United States Patent Application Publication US 2004/0214272 A1 - sequence listing, part 17

SEQ ID NO: 69174 - DNA, 329 bp, Zea mays
  Clone ID: MRT4577_163081C.1
ccccacctgttaaaccaaagcggggtttattccaattttaactgacaaaaccccattttaggcccttttgggggggccatttcctggccggggaattgggttaaatttcaaataaaatcaccccaatcccaaaaaatggggggaaatacataaccctgcaaaaaattttctttccgaaaaaaggggccctcaaatttccccagggtttaataagttttgctaaaaagggggcgcttctttttttttgagcaattcttaggcccccctttttttggaacaattcctggtttcagccagaatttggggggggttctaaaacacaacaattt

SEQ ID NO: 69175 - DNA, 307 bp, Zea mays
  Clone ID: MRT4577_163082C.1
tttgggtcgaaagttcgtccgcgcaaatgaaagatagatcagaagggaggagagagggcctcgccagcgaccttaggtccggccttaaagtgggtgcccagttcctcgctgggcatcgccaagcgtacaccgagaaggtaggactctccccgatctttttttgaagaggagctgtcaaaatgcgtcggcagcattgacagaaagcatgggcctcctacactaacgcaatgcgccctcccctacccctccaccaacgccgcaggttacgaaccacctgaacaacaacctggtagcctgaatcccaaat

SEQ ID NO: 69176 - DNA, 946 bp, Zea mays
  Clone ID: MRT4577_163083C.1
cattgggtacctcgaggccggccgggccctctcctccctgtcgtcattctcctgtttattgtaggcctgtagcgcagtcgcttgtcgcttgggctttcttccaaaggtggtgggcacagaaaagcctgacaccccccgggccggtacacaaactggtcgattcgggtcagctagagttcataaatggtgggtggtgtatgcatgatgaagctgttgtgcattacattgacatgattgatcagaccacacttggccaccgggtgatcaagaaacaattcaaaaagattccgagagctggctggcaaatcgatcctttcggtcattctgcagttcaagcttatttgcttggagcagagcttggtttcgattccgtgcattttgcaagaatcgattaccaagatagggcaacccggaaagcaaataagggcctagaagttatatggcgtggctcaagacctgttggttcatcatcacagatcttcacgaatgtatttccagtccattatagcgcaccagttggcttcagcttcgaagttttggctgaaaatgtcatacccgttcaggatgacatgtcgctgtttgactacaatgtccaagaacgtgtagatgattttgttgctgcagccatagcacaggcaaacgttacacgtacaaaccacataatgtggaccatggggggatgattttaactaccagtatgctgaatcctgggtctgaaatatggacaaacttatacagtatgtgaacaaggatggtcgagtgcatgcattatattcctccccgaccatccagacagatggtgtacatgcatcaatcgaatcttggccagtaaaacagatgatatttcccacacgccgattcaacaaatgcatactggtctgggtattttacaagccgtccaactttcaagcgagacagtcgagtgtacctcgtccgcgaccacgct

SEQ ID NO: 69177 - DNA, 120 bp, Zea mays
  Clone ID: MRT4577_163084C.1
gttcgttcgctcaaccctatccgtcctttctcacgacccactcgagcaccaagcccccggaaggtgaggagcgactgctcccggcgcgttttcttctaaggtcggccctggacagctaca

SEQ ID NO: 69178 - DNA, 1167 bp, Zea mays
  Clone ID: MRT4577_163085C.1
agaagagacacggaggagaggagaggagcgggctagccagtctcgatctcaggttctcaagaaagaccctgcagggagagcgatcaaaaaggctgccggcacggccgggtagcagctacaactacaagctggcctatagctagctagctagctatagctgctacagccgccgagctcgatcctcggactcggactgcaacgaggaaggagaggaaatggtgggctccggcgcggatgggggcggcggaggggatgacgcgcggagcaaagaggccgcggggatgatggcgctccacgaggccctccgcaacgtctgcctcgactcggactggacctactccgtcttctggaccatccgtcctcgcccgcgctgccgcggcggcaacgggtgcatggtcggcgacgacaacggcagcctgatgctgatgtgggaggacggcttctgccggccacgggtggcggagtgcctggcggacatgagcggcggcgaggacccggtgcggaaggccttcatcaagatgtccatccaactctacaactacggagaagggtgggtactatactgggtaggtgctgtgcaggtgcaggtgcaggccgtcgagttcggtcggagtcgtgtcgtgtgcaatttctttccgactttccaatctccactcccggcttagcttagcttagcttatggcactactagtattaggcggtaattatggtgtgatgtagacacgtacggcgcccattttttttcaagtcgtggctgctgctgctgctgctttctgcgaggatcaagcacgggcgctgctgtcacgtgagggaggggacacggctggagtggggcggtgcctcgtgaggcttaaacaatcccacccgcgtcagtgggctataacagccggatcagctcgtgattaacatattcacgattgtgctacgcacgctacatgcacagccaggtgctacacggcgtcgggggcagtgtctttttttttatttatcttagaggacgatgtgaaatgaaagagcgacatgtcgtcagagttgcgtgtcacacgttagctgtcagtcagtcagtcagtcgttctgtgtatttttgtgtgtgtctcggcctcttttgatctcgctttgctgctgtaccgagatttcggaggcatacaatacatacatgagtcatgg

SEQ ID NO: 69179 - DNA, 654 bp, Zea mays
  Clone ID: MRT4577_163086C.1
aggccgcaaacggagggagagaagaagagacacggttgagagggagggagggctagccagtctcgatctcaggttctcgagaaagaccctgcagggagagcgatcaaaaaaggctgccggcacggccgggtagcagctacaactacaaagctggcctatagctagctaactatagctgctgcagccgccgagctcgatcctcggactccgagatcgcgcccagggtagtagagactagagaggcggtttttacgacggccagcgtccgagagagagagagagagagaggtgacgcgagcgggcggaagcgagggagcggcagcgaggcaggggaaggagaggaaatggtgggctccggcgcgactgggggcggcggaggggatgacgcgcggagcaaagaggccgcggggatgttggcgctccacgaggccctccgcaacgtctgcctcgattcggactggacctactccgtcttctggaccatccgtcctcgcccgcgctgccgcggcggcaacgggtgcatggtcggcgacgacaacggcagcctgatgttgatgtgggaggacggcttctgccggccacgggtggcggagtgcctggcggacatgagcggcggcgaggacccggtgcggaaggccctcatccagatgtcca

SEQ ID NO: 69180 - DNA, 236 bp, Zea mays
  Clone ID: MRT4577_163087C.1
agaatggtatgagaatgcatattaccacagttcttacacaaaccgtacatttgtagagatttggagaatcaagcacaaaaggggttttaaaataaaacgggaaagattaaagacgggcacgttcatttttaaagacatggggaaaaaaaaaggcaactggagggcaaaggcgcgaccttatggtgggttacaccgataaaaatttcatgcgggttcaagcaccaccccatcatttt

SEQ ID NO: 69181 - DNA, 211 bp, Zea mays
  unsure (1)..(211): unsure at all n locations
  Clone ID: MRT4577_163088C.1
ggcaagggaaaagggncaaaagncncncncacnggagaccccnannggaangnggcagnngcnannngcngaaaggaacaggccncnncaggancannggngncagnnnnnacaggncagacacaanaaagccanancgagagacacannggcccagcngcnggaannngngaagacgaccganccacagnnanccaacnacgacgacgaa

SEQ ID NO: 69182 - DNA, 353 bp, Zea mays
  Clone ID: MRT4577_163089C.1
ttatttttactatattatgaacttataaattttttttattttaatactattctttttttttcatatttatattttttaaaaaaaaaaaattggcctaaatgaaaaagacagacctatttcacactactattatatggcccaactggatttggaaaaactgaactcacaaaataactaaaaaaaagttattatggatcttaaagagctatgattacgttatatatgagcgaaaataaacaaaaacatgctgaaaacaagcccatcggctattggtcttttttcaaaaaaataaagggaaaagtgaacttttactgaagcagggcggagaacaccatttactgtagaatagcttg

SEQ ID NO: 69183 - DNA, 339 bp, Zea mays
  Clone ID: MRT4577_16308C.1
acaaaacgtctgtacactcgtacgtcgatttgttagatatagtttgtatagatgactaggtgggggtaataaaggaaggtggatcatatgtgcttactgtagcgataaagatcagtacattgctacagcttctattggatgatgacattctggattcgcatactgcatactacgaagccggcggctagaatgtctaaactcatgtactatgagacgcagcagagaatgagatacttgttgtacaacttcaaggaccaccagaactgctgctcgatctacgcttggaaggagatcaaggactgcagctggtgcgactacagagttaagcacaaagggtgc

SEQ ID NO: 69184 - DNA, 147 bp, Zea mays
  Clone ID: MRT4577_163090C.1
cagacgcgtgcgcgcacgcgtgggcgcccttttcttgcacacggcaactatactctcggcggggttctttcacgacatgtcggagatgttcacacagatgcccacgcgcagccgatctccacatctgacaataccttacacgccgat

SEQ ID NO: 69185 - DNA, 487 bp, Zea mays
  Clone ID: MRT4577_163091C.1
caaaaacaaccaatccaaaaggtcgaaacttcactcaaactggctaacaataatacaggcggcccccccaaattaatatcctttccctgccccggacacacacgggaaaaagagggctcaattggtttgactgcaccacctccacagtaccaccgcataaataggttcaccaggtataccagccccccttacccaacggaaaaggcctaaaggcttgtttaaaaacgggccaccctactcactggagaaaaaacctcccacaccttaaaaattattaaccaccgggagcttccgcttaaaaataaagaccaactttttcatgacggcccctgtacctatcccaaaaaatattgtttggagagacaatggttcctacatcaaaccatggcaccctcccttaaccttttcaaagtaaatgattctggaaaaacaacaccctttctattttggaaatgttctagggcaatcccagggctataaatctctg

SEQ ID NO: 69186 - DNA, 916 bp, Zea mays
  Clone ID: MRT4577_163092C.1
cccccccaccaccactcttcaaggcacccaagcattcactactcctcattcaatacaagagcaatacacaacactccaagacacaaatcaaagccaccgatcgaatcaaagtccacaattcaactctagtttttaggacttgtgagaagatcgacttgttttcttttgttgttcttgttgcttggttgactttcttctttctctcattcttactctcaaagccttgtaagcaaagcaagagacaccaattgtgtggtggtccttgcggggtctaagtgacccgggaaatcaaggaaggaagctcactcggcctaagtgatcgtttaagagagggaaagggttgaaagagacccggtctttgtgaccacctcaacggggaataggtttgcaagaaccgaacctcggtaaaacaaatcatcgtgtcactctcgctatttgcttgtgatttgtttttcgccctctctttcagactcgattatatttctaacgctaaccccggcttgtagttgtgcttaaactttataaatttcagatttgcctattcaccccctcccccctctaggcgactttcaattggtatcagagctcggacacaatttcaatagaatcaaagcctctccaagtcccaaatacattccactcacctagtgacttgagagagagtttgttcgtgttctttgcgctcttgtttcatggatcgcttttttccttcctcattcttgttctcaagtgacttgtaatcaaggcaagagacaccaagtgtgtggtggtccttgcggggtctaaatgacccatttgattaaggagaaagctcactcggtctaggagaccgtttgagagagggaaagggttgaaagacacccggtccttgtgaccacctcaacggagactaggttctttagaaccgaacctcggt

SEQ ID NO: 69187 - DNA, 303 bp, Zea mays
  Clone ID: MRT4577_163093C.1
ggttttattcatcctctcccaactggtacttactgatgttgtttatgcaggagtcggatcatctcttacagaaatgggacttaccgagtatggttaataccaggagtcggatctggagttttacagtacgaggggggtcatcagcctttaagcagacgcgcctcaccccttggtagcggacgacttgagttgacgctcgggccaagtcggccgatttgcgaccgcgggctgccgctgccttaccccatgtccccttcgcccgaaacttcggtctgccccacctgtcctctagcacgctccccc

SEQ ID NO: 69188 - DNA, 207 bp, Zea mays
  Clone ID: MRT4577_163094C.1
tttgcgaggcacggccaccgcgggggcactttttaacccccttgcggtatccgtccctctcctgccttctcgggaactgcccgcccgacatgcgccccctgctttataatgttccaactgcaccttcactattgagtctctcatctgttcagccctattcatgtgctccgtccgcctacaggaagggtgcctgtgcgtgaaagaagg

SEQ ID NO: 69189 - DNA, 518 bp, Zea mays
  Clone ID: MRT4577_163095C.1
acagtagagatcgagatatatgggtggatgaaaaaggggcagcagaaagtgatgtgtctaccaatatatctactaatctaagtgcagataaactttatacaacggatccgtccattgaacgacaccaagaaatcccttcaaatgccattcataaataggacccggacgagaactagaaaaaactcatagctagattcgtgtcgttgaatcaactttggggatcggcttcactgcttgaagtgctgcaaaacagagatctcagatggtgagatatctagcactgaaactaccaaccaaccaagacatttggaactacactaggacaaaagaataagcagaagacaaaattgtttctatacatctttctggccacgagcatccttgaattgttccgataactcctccctcatttccttggctgaaaaggggagaacttcggcatcattagattagatgaatatattgacaaactgacaaaagcccccaaaactagaaatctgatacacttgtttagcatg

SEQ ID NO: 69190 - DNA, 482 bp, Zea mays
  Clone ID: MRT4577_163096C.1
cccacgcgtccgcccacgcgtccgcccacgcgtccggtacatccaaaggcgaggtggctgttttactgcaatagagttaaacctttaatgtaaagataaattgatgtaaaaattgagcagcttggacctaaattattgatctactgacttaaggatttattacaaaaggtcagaggtgaatttatgtgatgtgcttgtgcataccaatttatgttctctcaaaatttgttccttcagatctcccatatttttgtcaatttggaaatatagaagagataataatctaatgctcacaaacagaagttcatattatgcttctaagagttattatgttttaattttgtactcctaggttataatatgttttatcttgtgtttttttaccacttattgcttggaccatgtaactctctagcttaaggtcatgtttggaagcaacccagtttttaagaaatcagtttttagtttttttagccaggaga

SEQ ID NO: 69191 - DNA, 530 bp, Zea mays
  Clone ID: MRT4577_163097C.1
gtttgggttttttttttttttttttttttttttttttttttttttttttttttttttttttttttttttttttttttttttttttttttttttttttttttttttggcaccctttgtttttcccggaaatcccccccccccccctggggggggggggggttcccctatactaaccctttttacatctttccctaataatgaaaaaacctgttccctttggaaaaatcttatcccctcaaaattccacacaacataccaaccggaaaaaaaaaatgaaaaccctggggtcccaaaaaaagcccccaacccaaaaaaattgcgttaccccaactgccccttttccaaccaaaaaaccttttttcccacctgaaataataaatcccccaacccccaaaaaaaggcccttatccttttgacccccaagttgtttttttttttccccagtgaaaccgccaaaacctaattccccttcacccccttgccctcaaaaaacccaaaaacccttcaaaattgttttcccccaccacccc

SEQ ID NO: 69192 - DNA, 1905 bp, Zea mays
  Clone ID: MRT4577_163098C.1
ggagcaatctgaggagctccgaagctggctcttgctgggcttcattatttccaaacatatgattggttcatgttaatgactacaattacccttggatatattggatggatggtgaacctcattatacatgtgctacagtcttatacatcatatcctgtaattcttctcaagagggctcaattgtatcctaacaatacctccatgaaagtttacatttgtggatgcttctttatgggtttgtcatccattttgctacttctagagaaatcaccacttctttaccatgcttatgtattgtgcacaatattcctttggacaagaattgtacaaaaatttgattttttgaagtccgtatggagagaactagctaatatgcccttcaagtatatttttaatctcctgaccagttcagttgttgcactgcttgtattggagtttctggttatgagcttctttgataggaaaatttatacgtggtgcttcttggtccttgggatactcggttcaacatatgtagcattgtttattcaagctagtgctgcacttgcgatatacatatggcttgcttgctggttcctgtctgtatttactttgatgccagctgaaattccagaaaacaacaacttggtaatttttagtggagggctcataatacttattggattagcttcaagatggattaaatcaaatagttccagcttttggctatatctcactcgagcaaataaacgggatcctcaatcttttaaactctattttgttcaggttattttagtcgcaatatcttcgataatggtgtggctatctacctcacaccggtcccagaacagagaattgctctcactaccacagtttatcaattggtctgtagctggtgttgctatggtgctacctcttttctcaccacctagtgttctatcccgtcttacatctatattcttgggttttgctcctccatttctgctgctttccattggctatgaagcagttttctatagcgcttttgcaatggtactcattggatggatatttgtggaatctgccaacctgtattgctcagaagaaagtggttctgcacgtcgcagaagccttgcggataactcagtttttggctatgaagaaagacacctgcgactatctgatttaagaatccctttgttatttgtgatattatttaatgtcgccttctttggtactggtaattttgcaagtattgcaagctttgagatctcgtctgtgtacagattcattacagtttttagtccatttcttatggcaggacttcttatctttaagttgtttattccgtttatgcttgtcatatgtacgtttagtgcgatcaccaaggtcgtccgtatcccacggctgggctgttattttcttgtaatactgctttcagatgtaatgactattcatttctttttcctggtacggaataccggtagttggatggaaatcggcaacagcattagccatttcggaatagtgagcgcccaagtggtcttcgttttgctgctttttgccctcacgaatatatacactagagatattttggtctcgtctcggcaactaaccgcacggaaagttatgtaaatcgttcagtttatttagaaatccaaatacatccatccttttatttattcatttttgggtcgactttcattttgggatcaagtttgtagcttagcttttggctaaagttttgtagcttagcttttttgttttctgtgaatggaccttggtgtcaaatttttgtgctaatttcattcgcttacttacaaaaaaaaaaaaaaaaaaaaaaaaaaaaaaaaaaaaaaaaaaaaaaaaaaaaaaaaaaaaaaaaaaactcgagggggggggcctgaacagattataactatattagctttcctctcgggctatcat

SEQ ID NO: 69193 - DNA, 717 bp, Zea mays
  Clone ID: MRT4577_163099C.1
aattcggcacgagggttctcctctcctgtagaaagcgtttctacgcctggacctcgcaagaatcctgtactgtaccaagatgagaaagccttcaaagggatgcaatgagagggatgtgatttaccaccggaatgatcacacggatgacaatgggaagcatttcttcaagattttgattggtgatttccataaaagattggtcataccggttaaatttgctaaaaaaatcagaggaaaagtagaaagaaatattaagcttgaatcacttggtggttatacttttgatgttcaagttgcacagaatttgggcagaatcatgtttcaatctgggtggaagtcgtttgttagtgcccatgacttgaaaatgtttgacttgttggtattcaagtatgatgggatgtctcggatgaaggtcctgatatttgatcctagtggttgcgagaaagtaccgcctttttttgtcacgaaaaatgctatgagtggtggacgaaagagagaagaaccgcttgacatttcaagcagctatgctgatcttcccatgaaaacaccagagactaaaaagaaagcaagaaagcaaagagacaggagtaggatcaatattagtccatgtagatccatatccaactcatcaggaggaatgacaagttcagaagacgatgaagcacattctgttccaagttgcatactcccacgaggcaccatccttgatagtatgca

SEQ ID NO: 69194 - DNA, 216 bp, Zea mays
  Clone ID: MRT4577_16309C.1
ggggtacctgcccttggttttttataatttgggacaacaattacaacctccaactaatatttcgaaactaacattatccaattttttttttttttttgaaactaaaattttttcccttcgatggaaccaagggcaccttaacaataaattggatgatgttagtttcgagatattacttgcacttgattttttataatttgaaacccgacccctggg

SEQ ID NO: 69195 - DNA, 137 bp, Zea mays
  Clone ID: MRT4577_1630C.1
aaaaacaaggatgcacctctaagctcgaattctcaaaccaccaactggtgctccaagagactaaccttgagggcttacgaccacagccacctaaacccacactaaccctgccgagcatcttcaaccggccaagcaca

SEQ ID NO: 69196 - DNA, 429 bp, Zea mays
  unsure (1)..(429): unsure at all n locations
  Clone ID: MRT4577_163100C.1
gcnncggccgggccgannannaaaaaaaaaaaaaaaaaaaaaaaaaaaaaaaaaaaaaaaaaaaaaaaaaaaaaaaaaaaggccaaaaagccctaaaaagccccgtgggcctcggggcccccccagaacctagaggaatgccataatccaggataaaaaaaaaataaaagtgcccctttgcccggggcccccctataaaaaaatgggaccccccggcctctgggagttttattgattaacttttttacaccggtacaacctgtgggggggggcacggtttcgcattttcccaaattttgccgttttttaccgctttggccattgggccagttttttcaaaagggggggtggggaaaaaccgtggggacccccaagttttttgcatgggggaagggccctgtttgggcgagggggttgaaaaaaataagg

SEQ ID NO: 69197 - DNA, 1142 bp, Zea mays
  Clone ID: MRT4577_163101C.1
tgggtacctcgaggccggccggggttatttgcgatattatttaatgtcgccttctttggtactggtaattttgcaagtattgcaagctttgagatctcgtctgtgtacagattcattacagtttttagtccatttcttatggcaggacttcttatctttaagttgtttattccgtttatgcttgtcatgtaagttttttttaaccttgttaactttatgctacatgatgtcatggagttaaagttaaatgaagatgtgctgaattcgatttcagtgtacagttatttttatttttcaaaatatgaatatacgatactttaatgaaagttcttgtcacaaattaggtcaccatttgctatagaaagataaaaacaggcaacgatccatttataatttaatgttcgttttgatatctatatagactttatatactatctgcatagttatctgttgagcaactttaagattattttgggagttcctgcacagggtaacaagctataacaaataaaatgtgaagaagacagttttctccaaatgttaggtctttgacatttttctataacacttcagcttaaatatgtacttttttcttttaatttgcgctgaacttgatgctaccttggtgacaagagcagatgtacgtttagtgcgatcaccaaggtcgtccgtatcccacggctgggctgttattttcttgtaatactgctttcagatgtaatgactattcatttctttttcctggtacggaataccggtagttggatggaaatcggcaacagcattagccatttcggaatagtgagcgcccaagtggtcttcgttttgctgctttttgccctcacgaatatatacactagagatattttggtctcgtctcggcaactaaccgcacggaaagttatgtaaatcgttcagtttatttagaaatccaaatacatccatccttttatttattcatttttgggtcgactttcattttgggatcaagtttgtagcttagcttttggctaaagttttgtagcttagcttttttgttttctgtgaatggaccttggtgtcaaatttttgtgctaatttcattcgcttacttacagcctgaacagattataactatattagctttcctctcgggctatcat

SEQ ID NO: 69198 - DNA, 423 bp, Zea mays
  Clone ID: MRT4577_163102C.1
taaggacagccctgtagcacaaagggggtggaggccatgccctcagaggacccatcctatgtatcaataactgtggcttcttccgcagcgctatgaccatcaacatgtgctacaagtgccacatggatatgataacgaaacagaaacaggccaagctggctgccgttctctataacactcataagctaacggcagagacacactgatagatcccattagtgctggcagcaacaccgacactgctgtaccccaacatgaatgacatacaatgaacgtgcgtcacacccatgatggactcagaccctcgaggtgggggcggaaatctccaaagggggaaaggatagccgagaccgtgcagagcctgcaagaagcatattggacttacaggatgtaactatcagagagggaacttgtactgtgcac

SEQ ID NO: 69199 - DNA, 164 bp, Zea mays
  Clone ID: MRT4577_163103C.1
aggaccggccggaacccgggccgaccacgctcctgagcaaaccaaagacgcggaggggggggaaagggaaaggcccagacccacaagaagagaggggacaggcacaaggaacccgggagccgagagaacagcagcaaaccgggaagagaggaccagcacaggaa

SEQ ID NO: 69200 - DNA, 1684 bp, Zea mays
  Clone ID: MRT4577_163104C.1
agagggtcatcgagtcccttgggctgcagccggtccgggactccctggtggggacggtggagcagcgcggcatctccggcgggcagcggaagagggtcaacgtcggcctggagatggtgatggagccgtcggtgctgatcctggacgagccgacgtctggactggacagcgcatcctcgctgctcctgctccgcgccctccgccgcgaggctctcgagggcgtcaacatctccatggtggtccaccagcccagctacaccctgtacaggatgttcgacgacctgatcctactggccaaggggggcatgacggtgtaccacgggccggtgaagaaggtggaggagtacttcacagggctgggcatcgtggtgccggagcgcgtgaacccgccggactactacatcgacatcctggagggcatcgtgaagccgagcctgagctcgggaggcagcgtcaaggacctgcccatcaggtggatggtgcacaacggctacgacgtgccgcgggacatgctgcagagctcgtcggaatcggagtccacgtccaggggcgacgcgggacacgctccggacgagccgtcgtccgtggtctcgctgctctggggcaacctcagggacatcctcgggcagaagaaggacgagtacgactacaacaagacgtcggaggacctgtccaagcgcaagactccaggcatactcaggcagtacagatacttcctaggaaggtgcggcaagcagaggctccgtgacgccaggatacagggagtggactacctgatcctctgtctcgccggcatatgcctgggaacgctggccaaagtgagcgacgagacgttcggggcgctggggtacacctacaccgtcatcgctgtctctctgctgtgcaagatcggagccctgcgttccttcacgctggacaagataaactactggagggagcgagcctccgggatgagctcgctggcctacttcctgtccaaggacagcatcgaccacttcaacacggtggtgaagcccatcgtctacctctccatgttctacttcttcaacaacccgcggtcctccatctgggagaactacatcgtcctcctcgcgctcgtctactgcgtcaccggcatcggatacaccttcgcagtcttcttccagccaggttccgcgcagctgtggtcggccttgcttccggtggttttgactctgatagccactcagcagaaggacactatccttgccgacctgtgctacaccaagtgggctctggaagccttcgtcattgccaacgctcagaactattccggcgtgtggctcataacccggtgtggctcgctggtcaggagcggctacgacatcgagcacgaggctctctgtatagcggtcctcatcgccaacggggtactcttccgctgtgtagccttcttctgcatggtcaccttccagaagaactgagagagggaggtcaaggaaaacacacccgtgaactttctatgccctcgtagcagctctgtttttgttaatttcagtgcaataggattgtagactagagcccctcttggtaaggtatgtcagtatgtgtagatgaggacagattcttcaatagcagggatgccctaaattacagaggcggtttcttgcctaacaccaatgtaaatttgatatgcagattcagtgtatgtatgggtacgatgact

SEQ ID NO: 69201 - DNA, 288 bp, Zea mays
  Clone ID: MRT4577_163105C.1
gaggagcaggggcaggggcagcacgaccaggaccagtttcagttttatcaggaggagcaggggaacgcgggggcgggggcggaggatccggaacagcaggacgaacaacaggagggggcggcggaggacgcggacatgagagaagcgggggaggaacgcgccgacggcgaagcgaaaaaaggtcagggggaaagtgaaggtggacgacccaaacccggaggaggaggcgaggcacctggaaggaatcgacgacaagaacagaaaacataaagaacagctggacccccc

SEQ ID NO: 69202 - DNA, 484 bp, Zea mays
  unsure (1)..(484): unsure at all n locations
  Clone ID: MRT4577_163106C.1
agcagtggtaacaacncagaatacttggttttttttttttttttttttttttttcgggcggggcggaacttaccccacaaggaatttcccttccttaagacccttattggtaccgccccccttcaccggggcttcgggcgccgggtttccttgcattaattcaccaactttggggggggttccgcactgggcaagggttaacccccatacatgggcttaccaatttggggaaacccgggtttttgggaaaaaagcccccgggccttggcactgggacccccccccgggactttggggtggttccactggttaagggggaattctggcgattttccttaccattgggggcggttcggccttccttttaaggggcccattcccccttttttggggcggttttccacttactggcccctctttttacacctccgttgcttgggaaacccctggcgtcccccacctaattcgcttcgcgggccccccc

SEQ ID NO: 69203 - DNA, 827 bp, Zea mays
  Clone ID: MRT4577_163107C.1
cggccgctcgagccgatgcatcgaaagcgggagagcaagcgcaagtaactagcaactcatctatccatccatctatagactacaccgttttcatattcatatcggaggtaagctagctagccaccgcggccatggccgcagcgaaactcgcccttgtcatcctagtcgccgccgcggtcgcctgcaccggcaacagccagagcccggtgcaactgtgtgactacgagtttgttgtgtcgacgttcaatgaaaattgggcgggcacggactcagatctcaccttcactgtgttcagcacggaggtcgtgggcggcgtcgccctgaaaactatacaaagtgccgctggttccaggttcgacgtgggcagtaagaccaagttcaccatccagggcgggccgtgcgtgaaaccatgcggcctccgcctagaggttcacaagacctggtggctggagatcgggagcgactggaagtgccgttccgtcgaccttttggtaaagaggaacggggcggtgcagtggcatttctatctcattttcaatcagtgggtgaaagacggctcccccgtcgaatacaagccggcgcagtgcccgatcctctagcacggcgacgccatgcatgatcaggacgcgacggccggccggggtcgcgagtgcgtgcgtgttgaggtacggtactcgtttgtggccgcgtgtgactgttttgtttagtttgcttttcttccggcagctcccatgcataaactgtatcttgtcatcagcagctcccatgcataagctgtgtcttgtcatggtgtgtccggtgtatgcgcggctctctagctatagcag

SEQ ID NO: 69204 - DNA, 609 bp, Zea mays
  Clone ID: MRT4577_163108C.1
atctctgatccggacaatctctcgaccctagccgcctcctgcaagatgctcagctcgcgaatctgcgccatggccgagtgagacggagaccttcccatttcagggtgagatcctaaccatagtggtctcactcgtcatgaacaccttctactcgaacgaggagagcttcctccgctagtttatctccaactcttccgatgcgctggacaagatgatgctccacagtttcaatgacaagagccatctcgatgggcaggccgacgttttcatccaccttgacacacagaaggataaggacaaggtctacatcaacgacaggggagggggaatgacccaaggcgaacctgaccaccaactcatgtacatggcccggcacgggtacaacgacgtcctggaagaccctgctgccggggctgacgtgtccatgattgggccgatcagggacaggttctactcttcctaacttggcgccgatagatgtgtcgcgacctccaagcccgacgatgaagaatggttcgtgaggtaggccccagcgagctggtcgctcactggtactcgtgacacgaaaagggagcagattggcatgggcactaatatcactctgtttct

SEQ ID NO: 69205 - DNA, 1038 bp, Zea mays
  Clone ID: MRT4577_163109C.1
ccggccggggaaatccgaatgaggatgggtatgagatgagttttgtacccatgatgggtatggagatgggtatggagatgaatcaaacatgatatagatggagatgagatgctataacccggtggagaattcccattgacatctctaaccaccgccggccgggcttacccaccaccgacaaggaacggaaccctagaacccgcgacgccgagcggagctgcagccaccttggtcaccggcggcgatggcgagttccacctcttacctaaaataagaaagaaaactagaacctaaaaaccagcgacgccgagcggatctacagccaccttggtcaccggcggcgatggcgagttccaagtccggcatccctatcaaggcagaacaagattcggatggctcggcacaaagcacagctgatatgacggcttttgtgcaaaaccttcttatgcagatgcaaaccaggttccaagctatgtcggagaacatcatttcaaagatagatgaaatgggtgcgagaattgatgaattggaacagagcctcaatgacctcaaggctgagataggcggtgaaggcatgtcgacgccatctaagatgaaggaagagtcaagaccttcagacagctccgcatgagtgcagcagaagcagcgtgactcgtttcagaggccgttgctgtgtcttggcgttcattactaacaaatactcccccgttcttttttatttgtcgcgttttagttcaaaaatgaactagcgagcgacaaatatttgagaacggaggttagtacctgtttaaggtctcatttgagcagagattgtaacccctgctacttgtgttttgctgaatggtttgccataaactgtacgtcttcgttctgtgtagacctacccgtggttatgcgctgagcatgtagtgacagctgctagagtgctagcaccccaactactaagaattcaggattcgcaagcataatttactttgcttctgtgttagttttatcacttaaaaaaaaaaaaaaaaaaacgcgagactagtctcgtgc

SEQ ID NO: 69206 - DNA, 719 bp, Zea mays
  unsure (1)..(719): unsure at all n locations
  Clone ID: MRT4577_16310C.1
aattcggcacgaggggaaactgcatgtagcattaagtgaatttcagcctgctaggtgcctcgatgatttattttggtaggatcatgagtgtgaagattgatgggggcaaatgcgagcaaaagtgtagtactcaaaatatttcaaagatggaatagacaatgggaaaggccaccgagtttacttccagtggcggacctaggatttgaccatagggtatgcgatacaaaaaaaaaattgatatatataattcggtaaaaccatatatagtacgacgatatatccagatgacgaacctccgagagaccgtgattatatctgataatctaatatatataccacagatgagacatgagaagcgatcctccgatttagagcagggcggcggcaaactgcggcacaacactatggccaggcctccgttctctccgatcaagattagattagaaaaatgaaacatccaggccactaggaaattgaaacggcggtggactgcagcctacagggcactagggccagggcactacgagtcagaaaaatgaaacatccagacgttgccgctcgggccgcatcttaatggcctaatggcctcttgtcacgacgccatactgttcagtgcactatatttttttctttttttttctttntagttnttatatattcggtatacatacactcgctggttntacaggggtatgccgtgcatgcccggcataccttgt

SEQ ID NO: 69207 - DNA, 442 bp, Zea mays
  unsure (1)..(442): unsure at all n locations
  Clone ID: MRT4577_163110C.1
gggggccaaaaggaaaaaagggcccataaaaaaaactgccataattttaggcttagccgggaaggacccgccccaaaaaaatagggggacccccctttttgaaattttccaatccaattcctttttttttgaaattctccaacccaattcctttttttaaaccccccccccccccaaggcccccaaaatggggcctttggccggtggtttttttttaaaactccctgaaactagaaggggtctcccggcccaaggatccccggttgaccccttggttgcattttcaaaaaccaaaacgggccccccgcttggctggcaaaagcccctctttttggcccccttagctccctttaaattttttaaagggaccccccctggggttggcccaccttccccgttttttccaaaactgcaggggcacatccttgngcaaatcccaaaa

SEQ ID NO: 69208 - DNA, 240 bp, Zea mays
  Clone ID: MRT4577_163111C.1
aaaaagcagccgcaatgccgagaattaccatggccctctcctccacggtcttcgccggcaaggccgtgaacgtgccgtcttcatccgccttctgaaaggtccatgtgacgatgttatagacggactgtgaatgtcatgtcagagaaagagtccggtagaccgttgattaccaccccgtatgtgtgctgtacctgaattccctgtctaataagtctgcgaaatacctgatgggcgtgttcc

SEQ ID NO: 69209 - DNA, 793 bp, Zea mays
  Clone ID: MRT4577_163112C.1
gccggccgggtcgcggacctcttacctaaaataagaaggaaaactagaacctaaaaaccagcgacgccgagcggatctacagccaccttggtcaccggcggcgatggcgagttccaagtccggcatccctatcaaggcagaacaagattcggatggctcggcacaaagcacagctgatatgacggcttttgtgcaaaaccttcttatgcagatgcaaaccaggttccaagctatgtcggagaacatcatttcaaagatagatgaaatgggtgcgagaattgatgaattggaacagagcctcaatgacctcaaggctgagataggcggtgaaggcatgtcgacgccatctaagatgaaggaagagtcaagaccttcggacagctccgcatgagtgcagcagaagcagcatgactcgtttcagaggccgttgctgtgtcttgcgtttattactaacaaatactcctccgttcttttttatttgttgcgttttagttcaaaaatgaactagcgagcgacaaatatttgagaacggagattagtacctgtttaaggtctcatttgagcagagattgtaacctgtgctacttgtgttttgctgaatggtttgccataaactatatccgtcttcgttctgtgtagacctacccgtggttatggttatgcgctgagcatgtagtgacagctgctagagtgctaggaccccaactactaagaattcaggattcgcaagcataatttactttgcttctaaaaaaaaataatcactaaaaaaaatagtgccccttatattttt

SEQ ID NO: 69210 - DNA, 809 bp, Zea mays
  Clone ID: MRT4577_163113C.1
gcccgacttcacccgactagggttcttggaacgttcggataccatgcgcctgagtatgcaatgaccgggcaactcagctccaagagcgatgtatatagttttggagtcgttcttctcgagctattgaccggaaggaaacctgtggaccatacattaccaaggggacagcagagtcttgtgacttgggctaccccaagacttagcgaagacaaggttagacaatgcgttgactcgaggcttggaggggactaccctcctaaagctgttgcgaagtttgcagctgttgccgcgctgtgtgttcagtacgaagcggacttccggccaaacatgagcattgttgtcaaggcgctacagcccctgctgaatgcgcatgcgcgggcgaccaacccttgagaaaaatgctagctcaaaagcttcgcattgctcctctccgccctcttgtatgatagataagtaagatacgagtcgccgatgtcgttcttgcggacacatggctggcagcgtgtgacatttgtgattatttgtcccctgaattgtaaacaagattcttgtatccccacaacacttgattctttctatcggttgcaagatgacctgccgttttcttcttaagaagtcaccttagcaaaactcacaaactttattactccctctgttcaattataggatgctttgattttgtctagtcgtatagtttttgttatataaatatcttacaatttggaatggtattgactattaagggcttgtttggatccctcgagctaaaacaaagtgactaaattttacgctttgtttggttcccttgt

SEQ ID NO: 69211 - DNA, 1400 bp, Zea mays
  Clone ID: MRT4577_163114C.1
actcctatgggcgattgggaccctcgaggccggccggggacatctctaaccacacctcttacctaaaataaaaaagaaaactagaacccagacgggagcgacgccgagcggatctacagccaccttggtcaccggcggcgatggcgagttccaagtccggcatccctatcaaggcagaacaagattcggatggctcggcacaaagcacagctgatatgacggcttttgtgcaaaaccttcttatgcagatggtaagttcctagctttatttggcgacagtcttgtctcttgtgcatgccctcacttcgattattattttttgaatctgagtaccttgcagcaaaccaggttccaagctatgtcggagaacatcatttcaaagaatatcctcaaatcatttacttttttatgtattcaagatttttagcatgcaaagtaattggcattccaactattttattttagcttctagaaatattgaaattattagcagtgtcactgcagcttttatcatagtatgccaatttgttattgtgtgaatgataatagtgccaaacttctaattaaaagttcagaggtttgggaattggaaaaggatgattgattagagaagtttccactctgtgtaagtactccctctgtcccaaaaagaatgtaactatgggtttatcccaaaaagaatgcaactatatgttacgtgcagttaaagtgatttatgtttgaccaagtttctagtaatagtatttacatttacgtctccaaatcaatgtttaaagtgatttatgtttaatgtttgtaagggtctggaaagtaatgttctgttacgcataacctggctgttgctatttcaccaccatcctgaatttcttggtttccttggaaagtatcctaagcatgatggctgaaatatggtacttctctgttgttcggcaaataggcagaatcaggaaaaaaatacagaggtccaatttgcttctactagggaccaaaaaaaccatcttcattaacacttatcaccatttacattgattgtctagcttcaaaagacccttttttgttcatatttctctggggtactgtctgcatatctgtgtcacctctgttgtaaatacaaatctttaacaaacgctcactagatgaaatgggtgcgagaattgatgaattggaacagagcctcaatgacctcaaggctgagataggcggtgaaggcatgtcgacgccatctaagatgaaggaagagtcaagaccttcagacagctccgcatgagtgcagcagaagcagcatgactcgtttcagagccgttgctgtgtcttgggcgttcatcactaacaatacgtacctgttttaaggtctcatttgagcaagagattgtaacccgtgctacttgtgttttgctgaa

SEQ ID NO: 69212 - DNA, 689 bp, Zea mays
  Clone ID: MRT4577_163115C.1
ccccctcctcgagtttttttttttttttttttttttttttttttttttttttttttttttttttttttttatacctcttttatataacttaactattttaactttcaaatttacatatttatacccgatttcaaattatgacggatcaacatgtttttccaactttcgtttggggggggggggggggcaacatgtactgatgatgtacgggctcgttgaaccgaccaaacgaaacgtacgtattttacaggtcaaagctggggttgttaaaatggaaaaccgcccccttcttgtttttggccgcctccacccccccgggggggaggttccgcgccctgcattcccttgccaagcttgtttgcaccccctggggtccgaacaccaacacgcccacgtccgccgggtccccggggcgctccgaaaacgccggaaactccgttttaaaagttcggccggaagccgtacggggtcttccgaagggcggggaggtttaccctgggagcagctgttttcttcaccaccacccgccgaaaccaaggggctttgtttgttcggcgcccggggactgaaaggccccccaattgtcgtcctccaacctttgtttttccgacagatgccacaggaggaccacaaccccgccgggtaaagggaccccggcaaccatgcacagaatgaacaggaggcccagg

SEQ ID NO: 69213 - DNA, 355 bp, Zea mays
  unsure (1)..(355): unsure at all n locations
  Clone ID: MRT4577_163116C.1
acctttnnnnnnnnaaaaannnnnnnnnggngngggtgttgagggcaagcgcccttatttcccaaaaagagaggtctacttacgccaattggaagcactatacatacacaggggtacaagtccatatatgctgaacgggaccaagtctcgaaaaccatgaaaataaactatacggcaaaaaactggggccttgaaaacctctgggcatacttatggggcggcgagcacgacgacgacgaggacaggcccgaaaacacactgccctatgccttggccttgctaaacgccttaaacacgtcctttttaagcttgcaaaaacgcatcctttaaaccttctgctcaacggctgggcccc

SEQ ID NO: 69214 - DNA, 683 bp, Zea mays
  unsure (1)..(683): unsure at all n locations
  Clone ID: MRT4577_163117C.1
ccctacttaagggaacaatgctggtgcgcgggggggctttttgttctgttttctactggggaagcaacatggtattctcagctgactctttataggagacaagacggggaatgggttccctagggactcaccttgctgaccagaaacgtgatgcctagaactcggaggagagacagagggtcacgcaggcagggcgcacataatgggctaggcgggcatgagtctattctagtgaatggcacacaggggtccagccgatggtcaggtccatctttattgcacatgatcaaacaggcgaaacccgcgcgcgcagatgtgtcttgtgcggtataacatgcatgcaagaacatttttcctacccttatccagcatatttccagttcattcaccttcccaggatgtgtgttcagggtaatccgggcttaacatggcttggtcttcaaggtagtatttcattgttcccaggacatcaatgcgccaccagcgnagaccaaagcttgcaccctttaagtcacacgagggaacctgttttagcttgttgggttcaacccgaaagcttttgtttgccttcttttatccaaaaggctagcccacaccccatcccgaagcccttggtaaaggcgggggcctttctgccattcattctttctcttaccaaggtggctgtcaaaacggaacccaaa

SEQ ID NO: 69215 - DNA, 715 bp, Zea mays
  Clone ID: MRT4577_163118C.1
ttgggtacctcgaggccggccgggagatcaaatgacaccacactcttgaggtagaaaaagatcattttccccaaatactacccttgtgatttcgattggtgaatccccgccctctgtcttcgacttgtatgtcctgtgtcgtgccacaccacctcgatccagatggaaatgaacgcctacgactcgcacaaaactgatgaaaacttccgatacctgtgtgctccaaagaacggcgtgggcaagccctagaagccgctccactactgtatctctaccttccaccgtataatccctcatctcatgagacatgtgggtgaattctgccatgtcatgtgtgccggcatataatgcatctaccgtcataattactgcaatgagaagatcatacatatgcacaccgtgcccctcagagatctccatgaaacaacgcccctcccaactccaacttttcttcattcttcatctgcaccgttgagaccttctggtactatggcaagtacgtggttcttcgtgtcaaattgttatgcgcatgcaagtccacacggccttcgagaaggtgggatcccgcgaagagcctccctccaatgatgagaaggtcaattactgtgaactgctctacatttcttgtctgttctgctgccctcactcctgtatcgtcaactgcatctgtgaacctcccttttcatttccttcaatctgaataagaatatggcga

SEQ ID NO: 69216 - DNA, 801 bp, Zea mays
  unsure (1)..(801): unsure at all n locations
  Clone ID: MRT4577_163119C.1
gcatgcattgtgcaatggcactgcaggtacggacatcagactgtagatgagtatatacgcagaagccactcttagtatcaggcactctcgtgcgccaagtgcagacacatatggcctttcctgacctaacagaaaactatggggcatcacatgagatcactataatagcaggcccctatgagcactgcacattcattcgctcacaatattaaacactgcgctgacatgggccagatctgagttcgaggtgtgtacttgagaagactcccactgcggtgaacgctccttgtgacgaaccctggaggatatgcaaccggaacatgaactgctgcagatgcacagcgctatggaccaaattgcgcgagaaatagaatgccttgtgacagacaagtgagagacattccaagaatggattacctgagcccggttgtaggctgaggattatagctccaaccggggaaagcagctgacattcacgttttactgaagacgcaatgactagctctggcgctgctttctggtctgctaataagcggttcccgagagcactggagtcatcatcttctgactcgagacaccttaacttcttggtgggtgcttgtatattaacggctgagacatatggaatacccatacctggctgggcgaaaaacccaaactaactagctgaagctgtggacaaggacattgatgcctgatctccatgccaaagagggcgttaagatagagacgnatgaggaggctactagcctatcctctgcgtcatgttgatgctgctgncatcattgaagagcttattgc

SEQ ID NO: 69217 - DNA, 613 bp, Zea mays
  Clone ID: MRT4577_16311C.1
ggacgaaaaaccaaatgattttttaaagttgaggcaggggggggcatttttttccagcccttagggggactttttttgctaaacaaacattaggggggggccaccagttaaaacttgccccattaaaaggaaaaaccaaaactgggggaaggcccaaccaactcaaaaccccatttttaaatactactacggggccctacgggctcatccaatgcattttaaaaaggggaaaaaaaggctttaaccccccttccaaggaaatctatggaaacatttgccttgttctttactacttgggacaaccagttagttgccaaggcataaacagttgtcggatttaaacaaaaaggcggactggtacccgggtgcctttttaacaaaaaaaataaatgcggaccccctttccgtcaaattgggaaggccgttttcctccggcctcaagttcagggcccccgggttcatgccctggacccccccccttgggtacacaaaaattttgggccccatgctgaaaaacttattccaggggtcgcccccaaccagaataatgtccccttcgtagtcggggaacacaaccatccactccttgttaaagcctttcaactccccgttg

SEQ ID NO: 69218 - DNA, 691 bp, Zea mays
  unsure (1)..(691): unsure at all n locations
  Clone ID: MRT4577_163120C.1
cattgggaccctcgaggccggccgggagacagtactactactgttggacatctcgaaattccaacagcggcacgtacaccaccatggccggcgggaagaggagtaagctgctgcagggtgctcctccgccgccgccgccgccgcaatggtctgacgtccgtggcctgctccacatgcggttgacggacgccgccgcggagctcaacgtctccatcacctacctcaggcgcctctgccgccagaacggcttcgctcagtggccaggaaagaagatccggtacatgaacagtacagggaagaaggtgatgctggaggcagatgatgcgctgctggacgcctcgccgtctgctggtctcgctggtacttccgggctccggcaagccatgagcgcggaaacccggaacgaggaagaggacgacgaaccagttgcgaatcaggaactcaccactttaaacttgatagacaaggttggatcgtcctcgtcccccagccgcagcgacggccgcagctagtttgccagtgctagcttgctgtcatctgtgtgatgcaaaatgcaatacatgtagctgatcacaggcttcatctatatcggtcgactatgtattattactgtgatcccagttcgagcgagaacatctantatattgaatggtgctttgttgtcaataaaaaaaaaaaaaaaaaagcggcc

SEQ ID NO: 69219 - DNA, 388 bp, Zea mays
  Clone ID: MRT4577_163121C.1
cgttgctgtcgccgttgctgtcgccgttgctgtcggaagaattggtctcatatcactctaatagtctagtcaaccctcccaaaccaactccgcccgactatcttcccggcgacgtttattcccctatgaactaggaatcataacatccggtgtcatgtgtctgggatcttttcccatgacttctgttgcggacgatttccacaacttgcgtgaggggctcgctcaggcccgatctgctatcatccagctccgtgatctactcgcgacaaaggtggagtctgatcgccgattagcgacggcaacgcgactgcaggcgactgcacgtggcttcctggcactggcatgacgtccaatgtggcaagttgcggcaacggcaccgacagcaacg

SEQ ID NO: 69220 - DNA, 130 bp, Zea mays
  Clone ID: MRT4577_163122C.1
cctctacacacgtcttctagtcctataggacttctcgagcgatttctctagtgggattcttccagcgtgggggggcatgttaaatatctagctggtacccgattaggcgactctcctcttttcttcttca

SEQ ID NO: 69221 - DNA, 109 bp, Zea mays
  Clone ID: MRT4577_163123C.1
tttctttttctagatcccatgcttctgagtggggcattctaccacttgagtaaattctacattcttctataaaatatatcctcggatcaatagaatcacctcaatatta

SEQ ID NO: 69222 - DNA, 186 bp, Zea mays
  Clone ID: MRT4577_163124C.1
tgcgggcgctgctcctttctcactcggaggtcgagttcctctggtggatggactctgactccatggttcaccaacatggcgttcaacctcccggggaacccctccggcccttacaacctgataatgcacggttggaccaagatggtttacaacaccaaaaattgaatgggcttaaaaaccgcaagt

SEQ ID NO: 69223 - DNA, 373 bp, Zea mays
  Clone ID: MRT4577_163125C.1
aaaggcaacactccatatataataagataaggggttttttacttaacataacaatgctgcaaggaatcttggggtacaccaaagtagggccaatttttttttaacatcaccgctcaccaaaattttaaaaaaagcgttataacaacacttgttagcttacaaaaaaactgacacattgataaaacaaaaggaaaatagtttttaaaccctaaccttccaacccaaaaaccggccaatcccgaccctaaaaaaccaaacttggtgcggccccagtgcctgcccttggcgttgaacctgatggtatttgaagtgcccatgcggatccaaaaggggatgggggggttttggggcatttttttcgccagcttttttt

SEQ ID NO: 69224 - DNA, 473 bp, Zea mays
  Clone ID: MRT4577_163126C.1
ggggaacaaatttccttcaaaccattaacaaaactcgccgagggttttccctgggccagcacatcgggcaaaacaagggtttatttgcaaaaaaagccctgacaatggcgggggacctgttctactgggggaaaaaacaaaagggggaagcccaaaaattattgcaacacagggtacaccccatttgaaacatttgactttttgcgttcccaaaaaaaaacgaactccttttaaacaagccgctccaattcccttgaactcccgcacccccactttttaaccccctcatactttgcccccggggcctgggccccgcccccctgggggccaaatcctgactgggagcccccaaagccaccaccaaaaaggggctggccaatttttgaaacaggctttttggcagcccaaagcctggccttgattttttcaatgtcatccgaggcccattcctgggggggggcaagcatggctgc

SEQ ID NO: 69225 - DNA, 156 bp, Zea mays
  Clone ID: MRT4577_163127C.1
ggacgcgtgcaattacgtgatgggttgcaaactctacaaactggtgcacgtatgccgggccacgctcattaatcgtctctgatactatgctattggcagctccagctcggttcatgaccgatcaatgacaggattggcagcggctcacagctggct

SEQ ID NO: 69226 - DNA, 526 bp, Zea mays
  Clone ID: MRT4577_163128C.1
ccttttaattttttcttcttcacatacgactattcggcatcaggcacaaaagagttacaggtctaccacgggactcgtccttcacctaaacaaactgctttccggatgccagagctgcgcctccaaggcggagacgccattgtccactcctgagggagtgaggggcatggatcagccggagccgacgatgatgttgttgatggggatgaagatgagcttgacaaagaagccgacgaatcccatgacgatgaagccgatcgcagtgcgcgcggcgaccttggtgaactccttgcggtcgggcttgtggcagcgcttgacgaggcgtatgctgtccttggcgaactcgcggagcgggtcgaccaccgagtcaacagcgtccatagcggcgcggggagggagagaagatctcgagggggaggggaggcgctcttcgcttgcttgtagacgacgacgcggtggtgacttttgcgcgtgctttgcctttcacgaggcggatgagtgctgaatttttgcaggcccggccggc

SEQ ID NO: 69227 - DNA, 331 bp, Zea mays
  Clone ID: MRT4577_163129C.1
aacaaaattggaacaaacttacccaatttgggatcaggggagcaccaacccttattgggaaggtcggggggtaaaataaacccaaaaattatccccgttttgggtctttgaacaagggggggcttttaaaaagggtggaaattgaaaaccaacccttgtttttttgttttttcctcccccattttgtgtgaacgttccccatttgccctgttagaaggcccaatttattaaatataggttttcagcccctttttgggacttttggcatgcagcaggaagtttttgcccttttttgtcaccaaaaaatcatccccttaagggtgtccccctg

SEQ ID NO: 69228 - DNA, 742 bp, Zea mays
  Clone ID: MRT4577_16312C.1
atactttaccccgtggagaagcccagtcctctctgccctcttctctttccccccgggcgacggcggcggggtgctatccggcgagatgtccaccaacggcggcgactgcgccgggttcaggctctccggagcactcgtcctcctccactccggcgaccaaatcacccggatcccgcgtcatcttccactccagcggcgactcaactcaagtttgcagaacaccgggtctgcccagggcaaggccctcgtccacgaatgtggccgggaaaaatcattttcttcatttttttggtcggtgaggctggatcacacgtcaattacttgtgcttttctcctagctgttgatcatctgttccagatttgcactttttttggtgatttttattttgttccatctatccttttgagacgggtgatctagctgtatggctcgatcgagatgcatatcacttctgctgttaaatccaaaatagactgctctcctttgttttcttgtaatccccttccttctattccttctgtacatatgcgattttcttttgtttgtttgtaatccccttcgtctggactggatagatctctcgtcatcctgttgctgcgcaggtccaaatttgccgtgatgtttttatagaaatatatatgttgttttttattcatacccatgcttatgtgccagattgacttaatttctgtgatgtcttgaggattcctctaacttggataattgatgcttaatcctgct

SEQ ID NO: 69229 - DNA, 745 bp, Zea mays
  Clone ID: MRT4577_163130C.1
ctttcttccctccctcctgtcgcgtcgatccgttgaggcaggcagcaggcggactggactaactaggtaataggggaacggagttggtggagacggcaatgattggctgaacgggttgcgattgctagggaggaggaaacgtacggatcggagaggaggaggatgcggcggcctcactcggtgccgttttttttttttttttcgagaaagacccaaccttttaatttttttcttcttcacatacgactattcggcatcaggcacaaaagagttacaggtctaccacgggactcgtccttcacctaaacaaactgctttccggatgccagagctgcgcctccaaggcggagacgccattgtccactcctgaggggcatggatcagccggagccgacgatgatgttgttgatggggatgaagatgagcttgacaaagaagccgacgaatcccatgacgatgaagccgatcgcagtgcgcgcggcgaccttggtgaactccttgcggtcgggcttgtggcagcgcttgacgaggcggatgctgtccttggcgaactcgcggagcgggtcgaccaccgagtcaacagcgtccatagcggcgcggggagggagagaagatctcgagggggaggggaggcgctcttcgcttgcttggagacgacgacgcggtggtggcttttgcgcgtgctctgcctttcacgaggcggatgagtgctgaaatttttcccggccgcgcctctgagatgtac

SEQ ID NO: 69230 - DNA, 427 bp, Zea mays
  Clone ID: MRT4577_163131C.1
gttaacgcacagggcggaggccgacaatcattacgtgcgtcggggtgcacttctcctcagagaaacaatggaccgggagggccctgactacggctgacctacgaacacaaactaatacgggttacgcacgacgataaagggagctcactgaagatggcgacctcactactgaggcatatgcaagcggtcacctagccaaatccttcatattactgaggcaccatatgactactgactgggaccgcgtatccctagcaagctaaggattgtggaccactgatcatcatgctcatcgctgtcgcctacgtaaaagctctataccggacacaattccacaaaagctacgacccctaagacaaaatggaagatactgccacgattcttgagtgatctaactgatctttgtggaggtacgccctctgcacgc

SEQ ID NO: 69231 - DNA, 355 bp, Zea mays
  Clone ID: MRT4577_163132C.1
ttttttttttttttttttggttggtttttttttttttttttttttttttttttttttttttttgggggggaaacaccagttttattattgggggggttaaaaattacaaaaaaccccctccctgggttttggaacaacgggaaaactgacacagggggggtttgttacaaaaacaccattattgaattttgcaacaggggaaaaactgacccagggtggggggcccaattttttaggggaaaaaaagggccatgcatagaaatcccatttttacttttgggggaagggcacaaaggggaaggcctgtgaattttctcgaacctacattccaacgggtttgattcctctggggacc

SEQ ID NO: 69232 - DNA, 2233 bp, Zea mays
  Clone ID: MRT4577_163133C.1
ccggccgggccggggtcccgcgcgcccgtgcgtgagcctgcctgccctgtgccgctgtgcctgtgcgagccccgtcccgcgggaagaaagaagcaagcgccctcgcctgccaaagaagacgcgcgcgagaagcggccgcaagcaccatagcacaagcagcagccgacctcctcgaacgagccgagccctcgcccagtcgccgccgcccgcgcccctcccactccccaccgcgcttcagcttcagactgcacacacgggtatagggcaaaagagccgagtcgaggcgccaccgaaggtgcgagaatcaacgagccgccggcgagcgagaatcaacgagccgccgggccgaaggtgcgcctcgcctcgcctcgcccgtccgcctgcccgccccagtgcgctcctgggccgccgcggggcggagatcaacagcgtacctcccacggcttccgtcggttcctgatttaggatgtgtacagaggggcagtattcttgtgtataggttctctttctatcggtcaactgttgctgattcggacggaatgttggaggatcaatcttgcctgatatcaaggtcgctgccgggttcctgtgagcaggaatccagactagcttacatgacttaccacctacttgagatcacgaggagtaagcgcccgcctgggaccctgtcgattgagcacgacgtcgtggcagcattgactaaaaggacaaagtcctctgagcaccaaaacagcgaggcgctggattgtcaaggaagtaatggtcagggcgactcagattcaagcaccctgataagttccattggccgggacaactcgatcaactgtcttgctcgttgttctcgttctgactatggttctatcgcatcactgaaccggagcttccgatcgcttgtgcgcagtggcgaactgtacaaggagcgtcggcagcaggggatttcagaacactgggtctacttctctttgcacgtgcaggagtgggaggcgtatgacccctaccgttcacggtggatgacgctcccaaggatgccccgcaacgaatgtttcatgcactctgacaaggagtcgcttgccgtgggcaccgagcttctggtgtttggaaaggagatcctctcgcatattatcctgagctatagcatcctgacacattcatggtcgcggggcgttgaaatgaacgcccctagatgtttgtttggatcagctagttttggagagaaagcaattatagccggaggcatggatgctgatggaagggtgcttcgctccgtcgagctgtataactcggaaaccaagaggtggacaacacttccaagcatgaataaggctaggcggaagtgctctggtgtcttcatggatggcaagttctatgtgatcggtggaatggccagtaacacagaagtgcttacttgtggagaagagtacgacctagatagaggtacctggcgggtgatagagaacatgtccgaggggctcaatggtgcaagcggcgctcctccactcgtcgccgttgtcgaaaacgagctatatgcagcgcagtacgccggaaagctagtgaggaagtacaataaaagggacaactcgtggacgacgctgggggagttaccggagcggccagaagccgtggatggctggggcattgcgttccggggctgcggagagcggctgttggtcatcggtggaccgagagtgctgggcggcgggatgatcgagctccattcctggattccaagcgaggggccactgcagtggaacatgatcggaagcaagccctcgggtaactttgtctataactgtgctgtcatggggtgctgatacgtgcgcccctcaaaacataccgtcgacgacacacgaaagattgtgatattgggtttttttttattatcaaatggcataaagcactgattaattccgcctgacgggtaatctctgcattcttttttttgacatttcagattttactcaaggttcgtccaatagagctagtcggttccgtgtactcgttaatagctagctacccattggttcctgtgctcagcacattctatttgcagtccatctgtacctttggtccatatgatatactctgttgaaatgagtttttttctgagatggacgcgtacaggtgataaattgtaattggggggtgggtaaccgtgcatctatatgatttgtttgtatcaagttctgaaccgtgtctcaacgctgtaattctattgtgcaaatgtctcttttcc

SEQ ID NO: 69233 - DNA, 799 bp, Zea mays
  Clone ID: MRT4577_163134C.1
gtttcagcgttcaagctgcggcgccctgttcggatgtacctcgaccggaagacggacatgatcatggccggagggcggcaccccatgaaggcgaagtactccgtcgggttcaagtcggatggcacactcacggctctgcacgtcgatcttgggatcaacgccgggatatcgccggacttgagcccgttcatcccggctgccaccatcgcttgtctgaacaagtacaactggggcgccctcgccttcgacatcaagttgtgcaagacgaacgtatcgtccaagtcggccgtgcgtgcgcccggcgacgtgcagggctccttcatcgccgaggccatcatcgagcacgtagcgtccgcgctcggggccgacaccaacgccgtccggagaaagaacctccacagcgtcgagagcctcacgaagttctacggcgacgccgcgggggacgccccgacgtacagcctcatcgacatcttcgacaagctggcctcgtcaccggagtaccggagcagggcggaggcagttgagcggttcaacggcgggagcaggtggaagaagcgcggcatttcgtgcgtgccgatcacctacgaggtggccctccggccgacgcctgggaaggtgtccatcctgaacgacggctccatcgctgtggaggtcggcggcgtggagctcgggcaagggctgtataccaaggtgagcagatgacggcgttcgggctgcgggagctctgtcccgacgccgacgggctgctcgacaaggtgcgcgtcattcaggccgacacgctgagcttgatccaggcagc

SEQ ID NO: 69234 - DNA, 233 bp, Zea mays
  unsure (1)..(233): unsure at all n locations
  Clone ID: MRT4577_163135C.1
agatgcttagcgtgcctntctgcggttccgttagcgctggggagcaggagccggcgcttcccccggatcagctcagatctctgtacagggaactctctgggatccctcctgtgtacgatcgtttagtgttggtggtgattgatggactacctgctgaatttgtacttgtaataagaaggaaacctccaatcaaaaaaatgataatagactatgtcttacactcaaactttaat

SEQ ID NO: 69235 - DNA, 512 bp, Zea mays
  Clone ID: MRT4577_163136C.1
cacaaaggatttctttttgaggttgaatgcgcgcactttgatggcacctgtgcattggatttcgagccctgtacattattacgaccgtgcactccggtggacccagagattaattaccaaggggcatgtcgcacagcaagcatgtgacgatataccttcgggcaaccacaatgggagcacagtattctcgggtccaacccagggcagatgccttggctaaccaatgggcagtccgctggaaggctcgttgcgagcccttatccctgcctaggctaggactgaacttgaaaaccatatgtcactcacacctgattgccgaaccattgaagtaagaggagatgcccgccaaaatgtcgtagaagaacatgatgaactaacgcttgacgcaggtgtgactctagacgagactcaagaactgtggcgaccttcgagcgacacacgacattaaaggccaccttgtcctttaacaacgcacaattggacctacattggtgtcaagcggggtgcaagtc

SEQ ID NO: 69236 - DNA, 449 bp, Zea mays
  unsure (1)..(449): unsure at all n locations
  Clone ID: MRT4577_163137C.1
cggacgcgtgnnggcgttggatcgctgagtgttactgcagggacagtgatgatcaatctgcagaggagaatggggagttcttcttctccaaactccttggtatgagcataatccaaccggagttcagtgacgcgaggatggtctcatgtcaaatcaatggatttttccgtgagtgcatgctctcacggtcaggggaaatggaagaccttgtcattgaactggccgacagatgcaacctaaccacccaacgcagcgggcgtcatcttgtcatatcggaaagctgggacagagataagattttattcgagagcatcgacttctcacggatacggtcaatgacagtgtttggaatgtggagatcattcttcatctccaaaagtatgaagctcgtccgggtgttggatctggaagatgcattaggtttaacagatgaaaatgttgatcagatg

SEQ ID NO: 69237 - DNA, 305 bp, Zea mays
  unsure (1)..(305): unsure at all n locations
  Clone ID: MRT4577_163138C.1
ttttctctttttggtgaacatatgttcgcgccaatggggatttttacagctaattgggggtaatataaccctactatgctggatcttgaagaatctttacattnnncactcaacatagctttccagctgaccccgggagccatttgatctgatgggacaacatgagccgctaccgctcggtaccaagacgcctgcaggacccctcccgcctggactcaaggggatctggaccaaggggttcttgcccgcgccccatacgggccacgcctgggcagaggtctcgcaggctcggtacaggccgaggt

SEQ ID NO: 69238 - DNA, 333 bp, Zea mays
  Clone ID: MRT4577_163139C.1
cgcaacatcaacaacagttcctacttgcactgagccacctagacaaggcgaaccgtgacgggtacttgctacaacaggtgcttgcattcaacccacttgctctagcaaacgtagttgcaaaccaccaacaacaacatctggatcaatttctgccagcgcttattaaaataggcatggggaaccctgccacctacctacaacaagaacaactggtttcatctataacgctcggtgtagccaatgcacctacatacctgtaacaagaattgttgaaacagattgtaccatctattactcagctagctgtggcaaaacctgatgcctacttgcaac

SEQ ID NO: 69239 - DNA, 1017 bp, Zea mays
  Clone ID: MRT4577_16313C.1
gtcgtgcctgacgtcgtcggtggacgccgcgtcaaggctgccgctgatccaccagatccattcgccgctacgttcagatataggctaccgctgatccattcgcagccacggaatctcctacgttcagctcaatacagatccatttgataagatgtttagaggttctcctaagatagtagctttatctaaagctgctcaaaagaaggcttctcctaaagctgcaaaatcaaagaaatgtggcggtggtgttgagagagctgcatggaatgttgaattagagaagagtcttgttgacttgttatttgaacacaatatgcctccatatagggctcaaaatggatggagtccagatgcttggaataaaatagtttctgaattccacaagaagcatgaatatgttacattcaacaagatccaaattcaagaaaaggagagagaattaaaaagggaatacaagatattgaaggaggcgagaaaacaaagtggagtttcttggaatgaaaaaagatgcatgatcattgctgaaccaacgatatgggacaacattatcactggtccaaggataaagatattatcaacatctctagaggaagagaaagtcaaatcccatcttcagtctgtgcaggctgtttattcagtttcagtcaataaggcttagcttgtagtgtgtgtggtctgaaggttgcatgtgcatgtagagactgtttcttcgttctgtggaggctgtgcagttttcagcttatttcttcagtcgtttcagactctgcagacatgtgctcgtctctactttgtcaaaaatagatatcgttattcagactgcagttttcagcttgtttattgattgggtttattcagttttgagtcttccgattgcgttggtcgcctctccgtccctcctttgtgttttgtgcttcattcgaacgtttttttggtgcactaaatattcttcaatgtttggtatcattttgtgacttcatttagaagaggaaccaatattgtcaaaaaaaaaaaaaaaaa

SEQ ID NO: 69240 - DNA, 280 bp, Zea mays
  Clone ID: MRT4577_163141C.1
tattgcttagccatgacatgccctgctcccgtaccttaggcttctatcctgcggtgccggcccttccttttttttttttcttttctgggtgtttttgtggggggtggttttttttcttttataaaaaaaaaggggccagtttgtttttgcccttgcaatttccttatttcctgcaggcaccagggggttggttgtgtgaccacccaaggctattatccctttttgttaggatgggggtctggagggggtttaattgtattttccccttgggccggggggg

SEQ ID NO: 69241 - DNA, 615 bp, Zea mays
  unsure (1)..(615): unsure at all n locations
  Clone ID: MRT4577_163142C.1
tggtacgcctgcggtaccggtccgattcccgggcacattcgcatactctcttctagcacgcaagcacgagctatagctagctctgcaacaanagagaaggaggactacccttcgccggccggcctaaggaggagtacgtacagaacttgggacatggaaaccgtcgtgggcgacctcatggcgaccgagctgaggcttggcctgccgggcaccgtcgacgactgcagccagccccaactggtgaaggccacgccgccgtcgacgccaaggggcaagaggcgcgccaccgccgatgccgtggaggaagccgccggcgccgaggaggcaagcaagcgtgacgccgagacggcgcccccggcagccaagtgagtagagattatagatagagcgttattccaaaactgttcagaagaaccgtagtgtcccttcttcgatcgtagcaggcgcagctagctccgctctgctgcatcaggtcctgactcctgagtcctgacgctacgtacgtatgtcactcaactctcgcagggcgcccgtggtgggttggccgccggtgaggtcgtaccggaagagctgcttccagcaggccagcagcaagcaggcggcagcggccaaaca

SEQ ID NO: 69242 - DNA, 1163 bp, Zea mays
  unsure (1)..(1163): unsure at all n locations
  Clone ID: MRT4577_163143C.1
gggccccgcccgtgatgcccgccgcctcctcccccgtgcgacccctcccgtgatgcccgccgccgcctaccccgcgcgacaccagccgccgcctaccccgcgcgacaccaccaatggtgcccttccttccctggcacccgcaacccgccagctctgcgcgagccgccggcgggatacccgcctcccccgcgcccccgccagctccgcgcgagccgccaggggcgcgcgtccgtcgcagtgatgccgcgcgatgaaggccgcgcgggggagacactgggaaagccgaaccatgaacagaattcaagaggacctcgacaacctcgtcgacgagtacgaccgcatcgctgcgacctcctccggcggaggatcctcgcgcacctcccggatccgcctcttcctcttccctgccaagcccgagtcctcgtcctcgctcggctccctgctcgacgactcttcaaagtccgggatctggttcgtcgtcgccctcaacagcgccatctccggctcgctcggcggcntaccgcggtgtgcctccaccagttcaagcacgagtccatgccttattgatccctcacccgcacgggtgcagttgactcccgttgctgaacacccccaaatatagtttgggaaattaactgcacccagcgcctcagtggattgatatcacgcactgaagaacgagaacctaaagggaaggagaggtagatgcccccactcagaggaggcttcagtcgaaggggccggggggacttcctgtgcggctgtgtccctacgccagacgtgtgtgcggccaccggtggtggagcgaggcggacggggatggcagctgtaggagagacctgtagtctgcgcctctgcggatcggtggatgtggatcgaacttcagactttggggttggccacgcgcgaatgcggcgcttggactgttggaaggcgaggcgcgagcccgggggcgtccgactccggctaggccgtcggacggtgggtggcggcgccggcgtcacgcgtcgagccggcgagggccgatcgtcgagggcgaggccgcgaggggtcggccgacggcgggggcgggacactgtcggcggcgagggcacgccagcgccgcgcgtgtggcgagtgctagcaggtggcggcagccggttccgggcttggcggcggttgac

SEQ ID NO: 69243 - DNA, 2151 bp, Zea mays
  Clone ID: MRT4577_163144C.1
gcgccatggcagcgtcgccgcagcagcaaggccagggcggccctggcagcggcgggtggactcccgagcagttctggtcgctgctggacaaggcggaccgccggttcgcccgggtgcgagacctgccctccttcggccgccaggagcccgacgagttcgccaaggccttccgcgcctacacccagctctggcggatgcagcaggagcaccgtcaccgccttctcgacgcgggcctccgccgctggcaggtcggcgagatcgccgcccgcatcgcccacctctactacgcccagtaccagcgcaccgccgacaccgcgcttctctccgaggcgttcgtcttctaccacgccgtcctcgaccgcgcctacttccaggacgccgaccaccacctcacccccgccaagcacctccgcttcctcgccaggttcctcctcgtcgcactcctgctcggcaggcgttcgcacaccgtcccgcgtctcgcctcggacatacgcacgctcttagatgactccaaaaagtccttccaggatgccgaatacaaggagtggaggcatgtcgtgcaagagatcgcgaggttcctgcgagctgactcaccatttatgaacatgaggccgctcaggtacagctatgcattcgatccgcccccggacacgcttcgtactatgccaactactatcaagaagcgaggtctcgtcttaagtgacaccatactttgcagctactatcctaacgaggtcaaatttacagacctctccatagatgtattcagaatggttcagtgcctcgaatgggaaccatgtggttcatttgcgctaaacgatggttacagcgcccatgatgaaagtggacaaaatcaacccaatctattgaaagatttaagagatgctgcactgcccccgaatccacttaagacaattctctatcgcccttcagtaacacatttcctaacggtcctttccacaaaatgcgaggagcttccttcaaatggtatcatgttaatatatctttcagctacaggggagatgggaacttctggattttgtcctgatactggtgaaaatgttttgagcaactttaataagtttgacatatccagtcttagtcatactagttcaaaggaaaacaaagaaccttgtctatggttaggctgccgtgaaactgaaggttcaaattgcatataccctggtgatctaatcccatttacaagaagacctttatttttggtgattgacagtagcaccagctatgcattcaagtctattcatggtactgaaaggggggagacttctgccatgctactttcaccaagttcccgatcttccgctgcgggattcagtggcgattctactcggcacagtggtagccaatttactatgttcctcacatctccattgcaagctttctgccttctgcttggcaacaatgggacagatatcgacagggagttattattattgtccctaaatgaatgggccgcgactttagttgcatcatcttcacttcattctatttgggttgaagttttaggcgacccactcctaagaaggttacttctcaggttcatcttctgccgagcaactcattccctgttcaaaccaacaaaccataagacagagttcctgccgacctgcatgcctcctttgcctgagtctgttgatgcagagagcatgctctcccaaagctgtgtgctgcgagtcgcatcattctttggcgctgccagtcagttctcatttgctgaggttaccacatggcctgatgttgaccctgaggaggctgttgtcaccagttcttctggcagtgccaacaaaggtgtgcctgagacagccagagattcagacatttcaaactcatcatcatctttttgatgcgaccatggcgctaccttcgtccgcttgtgttatttactcatctgcatatgcggatccatttgtaattactggtgctcctttatgcttgatttacacatcaagcagaactgccttgcctttttgtttcccggttacttactgaattaatagtcactagaacatttttttatcccttagtttggaggtgtggaggagctgtgtgagaaagtgtggttgaagagtgttgtttcgttactgtccatggctcggtagaatgtattccctcggtcatttcggtttttct

SEQ ID NO: 69244 - DNA, 666 bp, Zea mays
  Clone ID: MRT4577_163145C.1
gtttctgaccctgaaggcaggaagacggttgcatctggtttctgagctgcaaagctcgcaatctcataagatttccctgaggaattttccaagttgcccaagtttccatcactatgcagcttgagagaaagctctttgccatgaaaatccaaaacatctatctggtctttaggccactgaattaaccaaaactctgtcgagtctgttggtgatatatcaagcatggcttcttctttgacctcctcaaaagccggtccaggctcatagcggacccttgcttttgccttcaccatctctagcacgagtccagcctctagtgatccctcacccgcacgggtgcagttgacgcggtttttgctgaacacccccaaatatagtttgggaaattaactgcacccagcgcctcagtggattgatatcacgcactgaagaacgagaacctgtaggagagacctgtagtctgcgcctctgcggatcggtggatgtggatcgaacttcagactttggggttggccacgcgcgaatgcggcgcttggactgttggaaggcgaggcgcgagcccgggggcgtccgactccggctaggccgtcggacggtgggtggcgagtgctagcaggtggcggcagccggttccgggcttggcggcggttgactgtagggctcccg

SEQ ID NO: 69245 - DNA, 232 bp, Zea mays
  Clone ID: MRT4577_163146C.1
ttttgttcttggaagcctgctgctgctactggtttctagtacctgcccacctgggcttgcatatgttgcttccctgctgctggcctgcgaatccacctgcatttgttgaggcttatcgccgcgtgtactcctgctttgtgggaggattcaggaaatgcttggagtttcattcggtggatgaaatttttaggtgggtatgtgtgtgtaagtttaacttgatctttatttgaaa

SEQ ID NO: 69246 - DNA, 338 bp, Zea mays
  Clone ID: MRT4577_163147C.1
aggggaaaagcaccactttttgatattcataaagactcttaatttattttttatccacaagtcaaatacataaacatttaattctagattattacaggaatcgacatgggccccactacaacatataaatgactttaaataacgtggacccaataaatttgatctatcctacacttttttgaacactactttaacacctatgcaacatgacctcgctttctttggaaacaagaccactaacttttttgtgaggcgttttaattaatctcatgttcgtggccaaaaaacttaaggaaaccttttttgccttgaccgataataacctgattatacaattt

SEQ ID NO: 69247 - DNA, 1068 bp, Zea mays
  unsure (1)..(1068): unsure at all n locations
  Clone ID: MRT4577_163148C.1
natcccatttacaataagacctctatttttggtgattgacagtagcaccagctatgcattcaaggcaggtttgtttgatctttttccctccctagaactgagcaaccactatctggacaatgagggttggagatcttttccttttctggcctacctcaacttgcttgggactaaagggctggtcactgtctattcatggtactgaaggggggagacttctgccatgctactttcaccaagttcccgatcttccgctgcgggattcagtggcgattctactcggcacagtggtagccaatttactatgtccctcacatctccattgcaagctttctgccttctgcttggcaacaatgggacagatattgacagggatgcatataacaaagctgaggagttattattattgtccctaaatgaatgggctgcgactttagttgcatcatcttcacttcattctatttgggttgaagttttaggcgacccgctcctagcaaggttacttctcaggttcatcttctgcgggggtactcattccctgttcaaaccaacaaaccataacgcgtggggacagagttccttccgacctgcatgcctcctttgcctgagtctgttgatgcagagagcatgctctcccaaagctgtgtgctgcgagtcgcatcattctttggcgctgccagtcagttctcatttgctgaggttaccacatggcctgatgttgactctgaggaggctgttgtcaccagttcatctggcagtgccaacaaaggtgtgcctgagacagccagagattcagacatttcaaactcatcatcatctttttgatgcgaccatggcgctaccttcgtccgcttgtgttatttacttatctgcatatgcggatccatttgtaattactggtgctcctttatgcttgatttacacatcatgcagaactgccttgcctttttgtttcctggttacttactgaattaatagtcactagaacatttttttatcccttagtttggaggtgtggaggagctgtgtgagaaagtgtggttgaagagtgttgtttcgttactgtcg

SEQ ID NO: 69248 - DNA, 553 bp, Zea mays
  Clone ID: MRT4577_163149C.1
cttcacgctcaagtatcagctacccacgaggacctggactccctcatctccgtctctacggacgaggacctcgacaacctcgtcgacgagtacgaccgcatcgctgcgacctcctccggcggaggatcctcgcgcacctcccggatccgcctcttcctcttccccgccaagcccgagtcctcgtcctcgctcggctccctgctcgacgactcttcaaagtccgagaactggttcgtagacgccctcaacagcgccatctccggctccctcgatggtatcccgagggggatctccaccgattcagcctccgtcaactgccttctcggcctcgaggaccagcgcgccagccagccgaagctcccggcgggcgccgccgctgccgccgtcggtgccgggaggcacccgcacgacgtccagtccgtgccagactcgccgatgctggataagaactcctcgttcgggtctacctcctcggccccgtcactatcgaatcttccgcctttacgcgtgcggccggaggaccgcccgtcggacgcccgcatcatgcaaccta

SEQ ID NO: 69249 - DNA, 473 bp, Zea mays
  Clone ID: MRT4577_16314C.1
cccacgcgtccgcggacgcgtgggtgctcaagataatgatttttctatcaagaggtgtatttctgttcttaagactatggatatcacaagagatgagaagatcaaagcagcggaggtgtttaacacaccaaattacagagaaacatttatttgttttaatgatgatgagccagaagtcgctctcctttggccaagggggaagatggataaactctaaagggtccaaggataaagatattatcaacatctctagaggaagagaaagtcaagtcacatcttcagtctgtgcaggctatttattcagtttcagtcaataaggcttagcttgtagtgtgtggtctaaatcttgcatgtgcatgtagagactgtttcttcggtctgtgcaggctgtgcagttttcagcttgtttcttcagtcgtttcagacagttttttcagttttctgtgcagacatgtgctcgtctctactttgtc

SEQ ID NO: 69250 - DNA, 2702 bp, Zea mays
  Clone ID: MRT4577_163150C.1
ccggccgggacacgtgactggtggactagacaggaaaatcccaagttacgacgacttccccgagacgacggcgtaacaaggggggaaaaaaggaaaggggatcgccatggcagcgtcgccgcagcagcaaggccagggcggccctggcagcggcgggtggactcccgagcagttctggtcgctgctggacaaggcggaccgccggttcgcccgggtgcgagacctgccctccttcggccgccaggagcccgacgagttcgccaaggccttccgcgcctacacccagctctggcggatgcagcaggagcaccgtcaccgtcttctcgacgcgggcctccgccgctggcaggtcggcgagatcgccgcccgcatcgcccacctctactacgcccagtaccagcgcaccgccgacaccgcgcttctctccgaggcgttcgtcttctaccacgccgtcctcgaccgcgcctacttccaggacgccgaccaccacctcgcccccgccaaacacctccgcttcctcgccaggttcctcctcgtcgcactcctgctcggcaggcgttcgcacaccgtcccgcgtctcgcctcggacatacgcacgctcttagatgactccaaaaagtccttccaggatgccgaatacaaggagtggaagcatgtcgtgcaagagatcgcgaggttcctgcgagctgactcaccatttatgaacatgaggccgctcaggtacagctatgcattcgatccgcccccggacacgcttcgtactgtgccaactactgtcaagaagcgaggtctcgtcttaagtgacaccatactttgcagctactatcctaacgaggtcaaatttacagacctctccatagatgtattcagaatggttcagtgcctcgaatgggaaccatgtggttcatttgcgctaaacgatggttacagcgcccatgatgaaagtggacaaaatcaacccaatctattgaaagatttaagagatgctgcactgcccccgaatccacttaagacaattctctatcgcccttcggtaacacatttcctaacggtcctttccacaaaatgcgaggagcttccttcaaatggtatcatgttaatatatctttcagctacaggggagatgggaacttctggattttgtcctgatactggtgaaaatgttttgagcaactttaataagtttgacatatccagtcttagtcatactagttcaaaggaaaacaaagaaccttgtctatggttaggctgccgtgaaactgaaggttcaaattgcatataccctggtgatctaatcccatttacaagaagacctctatttttggtgattgacagtagcaccagctatgcattcaaggcagtctattcatggtactgaaaggggggagacttctgccatgctactttcaccaagttcccgatcttccgctgcgggattcagtggcgattctactcggcacagtggtagccaatttactatgttcctcacatctccattgcaagctttctgccttctgcttggcaacaatgggacagatattgacagggatgcatataacaaagctgaggagttattattattgtccctaaatgaatgggctgcgactttagttgcatcatcttcacttcattctatttgggttgaagttttaggcgacccgctcctaagaaggttacttctcaggttcatcttctgccgagcaactcattccctgttcaaaccaacaaaccataagacagagttccttccgacctgcatgcctcctttgcctgagtctgttgatgcagagagcatgctctcccaaagctgtgtgctgcgagtcgcatcattctttggcgctgccagtcagttctcatttgctgaggttaccacatggcctgatgttgactctgaggaggctgttgtcaccagttcatctggcagtgccaacaaaggtgtgcctgagacagccagagattcagacatttcaaactcatcatcatctttttgatgcgaccatggcgctaccttcgtccgcttgtgttatttacttatctgcatatgcggatccatttgtaattactggtgctcctttatgcttgatttacacatcatgcagaactgccttgcctttttgtttcctggttacttactgaattaatagtcactagaacatttttttatcccttagtttggaggtgtggaggagctgtgtgagaaagtgtggttgaagagtgttgtttcgttactgtccatggctcggtagaatgtattccctcggtcatttcggtttttctatgtatgttttctatacaaaaaaaaaaaaaaaacgtcttcccccttccgcccctcgtcaaagcaagcaaagtggtgcggtgccatcagagtaagcagcccccattttccctattcctatactactactagtagctgcagcagcatccaccggatggccatgtccagcgacaccgccgccacgacggggacatgcaccaagcccaaccccaaccaccggccctcaatagcctgattgattcatgtccaccacccgggcgacattcgtaagagaccagccgtatgccgaacggaaagctcacttcgaccgagtttaagtattgtgttgtgtttcaaagataaaaaaaggtgccctttgtgtatgattttttatacacgttgtctcctacctgcattgatagtcccaggtctcagaattgtaccatgc

SEQ ID NO: 69251 - DNA, 1246 bp, Zea mays
  Clone ID: MRT4577_163151C.1
aattcggcacgaggataaaatccccacccaaaaacccacggaggagacaagcacagcaagccaccctccagcccgttcgtttcactcatggagccgctgccgtcggcaacggccgccggagtgggggcccccggccctggtcccgggtaccccgagtccacggagtcttctccgcgcagccggcgtggggattcgtgggacgagccctttccgtcctctgcagcggcggctgccggcggcggaggccggctccgcctgatgtgcagctttgggccccggatcgtcccgcgcccagctacccaacgaggacctggactccctcatctccgtctctacggacgaggacctcgacaacctcgtcgacgagtacgaccgttgggcccctcgaggccggccgggaggatcctcgcgcacctcccggatccgcctcttcctcttccccgccaagcccgagtcctcgtcctcgctcggctccctgctcgacgactcttcaaagtccgagaactggttcgtcgacgccctcaacagcgccatctccggctccctcgacggtatcccgaggggaatctccaccgattcagcctccgtcaactgccttctcggcctcgaggacgactcctccgtgcactcccgtagtggagtaaccaactcggctcccacggaggaccagcgcgccagccagccgaagctcccggcgggcgccgccgctgctgccgccggtgccgggaggcacccgcacgacgtccagtccgtgccagactcgccgatgctggataagaactcctcgttcgggtctacctcctcggccccgtcgctatcgaatcttccgcctatacgcgtgcggccggaggaccgcccgtcggacgcccgcatcatgcaacctaccgccgtcgaggaccacttcgcgcagatgggaatctccgagcagcagctgcccatgtatatacaagctcaacagcaggtgccgatccctgctatgaccggcatgtcgccatctgaggcgtccagccgattgttctctgacgatgataagtccgatcacggtggtggcggaggtcggaaacaacaacctcccaagcaggacgttccgccggttgttgattccaccaatagagctgtgtactataatgatagatctactccggctgaattgaagcgagacatgccggtgggaactgaagctgccagctaccgcctccccgtttcagctacggacgctgctgcggcagctgcagccaccgccgcg

SEQ ID NO: 69252 - DNA, 455 bp, Zea mays
  Clone ID: MRT4577_163152C.1
gccttccatcagcctaaaccctgcgacccaacccggctccaactccaaagccgtcatggcggtgccgtccccgaccactaccgccggcgtcgtcgtcggcgtcacgacccaccaccgcgtgctcctcccatccgcgcgcccccgcgccgtgccctcttatctccggctcccggtgcgagcgcagacccacgcccacgcccactcccagcgcgcgcgcctcgccgaccccgtcgcggccgcggccccggccccggcggcgtcgacaggctcgcccgagtcccccgcgtcgggcgccgtcgcggtgaagcccacggcgctcgcggccaagaagctcggcgccgtggtgatcgcgctggtgcgggagtacgacaacgtcgactgatcctacggactctgccccgaggaccctcgtgccaagatctcgctttgcgacgcgctcattgtcaggttcggga

SEQ ID NO: 69253 - DNA, 1612 bp, Zea mays
  unsure (1)..(1612): unsure at all n locations
  Clone ID: MRT4577_163153C.1
gccgggtcggggttcgtttcctcatggagccgctgccgtcggcaccggccgccggcgtgggggcccccggccctggtcccgggtaccccgagtccacggagtcttctccgcgcagccggggtggggattcatgggacgagccctttccgtcctctgcagcggcggtggccggcggcgggggccggctccgcctgatgtgcagcttcgggggccggatcgtcccgcgcccgaccgataagtcgctctgctacctgggcggggagacccggatcgtggccgtggaccggcacgcgtcgctcgccgacgtccacgcgcgcctctcgcggtcgctgctgggcggccgccccttcacgctcaagtaccagctacctaacgaggacctcgactccctcatctccgtctctacggacgaggacctcgacaacctcgtcgacgagtacgaccgcatcgccgcgacctcctccggcagcggatcctcgcgcacctcccggatccgcctcttcctcttccccgccacccccgagtcctcgtcctcgctcggctccctgctggacgactcttcgaagtccgagaactggttcgtcgacgccctcaacagcgccatctctggctccctcgacggcatcccgagagggatctccaccgactcagcttccgtcaactgccttctcggcctcgaggacgactcctccgtgcactcccgcagcggcgtgaccaactcggctcccgcggaggaccagcgcgccagccagccgaagctcccggcgggcgcaaccgccgtcgctgccgctgtcggtgccgggaggcacccgcacgacgtccagtccgtgtccgtgccagactcgccgatgctggataaaaactcttcgttcgggtccacctcctcgggcccgtcgctatcgaaccttccgcctatacacgtgcggccggaggaccgaacgtcggacgtccgcatcatgcaacataccgccgtgaacttccagcacagctgctcgagccactgattgataattcaagggaaaattgatcacctgccaaggtgacactactactcaacgatcttatccttcttcctcctcttctttgatttttccggtggcgactgtggcatctctgaagccgtgttgctccccgcgcctcgagcctcagatccttctgtggccttgcccgacacatttgagtgccccaggctgctttcatcctttctcttccccttgtgtttgggtgttggctctgcgctcctttggcccagtgaaagcgccgaaccttggctactgggattctttgatgcaccggtgaaccgagacatggtcttcttagaacctgcagatttctttatgctaggagtaagactcccaaaacttggttttgtaaattcctcaggtttaggataacgaactaaggatactcgccgtgaaatcttccccacaggttttgtttctgagcctgaaggcaggaagacggttgcatctggtttctgagctgcaaagctcgcaatctcataagatttccctgaggaattttccaagttgcccaagtttccatcactatcccgcgtactctgcgttgttaccnctgcttaagggcgaaaaccagcncnctggcggccgtt

SEQ ID NO: 69254 - DNA, 1499 bp, Zea mays
  unsure (1)..(1499): unsure at all n locations
  Clone ID: MRT4577_163154C.1
agagtgttctctgacgatgataagtccgatcacggtggcggaggtcggaaagcacaacctcacaagcaggaggttccggcaattgttgatcccaccaacagagccgtctactataatgacagatctcctccggccgacctgaaacgagacatgccggtgggaacggaagctgctagctaccgcctccctgtatcagctccggacgctgcagctgccgctgcaacacaggtcccagctggatatgtccttgcccagatgcacgcgccacagcaacatccaccaccgcagcaacatttaccaccgcagcagccacagcaaccagctcctcagcagcagattgtttctgctggaaaccagcatttcatccacaacccggccactggcaccttcatcccaatccagtcctattaccaccaccaccctgtacctcagcaggcaccccagaccgtgccgaggcagcaacaggcacccgcattcgacccaaacacggggatgtactaccttcctatgcagcagaacgcacaccagccatacagcatgcctcctggtgcccaggccaccttgccaccaccatcgncccttgttngataccacgccaaagccaaccgtgccaattcctcagatggcagtaaggcctngattgcaacaacctggtgtcntaccgaacaacagctgcggctaccgctgttccagcgcctaatgcagcacctggatatgctgggatggcctaccaccatgtcatccaatcccaccaccaccaccctgcgccgcagcctgtagcaaacatggctggcaactacgggtatgagtttgctgatcctacgcgcccgcaagtctactactcacaggcagctgcacctccaacattgccacagtatccgcccattgtctctcctgatgctggccaggctgaaaaacattaagcagactgaggattggtgaattcagggtgaagatgttgctattaggcaaccgtgcatttgcactgggatcaaaacaagcatgcatcatccaaggataggttcagcataaggtttttattggatggttcttgtgttggtgagacagaagggtgccggattagttggggggagtgaagtgttgggtccctgttccaaattggtctttttttctttcctttcttattttgaataaaatatagtgtccaaaagaacctggtggtaacgaagaactcatcatcattttgtgtagccctctgtatatttgatctcatggatgtcattcaggttgaggtgcagataagtgtgttattagcttgcttgtagaaaccttatgcgagttaaatatatatatacatcggtcccgtattgtactttgaaaaaaaaaaaaaaaaaaaaaaaaaaaaaaaaaaaaaaaaaaaaaaaaaaaaaaaaaaaaaaaaaaaaaaaaaaaaaaaaaaaaatggcgggggtggcaccccatggcaaaaaaacgggggggttgggctccattaccaaaaaaaggaattggccccaacg

SEQ ID NO: 69255 - DNA, 505 bp, Zea mays
  Clone ID: MRT4577_163155C.1
cggttgctgtcggcagactgctgcgaagctcgctctcgcttgagtatgatctcagtggcttcaaaagaagctttgagttgttcgtatttggacgtcaactccttccgctccaataaaataagcccaagattgtgctgatattcatagatctcggactcgagccgcgagatgtagccgatgagggccgccttgtcgcggcgcctgacagcgtcctcgtcgaacccggcctcgcgcagcttcatccagatcgcctcgtcaccgccggccgagcgcgggctcgccatggccaggaccccaccggcggggaaccctagcagatcctgaatgcgccgcccgcccagccgcaacagcgcgcggcgaggtcacgcgttcctcgcggcgggccgctcggaagctcagtgctttccggcgggggctgagtccgtgagtggaggtctctcttccccccgtcctgtcacgaccctgcttttctcgacagcaacggcgacagcaacggaattcgagc

SEQ ID NO: 69256 - DNA, 2362 bp, Zea mays
  Clone ID: MRT4577_163156C.1
cattgggtacctcgaggccggccgccccttcacgctcaagtatcagctacccaacgaggacctggactccctcatctccgtctctacggacgaggacctcgacaacctcgtcgacgagtacgaccgcatcgctgcgacctcctggccgggaggatcctcgcgcacctcccggatccgcctcttcctcttccccgccaagcccgagtcctcgtcctcgctcggttccctgctcgacgactcctcaaagtccgagaactggttcgtcgacgccctcaacagcgccatctccggctccctcgacggtatcccgaggggaatctccaccgattcagcctccgtcaactgccttctcggcctcgaggacgactcctccgtgcactcccgtagcggagtaaccaactcggctcccacggaggaccagcgcgccagccagccgaagctccaggcgggcgccgccgctgccgccgtcggtaccgggaggcacccgcacgacgtccagtccgtgccagactcgccgatgctggataagaactcctcgttcgggtctacctcctcggccccgtcgctatcgaatcttccgcctatacgcgtgcggccggaggaccgcccgtcggacgcccgcatcatgcaacctaccgccgtcgaggaccacttcgcgcagatgggaatctccgagcagcagctgcccatgtatatgcaagctcaacagcaggtgccgatccctgctatgaccggcatgtcgccatctgaggcgtccagccgattgttctctgacgatgataagtccgatcacggtggtggcggaggtcggaaacaacaacctcccaagcaggacgttccgccggttgttgatcccaccaatagagctgtgtactataatgatagatctttgctggctggtctgacgcgacccatgccgccagcaaataattctgcatggataaaatgagaaccggaaattcataaagaaacctgaacgtgaacttccagcacagctgctcgagccactgattgataattcaagggaaacttgatcacctgccaaggtgacactactactcaacgatcttatccttcttcctcctcttctttgatttttccggtggcgactgtggcatctctgaagccgtgttgctccccgcgcctcgagcctcagatccttctgtggccttgcccgacacatttgagtgccccaggctgctttcatcctttctcttccccttgtgtttgggtgttggctctgcgctcctttggcccagtgaaagcgccgaaccttggctactgggattctttgatacaccggtgaaccgagacatggtcttcttagaacctgcagatttctttatgctaggagtaagactcccaaaacttggttttgtaaattcctcaggtttaggataacgaactaaggatactcgccgtgaaatcttccccacagcctttgtttctgagcctgaaggcaggaagacggttgcatctggtttctgagctgcaaagctcgcaatctcataagatttccctgaggaattttccaagttgcccaagtttccatcactatgcagcttgagagaaagctctttgccatgaaaatccaaaacatctatctggtctttaggccactgaattaaccaaaactctgtcgagtctgttggtgatatatcaagcatggcttcttctttgacctcctcaaaagccggtccaggctcatagcggacccttgcttttgccttcaccatctctagcgcgagtccagcctctagtgatccctcacccgcacgggcgcagttggacgcggtttttgctgaacacccccaaatatagtttgggaaattaactgcacccagcgcctcagtggattgatatcacgcactgaagaacgagaacctaaagggaaggagaggtagatgcccccactcagaggaggcttcagtcgaaggcggcggggggacttcctgtgcggctgtgtccctacgccagacgtgtgtgcggccaccggtggtggagcgaggcggacggggatggcagctgtaggagagacctgtagtctgcgcctctgcggatcggtggatgtggatcgaacttcagactttggggttggccacgcgcgaatgcggcgcttggactgttggaaggcgaggcgcgagcccgggggcgtccgactccggctaggccgtcggacggtgggtggcggcgccggcgtcacgcgtcgagccggcgagggccgatcgtcgagggcgaggccgcgaggggtcggccgacggcgggggcgggacactgtcggcggcgagggcacgccagcgccgcgcgtgtggcgagtgctagcaggtggcggcagccggttccggcctcggcgggaattgac

SEQ ID NO: 69257 - DNA, 3014 bp, Zea mays
  Clone ID: MRT4577_163157C.1
gaacttcggcacgaggcagaaagccggcgaggagagaagcgtagccagagcagcaaaccaccccccttcctcgcccgttcgcttcctcatggagccgctgccgtcggcgacggccgccggcgtgggggggcctgggcccgggtaccccgagtccacggagtcttctccacgcagccggggtggggattcgtgggacgagcctttcccgtcctccgcggcggcggcggccgcggctgccggcggtgggggccggctccgcctgatgtgcagcttcgggggacggatcgtcccgcgcccgaccgataagtcgctctgctaccttggtggggagaccaggatcgtggccgtggaccggcacgcctcgctcgccgacgtccacgcgcgcctctcgcggtcgctgctgggcggccgccccttcacgctcaagtatcagctacccaacgaggacctggactccctcatctccgtctctacggacgaggacctcgacaacctcgtcgacgagtacgaccgcatcgctgcgacctcctccggcggaggatcctcgcgcacctcccggatccgcctcttcctcttccccgccaagcccgagtcctcgtcctcgctcggctccctgctcgacgactcttcaaagtccgagaactggttcgtcgacgccctcaacagcgccatctccggctccctcgacggtatcccgagggggatctccaccgattcagcctccgtcaactgccttctcggcctcgaggacgactcctccgtgcactcccgtagcggagtaaccaactcggctcccacggaggaccagcgcgccagccagccgaagctccaggcgggcgccgccgctgccgccgtcggtaccgggaggcacccgcacgacgtccagtccgtgccagactcgccgatgctggataagaactcctcgttcgggtctacctcctcggccccgtcgctatcgaatcttccgcctatacgcgtgcggccggaggaccgcccgtcggacgcccgcatcatgcaacctaccgccgtcgaggaccacttcgcgcagatgggaatctccgagcagcagctgcccatgtatatacaagctcaacagcaggtgccgatccctgctatgaccggcatgtcgccatctgaggcgtccagccgattgttctctgacgatgataagtccgatcacggtggtggcggaggtcggaaacaacaacctcccaagcaggacgttccgccggttgttgatcccaccaatagagctgtgtactataatgatagatctcctccggctgaattgaagcgagacatgccggtgggaactgaagctgccagctaccgcctccccgtttcagctccggacgctgctgcggcagctgcagccaccgccgcgacacaggcccctcctggatatgttcttgcccagatgcatgcgcctccgccaccgcagcaacctccaccacagcagcaaccacaacagccagctcctcagcagattgttgctgctgggaatcaacatttcatccacaaccctgccactggcacctttattccaatccaatcctattaccaccatcctgtccatcagcaggcaccccagaccatgcaaaggcagcaacaggcacctacgttcgacccaaatacagggatgtattatgttcctatgcagcagaacgcacatcaggcatatggcgtgcctcctggtgcacaagtcactttgccacctccgacccttgttgacacaacgccaaagccaaccgtgccaattcctcagatggcagtaaggcctgaattgcaacaacctggtgtctaccgaacaacagctgcggctacccctgctccagcgcctaatgcagcacctggatatgctgggatggcctaccaccatgtcatccaatcccaccaccaccaccaccctgcgccgcagcctgtagcaaacatggctggcaactacgggtatgagtttgctgatcctacgcgcccgcaagtctactactcacaggcagctgcacctccaacattgccacagtatccgcccattgtctctcctgatgctggccaggctgaaaaacattaagcagactgaggattggtgaattcaggtatgcctcaaattctagaggccttgttatccgtctgttacttatcattatcgttgctaccgcatgttacatgaatccgcggcaaagagtgaagatgttgctattaggcaactgtgcatttgcattgggatcaaaacaagcatgcatcatccaaggataggttcaacataaggtttttattggatggttcttgtgttggtgagagacagaagggtgccggattagtttgggggagtgaagtgttggatccctgttccaaattggtctttttttttttccctttcttcttattttgaataaaatatagtgtccaaaagaacctggtggaaacgaagaactcatcatcatcatcatcatttgtgtagccctctgtatatttgatctcatggatgtcattcaggttgaggtgcagataagtgtgttattagcttgcttgtagaaaccttatgcgagttaaatatatatatacatcggtcccgtattgtactttaaaaaaaaaaaaaaaaagatattgatgttggtatgtttctttttgttgaatacattgacttcgattttcccaccgctatgtaattttgagcagtggattgacacagaaatatcagagaaagacaagaagtggttggagaatctgaagaagtgggatgcagaggacaaagagaggatggaaaaaagacgagaggagcttgctgccgagcaacaacgtgaagacgaagagaaaatgaggcgtgttgctgaatgcagggaagagaaggagaagaagcttgagcgtgcacgttgtgcaaaggaagcaatggaggagaaccctgatgcatttcgcaaaggcaaatggccccgttgcactcagtagtcttggtgttttatttgaagttatgtaataatgaacttattatttggtattatgtattgtcgaacaatgac

SEQ ID NO: 69258 - DNA, 888 bp, Zea mays
  unsure (1)..(888): unsure at all n locations
  Clone ID: MRT4577_163158C.1
cctcgaggccggccgactccatcatatcccaacctttccttcttctcctttgacttcttaccaccgctgttacactccagtccgacctatactggcaatacaacgtaatggcaacaaacggcacttcatccacctactcgatcccgcgcgaggcacgaagcctactcgacaacgggatcttgaagaatcccctcattgctcccaaccttcctcaagagattgaagaatgcgcaaagactattaaatttaaaggcaacgatgcgcctagtttagccatcaactggcgtttcgccgaaagcatctctgccttgaaaggcctagaagccgccatggtaaatgtcctgctaaagagaaaatacaaccttgagccgcaggaagtcgagatagacacgtgagtcttgtgcgaactttccattcataccaccactgaactccccaaagcgaccacgcccaactcttcttcatgtccggcttccttgccgccatcgacccagacggcgaaaacataaactttatcagcaaacccctgtcaaaaagcaacagcgcatacgacaagtacttcaaagactgcgacaaatacgacatgctgcggaatgcataccgtacatcagccacaaacatctatcgatgcaaggacggccgctacttccacacgcacggctccatgaacccagatcacacacaagattatctcggcctaccgcacgacatggacgtcgcaactctcgaagccccatggggacccgtacgtcgaaaaggtagcacagatagactcgcacgagatgcagcgtctcgcatccgacgtctccaagcaagcaggcaccatctgctggnacaccgaaagaatcaaaacagcgagcacggcagggcaaacgcgcacgtcggcct

SEQ ID NO: 69259 - DNA, 733 bp, Zea mays
  Clone ID: MRT4577_163159C.1
gcggccaaccgcgcggcctccccatcctcaacgcctagccccaatgcactgcacccccgcatcatccaccccctccctctcatcaagcctttttctcgaccgcgatagtgacggcgacaagccgacaagcacgacccccctctgcctcgccacgtgtggcctcctccaccgcctggtttggagttttcccatccttgacggcccggttcgaaccccgatcaactatcctccagatcggatcatggcgacgacgcaagagcgagatgtggcgcagccctaacgacggaggaggcgacgtggagtaactatgtggtggcggagcgcaaagtcgacgaagactctctctgccgccttctcacgagtgggattgtgctaccacttgaacagtcagatatcatgctttgtttggaggcctaactctgcaagcaaattcacaccgatggttaccaattgagtgatgaatattgtgttatctgaataatctgtagagagggtcttgactatgaggttagggaagaatgatagctactactatattagcaatgtctgttttactctgctagtatccagtgtaatgtttgaatcagcgcaatcggtcagttttgactactactactactatgccatgtactagaacttcttgttgtatacagtgtgtggttcttattttggtagcaagactgtaatttgataaagcttataaagcagcagtaagacatgcctttggttgatt

SEQ ID NO: 69260 - DNA, 364 bp, Zea mays
  Clone ID: MRT4577_16315C.1
aaaactgaataaacccaatcaataaacaagctgaaaactgcagtctgaataacgctatctatttttgagaaagtagagacgagcacatgtctgcacagtctgaaacgactgaagaaacaagctgaaaactgcacagcctccacagaccgaagaaatagtctctacatgcacatgcaagcttcagaccacacacactacaagctaagccttattgactgaaactgaataaactgaataaacagcctgcacagactgaagatgtgacttgactttctcttcctctagagatattgataatatctttatccttggaccctttagagtttacccatcttcccccttagccataggagagcgacttctg

SEQ ID NO: 69261 - DNA, 422 bp, Zea mays
  Clone ID: MRT4577_163160C.1
aaaaaaaatttttttattttttaatttaaatttaaaacccgggagatttgacgcgaaattaacggcccggtccctgtggggaaacaaattttccaacttaagggtaaaccctaaactgggttaatacaaggtcaatgttggttcctggaaaaaaaagttatccctaaaaaaacccgaaaaaaaaaaaatcggaaggcttaaactgcaaagcctggggggccaaaagagggaaccaaaaagcttaataggggatggaccttttgccccctaaacattaaaaaaacctgttaagccttaaaattatgatacacagggcaactcggggggaaaggcggctaaaaaattgggccccagggtggtaaatcctaaaaacagaaagacgggaaaattttacttaaactttcacccctgggcccgaacaa

SEQ ID NO: 69262 - DNA, 294 bp, Zea mays
  Clone ID: MRT4577_163161C.1
actatattttgaggccttttcaaagggaaggcggcaattttttggttgttgctggccctcctgctggccgtcttggtggcggcaagccaacggccgccgcggaaaaaaaaaacaactacaccaacggcgtcgagaacggaaaaaacccaacgtagactacgcggaattgggggaagaacacccacccctttacaagggagactggataatattccagtaccacaacggtaaaaccgacaaggcccacccaaactaaggggggtacggcgaaaaaaacaaaaacaacgcgctaaa

SEQ ID NO: 69263 - DNA, 229 bp, Zea mays
  Clone ID: MRT4577_163162C.1
cgccccagtattcggggcgacacacacgcgcgctaaacctctgaagtaaaggttgagggcacgtgagcttcgttagatgagggtgcggctgaacggctatcatcgcaaatccaggaaattgtggaccatgaggttgcagtagacacaattgcaccacttgagaatgatacaactgatggtgagaacactgatcctatgtacgatgacacacgtaatgagtaaatgagaa

SEQ ID NO: 69264 - DNA, 605 bp, Zea mays
  unsure (1)..(605): unsure at all n locations
  Clone ID: MRT4577_163163C.1
tagccgatctttatcgtttccatgtgtacaagttactccatcatggcattacatgatgttacacagaaacaccttaacaaccatggctgctcctttgagcacagtgctcagacaagataaatactcttgtcaaccaacagcttatatctccttgcacggagtgcgtcgaatcaaaagccttggtgaactaatcgaaactatgtacaacaacgtacgatcgttgccgcagttgcctaacggtacaagaatgttgttcttacatatatgaaactagtgaaaccagcttatacacaaactgcctgacgaaaggcagcagcgtacaaccaagagttcagtcaatgcaagctcatctgggacctattttcgaactaggaaagaaactcatctgaaaccacgttgcggtatgtgggcaggacaaatttcagagagatcagaggagcgttttcgtgcaaagattttcctagggtccaaaacataattggataacaagattttctccaagttctctccccgagcccatgaaggaaccaatttcctcctacgccttgaatgttctatatgttcgaannnnnnnnnnnnnnnnnnnnnnnnnnnnnnnnatggag

SEQ ID NO: 69265 - DNA, 1598 bp, Zea mays
  Clone ID: MRT4577_163164C.1
ctcctcatagcgttgcggatgctgatgatgatgaggatttcgaacatatagaacattcaaggcgtaggaggaaattggttccttcatgggctcggggagagaacttggagaaaatcttgttatccaattatgttttggaccctaggaaaatctttgcacgaaaacgctcctctgatgggaaaatgtctcgctcccttcataacagattaagcaagacagaaacaaggcacgtgcgtgaagcaaatcctggaaagcgttctaagcctagtaatattgttgctaatgtggcatcttttatacctcttgtgaagccaaaggtgcaaccaacaacatgtgtgaaaaaagatgttagagtgaaagcacttgagacagctgaagctgcaaaacgtcttgaagaaaagaaacgaagtgaacgtgaaatgcgcaaagcagcagcaaaactagagcgtgagaaactgaagcaagagaaagagttaaagcaaaaagaggaagaggaacagaagaagaaaagaggtgctgatgtggcaacaaggaagaggcagagggatgaggaggaaaggagggagaaggagagaaaaaggaaatgcattgaagaagctcgaaaacaacagaagcgacctattgaaagaaaacatgccaacattaacaaagatgctcatccagaaggtcatgataataaggagctgcagcagaattcggctgaagcagtgaaaggcccagtaaaatttgatgaaatgacaggtcttggaggaaatgccactaacagtaacaatgaaatggttgtgattaccgatgagaggcctgcaatttctggacctaattgtcaggaaaatatcccaaacagtattgaggagtcatacataatgactccatataaagattctgatgatgatgatgatgaggatttcaaacatatagaacattcaaggcgtaggaggaaattggttccttcatgggctcggggagagaacttggagaaaatcttgttatccaattatgttttggaccctaggaaaatctttgcacgaaaacgctcctctgatctctctgaaatttgtcctgcccacataccgcaacgtggtttcagatgagtttctttcctagttcgaaaataggtcccagatgagcttgcattgactgaactcttggttgtacgctgctgcctttcgtcaggcagtttgtgtataagctggtttcactagtttcatatactccctccgtttctctttatttgtcgcctagtagttcaaatttgtacaacgacatatattaaggaacggagggagtatgtaagaacaacattcttgtaccgttaggcaactgcggcaacgatcgtacgttgttgtacatagtttcgattagttcaccaaggcttttgcttcgacgcactccgtgcaaggagatataagctgttggttgacaagagtagtgatcttgtctgagcactgtgctcaaaggagcagccatggttgttaaggtgtttctgtgtaacatcatgtaatgccatgatggagtaacttgtacacatggaaacgataaagatcggctatttttaacgcaaagaaatgacgcatcggattgtttaaacgatttggatc

SEQ ID NO: 69266 - DNA, 162 bp, Zea mays
  Clone ID: MRT4577_163165C.1
tagctgcaccaagaagacacatgaatgggacaagactatcattgaatacaagacgaataagccatctcgcctgccattccttgacattgcacctctggacatcggtggtactaaccaagaattccgtgtggaggttgcccctgtctgtttcaaataagtgaa

SEQ ID NO: 69267 - DNA, 185 bp, Zea mays
  Clone ID: MRT4577_163166C.1
aggaagtgtttttttttttttaggggaggaacaaaggtttgtaattttgccaacagattacacacacggtgggggttccacacccgaccgaacggaagaaccatcttactaccaactattagcgcgcctgatccagttagtagccgtgcttgagcaggactagcgaggcagtactttgcatgacc

SEQ ID NO: 69268 - DNA, 366 bp, Zea mays
  Clone ID: MRT4577_163167C.1
ggccgggaacgattactgatacgagaaaccacagccgagctttccgcaaagcgcgcgaggcaggagagagagagagagagaggcggggagcaaaacaatggaggggaaagaggaggacgggcgcctgggcgccaacaagttctcggagcgccagcccatcgggacggcggtgcagggcgccgctgacgacgaggcctacaaggagtccgcgccggggtcggtgctacaccccgaaggaatcaagtcctggacctccaaccgggcggggaccccccgacaccctacgcgccatcatcttgatcgacagcacgctcctcaccgacgacgcgacgaagacatttttttttttttctccccccccccccc

SEQ ID NO: 69269 - DNA, 781 bp, Zea mays
  Clone ID: MRT4577_163168C.1
gggaatatttacaagataagaaaactcgtagaaccataatgttcttgtagcaaaatagattctacatctagtgatcaaaaccaataacactgcccatgtkgaggtactacaaaagtatggcgttcaaggctgacagcstgcyaccaaaaatgttgatgaatgcyagaaccaaacactgaaatgcaagcataaatcaattacgcaaaaaaatgacgcttctaagttctaaaggacaacaacaacaacaaagccttttagtcccaaacaagtkgggataggctagagttgaaacccaatcggaaccacaagtcaaagttcaggcacatggatgactgttttccatgcaacaaatagttcagtcacttaagcataggtactctacagctggaatcattttaatggagttctcycataaatacttgagawttgtgtcattatgttcactttkacaggaaaattaatatggtagtkagcactgtttagtatctaataaaatgctgtbtagagctgaaaggttaagacattctctaatacscccycattccaaaatagtagtkgttttagctcttggtttttatgtctttattcaaatagatgaagatgaacctagacacacatataaaacacatacatcaagtgttctatgaacccagtaattaactaaaacgaattttaatttaggrcaaagggagtaccacaaccmaaaararcacatgttawaatgttaactgawgctaatggctaaagcatcttgcttcaccaaagtaatgcactttaggaa

SEQ ID NO: 69270 - DNA, 260 bp, Zea mays
  Clone ID: MRT4577_163169C.1
tcagagctgcacgacgtcgcgcggcgatgacacgcgctgcacgagacccgtacgagcgcggcacgtgtcgccggcacggccgcatcggaagcaccggaagcatcccggaggtcgctggaacgccggtggcatgcaccaccaccgcatcctcttcgacaagtaccatcccggctacttcggtaaggtcggcatgcgctacttccacaagctccgcaacaagttctactgccccgcggtcaacatcgagcgcctctggtcga

SEQ ID NO: 69271 - DNA, 152 bp, Zea mays
  Clone ID: MRT4577_16316C.1
ggccaaacgaaggaaacaggatttgatccaactggtgccattgattagattgctcagctttaactcggttagtaacccggaccctaacttttacgactacatccgggttgtactgacttatacatgctgtactcggaccgttttaaaccctg

SEQ ID NO: 69272 - DNA, 253 bp, Zea mays
  Clone ID: MRT4577_163170C.1
cccaccgcctccgccgccgacaacagcgtagtgtagtgtagttccggagagggttgggtccagtagtagtgatccgcaatgtcgaccgacgatgctgttgtggctgaggtcccggtgaccgaagtgccagcggaggtcccggcggcacacgtcgccgaggcgcccaaggcgcagaacgcgcccaaggaggagaaggcgcctcatcagaagaagccgtctgcggtgcagaagccggaggcgcacactccctacg

SEQ ID NO: 69273 - DNA, 912 bp, Zea mays
  Clone ID: MRT4577_163171C.1
atctttttagttgtttgctggcagttagagaatgcttttatctccatgttcattgcaaagaacaactattaaggacatctcttttcaacactatttaacgtttctatattccaagtattattacgctaaggccccgtttgtttcattttattttgaggaattgaaatcttactattggaataagctattttttagattgtgacattccaccacttttcaaagttactatataactttatcttaaattcatggggtgaaagatggaaattgattctatagatttatatgctattttttaatgtacaacttataacatactcttctatttacttagttataacatgaatgtggtatataactatctctgtcatatgatttaagataatatacaaatatattacatatataaatatatgaacttaattagttttgtctaaattgtaattattaaaatggaatttaattccaacgaaacaaatggggcctaagagtaaagtatcctgattttcttttgcaagagagtttttcttgtgtgcactctatcctggttctgattaagttattgtaaaatttcaggttgggatcacagaagattttgagtatttgcagtgatgtccaacagcctattacagcgtcgaaaatgtgccacggaatgttggatcgaccacagatgcaagtttatcatgttggtgctgtgagttatctgcagtaaatagattttgtatatttcacatgcttggcaacaatgaccgatatggccacatgcatgttagggactacttttcctagatgctaccaagtggctagactataccgaaggctcctgctatgcttgaaaactttaccgaaggctcgattttattggatgtagtggctagactatatcatgaaatgtaatttctttgctgatgg

SEQ ID NO: 69274 - DNA, 2202 bp, Zea mays
  Clone ID: MRT4577_163172C.1
atgccgtcttctttctcgtctgctgcaaacacgccgccgcccgacgcatcgtccgaggataccttgaccaacgtggcggcggaggagttacatccgggtgatacggtggagtttggcatttcgcggatttcctcggtccgcgttcaggatatgcagcagctagggtattttggcagcggagttggtcgtgtcctgggggcggaggaggcgtttttcaccgttggccttcatctgcctgcacatcgctttgtggcggaggtcctgcagagatttgaggtccaggtccaccagctgacaccaaatgtcgtggtggccctggcgaagtatgtctgggcggcgacttcgtatggcggtcagccttctgtggagggcgaagtcgaagaccacctagggctccccgtggccgtgatgtgctcccattattatgtggtgtacccgcaatttgaggtggcagaggatgatgaaaatgagggagcccttcggtgcgctgcccgcatgagtagcgggcacgatttagttgaggaattcatcgggtatggggtatggcccttggcacatggctgggcgttgggcgaagtatgccctcacgagatgccctccttgggcgggcagcgagtgcgaagtctagccttcgcattggatctgcatggccgggatccagccacatttgttcgtgaagtggaggacagtgcggcgaggattgtggggcgctatgtgccaaggacagcgggtctatggagctgggatatccgtgggtccaatgttagattgaatcgggtcttcgaattaaactgcttgccatacggtggctatcccagggatgacactgccgaccgctgcgggaagagaccggtgggcgtgaccgaggaagggccttcgcaggggactgccccggccactaagaagagaaaattaggtactgcagtggggagagtgggggtctctgatagttttgttgtggatttgatggggacgtgtgcagccctcaggggaaggatgttttcgcccgagctctgggagtcttcggcccgaatgctggaggttaccgagggtcgatggcccaagaatgttccgatcccccgcgcggctggcgaagtcttctttacgtctcgcatggctcgtgacttgaaggtttttccttatggatggaatattgttgctgttgtatcggcagtgatggagagggaccgtcaagacgctgcgcagaaacaccgggcgatcgtcaggatcgcggatcctatgcgcgaggcgaagaaggcgcgagggagcaggaaggctgctgcctctggcagtagcaaaccggtgccggatgcgaaaccggccgcccctgggcacagcaaggcgtcggcttgtgcgaaggttgccgcctctggcgggagcaagccacccccggacgggctcgtgaaaggacgaaggccgccttcgccggcgcgacgtattgccgacttcggcatggacatcagtgtcgatgattattttgttgggtcgggtgaggggcaactggttgttgtcccgcctccggtggcaaccacttcggcaacggtggtggtgggggcgaagggtgccacgcgggacccttgggccactttttgcacgagcggcgagattctgtcggccgctgccgctaaggacgtggcggtcgactttgccgacctcgtcgtgtcgggtgccttgactacggacgttgctgccgaagtcgagcgtctctgggcacagcatgcggatgctgtgcgggagaaatcggctacgaaaagcaaaaaccgcaggctgtcggagaaggtggccgccatggaggccgagaagacggatctctgccgccagctggcggaggagaggagggaggcgaacaaggccatcgctgatgcgcaggctgcgcaggccgaagccaaagtggcatgggcggagggcagtctcgcccgccaacgcgccgaggagctggaggcgaggttcaatgccctgcgcagccgcgtggacaaggccgaggcctcaacgcgcgcggaggtcgagcggacgcacgcacagttcgtggacgcgtaccgcgagctgggtgcgcggactgctgacttcgaagtgcccgtccaagaagcgggccttcacttccttgaatggttgcaggaggagctgctggtgctcccgaccattgtgacgggtttcatgtccttcgcctccctcgtcacatgcgagggggccgtgaatgcttga

SEQ ID NO: 69275 - DNA, 363 bp, Zea mays
  unsure (1)..(363): unsure at all n locations
  Clone ID: MRT4577_163173C.1
cggccgggaaccgaatcctgacgcttcatccgttgcgctgcgctcggctccctcgncgcagtgcggatttaacatggccgtgccggaggtggtggtcgacggcgtcgtcttcccgccggtggcccgcccgccgggctccgacgagctcgcacttccttggcggcgcaggcgtgcgaggcctcgagatcggaggcaacttcatcaagtacacggacatcggcgtgtacctgaaggacgcgatcgcgccctcgttggacaacaagtgtaacatcaagacggacaactagatcgactccaacaacctcttcttccacgacggacgtgcgcgtccacttcgagaactgacaagagccagaataccct

SEQ ID NO: 69276 - DNA, 783 bp, Zea mays
  Clone ID: MRT4577_163174C.1
atgccgtcttcttcctcgtctgctgcaaatacgccgccggccaacgtgtcatccaaggataccttgagcaacgtggcggcggaggagctacgtccgggtgatacggtggaattcggcgtatcgcggatttcctcgatccgcgtgcaggacatgcagcagcttggatattttggcagcggagtggggcgtgtcccgggggcggaggaggttcccgagcccgagggcgagttggtagtttttgaggcatttttcaccgctggcctgcgtctgcctgcacatcgctttgtggtggaggtcctgcagagatttgaggtccaggtccatcagctgactccgaatgccgtggtggccatggcaaaggatgtctgggcggtgacctcgtatggtggtcagccttctgtggaggtcttcgccaaacattactgtctgcattggcagaaaaggaaaattggacataagattgcacagttcggatcatgcacgtttactccgaggaccggaaagacttcgatcgaagttgtggagttagttccctgtgcccgcaataagtggggcaactggtgggatttctggttttatgtttccgaaggtgaagtcgaagaccacccagggctccccgtggccgtgatgtgctcccattattatgtggtgtacccgcaatttgaggtggcagaggatgatgaagacgaaggagcccttcggtgtgcggcccgcatgagtagcgggcgcgatttagttgaggaatttatcgggtatggggtatggcccttggcgcatggctag

SEQ ID NO: 69277 - DNA, 420 bp, Zea mays
  Clone ID: MRT4577_163175C.1
ggcgcgaaaaacgccgtattttggattgtgtgtcagcctgtgcggagtggcattctaaacaaacttgtgtcatccacgctcgggactgacgcacaatgagcgtcaggcgcaggccgatcaaccgcgatatgaaatgaacgtgttcgcccacacggatgcagacttcacacggtatcgacatatgcgttgcgtcaaatatgtttttacgtgagagggataagcaactaagacgactacggatgcgctcacaagaatctgtggctgacacaaggaccagaccgccgagcttaaagagagctttaaaacgcacaacaccctaaatgcggaaaaataatggagcactggacattcgcctgggcctccatgcgcggtaagaggaggagtggttacagaaccggcacacccggaccaatctgaagc

SEQ ID NO: 69278 - DNA, 347 bp, Zea mays
  Clone ID: MRT4577_163176C.1
tcttccagcttcctcctcttatcctctagcgttccccttcacggctgatcaatatactctctggtaggtattatactgcaagggacgcttacccttatccatatccctcttccgctcaagagctgaaggatgaatcagcatctcccgctgtcaatacagaagcagaaccagcaacctctgatccctaagcttctgctgctgcttaataccccgcctcggcttatccgtcctctgatgatccctataaggcctatcctgtcgctgatgtggcccataaagccatctaatgacgccgttctccttactctcactgctgcacctaacatcagctctagagatctattttc

SEQ ID NO: 69279 - DNA, 272 bp, Zea mays
  Clone ID: MRT4577_163177C.1
tcgcccacgcgaccgctcacgcgacccgccatgagcgcgtcctcgctgggccacgaaacggtaggggcgcctgaagaccctggatactgcgtaccgctcccttgcgccttcgtccgtgccctgctcccaccgacgtggcattagagtatgatgatctcatttatcgctatcatattagctccctacaccaaagaccagagtcagatccgaagctacctcgccgcccagcaaggattttacccggacggagctctgcaacataggggggatcg

SEQ ID NO: 69280 - DNA, 134 bp, Zea mays
  Clone ID: MRT4577_163178C.1
ccggccgagtctactgtgcgctctgagtacgttttgggcccggttgtcctttaagctgggtcaattccattacttcttaattgagaggcagagctcctaccattacgtacaaaaaaaaaaaaaaaaaagcggcc

SEQ ID NO: 69281 - DNA, 234 bp, Zea mays
  Clone ID: MRT4577_163179C.1
gctagtcgacgatgcagatggtatatgccaactgcgagacgtgcgctgcgaaactccggattaactgtaaggacttggggttctggactcgcccgctagaccataggcgtgttctagtggaggttggcacgagaccattgcgcgtgcaatgatggcctcctatgccacctggcggaattgcgtaattagggtatgtgagagttcagactggatggcgacagatctggcggagtt

SEQ ID NO: 69282 - DNA, 1810 bp, Zea mays
  Clone ID: MRT4577_16317C.1
taacaaaaatctggaacaaatccaactcgcctcacgcgactgagctgagcgcgtcgccgcacgtttcttacaccgcgctcccgccaccacctcctgctcccaccgccacctccttctcgcagctcccgcctctgccccagtcctcgtcgtcgtgctcctctcctgcgtcgtcgtcgtgcctgacgtcatcggtggacgccgcgtcaaggctgccgctgatccaccagatccattcgccgctacgttcagatataggctacctgatccattcgcagccacggaatctcctacgttcagctcaatacagatccatttgattgtccctactcttgtgagagtcgcgaggacaagctttccccctcttgagatccggtgtctaatccatttttcaagataagatgcttagaggttctcctaagatagtagctttacctaaagctgctcaaaggaaggcttctcctaaagctgcaaaatcaaagaaatgtggcggtggtgttgagagagctgcatggaatgttgaattagagaagagtcttgttgacttgttgtttgaacacaatatgcctccacatagggctcaaaatggatggagtccagatgcttggaataaaatagtttctaaattccacaagaagcatgaatatgttacattcaacaagatccaaattcaagaaaaggagagagaattaaaaagggaatacaagatattgaaggaggcaagaaaacaaagtggagtttcttggaatgaaaaaagatgcatgatcattgctgaaccaacgatatgggacaacattatcactacatttcctagagctaagaagttccgcaataagtcttttccaatctttgatgccttgggtgaattatatgatggtcacattgcacaagggacttggaacattacatctactcaaccactacaaaattctgatgatggagagaaatttaaaaccatagaagtggaatatgaagatactaatgaaccacaagtagatgcgagaatagaacaagatgaagatatagtaattgttgaaagggttgaacataggttacctaaaaggtcagatgcaccaactgtcaatcaagagaaggagacaaagagagtgaggaaagatgcactagaagggctgatagggaggtaccttgatgtgaaaacaaagcaagttgcagatgaggctgcacaatcaacaaaagagaaggaagttgctcaagataatgatttttctatcaagaggtgtatttctgttcttaagactatggatatcacaagagatgagaagatcaaagcagctgaggtgtttaacacaccaaattacagagaaacatttatttgcttcaatgatgatgagccagaagtcgctctcctatggctaagggggaagatgggtaaactctaaagggtccaaggataaagatattatcaatatctctagaggaagagaaagtcaagtcacatcttcagtctgtgcaggctgtttattcagtttattcagtttcagtcaataaggcttagcttgtagtgtgtggtctaaagcttgcatgtgcatgtagagactatttcttcggtctgtggaggctgtgcaaaaaaaaaagttttaaaattgtttcttgagtcgtttcagacagttttttcagttttctgtgcagacatgtgctcgtctctactttgtcaaaaaaaagatagaattattcagactgcagttttcagcttgtttgttgattgggtttattgagttttcagttttcaaaaaaaaaaaaggcaaaatgctgcaaaatataatgcttcatgaagtcaataaatacatattta

SEQ ID NO: 69283 - DNA, 647 bp, Zea mays
  unsure (1)..(647): unsure at all n locations
  Clone ID: MRT4577_163180C.1
attctttttctaatagagagncacgtctctcccttgtttctagtcaaaacctatgccacgagatcccccactctccattccgtctagaggtaacgaggtgactccgcgcctcccccttgcgagacagccaatactccttctcgcttaccacttttagcccggcgcgaaatcttgtgcagatacagcacgtgctcactgctgtgccatccggatggacctccctatggagcacagatgccaccggtgtagagcttggcactgaggaagaaactgccttctattctgctgtatgaaacactgtgtgctgaaaattccggccctaacgccgaatatggtagccgtctatacagtgatgtcgccgaattgtcgacgtgctgccgatcaacagttcatagctcgtgcagaagtattatcgggtgtacaaggagcatatacctgctacactcgttgtgcctaaaactgctgctgtgatgcaggagatctcacactcgagcgcagcaagaccattgggaatatctgtgctgatcgctggggatgacgccaatgcaccactgttgtatcaggatgatccctctggattatacttctcctgccaggcatcactcatggtagactatgtgtcgaatgccaagacttttcttgccgag

SEQ ID NO: 69284 - DNA, 397 bp, Zea mays
  Clone ID: MRT4577_163181C.1
actggctcgctcgatcctagcttgcctgccaaggggcgcattgaccatggccatgttcacgcaagcctccgtcgccacgcgccacctgatggccgccgcctgggcgccggcggcgaagtcgcggtagactgagctcgcagctcgcgctgccgatgtcgtcctcccgtgggccggccccgttccgcgcgtacaccgaggaggcggtggaggcgcccaaggggttggagggcccgcaactggaccccagcacgccgatcccgatcttaggggggagcacgggcgggctgctccggatggcgcaggtggaggagttctacctgatgacgtggacgaacaccaaggagcaggtgttcaagatgctcaccggcggggccgccatcatgcgggaaggccccaa

SEQ ID NO: 69285 - DNA, 408 bp, Zea mays
  Clone ID: MRT4577_163182C.1
aatctccggctcgacgagctctctagccggcggacgccctttcttggtttttttcaacctactagccgtactaccaagaataactgcattaaggcggcccatgcttcacggccacatagacatatcatccccttgcgagtgccgtaagggccctacatacaaggtccgggttcatcaattcgtaaacaccttattagtacctgtcccctactaactgatccagcgaggaactgaccttatttcacccttgccatgagccgtacgcacaaccaacctgacacttgctgtgatgtcaaagctgtaattacacaggatgctagctcctcagccagctctatgagtgcctacactagggatgggactgacccgcttgatagcctttttcttctgctcagagtcccggaagcc

SEQ ID NO: 69286 - DNA, 1212 bp, Zea mays
  Clone ID: MRT4577_163183C.1
agaagacaggggagactagttgagacttgagactggacaggagaccagcttccggaacctcctcgagcacactggttgaagctctgctccaccctctcgctatcggttcctataaataaagcaagagcccctcgtcgatcctcacctccacagctagcatcgatccgccattgctcaccgcacaagtgcacgctcacctgtcacctcacacacgcagctaagtagctaacgccgtaggcgagaacaagaaaaagctcgacatggccgaggagaagaagcagggcctgcagctgctggacttctgggtgagcccattcgggcagcgctgccgcatcgcgctggacgagaagggcctggcctacgagtacctggagcaggacctggggaaaaagagcgagctgctcctccgcgccaacccggtgcacaagaagatccccgtgctgctgcacgacggccgccccgtctgcgagtccctcgtcatcgtgcagtacctcgacgaggcgttcccggcggcggcgccggcgctgctccccgccgacccctacgcgcgcgcgcaggcccgcttctgggcggactacgtcgacaagaagctgtacgactgcggcacccggctgtggaagctcaagggggacggccaggcgcaggcgcgcgccgagatggtcgagatcctccgcacgctggagggcgcgctcggcgacgggcccttcttcggcggcgacgccctcggcttcgtcgacgtcgcgctcgtgcccttcacgtcgtggttcctcgcctacgaccgcttcggcggcgtcagcgtggagaaggagtgcccgaggctggccgcctgggccaagcgctgcgccgagcgccccagcgtcgccaagaacctctacccgcccgagaaggtctacgacttcgtctgcgggatgaagaagaggctgggcatcgagtagagagcatccatcggtcggccggtggctggccgggagtaataatgacgaaccaattatctagttttggtttgagtgtgctcagcagagcagttcgtgttcatgagttcgtcgtcgttgtattttctattgtcagcggtggcagcgccgtacgtgttgcctcgtgcaccacatccgaataaatggtttttaaaaaaaaaaaaaaaaaaaaaaaaaaaaaaaaaagaaaaaaaaaaaaaaaaaaaaaaaaaaaaaaaaaaaaaaaaaaaaaaaaaaaaaa

SEQ ID NO: 69287 - DNA, 1829 bp, Zea mays
  Clone ID: MRT4577_163184C.1
cattgggtacctcgaggccggccgggggacaagtcagaaaaaaaaaaagaataagaagaaaggaatccctcctacgcggaagcgaagagattcgtcgcctcagccgcctctctgctcagatctgcggcggagcctcgccggcggcctgcgccccgcggcgccgccgatccaagatgccttcgtgcgtgcagggatgctgctgctgctcgtccctgcgccttctcccccgcgacgacgcgctctcgtccccctccgcctgcgcgcaccgcctgaagccttggtcttggcgtgcccaatcccccacctcgtcctcctaacgcttgtccccgcccgctccccaccctgatctacctgtctctacccttccctcctccatttctacatctccccgttgctgctctgctcctgctgccacaagagtattcgccttcaatcgttgctcgcgcctgtcatttcgtgccgcacgccgacttgtttgccgttttcgctgccgtcttctgttggatcggatttgtctggatcgattccaaggtcggatctacgctgctgcgggtcagcatcagtagcgcagcgtggttgtacgtttgcggtgttgctgacttgctgtatcactctgcgtctctgcaagtgctaaaccagtcactttatggacggtggttcctgtggtctcgagggagcgtcggtagtgacatctactaccagcgctggtattccgcttctgccagagaagcactgcgcccttgtttgatgaagcttgtggagccatggcgggcagtaatagtcctgaaggagtgccagtagtgacttctgctgatgaccctccgacccgtgccaatattccatttctctgcaattcagttgactgaaacatgtgaagccacaggggacggcagtgctcccttggatgctcagatatgtacgggtttctctaagttgatcagcttggaggtgaagaaaggcctccagaagtgcgcgacgttcccaccctcgtctggtcagcctcagcaggaggattgttcatgctcccatgtaggtgatggcctcacgggtgctcctgctttctggcgatctgtgtccttacctcagccaactttgaagctggtctctgccatgaaaggaggtcgtgaaaagaacggagtggcatcatcaccaagtgaaaaccgccatgtcaagtgggctcctgatgtgtacgacccccctgtgacatcggtatgccattcagtgaccaacagctatcagcgccggtcaaagcaccgcaagaaggagaagaacaaacagaagaagaggcagaaggggaagtcgaagaagaaccaacaacagagttctgcccagaatccatctgcaccgcaggttcctggtatcgggccgaaaggcgttagcaccactggtggccagtctccagcagacgatctcagcgaacatgaggccgggatcatggactacagcatgggtagccaggaagccaactgtggaagcagcttcttgcgcgagtctgttgctaagatgcacttctcgaccgccgaagcttcctgagaggcgtgcctcagttctgtaaatatgatggacgggatgtgtataaataaacccagcatgctgtttttttttttcgtcgtcatcgtgtgcttgcgtttgagagcttgcctagtgttttggaacaataatttttggacagactatgtgttctgtatgttttggtcgtcagacatatctatcctcagcccatggctttgcttcacggtttaacctggactcttctgagaagttatggatgttctgaactcaagttatacactgcataatgatgtttgatttgctggaattttatgttc

SEQ ID NO: 69288 - DNA, 651 bp, Zea mays
  Clone ID: MRT4577_163185C.1
cgcaagacttctccgaggcgagctcggcggcggagagggtccaggaggtgatcctgcgggtgcccaagatcgactcggagagcagtgccggcgacgagctggccaacgtcgccggcgaggtggaattcaagaacgtggagttctgctacccgtcgcggccggagaccccaattttcgtgagcttcaacctgcgcgtgccggcggggcgcacggtggcgctggtgggcggcagcgggtcggggaagtcgacggtgatcgcgctgctggagcgcttctacgacccgtcggccggggaggtgaccctggacggcgtggacatccggcggctgcggctcaagtggctgcgcgcgcagatggggctcgtgagccaggagccggcgctgttcgcgacgtccatcagggagaacatcctgttcggcaaggaggacgccacgggggaggagatcgtcgcggcggcgaaggcggccaacgcccataacttcatctcccagttgccgcagggctacgacactcaggcaagctatttaccacaccagcccaccacttttgcagctggcgtatgcatgcagtcgtttcgttcgctacacttttctgcctgcttttgcgtgcacactagtactaacaatgcctaaatgtcccctggaatttatg

SEQ ID NO: 69289 - DNA, 312 bp, Zea mays
  Clone ID: MRT4577_163186C.1
tttctgttccgcctaagagagctccttccttgccctccacacgtgttttcaggacgagctgccagacccgacccagcgaaagatctagcacgggcaggactatgagggacatggacggccgcgactacagctatatcaaggtcatggacagcggcatggtcgcgcacagagggatcatcatcggacgtatggactaggagggcgccgacggtgtcttccgggggatcagctccctggacgacgacgccagccggctacgaggaactgtccaagccatcgataatgcattaccgaacatcgactgcaacttgc

SEQ ID NO: 69290 - DNA, 259 bp, Zea mays
  Clone ID: MRT4577_163187C.1
ggggttctaaaacaaaatggccttttttttcccacaaagaaaaccctggcgggtttcataattacccaggggccggccggacattttctcataccatttgggggccaaaaaccgcccgctgttttagagcagctttatttttttttgtttgaaaacaaaaaagaagggggaagaaaacccaattttcggacacaatacccttgtttttccaaaccagccggaagggaaatgaagttcatccccgccccatggtttaatt

SEQ ID NO: 69291 - DNA, 376 bp, Zea mays
  Clone ID: MRT4577_163188C.1
agcaagatgttgtgtacacggattggatagatcgtccacaacctcgattggaccgtcatacaggaaatgggtttacagtgacgctgggaagagtgagggaatgttccgtgatggacataaagttggtattgtttggacataacacagtggtaggagctgcgggtggttcgattattactgcaaagttgagtgtcgccaaagggtttattgcacaaaaaggaaaacaaagtgtatatgcggcagtatctcgtcactagtgtgtgtcactagacagaatagtgtgtttgtgttgtttgtgtctgtgttttccaatgaaagacattgaccactagaactatgtgaaaaaaaaattacagtcaaccacaaagactatcaa

SEQ ID NO: 69292 - DNA, 358 bp, Zea mays
  Clone ID: MRT4577_163189C.1
ccgtgatttacaatcacgtccatctaagaatgctgaactgctgtaaccggtcctgccatcaagatggtcgtgagcccggccgagcgagagcgagggataggcatggctgctacgaagctcgtgacgctggcgctggccgggctactggcggtgaccgttgtggcttccccggccgcggtgcgcgcggctatgtcaagtaccaccgtgtacaagacgctgatgccgtgcatgccgttagtacagatgggtggagccatgccgtctcagtcgttctgctaaggcatccgcagtctgttgtagcaagacaacaacacccctgatcgttcggactaatctgtgggtgccttaataacgtcgt

SEQ ID NO: 69293 - DNA, 1081 bp, Zea mays
  unsure (1)..(1081): unsure at all n locations
  Clone ID: MRT4577_16318C.1
actttacatttttccacagactagattattggacagagacgcgccttgcaactttgagctctctggcctgcccccgttccagcaagatctgtactccgtatccatcgtctccttgcttagtgggcactcaaagtgttgcgcatactgctcaaacaaatgatgatccatcgatagtggctgaggcgacagctctccaagtttcgtctgttcgctcgtggtggaaattccgctgagcgagcgagcgagcgaatcctcctcttcccagccccggcgtgaggagcgccggcgatgtcgaccggcggcaggaagatgaggacggcgtgcgtgaccggaggaaacgggtatatcgcctcggcgctcatcaaggtgctgctggagaagggctacgccgtcaagacgacggtcaggaaccctgatgacatggagaagaactcccacctcaaggacctgcaggcgctcgggtccttggaggtcttccgcgccgacctggacgaagacggcagcttcgatgacgccgtcgccggctgcgactacgccttcctggtcgccgctccggtgaacctccacacgaagaaccccgaggaagaaatgatcgagccggccgtcaggggaactctgaacgtgatgcggtcgtgcgtgaaggcgcgcacggtgaggcgcgtggtcctgacctcgtcggcggccgcggtcaccaccaggccgcagctgcaaggcgacgggcacgttctggacgaggagtcctggtccgacgtcgagtacctcagagcccacaagcctncaggcncctgggggtacccggtgtccaaggtgctcctggagaaggaggcgagcaggttcgcggaggagcacggcatcggcctcgtcaccgtctgcnccggcctcaccgtgggcgccgcgccggccccgaccacccgcaccagcgtccccaactgcctctccattctatccggcgacgaagccgcgttcgccgtnctggacgccacccagancgccaccgggtgccttccgcnggtccacgtcgacgagtctgccgcgccgagctgttcgccgccgaggagggcgcggccgcggggaggtacgt

SEQ ID NO: 69294 - DNA, 197 bp, Zea mays
  unsure (1)..(197): unsure at all n locations
  Clone ID: MRT4577_163190C.1
cganggtgangatcgccgacgaggtgacgagtaatagacgctctactgcgccgcgtcgtcgggctgtgtgcactgcaatctgtgactgcctgagtggctctatcgtgtaatgttctgtcggtctaatcatcgtcgtgtgtgttacactacgtgtagacttatcccgttgcactggtatagttgcgtatgttctgaaa

SEQ ID NO: 69295 - DNA, 297 bp, Zea mays
  Clone ID: MRT4577_163191C.1
cattaaaacctaacaggggggatataggtccagctgggggcaagcatctatatatatacatcaaattcatgggaaactgaatagctgttaaagatggaatcttgacctaccctaagcccataagggctatacaatatataaacacatctcatattatcatttatgccacatggtcaacaatatgacttggagctccagcaccttcagcatatgttggactgggccataatcatcctcaacatgcagatgatcaccagcaacaaaggcaatctcagcttcttcctcttctcctaatcc

SEQ ID NO: 69296 - DNA, 357 bp, Zea mays
  Clone ID: MRT4577_163192C.1
ggggccgacccacgcttccgatgactcttggctcctgccttcgccttctttttcaagcaacaacaaccacgtcgacagggggggttttttaactctgtgacgggcactaacaacggtttaaactcatccacgtaacataaaccttcctcaaaacctgtgcatagcttaacaccgcacctctaaaattttacactatccacctcacaattaaaatcccagtcataaagcgagaaaatcattataattccagccatatacatcaaacacaaactaaaaactaaatggcgtccaaagggtaacattttccaatccaaacaattacttcgcattccacaacattccaaatctaactcaccc

SEQ ID NO: 69297 - DNA, 114 bp, Zea mays
  Clone ID: MRT4577_163193C.1
gcacgtgcgacccgctcgtcgtcaccgatagaggaccgtgtcccgccacgccaagacgagatgctaggccacatattcctgcccatcgcagaagcaatgccgcggcacgaccac

SEQ ID NO: 69298 - DNA, 299 bp, Zea mays
  Clone ID: MRT4577_163194C.1
tttacgtgtcactatgcactatataagagctatgacgccgcggacctcatctttaatcctgtatactgtacagccgtcgcccttttttttttttttttttttttttggggggaggagacatggaaacctacgaggccaaacaaaaatcttagacaaaacttaatgctggttaatataatcaggcccgatggtaaacgttcctctaatgtatgacaacactcaagtttacatattaccatgcacaggacatagtgccacgctggcaagaaaaccagcaggtttggattataacactcctc

SEQ ID NO: 69299 - DNA, 403 bp, Zea mays
  unsure (1)..(403): unsure at all n locations
  Clone ID: MRT4577_163195C.1
gcggggcgctcgcgtttttctttttttttttttgggactctgcctcttaggatccttgggccttcgccgcccttccggcggccccggtttactccagcgcaccgcccgcttggngctcccagctcggtggnctggcgcgtttgccctgcaccccggggggggggctcggtacctgcccgagcggccgcccgggccgcccctccgccccgccccccgccccnccgcggcgtcccccctctccnccgcttgcccgggcctgctcctctgtttggtcggccccccccgcgcccggccttcccccccccnccccccgcgtgcgctccgntcgcctcccgcccccccccccccgcgccggccgcccccccccccccccncgcgcccgcctctgcgggccgccccgccc

SEQ ID NO: 69300 - DNA, 2038 bp, Zea mays
  Clone ID: MRT4577_163196C.1
ccgggcattattatatatatcttcccgcgcccgagattccccgtggatgactcgctgacatgtgggccctctctgcgaacctcgccagcactaatcgagccgccactggcagcatctgaagagaataaaagacagccccacacgcagctcgaatcccggcacgtgagcggcggaggcagggacggccatggcatgcagtgggtgcagctgcgaggcggcggtgggggcgatggcgtcggaggcgtacctggagggggcgccggtgcgggaggcgcgggagctggtggcggagctctgtcggcacttctacgcgcagggatgggtcacgggcaccggcggcagcatcaccgtcaaggtcaacgaccccgccgtgccgctcgccgatcgcctcatcgttatgtcaccctccggtgtgcagaaggagaggatggtagcagaggacatgtatgtgatggctgcagatgggaaagtgctttctgcgcctgtagcaaagccatggccaaacaagcctcctaagtgcacggactgtgctcctctgttcatgaaggcgtatctgatgagaggagctggggctgtcattcacagccatggaatagagacttgcatcgcaacaatgctcatccctggtgcaaaggagttcagagtgacccacatggaaatgatcaaaggaatcaaaggtcatggctaccatgatgaattggtcattcctattattgagaataccccttatgagtatgagctcactgactccctaagtgaggcgattgcagcatacccaaaggcaactgctgtgcttgtaaggaaccacggaatatatgtatggggggagtcttggatcaatgccaagacacaggctgaatgctaccattatcttttagatgcttgcatcaagctctatcagctaggtattgattggacaacccctgaacatggttcaataaacaatccaaggagaccgcacagcattttgagccctgaaatttgtaatggatgtcatgctgctgattcatcaaagtgtgttgtactagacattgaggggacaaccactccaatatcatttgtgactgatgtcatgttcccttatgctcgtgataatgtacgaaaacatctgacttctacatttgattttgaggaaactaaagaagacatcaaactattgcgcatccaaattgaagatgatctacaaaatggagttgctggggctgttccagttccacctgatgagggtggcaaagaagaggttatcaattcattggttgccaatgttgaatcaatgattaaagcagaccggaagatcacatcattgaaacaacttcagggtcatatttggaggattggatttcaaaagaaagagctacagggagttgtctttgaggatgttcctgtggcgctaaagaactggcatgctagtggcataaaggtctacatatactcaagtggaagtagagaagcacaaaggcttctatttggcaatacaacatacggtgacctgcgaaagttcctgtgtgggtattttgataccacaactggaaacaaaagagaaacaaggagttattttgagatctctcagtcactcggcgtggacagtccatctcaaatcttattcatcaccgatgtcttccaagaagccattgctgctaaaaacgctggttttgaggtgataatctccattcgcccgggaaatgccccacttcctgacaatcatggtttccgcactatcaaatcattcagcgagatctgaggaatctggtgatctggacatgtctagatatatgtaattcgcgagtgctttagcccgcggatgccagttcatgcagtagaagcattatagcaccgcagcatgtcaaaacgatgtgacgtaacaataagttacatggcgaaataaaaactttggttcgttgtgtaaaaaaaaaaaaaaaaaaaaaaaaaaaaaaaaatctccttgttgaccagctgtaggtggtggcggcgatcatttttaggtcgcgtttgacaaaaaaaaaaaaaaaaaaaaaaaaaactcgagggggggcccggt

SEQ ID NO: 69301 - DNA, 2153 bp, Zea mays
  Clone ID: MRT4577_163197C.1
atggcatgcagtgggtgcagctgcgaggcggcggtgggggcgatggcgtcggaggcgtacctggagggggcgccggtgcgggaggcgcgggagctggtggcggagctctgtcggcacttctacgcgcagggatgggtcacgggcaccggcggcagcatcaccgtcaaggtcaacgaccccaccgtgccgctcgccgatcgcctcatcgttatgtcaccctccggtgtgcagaaggagaggatggtagcagaggacatgtatgtgatggctgcagatgggaaagtgctttctgcgcctgtagcaaagccatggccaaacaagcctcctaagtgcacggactgtgctcctctgttcatgaaggcgtatctgatgagaggagctggggctgtcattcacagccatggaatagagacttgcatcgcaacaatgctcatccctggtgcaaaggagttcagagtgacccacatggaaatgatcaaaggaatcaaaggtcatggctaccatgatgaattggtcattcctattattgagaataccccttatgagtatgagctcactgactccctaagtgaggcgattgcagcatacccaaaggcaactgctgtgcttgtaaggaaccacggaatatatgtatggggggagtcttggatcaatgccaagacacaggcctgctttggctttagggattaccaaattaaggacttcatttggatgacacttaaattccctgaactagatcatgcctctttcagaagaaaaaatacaatgtatttgtaccatatattcatgggaagtcttctaattcttcagagttttgtgataataataaggacagacctagtgctggctggtgggatctggggaaggaatagccttacccctgcattttgcagggaggctgaatgctaccattatcttttagatgcttgcatcaagctctatcagctaggtattgattggacaacccctgaacatggttcaataaacaatccaaggagaccgcacagcattttgagccctgaaatttgtaatggatgtcatgctgctgattcatcaaagtgtgttgtactagacattgaggggacaaccactccaatatcatttgtgactgatgtcatgttcccttatgctcgtgataatgtacgaaaacatctgacttctacatttgactttgaggaaactaaagaagacatcaaactattgcgcatccaaattgaagatgatctacaaaatggagttgctggggctgttccagttccacctgatgagggtggcaaagaagaggttatcaattcattggttgccaatgttgaatcaatgattaaagcagaccggaagatcacatcattgaaacaacttcagggtcatatttggaggattggatttcaaaagaaagagctacagggagttgtctttgaggatgttcctgtggcgctaaagaactggcatgctagtggcataaaggtctacatatactcaagtggaagtagagaagcacaaaggcttctatttggcaatacaacatacggtgacctgcgaaagttcctgtgtgggtattttgataccacaactggaaacaaaagagaaacaaggagttattttgagatctctcagtcactgggcgtggacagtccatctcaaatcttattcatcaccgatgtcttccaagaagccattgctgctaaaaacgctggttttgaggtgataatctccattcgcccgggaaatgccccacttcctgacaatcatggtttccgcactatcaaatcattcagcgagatttgaggaatctggtgatctggacatgtctagatatatgtaattcgcgagtgctttagcccgcggaccagttatgagcattatagcagcaaaactaacaataagttcgaataaaggttcgttgtcgcaatgatgccagttcatgcagtagaagcattatagccccccagcatggcaaaacgatgtgacgtaacaataagttacatggcgaaataaaaactttggttcgttgtgtatttgcggctcatctacaattggatagtttgcatttccttgttcagcatctgtaggttgtggctgtgatcatttttaggtctcgtttgacaatgcttaacttcacgtaaatcagttttttagcttcagctgttttggtg

SEQ ID NO: 69302 - DNA, 1571 bp, Zea mays
  Clone ID: MRT4577_163198C.1
ttgggacgtttcccggcgtgcacagcaccgctcgatcgagcgaacacaaacccttggtggagtcctctccgccgccgcgcgctaacaacctacgtacgctatcgccgcccgctcgcctcgacgggattggtccggccttcggcccgtcccccccaccacgctcgctccattggcaggcgagaccgtccatcctccgaccccacccgtcggccgccgggatggcggcgtcgggcggggatgcgccggaactcgccgtgataacaaatgcttgtaatgctgcaagcgcacctgaagaaaataggcttgctggtgacagcaacaccatttcagaaaatgcccaggaatcattgagttctttgccagaacaagagtcgaatgatgctagtgttaacacagaaaagaaagaacctggcatttcaaaatgcaaatcagtggacgaaataccaaaaacagtggccgtaaagaggtgcaagaacattgattcaaagaaagtctcctcaaataacaataataatccaagctttactggcagtctggttctgaaaaaacagccagcgaagggaggccatctttttcaattatgtgaaaatggaatgtctcaagacacaaagactcctagcacaaggatatgcataaattcagcatgcaaagctgtcttcaattcagataatgcattttgtaagaggtgttcatgttgtatttgccatggttttgatgataacaaagatcctagcctttggttggtatgctcatcagagattggtgatcaggattgttgtggatcatcctgccacattgagtgcgcactcaagcaccgaaagactggatgcatagaacttggacaatctatacagcttgatggtaactactgctgtgctgcatgtggcaaggttattggaatacttgggttctggaagaggcagctggtagttgctaaagatgctcgtagagttgataatctctgttcccgcatatatctgagtcatagacttttggatggcacaactcgttttaaagagttgcatcggatcgtagaggatgcaaaagcaaagttggaaagtgaagttggcccccttgatggtacatcatccaagatggctcgtggtattgtaggccggctgcatgttgctgctgatgtgcagaaactttgcactttagcaattgaaaaggctaatgagtggcttagctcaaacattcaatctgaaacaaaacaaaatgatacacttccttctgcctgcaggtttaaatttgaagatattacagcttcatctttggtgttggttctcaaggaagctgtttcctcacagtatcatgctatcaaaggctataaactctggtactggaatagcagagaagcacctttcacaggagagcctgctgttttccccaaagaccaaagaaggattcttatatccaatctgcagccctgcacacaatattcgttccgtattatttcatttactgaggatggtaaactgggccattcttaatcaaaagtatttaccaagagtgtgtaaattattcttaagaacacagagctcgaagcataatgttgctcatctcctaccaaa

SEQ ID NO: 69303 - DNA, 348 bp, Zea mays
  unsure (1)..(348): unsure at all n locations
  Clone ID: MRT4577_163199C.1
gaaacccaagcatgggagggttttgttaatggcaaggagcggttggaggcccaccaacaaccaatttcaaccacgaatctgggttcgtcggtacatgtaggttacaatgtctgctgaatacccaacagtaaacaaacagtcctccctggctaccttttatcgctcctgagctctcaagcatggggtcgatggcggcgcattagttcattttattattgtaaaagccgcgtggttgtctgacttctcttggattatcaaatcggggtcgaataaatcccagaccaagcgaaatactatatctnnngttgagagtacctccctaatgatgacctttatgcttttattatc

SEQ ID NO: 69304 - DNA, 524 bp, Zea mays
  unsure (1)..(524): unsure at all n locations
  Clone ID: MRT4577_16319C.1
cggccgcgtgggtgcgggtccacctcgtaaccgggcagatgcctgacggagtcctgacgaaacttcaatctctcctataattaaggcatgcaaaaggaaactagatcctaactttccaaaacttagccactgacggtggcacctggcttggccgcgcactccgcatccctcctggcgtcacgacgacgcctataggtgtgaccgtacatgacactatgaaatcaaaaatctgtgaaaaaacatgtgaaatccggcagtgtggcgggcgcctgtaaccccgcgcctactcacctctagagtactgaccttttcttcctcgacgttgtctctggctatccgcgttcgatccgtagagcagagccgagaaaatgggaaagggacaagatccggtagtggagcagacgtccgacactgccttgcttgcctggcaaggggcgacgcttagctggcagggggttattgctgggaggcangactagggggggcgtccggaccagtgggtggctagtgctgggaggcagggc

SEQ ID NO: 69305 - DNA, 3166 bp, Zea mays
  Clone ID: MRT4577_1631C.1
gactagttctagattgctcgacttaaatcagcattagctgcgaaaaatttaggatcggagcaaatcatcagtcatgactctgaggcatttaatataaagacgccttcgcctggtttttcaaacacacgacagggtagctgtgatctactgtctagccaaagtaacttcagacaaccaatggaggaggatgttggaaacatagaggctagagccaatcatacactgaggcaaaagaaaccaagctttgatctccaggatttattaacagcaagtgattctccttcatggccagatagcaatttgagggtaaattttcagatgggagatgaaagagaagcaattggtggggactggatagataaggttgtagtgaacaacaataattcagccagtgattgggagggtgacaacgcagctttacctgactttttttaccagagatatcattcaggtatgagggagaagcagtaccagaggaacaacatgagacaaaaggatgaccacgagtatgaacagcaaaggcctcgattgtactctacaaatactgatgattctgatgacattgacatagcaacaagtgattcctcagaatcagatgcattatggcagccccatggccattccctggttccctccattagtgagagtggttcaaaggttaagaaaccacaaataaagcttagagatggttcagatgccaggacaccgattcattctcaaataccatcagggtcgagaaaagtcgcaaacggttcgagtagatctgttaggcagcctttaagcagaagcgacagcagaaggctttcatcaaatggaagacaaactggtgcttcgccgccacgttcattgttcccgtgctgttttgccctctttcttctctctgcccgtcccctgtgcttctgaggcaggatctcaaccttcttggaaggcacctgtttagcttggctcatgctgcttctggttatcacaaagttcttgaagaaaatagaaaactatacaaccaggtgcaggatcttaaaggaagtattagggtatattgtagggtgcgtccctttttgccgggacaagcaagtccgtccactgtggcttccattgacgagggcaacataacccttgtcatcccttccaagtctggaaaggaagtacggaaaacttttagcttcaataaggtttttggctcatcagcgacacaagatgaggtgttcttggatactcaaccccttattcgctcggttcttgatggatacaatgtatgtatctttgcatatggccaaactggatcagggaagacatacacgatgagtgggcccaaaaacatgactgagcaaacccaaggtgtcaactatcgggcacttggtgatctatttaagcttgctgaacaaaggaagagaaccttcatttatgatattgctgtgcaaatgattgagatttacaatgaacaagtcagggacctccttgtcactgacggtctcaacaaaaaattagagattcggaataactctcaaaatgggctaaatgtgccagatgcaagtcttgttcgtgtggcatcaacaatggatccacgcgtccggatgaatgttgggcacaagaatcgtgctgttggtgccactgcactaaatgacaggagtagtcgttcccacagttgtttaactgttcatgttaagggaagggatctgacatcagggacaatccttcgcggttgcatgcatttagttgatcttgctggcagtgaacgggttgataaatcagaggtcactggagaaaggttaaaagaagcacagcatataaacaaatcattgtcagccttaggggatgtaattgcttcgcttgcccaaaagaattcacatgtaccttacaggaatagtaaattaacacaacttctccaagattcacttggaggtcaggccaaaaccttgatgtttgttcatataagcccagaaagtgatgctgtaggagaaaccatcagcaccttgaagtttgccgagcgtgtgtcaactgttgaacttggtgctgctcaactaaataaagaatctggagaagttagagagcttaaggcgcagattgctcaacttaaatcagcattagctgcaaaagatttaggatcggagcaaatcatcagtcatgacactgaggcatttaacataaagatgccttcgcctggtttttcaattaagcgacagggtagctgtgatctactgtctacccaaactaacttcagacaaccattggatgctgttggaaacatagaggctagagccaatcctacactgaggcaaaagaaaccaagctttgacctccaggatttattaacagcaaatgattctccttcatggccagatagcaatttgagggtaaattttcagacgggagatgaaagagaagtaattggtggggactggatagataaggttgtagtgaacaacaataattcagtcggtgactgggagggtgacaatgcagctttacctgacttcttttaccagagatatcattcaggtatgagggagaagcagtaccagaggaataacacaagacaaaaggatgaccatgagtatgaagagcaaaggtctcgattttactctaccaatactgatgattctgatgacattgacatggcaacaagtgattcctcagaatcagatgcgctatggcagcagctcaatgtccaaagcatggataactctattagtttgagcggttcaaaggttaagaaaccacaaataaagcttagagatggttcagatgccaggacaccaatccattctcaaataccatcagcgtcaagaaaagttgcaaacggttcaaacagatctgttaggcagcctttaagcagaagcgacagcagaaggctttcatcaaatggaagacaatctggtgcaaagtagggacttacaatgatcgtgtgcattttttgcctttttctcagtgtttgtcacgagagattgtgaggatgttcttgagtacagcaatgagtgacaataaacccgattgattgtgtcagtgtggtgagttgtgatctcaacaactggtgtgtgaggccattaacctttttttttccttattggccttcaggctatgttgagttatagctagttctttgtatcttgttcataatataaatttatataatgaaaagaaagcaaatcgattgatcaaaaaataaagt

SEQ ID NO: 69306 - DNA, 195 bp, Zea mays
  Clone ID: MRT4577_163200C.1
cacaggaagagctcgccctccggtcatggaaagccatgaacagcgactcttagtcgacggcgcttaagttcttcctgaggatctgttaaatcgcgcccaatcccaagtaggcttactagttaccacccgataatgtcgactacccgcttttggaactcccaaggtgacgtctcttaccctacgagcatgctttta

SEQ ID NO: 69307 - DNA, 119 bp, Zea mays
  Clone ID: MRT4577_163201C.1
aggggccgccccgacgggctcgagctataatgtaatggagccgttgacttgctacctagctcgctagtttactcatttagcggtgatgattaacgttttgtcacccattaccatgggtg

SEQ ID NO: 69308 - DNA, 248 bp, Zea mays
  unsure (1)..(248): unsure at all n locations
  Clone ID: MRT4577_163202C.1
aaacccgggccgacccacgcttccgaccctacaagatccactcttccgaacacgtgcattcaaccncatacctcttctatgggccgccgtaaattaaataaactgccgcgcccaacaacacccacaaaactgaaaaaaccttgcctttacccaacttaatatccttccaaaacacccccttttgccacctttccttatatcaaaaaatcccctacctatcacccttccaaacatttgctcacccttaa

SEQ ID NO: 69309 - DNA, 438 bp, Zea mays
  unsure (1)..(438): unsure at all n locations
  Clone ID: MRT4577_163203C.1
ttttggccacccggncggcgagcacccggggggggggggggtcctcccggcggcctcgggccgtggcgcgcgcgagcgcgtcctggtggacgtggacttccggtcggcggacgaggccgcgcgacccaccaaggaaaactttttttttgcgtcgattttttgccggncgggcacgttggtggggggggggggctccacctcctcattccctcttttcttttttgcgggggggggggggcctctctaagcgaggaaggaatctccttcctctgggtttgccctcgtccatgcgcgccatgtggctctccccctaccaccgctaggcgccggtgttcgaagaggcgggctccgcctcctctgtcgatgtctaggggttcggtcccgggaccggatccgtcccgtgacaactggacactttaaattttttttttttttttt

SEQ ID NO: 69310 - DNA, 305 bp, Zea mays
  unsure (1)..(305): unsure at all n locations
  Clone ID: MRT4577_163204C.1
aggtaacaaacaccacttagcagcaggctcttgcgtccgtcttgcccttttgcttccgcctcctgcccttaaaatctttcaccaccccctcccgtcgcggtcaaattggcgatcctcgtttggggagggccaagaaaccagagctctctctccgatgcccaccaacgtcaggtgattgaggaacgttggtgtttctggataattggagatgtactcaggccagcaatctgatcaaggtcctagtgcaaatagtggcagagaattctccgaggcaaattggaattcttacacaatgcatcnaaaaa

SEQ ID NO: 69311 - DNA, 318 bp, Zea mays
  unsure (1)..(318): unsure at all n locations
  Clone ID: MRT4577_163205C.1
cggacgcgtgggtggcttctgagtcctatggtgctgttacgatggtcacctctctggatatgctaaactggttgtgccctgcaatgtagcccggctagaagctcttctgtttgaagcgaaaagtgaatgggctgaagctgaaagagcttacacgcaaatcctggaaatcaatccatttgaccagattgtccacaagcggacgcgtgggcggtgagaacgaaatccagcattcctggtgcacaacacagcacaggcagcagcgtacctagaatgccgncgtcagccggcggcaaccctgcgagcgacagcgccgcgggc

SEQ ID NO: 69312 - DNA, 351 bp, Zea mays
  Clone ID: MRT4577_163206C.1
agagtgtttcgcgcaaagaatccccatgcatacaaacagggtagaggtagagggagatgagaggagaggagaggataggagaggttgggtctgggacaccatgatctccgattaagctgtacggggcggtcatgtcttggaacgtgactatgtgcgcatcagtgctggatgaggctgggtccgactacgacatcgtgccgatcaacttcggcaccgccgagcacatgatccccgagcagctcgtccgcaacccgtttggtcaggttccagctctgcatgattgtgacttgtacctcttcgcatcacgcgctttctgcatgtacgctgttcgcataaacaaggcaaatctgt

SEQ ID NO: 69313 - DNA, 177 bp, Zea mays
  Clone ID: MRT4577_163207C.1
attgccggacccacgcgctcactacttccggggtcgacctttttttccttttcttaaggatactcgacgggcaacatctttgtttcgtccgtttcgccacaacacaactttccgatagctaaaccaaaaccaccggcccttatccctatacctccacctacctagtgcggttccggt

SEQ ID NO: 69314 - DNA, 417 bp, Zea mays
  Clone ID: MRT4577_163208C.1
ctgaaaattatgagatggtcgagaagttgaggaaggaaatgtcggcgatgggcacttagagcatgtctagcagctcaccaaaaaaaagggagagctattggggagctgttggagcaatggaattgcctcatctcccccaatatgacagttttatggggatgagggatggtattggagagctactggatgctctatcggatctgatatttggcttggatattgcacagtgatgcatggatatcaacctcaccttattgcagttgagaactatgagtggtgcaacaaattctgaattggttgaaggagatctctcctatcactatcctggagacggatgttggagaaatatgactgctggatctgtaattaggataatgtcttttagtcgatccctttttgtgcttgtttgttgaactt

SEQ ID NO: 69315 - DNA, 151 bp, Zea mays
  Clone ID: MRT4577_163209C.1
cggcggacagggcccaggccccaggggaacggagtgcgcgcatggccggggtagactctcgagcgcgtacatggcaggatgacaacgggattagtgctagttcagaaacacgtacagggtaactggacgtctaatgttgtgtgatgtgtta

SEQ ID NO: 69316 - DNA, 211 bp, Zea mays
  Clone ID: MRT4577_16320C.1
agctctctttcagagacgggctgtacgaaagagtaaatatgattctggagccggagattagttgaagacagcccgggaaaacctccgttgcggagtgatttatcattcgtggagatgtactgacccaccgcaagattcgtctgaaaagctgatacatcaaatgcgagaaaagaacatatatttcattgctcttcacctgggatttgaacct

SEQ ID NO: 69317 - DNA, 1083 bp, Zea mays
  Clone ID: MRT4577_163210C.1
gcccgtgcggtcgtcgtggtggcgtgttctcgtgggcgcttggtgctggcggcaatcagactccaagcagagatggctggaaaaggattcactgctggcagcgaggtgtactatgcatttattagtgcttatgagaagtctgaaaattatgagatggtcgagaagttgaggaaggaaatgtcggcgatgggcacttagagcatgtctagcagctcaccaataattcatccctaataaaatggtattggtggtcaccaatagtgctttttttggaatattggggagactctatagtagattaccaataatctttcccaatacatgggacccacatgtcagaatagaggatgtgggaggaagaagatgacgacagttgttgtggtcccaacacctatagagggagatgcaactccccttttatttgaggggagatgggagatttgttttggtgaccaccaaaaaaagggagagctattggggagctgttggagcaatggaattgcctcatctcccccaatatgacagttttatggggatgagggatggtattggagagctactggatgctctatcggatctgatatttggcttggatattgcacagtgatgcatggatatcaacctcacctaattgcagttgagaactatgagtggtgcaacaaattctgaattggttgaaggagttctctcctagcactatcctggagacggatgttggagaaatatgactgctggatctgcaataggataatgtcttttagtcgatcccttttgtgcttgtttggtgaacttgtgtccccaatctgttgaactctgtaaacatttgctttccataaaagcagagatattctccttaaaaactcagtccagaatggtgatatatgaatgatccctgagagtttataaggtacaaccgtacaagtccaggtgctagagacttctcaatttgctggaaaatgctgtagtattttgtgttgacttgctgtttgatatatgctcagtacctcactgtaaaatgtggttctcttgtttgcctcttaacaaaatcctgagaaatgacatgagaacaaattgagaattagt

SEQ ID NO: 69318 - DNA, 301 bp, Zea mays
  unsure (1)..(301): unsure at all n locations
  Clone ID: MRT4577_163211C.1
acctctacaggacaaatgattggtgctgtaaaatgcagcatttcacaccttactagcattctttgtcttttctaccaaatattaacaactttcaattccgttttcttaattctgttctactaatgtccgatttactactcatcatttttcttgacacttaacattgctttaatttgtaattgctaatggtttttgaactcttctaattgtaatggacgtgtttatcattttaatttagcattgaaattgtcttgatgttgattaagatgttacgagcanaaattctaatacgcattttttt

SEQ ID NO: 69319 - DNA, 115 bp, Zea mays
  Clone ID: MRT4577_163212C.1
atcgcggtaagcttaccacctaggcaccggcggacccgccagtccgcccctgcatccagtgatccagtcaatcgcggacgcccgcttggccgcttccatgggttccatgaggcgg

SEQ ID NO: 69320 - DNA, 190 bp, Zea mays
  Clone ID: MRT4577_163213C.1
caaacgttcacctacgctggtgcactgtcgtctaccgacacctagagattgatctcgactaggaacatcattctgtggtgactgtgtagctggtagctataacctacccgaaacaggtatcattatgtacgtgtggacccttgcctgactatctgataagttgactacgaacaccttcattaatgatcac

SEQ ID NO: 69321 - DNA, 302 bp, Zea mays
  unsure (1)..(302): unsure at all n locations
  Clone ID: MRT4577_163215C.1
acgggagcacgcggnaagaagctgaggctgaccaaggagcagnccgcgctcctggaggaccgcttcaaggagcacagcaccctgaacccggtacgtagtactgtacccctgcgtgcgcgacacgttgggcgtgactcactgacttcggtggggtggcgactggttgcttcgctgcttgctacgcaccagcaccacaaaacggctgcggcttcgactgcacttgccttgcctagttctacacctcgatgaattactagtcgactggctgccttcatgggtgattattactacagccccacaca

SEQ ID NO: 69322 - DNA, 225 bp, Zea mays
  Clone ID: MRT4577_163216C.1
aatccgggggatcggccaagtacaaaacgggcctactccacgttgtggcgtcccaacggtcgagagttgcactcaactcctcttaagtgatccaatgatcaacttgaataccacagtgctatgatttttttttcttatccccttcgggaggaatctccacaacttggaagccttttgcccttacacttttgaatggtcaacaaaaaatcaccgggtaaggaaggg

SEQ ID NO: 69323 - DNA, 590 bp, Zea mays
  Clone ID: MRT4577_163217C.1
gcctacacctggaactggagcaacattacttctgtcatttccctttggttaaaacgggtcccaggtgtttcagataagggatactcaacctatactacatagtgaccagtaagaaggaaagtgtattttatctcaagttcatgcttgatttgactacatggctgcggctctccacagctgggtgctgcctgggtcccatgctgggcagtgccttttgggcaccagcatttaattttcacacttgcatgggagccctggcaggacttcacagttctcagacagccactgcctgcccacacactcctgatcccagtacttgctgagtgattctagggctggtgactctggtactgtgtccacattgcctcctcttgggtgacagagacagaacatgttcaattaagagactcttggcaacagcccatctatatcagcaattgttgatgctcagatcattgtcatgtatctcctttgtcaatgaacaaatattactgcgctactgtacactgggtactgtgctagaggctgaagatgtgatgaactcaacagcaactgacatgccacttgtagctcttaaacctttgtcctaa

SEQ ID NO: 69324 - DNA, 311 bp, Zea mays
  Clone ID: MRT4577_163218C.1
ttttattcccaacccaaccagggtaagaaaccctaggagccacctaggataccccaaccctggtttttaaagccaaaacccggaaaaaaacttgggacttttcgactgggccccttaggggaggcaaggttttttttattggtgggcccctttgacacccccttaaaaccatgaacaaacccccccccggcgggaaaaccttaaaaaccttggcctcccaccaccccccaaaccaccatatggtaccggtttaagcctcccaatttattaaggtgaagaactttttgggggaggcgggggtcaacccggga

SEQ ID NO: 69325 - DNA, 2159 bp, Zea mays
  Clone ID: MRT4577_163219C.1
agccggccgggaactgttttcaatcttttagtccgcacgcggctatcctcatcagtcttctccgcttttccccccatctccttctgggcgcaccaggaaaaaaattgatacattcctcggcagctgcgcgagtcctctgttgataccccggcgacccaaagcccccgtccgagcagcagcagcagccgccgcctaaaagtaacaggattggggattttttttttgcttcgtgttctccttctcctgctgtaggcgttgattcgggtgatgagagatgggcttcttggcgtgcttgtgccgatgccctcaggacggggacgacgacgagaaggagggggagcagttcagaatcaaccaccaggtcgcctcagtggactacccaaaatcttctgaaagcagcccattgaaggctgagagagtggttcatatggacggagcgcagctaattggtagacatgatgaagcaacaatcttcacgttgcgtcagcttgctgaggctaccaataatttcaggcaggactctcttttggggcgaggtggattcggttgcgtctacaaggcaactcttagtaatggacaggttgttgcagtcaaacaacttgatctaaatgggcttcaagggaacagagaattcctcgtggaggttctcatgctcaacctcctgcatcaccataatctagtcaatctgcatgggtactgtgttgatggcgatcaacgcttgctcgtttatgagtatatgccattgggatcactagaagatcatctacatgatcttgtacctgatcaacaacctctagattggaaaacacggatgaagatagctgctggtgcagcggctggtttggaatacctccatgataaggcaaatcctccagttatttaccgagacattaaaccatcaaacattctccttggcgaaggctatcatgcaaaattgtccgactttggacttgctaagcttggtcctgtaggcgacaagactcatgtgacaacacgcgttatggggacacatggttattgtgctcctgaatatgccttaactggacagctgacagtgaagtctgacatctatagttttggcgtcgttttccttgagctaattacaggtcgaagaccacaagacagtgatcggcctcctgaggaacaagacctagttgcatgggctcgtccattgttcaaagaccaaaagaagtttcgcaagatggctgatccttcgttgtgtggccgcttcccaaagaggggtttattccaggcactggctattgcagcaatgtgtttgcaggagaaggcaaaaagccgacctcccatgagggaagttgccgcagctctctcttatttagcatcacaagcatacgacaggaacaacaacgctgctgctcatcgtaatcgtgccgggccttcaacaccgagagttctggacgaccagattggccaggacgcctgcacattagctaatcaacagggagctcagatgtccatgcatgtcgggacagaccacgccatgcctgaagtgaaggaagcttcctgtagtggttcacatcgtggaggacggggcagggttaccccgaatggcgctgatagggagcgtgcacttgcggacgccaacgtgtgggccgaggcttggaggcgccaggagaaggcaagcaagatgcgatagcgaccagagcctgactgcatgagttttgacatgtcactgcaaagatgcttactttgcatacattttgaaagagaactgtgggctacacgaagggttgttagaatagaaagaggaataatgcgcagtggaaatgcagagcttcaccagagtgagcgcttcgaagatttcaccggtgaatctacagtactcagacttgtttcagtgcgtacatggatttagcttactttatacacagacacttcacactccatagatgcatgtaatagctcaataataggcacagtagactacacaatctgtctgtagttcagcggttttggaaaattaataacataggatccgccgttaggttgcatgaaatgctatgatccgttggcgggtcttgcattctctattgggtcaacgtctacatatttgtacatcgttcaaccatttacatgatgaaatatacaattaagacttctaagttggtactgttaaaaataattatgatactgaagac

SEQ ID NO: 69326 - DNA, 556 bp, Zea mays
  Clone ID: MRT4577_16321C.1
agatctgtactccgtatccatcatctccttgcttagtgggcactcaaagtgttgctcaaacaaatgatgattcatcgatagtggctgaggcgacagctctccaagtttcgtctgttcgctcgtggtggaaattccgctgagcgagcgagtgaatcctcctcttcctagccccggcgtgaggagcgccggcgatgtcgaccggcggcaggaagatgaggacggcgtgcgtgaccggaggaaacgggtatatcgcctcggcgctcatcaaggtgctgctggagaagggctacgccgtcaagacgacggtcaggaaccctgatgacatggagaagaactcccacctcaaggacctgcaggcgctcgggtccttgggggtcttccgcgccgacctggacgaagacggcagcttcgacgacgccgtcgccggctgcgactacgccttcctggtcgccgctccggaagaaatgatcgagccggccgtcaggggaactctgaacgtgatgcggtcgtgcgtgaaggcgcgcacggtgaggcgcgtggtcctgacctcgtcggc

SEQ ID NO: 69327 - DNA, 389 bp, Zea mays
  unsure (1)..(389): unsure at all n locations
  Clone ID: MRT4577_163220C.1
cctccgcttcctcctcctcctcctcctgcccctcccccacccccacccgtggggacgcctgccacaatttcacctcggcgggagccggatggggcctgtgcatgccgggggggacggcctgcacgaggctctgctggatgtgtggtgagcgcatgcatgcccaacaccgctaacatgtgcacgcgcatgcctgcacactgggatggaggtgacctaaggcgtcccacaccaccccgccgccgnccacnacccccacggcnccacctaccaccacccgacgagcagccacccaggaggcccccctcaaacaagccgccnggggaaccccccgcccccccccccggcccgccaaccacatacccgcgcatgcgctggcccccccaccccca

SEQ ID NO: 69328 - DNA, 120 bp, Zea mays
  Clone ID: MRT4577_163221C.1
attcccacgacacgtgctccctctgcagctctcccgtgggctagctctacgcgctgccgcaggaggagacctctggctcgcatctggaattacacgtgttcaccaccaacgtcctgttct

SEQ ID NO: 69329 - DNA, 176 bp, Zea mays
  Clone ID: MRT4577_163222C.1
ccctagcacaatgggttttggaacacgcgtacatggtactgaactggataaagttccatcaccatgcttgtgcaaagtgtgaacagggggggtgcgtatttattagggacatacgcgtatactcgcttggcccacacgccccaacgagatatgaatgtagttctagatttgcgaca

SEQ ID NO: 69330 - DNA, 567 bp, Zea mays
  unsure (1)..(567): unsure at all n locations
  Clone ID: MRT4577_163223C.1
gtaacatgcttgcntcttcgccattctcttgctctccattaacatacactttagcgttgtcacatcccgcaaagatccttcattctcgggaaaagttgaagagaagataccgggcgggcacaagactgcacacgcagctggatccgaagaaaaggttttactgattggacccaatatcctgctccgtccgcggcccatgccaccgtgcaagagaaggtgttactgatttggccaaaatggcattctgaaattgagatttacgacatccggaatcagtaaaactatatgtgtgattggtatttcggttatcaacgaggcttgacttttggtgtttccttcaaataaagcttgcccctggttttaatattagttacttcaattatcatgtaatcagaaatcagacaatatggtgcaattgattgcaaaactgttcgtttggaaaaaaaaaaaaaaaaaaaaaaaaaaaaaaaaaaaaaaaaaaaaaaaaaaaaaaaaaaaaaaaaaaaaaaaaaaaaaaaaaaaaaaaaaaaaaaaaaaaaaaaaaaaaaaaaaaaaaaaaaagggggg

SEQ ID NO: 69331 - DNA, 122 bp, Zea mays
  Clone ID: MRT4577_163224C.1
gactcacgggccgacacaagcgtctacagacagtcaaataaaagcagtacagtgtgacgcgatatacagaaatacaacgagtgtcagactgtgaaataaaagcagtacagtgtgtttcttgc

SEQ ID NO: 69332 - DNA, 258 bp, Zea mays
  Clone ID: MRT4577_163225C.1
aggaaacacgtcagacattcttttctttttactaaccaagacaagggagtttcttcaataggcaaaggcagaatgtgtttcgtctggggccaaagtaagatgtgacacgagtgtctgctcagagagacagactggtcgatttttttaccacacccccactaaaagttgcccgggcgggcacctgactcgccgaggactctcagccaaacattatagaaaatgggggcacccttttccatgattccttggatgtccaac

SEQ ID NO: 69333 - DNA, 139 bp, Zea mays
  unsure (1)..(139): unsure at all n locations
  Clone ID: MRT4577_163226C.1
ggtcaaattttattagcaattactaatataagtaatactcacccattaagcagtagaacaaagtaacaacatcacctgcaatgcgatgcattatgacaaattgcaattttaaaaggtttttnccccccccttttttttt

SEQ ID NO: 69334 - DNA, 409 bp, Zea mays
  Clone ID: MRT4577_163227C.1
cttaacacaactgttactacccttggtttatggagccatgcgtttgccacaagtttaagttttgtcttttggcgggggcacaacaaaaaaaacaggtggacacactgctttttttttgcagcgcgctgatcatccgtctagggggagaaagcttgcaaacatgtttactccccaccctcaggaagggcccccgggcctattggaagccccccagggactgagcctaggtgcttgcccctgtatttgcggcaacaactgagccaaatataccctgactggaaccagctggggcgggaggtccttcgggaggtaccggcgccccttggacagggggaggggacgccttagggggggggaactggccaaaaaaaagtgcctatgtattctacccagcgcccccttgacctcc

SEQ ID NO: 69335 - DNA, 258 bp, Zea mays
  Clone ID: MRT4577_163228C.1
cggaaagaagcagccacgcagaacgacgaagctagcttcgactcaaatcaggcaaaggggaggactagatagaccttggcggtttaaattgcttatagacaaatgttcaagggcatgtatgtaattatacctgggctgcgtcccgtacctagactctctcgcattcacgccttcgagcaagtcaaatgtatcaatgtaatattaatattggtaaatattcatttatgttttatagaatgcaaatataaatgaattaat

SEQ ID NO: 69336 - DNA, 552 bp, Zea mays
  Clone ID: MRT4577_163229C.1
atggcgttgctgatggagcccggcgctgagcccctgactgagagcgagcaggccgacctggccggcatcgccgccatcaaggagtcggcggcgcgcgaatacaaggagcaggggaaccagttcgtccggatgggccggaggcactacgccgcggcggtctcctgctacacgaaggccatcgctcagatggagcccctctcctccctcgacgcatcagccgctgctgacgcctccgttctcttcgccaaccgagcacatgtcaacatcctcctcggtaaccaccgacgggccctcgacgacgccgagcaggccatccgcctctctccctccagcgtcaaggatcttgctgctgctatgggaaagagaggggtgaaacttgggaaggcagcctatcaagagctgacaggggtaaagaagccagtgctggatgagcagggcgtgctccactggcctgttcttctgctctacccagaggtcatgtcgagtgacttcattgaggattttccagatacagatactttctcgccccaccttgatgtcatatcctcctga

SEQ ID NO: 69337 - DNA, 1409 bp, Zea mays
  Clone ID: MRT4577_16322C.1
ggccgggacatttaccgactagtagatttctgatgagatgtttcatggatcagcagcgccatagaaatcctacactttgctacttcagccaggcctatgcgcgcatgtgcctttactttactgtcgctgttggaggtagagacggtggttgtgattgtgaatcccacccaccacggcatcgccccggctgaccacgatttggttccgttctgattctgaatccctcccagacgacatggacaagaactcccacctcaagggcctgcagcagctcgggccgctgacggttctccgcgccgacatggacgaggagggcagcttcgacgacgccgtcgccggctgcgactacgccttcctcgtcgccgccccggtgaacctctcggcacaggatccagagaaagggcagatcgagccgtccgtccgaggcacgctgaacgcgatgcggtcgtgcgcgaaggccgggacggtgcggcgcgtgatcctgacctcgtcggtggccggggtcaccatcagggccgcagctgcaaggcgacgggcacgtgctggacgaggagtcctggtccgacgtcgagtacctcagagcccacaagcctgcaggcccctgggggtacccggtgtccaaggtgctcctggagaaggaggcgagcaggttcgcggaggagcacggcatcggcctcgtcaccgtctgccccggcctcaccgtgggcgccgcgccggccccgaccgcccgcaccagcgtccccaactgcctctcccttctatccggcgacgaagccgcgttcgccgtgctggacgccatcgagagcgccaccgggtgcctgccgctggtccacgtcgacgacgtctgccgcgccgagctgttcgccgccgaggagggcgcggcggcggggaggtacgtctgctgcggcctcaacacgaccgtagccgagctcgcgcgtttcctggcggacaagtacccgcagtacggcgtcaaaacgaacctgctctccggcgagcggcttgagaagccgagagtgtgcctgtcgtcggcgaagctggtgaaggaaggtttcgagttcaggtacaggacgctggatgacatatacgacgacatggtcgagtacggcaaggccctgggaatcctgcccgacttgtgatgctgcttgcttcctctgctctcggccggccatcaggactgtactttaaaccgtccagcaaaataagtctattatggcaaattttcaagggatttcaatttttctacggaaaaataaactaatttcattgaaaaatagaaatctcttgaaaaattaaagtttctaaactagctcttatgctgctactgtgccgaaccataattggaccttaaaaaaatgtcaagaaaatttgtctaaaaaaaaaaaaaaaaaaagggcggacccacgcgtccg

SEQ ID NO: 69338 - DNA, 1598 bp, Zea mays
  unsure (1)..(1598): unsure at all n locations
  Clone ID: MRT4577_163230C.1
ccgcagtctccgcacatttcaaaagtttgtagatcggcagtctgagttagtccgagtttaaggatagaaaatgtattttgtcctctttgggttagaaccagcaagaggagtcgtgaatccgtgacaaccggcggcggcgagggaagaatcgaagatcgccgcagccgcaaggaaggaaaccgagaacaactcaatccgctggctatggcgttgctgatggagcccggcgctgagcccctgactgagagcgagcaggccgacctggccggcatcgccgccatcaaggagtcggcggcgcgcgaatacaaggagcaggggaaccagttcgtccggatgggccggaggcactacgccgcggcggtctcctgctacacgaaggccatcgctcagatggagcccctctcctccctcgacgcatcagccgctgctgacgcctccgttctcttcgccaaccgagcacatgtcaacatcctcctcggtaaccaccgacgggccctcgacgacgccgagcaggccatccgcctctctccctccagcgtcaaggcgtactaccgagcagtgaaggcggcgcttgcgctggacttgttaacggacgcggcgtccttctgcaggaaggggctcgaacaggacccccctaacgaggaattcaagaaactgttgtcggaagtggattcaaaactgagagagcaagatcgtcagagagcgaaggttgcacaagcaatcgccaaagccaaggatcttgctgctgctatgggaaagagaggggtgaaacttgggaaggcagcctatcaagagctgacaggggtaaagaagccagtgctggatgagcagggcgtgctccactggcctgttcttctgctctacccagaggtcatgtcgagtgacttcattgaggattttccagatacagatactttctcgccccaccttgatgtcatgttctcagaaacttctccaccattgccatgggatgataaccatgtttacacaagggactcaatcgaattatattatcagggtggttttggcaaacctttgtcccgaagtgaggtattaagatatcttctagaaggcaatgtagattcgaaggcgcttccagatagccttcttgacggggaagacgaagaacatgacagtaccaaatgtaccactgttacatcaactgatagctccagtaagtggatcaaggtaaaagaaggaaaaacacttcaggaggtgctgcaggataaaggctatattgttcctgcaattcctgtgttcttcgttgtttcaaggaagtccacattctataaagacttcaaggctggaaactggtctttgccatgaaacagaaccggacactaaggttcagcttaaatcgatctctgagacgggcagcggatatggcaagaaagcagaagatgccctcttgtgatcatggtcatttggtttaaaaggagtgtgcttttttcagtgtctgcagactgacagccttttgttaccgagatagacagaaaagacgaggcaatgtaatatgaatttttatgtgaaccgattcagcgtttagcatggtcgtagtatgttaagtctcggttgaaacgttggtgtttctaanaaaa

SEQ ID NO: 69339 - DNA, 208 bp, Zea mays
  Clone ID: MRT4577_163231C.1
ccggctcgacccacacgtgcggcaacttggatatgttgttcacaaacctttttatatatttataggcgtggaaaacttaggagcagctttctgcctcgatccccatgtgcctgggagcattgccaaaagaaattacttacccactggatccgtacagtctgagagcctagattggcctaaatattttcccaaaggaacataaagattt

SEQ ID NO: 69340 - DNA, 1332 bp, Zea mays
  Clone ID: MRT4577_163232C.1
tctcactcctatccttctcgccttcgactgcccagagcgcccagcgcccgcgaagcttctagaacacgcgacgcgggcgagcgagctggcgggtgggcgaggcaaaactaaggaggcgggaggagcggcgatgcggggcaggtgacgctgcggcgcggcgtgggggatggtggcggcggagggtgggcccggcggggccgtcgaggagggcgtcggggagagctcgtccccgccgcgcgaggacgctgccccagcgcccgccggctccggcgggagcgggggcagcggaggcgcccgcgaaatctgtgcccaggtgctcgaccgcctcgtcgccgacggctacgcggaggcgtccgaccccgagttccgcgacaggctcgccgcccatttcggccggctcccgcacagctatcagctggatatcaatgttgacaaagcatccgatgtcttggtccaccagaacgtcttagcagaagcaaaggatcctgataggcgccctgcattctatgtccgtttcttgaggattgaagatatggattcagcatacgactccgatgcatctgaagaaggggatgatgatggtgatgatctctctgtaagggagacaccccacagtgctacatagaagaggaaggaaacaccgccgccgccgcgccttccattccagtactcgcggagctgagcccgtcgctggtgatcagcctgagcacgggcgtgtcgctcttcctgggccgcttcgtcttcttcaacttccagcgggagaacgtggcgaagcaggtgcccgagcagaacggcaagacgcacttcgacgccggcgacgagcgcgccaaggagttctcgggcctgctcaagtccaacgaccccgtgggcttcaacctcgtcgacgtcctcgcctggggctcgctcggccacatcgtcgcctactacatcctcgccacctcaagcaacggatacgaccccaacttcttctgagcggccggctgcgggcatgttcttgagcctgcctgtattctactccgtgtgtgttgagccatatatctgatgctcaaggattggttaatttgaacaagtggtgcaactgcgcgtgtacatggatttgctcttcctctatgtctctgtctctctgtctccggttactttccctgtttcactatgccatgcacatagacattgccatgttctgctgccagctcagggcttgtgaataacacatacataaggagagcagatgtctgatagcatacaatagcataatgaaacaccggcaaggggaaaagaaaaaagcagaaatagcatttccaggatctagggaaccaaggagtagttttgcgc

SEQ ID NO: 69341 - DNA, 312 bp, Zea mays
  Clone ID: MRT4577_163233C.1
gacctggccatgccaggtcgagctgcctgcatcctatttcatgtccaaacgcacgggtggatcacaggctacgcggctgttaattaatctacatacgtctgccttcaattactgaatctgcacgttgatacccatgatatgtcagactggtcaaatgagcttttcacaaacgaagtcctgatctgatttaatcatagatttaatgccatactcgtgtatctacttatacactttgtctaccactaaccacctttgtttgccaatgctctactgctctctatactacttatatactgtaacgagaacatgcgt

SEQ ID NO: 69342 - DNA, 293 bp, Zea mays
  Clone ID: MRT4577_163234C.1
taccactcttccgcccactcttccgatatattaaaaaaaaaaaaaagaaaaaaataaaaaagagaaaaataaaaaaaatataactactaataaaaaaaaaaaaaaaataaataaaatataaaaaaaaataccaaacaaactctaaaaaagattctctaaaatacaaaaaaaaaaaaaccttatttcataaaatcaacagagttaatatttattacgactacatgcatattcatctcactcatctaaaatgctattacctgaactccctgcaattaatgcagcttatctctatt

SEQ ID NO: 69343 - DNA, 358 bp, Zea mays
  Clone ID: MRT4577_163235C.1
ggtgacgcacgcgtacggagggattcgatgccgttagacgtaggcgagctcattcttcggcgttttcctttctccctctccgtcctatagcgaccgaccaacgcgtagtgcgaagatgtgagaggcagacgcccgtgtactagcacctgacgggcgagaacgaaggccaccacctcacgagggagggcatcgttagccacgacggcgcctcccgagctgagagcagcgcattgcccgagttcatgcccgttgagaaggctggcatcatgtaggatttcgacgagcctgagcacctcaccccgtccggactgacactgggaggctcctagtacatggtcatccaatgcgttcctggagc

SEQ ID NO: 69344 - DNA, 488 bp, Zea mays
  Clone ID: MRT4577_163236C.1
tggagaatctttagcaacagctatgcgcaaagtttcaagcttatctgttttgatgccagcattccctgcatgcatctcaacataattcaaccttgatcttccagacttgacaaacattcaagcatacaactaacaagttctggcagatgaggacgaagtgcaggaccagcacccttagcaagcttcatgaccaaactaatagcagctttttgaacacttgatactttactgagtatgccctcagaaagcaagtatggcagcacaatgttcatcgtttcgtttgcctcagaagtagaagttagtgatatatcacagagcctaattgtcaatgagcttacagctcggcacaaactgtcaccggcagttcgcacagtttcctttatgtcatccatcgcacggaaggtggttgtccatattttcctcaaatgtttacaaacctgactatatcttcgaccttggatgatgtctgcaagagcacgacagcaacg

SEQ ID NO: 69345 - DNA, 611 bp, Zea mays
  Clone ID: MRT4577_163237C.1
cccacgcgtagcgagacagcaagcaacatagatagtcgactccattagcaccattggagcaacaatggcgaccaagatattgcccctccttatgctcccagctgttgctacatgtgcagctaacgcgacatgcttacatgaatgcttacaagctcctatagcttccctccttccatcataccttgcatcaattatagcttaagtatgtgaaaacccatctctgcaaccatataggcttgaacaaggaatcgtagcaagctacatacctttatcgcccttgttgccagaacaatcaccagccctatctttggtgcagacattggtgcaaaccatgatggcacaacagctgctgcatctcgtgctacctgtgatcaaccaagtagctctggcatacctttatccctactattagcaacaacaattccttccattcaaccaactgtctacactgaaccctgctgctcatctgcagcaacaactattaccatttagccagctagctactgactactatcagcaacaacaacttctatcatttaaccaattggccgctctgtatcccgctgcttatttgctgcagcaaattctactgccatttagcgagctagctg

SEQ ID NO: 69346 - DNA, 650 bp, Zea mays
  Clone ID: MRT4577_163238C.1
aattttcgtcgacgtcatcttgagcttctgcttgatctgacatcaagatagagacatagaagacaatctagtaaagacgctatgtacgtggtcctccatcgaagatgttgacaccgttcgctgcacaacagcagcaggtgccacacgagctggcggctccgggcagccagacggcgtcacccaacacgaaggcttcacagctggtgaccagcttcttgacctcctcccagacgtgcgtgacagcgcagctctcaaaccattcgcacctcgcctactcacacaccacccaggcgctcctccgccccaagtccttctggtactaaggacaaggtgctctgcctgatctaggcggtgctgggactcactacgcctcctatgagacataaacaccgcatggcaagcaagtgcaccaacgaggtgctcctcgtgatccagaacaacaagacgctgctcgaccgggtgacctactcggccagcttcatgctcacccatatcactacatgctacgcctatcatactcttcgagcaagttcaacaactccctgctcgacgcatacgaccaccacgtgatcgtggcgctcgttctgtcggacgaccgccgacacctgcgtcgccttctccgataacatctacatgatcaaaagctcatg

SEQ ID NO: 69347 - DNA, 715 bp, Zea mays
  unsure (1)..(715): unsure at all n locations
  Clone ID: MRT4577_163239C.1
ataattgataagagcattcacacagcatatgtccgggcaatcagatcagcgcaacatttcatttatatagaaaatcagtattttcttggttcttcgtacgagtggccatcctatgtgaattcaggtgctgacaatctgataccaatggaattggccctcaaaattgcaaccaagattagagctggcgaacggtttgcagtttatgtagtcataccaatgtggcctgaaggagtccctacctcggcctctgtgcaagaaattcttttctttcaggctcagacaatggagatgatgtatggagtaatcgcacgagagctcaaggccatgaatattgaggatgcacaccttcaagattacttgaactttactgtctaggcaatcgggaagaaccgtcaacagatggtagccctgagtcagataagtctacagataaaagtgcagcgggcctggctagaaaacatcggcggttcatgatatatgttcatgcaaaagggatgattgtagacgatgaatacgtaattttgggctcggcaaacatcaatcagagatccttggctggctcgagagataccgaaatcgcaatgggtgcctaccagcctcatcatgcatggtcttcgaagaagggtcatcctcacggccaggtgtatgggtataggaactccctctgggcagaacaccttgntatggttgatgaccacttcaaggaaccttctag

SEQ ID NO: 69348 - DNA, 605 bp, Zea mays
  Clone ID: MRT4577_16323C.1
gatactaagtattaatatatttgtatcttgtgtaattttatatgatattaccgttttggatactatgacaagatataataagccgatacatttatttccggggcaatttagaagccctgaaaaggggaacaaaatgccacaaaaaaataacgaacggaagaaagacagctttacatgttcgcccctctacctatttgaaatcaaacaagcttctgcaactccgaggcccgattgccatccctaactccgaccgtggctgacgtacccaaacggcggcgacggacgactgcaatgtcgtgcccaagcccagttccaatcgtcgccgtacaccggaagctcgttttcgaaagttctacggcaaccggagatgccgttcaccggagcgagggctgcgaggctctccagttcgaacaggtcggagcttgcgtcgctgctctcctcgctgccaccgctgtccttcacttcgaccaccgggaatctcatgcaaccggcggctgctgcggccacagcaacatcgccttcgatgtccaagaaacgcacggtcctgctccggctctgcctccgggtcacccgcgcccgcgccgacggcagtgtcttagcgaggc

SEQ ID NO: 69349 - DNA, 250 bp, Zea mays
  unsure (1)..(250): unsure at all n locations
  Clone ID: MRT4577_163240C.1
ggaacaagccacccccaactttcccccacccataaaaaggaattctaaacgtattnccaggtaaacacagttcttgccccaacccaacccnccagggaccccccaccccctaaaagggncccacanaagggggaacaacccccaaccccccccaatagcccntcccctaaacccaaaaaggtnggaacttaaggcgggccttggggcccccgggaaccccgtcccgggnaagccccccgggaaggacaag

SEQ ID NO: 69350 - DNA, 540 bp, Zea mays
  Clone ID: MRT4577_163241C.1
ccccctctcgagttttttttttttttttttttttttttttttttttttttttttttttttttttttttttttttggaaggcggcaggaacccttcccataattaaaagccacatatgttttatgatccttcccatcttttctaaaatggagagtggaaactttgggatctattcaaaactattatgcctatttggacttcataaaaccccccgaaaactattcaaagttctgaaaattaaaaaaaaggggttttcacggggaaccagtttatacttcccctacttacaaggaataatcccagccttcgtagcatggtcccgagcaaatagcaaatgaacccgctcccgagggaaaaacagcaacttcactgaataaggtgatcccttaaaaggcctgccccccccctccggaaaatccctccagagcatggaacacttttggaagggctgtctgcaaattgttcagggccatggctcggttttccctaacaggggttaggtatgtggccttctcctcctcgaccttttttttaaaggcat

SEQ ID NO: 69351 - DNA, 523 bp, Zea mays
  Clone ID: MRT4577_163242C.1
tttttttttttttttttgataaatatataaagatttatttatacactctttactaatacacatttcagtgcaaccaaccaaactaaatctatgtctgatctacacgagtctacaaacacaaccaaacaaaagtgtttgcactaatacacatttcagtgcaaccaaccaaactaaatctatgtctgatctacacaagtctataaacacaaccaaacaaaagtgtttgcacgaactcaccttggttctactaatactggccagactcatacggacctggctcgacttctacggtaacaatcacatagtatgtgattcagcaatgttttccacaatcgcttgcttggggacaagcatgtttgacagagggggcacatgtgacggctgaagtctgaagatcacgaagaaactcgagctggcagtgtgccgggaggtctagtaatccgaggtgtggagtagcagccatgttggcttgtgggtgtgtgggccgttaatgacccagaatactgttgggcctaggagttgt

SEQ ID NO: 69352 - DNA, 535 bp, Zea mays
  Clone ID: MRT4577_163243C.1
ggccgggctcactcgcctcgagcgcctatgaaattcggagccgccggaccgtccgggtgcgtctaagactcaaatacaaaaatcattattgctaaagttgctctccttgatcatgcaaacaacaatgctaccattaatattattataaaacactgtcaacatgccctcatatcccattagatgccatatattacatcaaagaactataatgcgcgagaggcgacaagagaacatcgcaacaaggatttaacaggagcaagtatcgaccgtgcaacaaacataagcactatagcaacaaccatacttaatgatacatatatgcaaacaatccatgaaaaacaactacaacaacaggatgagcaaaatataatggataaatcccataagcaccctttctcttataacccaaatgacaacaacaccattagatgcaaacaaataacagggggaacacccagctgcttaactagacgcacatcatttactaccataaaaccaaatgcataagtaaccccagatgctgatattaataaaa

SEQ ID NO: 69353 - DNA, 567 bp, Zea mays
  Clone ID: MRT4577_163244C.1
acaagaggtcaacagaataattttattttaacagtaacttgtagagtttaagatgcaccagaacgtttagaatataaacagaacgtgtacagtttaacatgcaccagaaccactagccatacacaatttgacatgcatcaaaacgtgcagaaccggttacagtttggcatgcaccaaaaccggttacaatttggcatttcatcatctatacattaaagatcgttgtccaactcgtctagaccttctcatctctctagcaactccagccacatctagccatcatcttaccaacgatcggcgagaagtagccaccgaagggatccacgagacgctggtcagcaggtgaagaagccaccgccagaccgtgtcgtagtcgcctttgtaccgtaccagcttccggagctcctccgtctacgtcgccatagctgccggagcgcctgtctcgaagcccgctgcagctgccggagcgcctccgtctcgaagctcgctgcagctgcctcgcgcgccgccaacgagaggcgagggttctttccacaccgaagggacgaggtttgtatcccggtcggg

SEQ ID NO: 69354 - DNA, 248 bp, Zea mays
  Clone ID: MRT4577_163245C.1
gcaacacacatgttcaagatccggcgaatcttatcaagtggttaccagcagatgtattttgatggtcgagatcctgtgccttacgtgctagctcgaacgtggagactttgcgcggacgcgcgagaatggtacgccaatgcaccggcaacaacgtcaaattcgtttggtctcttgtaccgacttgagctattgtattgtacaattgtatttttgtcgccctcaatcggcgatcccgagatctgtgactt

SEQ ID NO: 69355 - DNA, 550 bp, Zea mays
  Clone ID: MRT4577_163246C.1
cccgggtcccaaccaacagcaagcgaaaactaccgatccttctggtcttcgcggcgaagagtcattgcgcggcaaggcgcggaaagggcctgggcaaaggcggcgcaaagcgccacctgaaggtgctcctcgataacattcgagggatcacacatagccggccatccggcgtctgactcgcaggggcggcgtgaatagcatgtacaggctcatttaccaagagaggcaatgcaacacttgaaggatcttcctagaaaacgtgatccgatgacatccttaattataccatgcactcgttccacaataacgtgataaacatggacctggtctacgcgctcaagaaccagaatcacaccctcttatttcttcctggtgtaggagtaggttcgggcgaggcctctcatatcctatctccagatgtattgatgctgcaacccggaagtagaaggtctgggggaaaaattcttggtactgcggcactaccacaagaatgttgtgcagtgtcttgaagaaatgccacatagcacttgttgcttgtgcaaacatgtct

SEQ ID NO: 69356 - DNA, 149 bp, Zea mays
  Clone ID: MRT4577_163247C.1
caagcatcggtacggcactgagcatcggtgaggcaggcgacgcgcgccgccgatgaacaggcgcctcacctgggagagacagggagggtagccgagcccgagatggccgccgctaggtaggacgacgaagcggcacggccgcttcttct

SEQ ID NO: 69357 - DNA, 107 bp, Zea mays
  Clone ID: MRT4577_163248C.1
gcgcgttcttccgcccgacgtcacggtggagggatggcgagcttaattagaaaccctctacatccgatccagctaagcagctagccagcactacagaagggcgtggc

SEQ ID NO: 69358 - DNA, 423 bp, Zea mays
  Clone ID: MRT4577_163249C.1
aacctgacctatctcattatgacctaagataagaagacggcaaagagccaaaaccgaaggaacagagacagcgtgatcgtacatgctggagcattcaacaaggggactgcaggtatacagcattaagtggagaaacagagtgttaaaaaacagcttaaattaacaaagtggaagacccctaacctattgccgaacgtaacgaggaatgacaaataccttggagaaagtggaacaaatttccatatttggtaggacattacgccatgcatacgaaaaacatttatctatattaaactgaccgttggaaaatgtgtgtgaatgcagagtacaacatccttgttattttagctcctggaaaccaacaatctatccattgattagtgtaccgataacgcaagaaactaggaacggagccaacacact

SEQ ID NO: 69359 - DNA, 1109 bp, Zea mays
  Clone ID: MRT4577_16324C.1
gttctagatcgcgagcggctttccttttttttttttttttcggacgcgtggaaaagtttgtctcaactcaatgaacaacgccttcacacaccctggcagcacaaagtattcactaagctcttggggctgcattataagatactgtaccgtccagggactgacaacagggtagctgacgctctttctcgctgtgtccaaggtgaattacaggctatttctgtggtggttccaaagtggttgtccgaagtgcagtctagttaccttaatgatgctgaagcccaagacctacttgctaagctatctattgacccgttggcggtgccacactttacactgaaggatgggctactacgctacaaaacacgcatttggctgggggccgatgcacagcttcaccatcggattttgtcagccttgcactgttctgctatgggggggcattctggcgtgccagtcacttatagtcgggtgaaaggcatatttgcatggaagaatttgaagtcttctgtccaacagtttgttgagcagtgtcaagtgtgccttcaagctaaacctgatcgctcggcttacccaggcaagttgcaaccgctgccagttccacgttccgcgtggcataccatttctatggattttgtggagggacttccccgttctggaacagctgattgcattttagttgttgtggacaaatttactaagttcagtcgctttatccctctcagtcacccttatacagcagcttccgtcgcacacctattcatgtctcatgtataccggctccatggatttcccattgccatcatttctgaccgggacccagtatttacaagccagttttggaccactctctttaagcttgctggtaccgagctgcgcctgagttcagcatatcaccctcaatcagacggccagacggaacgtgttaatcaatgtcttgagaccttcttgagatgcttcgtcagtgcctgcccgaagaaatggtctgcttggctttccgcagcagaattttggtacaacacaagctgccattctgctcttggtcgttctccattcgaagtgttgtatgggcgcaaacctcattcgctggggttatccatgaatgctacagc

SEQ ID NO: 69360 - DNA, 293 bp, Zea mays
  Clone ID: MRT4577_163250C.1
aagagcagtctccaatagtatagcaacaccaagaaaataagcgccatgcagacgccggccatgtcgacgtccacggccacgacaacaagggccatggcgccagcgaagccccccgcgcggcggcattgctgcagctacctcctcctcctcctaccctccaccggccaccgccgcagcgtcgcggcgtggtccgcgaagaaaaagaacccgtggctggacccgttcgacgacgggcccgacgaggagttcgactaccagggcatgttctccggcgggaagcaggaggaggaccc

SEQ ID NO: 69361 - DNA, 163 bp, Zea mays
  Clone ID: MRT4577_163251C.1
gtttcacgttggaccaccagtcctctgtgcacgccatagtcacaaacttaaagatgaacctcctcctgcataagtgcctcacgaccctgaaaagcattatgagcaggaacaggaatatgtaacccagaacaaaattatacacgaatcgactgctgctgccata

SEQ ID NO: 69362 - DNA, 790 bp, Zea mays
  Clone ID: MRT4577_163252C.1
aagtatctggaatcacgttttagatgaggtcaggaaaaaaaatctagagagcttgcatgagtaatgaacgggccaggcaggcaggcagggatcctcttctgtggagtctgaaactagagctttcttctcagcaatggccgaacatgtactgactactggggtacgaggaggcaatggcagtgcagagagccgatccgggctctgaatctgatgagccgagtgaaaggaaaccgtcggcggagcagcaccgctggctgccggcgtctcggtcgtcggtcaacaaaccacgccaccagtcagtcatcagcttgctgcctaaactgacgatttgctagtcttgatatctagtacagctactacaatacaagccaattctccctctccgatcattattattccggaccggtgtcatgtcatgtcacggccttcgttctcacaagactgccttctctgaatatctccattgaggaggtctgagcacaggtgaagaaaaaaggagggagttggcattttcctccggtcgggctgtgttatgacaagcctgctgacgcagtagtaggggtggtggtggcgataaagccaatcacatgttcccatctgttccgttctgcacctctctctctttctcccttctctgtccttgggttcgtttacttctgtcaagtcaacccatccatgggcgatgcctcctcgccaaggcatgcgctctcagcagacttcaaacccacatgctgttgttaggcagtcgcatgtccccacctgtgcaatcttccttagattccggctgatc

SEQ ID NO: 69363 - DNA, 292 bp, Zea mays
  unsure (1)..(292): unsure at all n locations
  Clone ID: MRT4577_163253C.1
actcctctttttttttaattcacatctatcccatgctttagccaactaacacttgcctactggcactttcaagcgtctcaagggaccaanntaacacccaacccctttcaattgatctgctaaccaactctaataccacatatttggcaccttagagaatattttcctattccaagaaaccaccacacattgacgtctcttgcccttaccatttagatcacatacaatgcacagattcagattcttgctaccaacacacataatactcaactctacagcacaaccacacaca

SEQ ID NO: 69364 - DNA, 822 bp, Zea mays
  Clone ID: MRT4577_163254C.1
tcggcccccacgccgtcgccgtgatcctattacctgatgcggcggcaccaaacctcgcaaggtcgaagcccgtacgccgccctttgtcgcccaccgacacctgaccacacaaaatggataggtttttttagcagcaaacaagactttatcgatgtagttgaggcaatattcagaggtgcgatgaaaggcaaactgatagtgtcttgcccccttcctcctgagaggataccaagattctaacttcttttcaaggatgtctgagaaaactgcagctcatcacgtgcacacaatcagctacctagcccaaggtaagtagaaaagctgaagcttctataagagaagcacaacagaggggacaatgcaggcgtgttcgtgcttcgaaaaaacctaattgtgctggaaacagccattttcattctcaagactttgcgcaaatctctgcaataatctaatgttgtacttgtccatattgcatgtttaggtttgtatttaatcacgttcatcaaatatgatgggtatagatttcttgtttggtctactagtcaagcaagagaatgcccttcgttttgctgaggatgcaagtatgttctactcaaataaattactcatccaacatcctgtgtttttcgctattggtgtcatagtatgttctccctacaacattttattattgcagaccagttgtgctatggcacctgcctttagtgtcttccttacttcctattcatatggcgattctatgagtatggcacgagcagtagaagctattaaggtaaaattggccagctatgcataactatgaattcccaacacttgttttga

SEQ ID NO: 69365 - DNA, 294 bp, Zea mays
  Clone ID: MRT4577_163255C.1
ttgggggaatgccaaaaccccaaaaatgggggggtgggcaatcgttcccgcccggggaatttttccccttgcaaaatagggggactgtggggttccaacaaagctgttccaacaattcaaaaacttaaaaaagggcgcccctttattaaaacccttggtccattattaaattccaaaagggaccggtttccctattgagccccacctgggattaaaactttctaaatgtccacctaggcacctaaggaccggaacttttaaatcttccatacccatccctggttggaaaacgga

SEQ ID NO: 69366 - DNA, 1051 bp, Zea mays
  Clone ID: MRT4577_163256C.1
taactgcttcatttctacgcgcccttttcattttttctagcgccctctgcctccatccaccgacgcggcgcccgacgcccgacgccgcactcacctcgcctcgctgaatcgtccccgccagacgtcgggtgcccgacgctgcagcacggcagccgcacaaccgcagctcccaccgctgccgcgctcctccgcgcaacctcgatcgcgcacagaggcccattccgccgaggagtggcacgaggagagacgacaggtgcggggatggggtcagttttgctgccaacgctgcggctgaagagtgaggtcgacgccgccatccgcgacaccctcgataaggtcctcgttctccgatttggtcgcgccaccgacgccacttgcctccacctagatgacatcctggctaaatcttcttgggacatatccaagtttgctatggtagcattagttgacatggactctgaggagattcaagtttacattgactactttgacatcactttggttccagcaaccattttcttcttcaatgcccatcacatgaagatggattcagggacacctgaccacacaaaatggataggttcttttagcagcaaacaggactttatcgatgtagttgaggcaatattcagaggtgcgatgaaaggcaaactgatagtgtcttgcccccttcctcctgagaggataccaagattccagcttcttttcaaggatgtctgagaaaactgcaactcatcacgtgcacacaatcagctacctagcccaaggtaactaggtaagtagaaaagctgaagcttctataagagaagcacaacagaggggacagtgcaaggcgtgttcgtgcttcgaagaaacctaattgtgctggaaacagccattttcattctcaagattgtttgcgcaaatctctgcactaatctaatgtttttcttgtccatattgcatgtttaagcttgtatttaatcacgttcatcaaatatgacgggtatagatttcttgtttggtgttaataccttgctactagtttatattgagttttggcattttcccc

SEQ ID NO: 69367 - DNA, 831 bp, Zea mays
  Clone ID: MRT4577_163257C.1
cattgggtacctcgaggccggccggggtatgtcgcctagaggggggtgaacatttttttctagcgccctctgcctccatcccccgacgcggcgcccgacgccgcactcacctcgcctcgctgaatcgtccccgccagacgtcgggtgcccgacgctgcagcacggcagccgcacaaccgcagctcccaccgctgccgcgctcctccggtcaggcggtccttcctggcccggccgcccccgccgcctgccccgttgcatccgtgcccctagcgcaacctcgatcgcgcacagaggcccattccgccgaggagtggcacgaggagacgacaggtccggggatggggtcagttttgctgccaactctgcggctgaagagtgaggtcgacgccgccatccgcgacaccctcgataaggtcctcgttctccgatttggtcgcgccaccgacgccacttgcctccaactagatgacatcctggctaaatcttcttgggacatatccaagtttgctatggtagcattagttgacatggactctgaggagattcaagtttacattgactactttgacatcactttggttccagcaaccattttcttcttcaatgcccatcacatgaagatggattcagggacacctgaccacacaaaatggataggttcttttagcagcaaacaggactttatcgatgtagttgaggcaatattcagaggtgcgatgaaaggcaaactgatagtgtcttgcccccttcctcctgagaggataccaagattccagcttcttttcagggatgtctgagaaaactgcaactcatcacgtgcacacaatcagc

SEQ ID NO: 69368 - DNA, 907 bp, Zea mays
  Clone ID: MRT4577_163258C.1
ccggccccaacgccgtcgccgtgatcctattacctgatgcggcggcaccaaacctcgcaaggtcgaagcccgtacgccgccctttgtcgcccaccgtgagtcacccctccggtcctccctccttaccccctcgccaagtccctagaggtcgctcaacgctggatctgccacgaccctaggctcccagctatctacgtcctactcctgcccctggctatgccgatgtgcccagtgacctatgactgcgcctcggcagccggcgccctgttgaagccctccgcttcatatccccgtgctgtcgtgcaaccagccgccatgagggacacctgaccacacaaaatggataggtttttttagcagcaaacaagactttatcgatgtagttgaggcaatattcagaggtgcgatgaaaggcaaactgatagcgtcttgcccccttcctcctgagaggataccaagattctaacttcttttcaaggatgtctgagaaaactgcagctcatcacgtgcacacaatcagctacctagcccaaggagggaggtcctagaggtagtaagtcacttgtttactccatgatgacaatagcaagcagatcgcggtggtgcctatggatgctacaacaagaaagatcaaaagttcttttggatggatgcagctagatattttgttttgtattttctccaaaagagaaatttgcaagtgaacttaaaattgtgaaaccaacatgtggttgtactagctagtatctctaagctttcacaagccaaacttagtgttgttgctgcttattttaatctttattacaacaaaagcaaacttgtgaactttatgtgaatgcagtacaattgttattgtcatgaatgaaaacatgagctatgtattaaaaaaaaaaaaaaaaaagcggcc

SEQ ID NO: 69369 - DNA, 242 bp, Zea mays
  Clone ID: MRT4577_163259C.1
ccctagcttctgtttggctgttgccttgcgggtggcggatgctttggtgcgctgtgcagtgcgctccagtcgtagtggactcggaatggccgcacttagccaatagatcagtgtattactaagtcgctcgtgtataatataacgcacacgggtccgatacctaggttgtttatcatgaagagcgcgcaagtcgatgatgcactcgcattaaaggaatgaagatatgcttcaaggaagggata

SEQ ID NO: 69370 - DNA, 251 bp, Zea mays
  Clone ID: MRT4577_16325C.1
gcccaaacttgggcacaaggggggttatttactctttgattttgctttgtattacccatagccaaaaggggggataccggattaccatattgggcagtacagtgggtttacgctcctccctttggttttaatggcacgtggggtaaaaaatacgcacagtgtggtcgttataaatattttccaaggtagcaacaataactaggccctttagcacgggtaagttttacgtttttgattgccaagggggggga

SEQ ID NO: 69371 - DNA, 1740 bp, Zea mays
  Clone ID: MRT4577_163260C.1
atgagccaaccgtcccaggggaagaacctccccagcgagaagctcggcgatgaaggaacagacgctggaatattcggcgacatcacggagctggggagcgggacccagcgtagcccgtatctcgggatgaagtttcggaagtgggagaaactcccaacgagtgggtattcagagaaaggaggaattctcgccgacgtgaccgtcggcaagctcaagaccaagatcgagaacaagccgaacatggcgctagatgcatggagctccatcaacgcttcgtgcgaccgacgacacgaaaacgatataaggcattgggaggagtatgatcgggaccatggcgtcccggctcgaagtcacgccacccgagttaagtcggctgcagcgtcaaccagtggcccgatccggggacggtcgagacgacacatcaccgactcccctccccgagatcgacaccatgaacatcgacaggaagacacatgtggagtatccacgcttactccgcgtctcagggccatccagtggcccccaaacttcaaggtctccaacgtcgacaagtacgagcataagcaggacctggaaggcttgttggccgtctatacgaccgccgcccgagccactggggcgaccaaagacgtgatgaccgcatatttgcccatcatccttgggcaggatgcattgcaatggctacgacatctaccacgacattgcatcgacgattggagcgacttcggtcggtgtttcatcgccatcttccagtccctctccgacaagccggagcaaccatgtgatctcaaatccatccggcgtcggggcgatgaaacacttcggtcctacctcaagagggacttcaagcactccgtcagaaatgcccgaccgttccagcctctaccacctcccccaccacgaggagggtctggcgagcccaagcagcctcagcaaccagaagggggaggggtggagcattcccacgcattgacaggcaggtcaatgtcatcttcagaggacacgggtcgcaggagaacagaaggcaacaaaagctcaacgaccggcaggtcctggtggcaaccacaagtgccccggctccttatcggtggtcagagcacccaatcaccttcagctaagcagatcaatggctcaacttcgaccatcctggcaagtacctgctcctcgtcgatccggggaagtagcatcaacgctaccttcccccggacactcctgggcttgggggtcgcactcaaagacctcaacgagtcagacactccttccttcggcattgtgccgatcgaaggtgagtactcgctcgggaacatctacatgctcgtcacctttgggactccggagaactacagaaccaagttcctgaggttcgaggtggcacgtttcgactgcggatacaacgccatcatcggcaggccaggactggcgaagttcatggccattccgcattattcctacatgatattgaagatgccgggaccgccaggaattatcaccatgtgcgctgacttccaaggcacaacggaatgctttcggggagccatccaggcagccctctgtgctggaccatcgacgacttcctccacacaggcggacacaaaggctgaggaagacctcgcaatacccacaaacgaagctcaagtcgtgacctctatacggctgactgaggagactaaaagaatcaacccgggattctccgatgtgcgcacgactaccatcatcagttccagccttggcgacaaatag

SEQ ID NO: 69372 - DNA, 500 bp, Zea mays
  Clone ID: MRT4577_163261C.1
cgcccccttctctccctctcatgccgctggttgatctctcgtcatctcctcctccaagcacggatcctctcgtcgtctcctccaagcacggatcaggaacactgaaattctatctcaaccggttctgccgactgggtaacttgaattctaaagatgaggcatggtttggaagtcttccaagaagcagtcgtacccatgctgatatgaacagagatgaattggaagtttgttgctgcagccttaagcaagagtggtaatacttttgacacaacaaggtctatggtactcatatctgaatcagagaaagctaacctaaaggatagggcaaggaggctcctttctaagcctatcaagtttttcaatgagatgcaggagttgtttattgacagcagtgctgatggctctctagctatggatgctacaacctgcatgaatgaaactcatcctggagatgacagtgacttcatgatgatgtgtgcagtgacttcttcaactattct

SEQ ID NO: 69373 - DNA, 2260 bp, Zea mays
  Clone ID: MRT4577_163262C.1
ctgtgcggcgctcaggcgccggccgggaaccaagcaaaaactacacgtcttgcccaaacccaaagccgaagcccctttcccctcccccgcttgccctcttctgccattttgtcgaacacctcccccgatcgcgcgactccggccatggcggaaaactccgacgcggctgcggccgtaactgcgcggctactggagcttgcggccgacaacgactccacggcgctcggggacctcctcgcggtacacccgtcgcttgccgacgagcccgcgccgtggtactccccggcgcgcggcgcggagcctatgaccccgctcatggtcgcggcggcgtacgggtccgtggcctgcatcgatgtcctactctcgccgccccacctgaccgatcccaaccgcgcctcaccgtcgtccctctccaccgcgctccacctcgcagccgccggcggcgcctccgctgcgccggctgcggtatcccgtctcctagctgctggcgccgaccccacgctgctcgaccatctccatcgccggccgtccgacctcgtcgccctcccacccaactcgctcccgcttaagaaccacctcctctccctcctcggagggcgcaaggagtggccgccggatccctccctccccgacatcaagaacggtgcctacgcctccgacgacttccgtatgtactccttcaaggtgcgcgcgtgctcgcgcgcctactcccacgactggacggagtgccccttcgtccatcccggcgagaacgcgcggcggcgggacccgcgcaagtaccactacagctgcgtgccctgcccggagttcaagaagggggctggatgccggaggggcgacatgtgcgagtacgcgcacggcgtgttcgagagctggctccacccggcgcagtacaggacgcggctgtgcaaggacggcctcgcctgcgcgcggcgcgtctgcttcttcgcgcacacgcctgaggagctccgtccactgtacgtgtcgtctgcggggtcgcgcagcgcgatgggaatggggctgccgtcgccgggtgcgtcgttcacgccgccgctctcgccttctggcgggggaagcggtgtggccggcgcgtggccgcagcccaacgtgcccgcgctgtgcctccccgggagcgcggggaaccttcagctgagccggctgcgcactttgatgagcgcgcgcagcatggcagtggacgagctgctcgcctcggcggattacgacgggctcgtcgggtcgccagcctctctgcggtcggcgaggggaaagacgctcgtgccgtccaatcttgacgatctgttctcggcggagatggcgggcgccgcggcatctcactcgcctcggtacgcagaccagggcggctctgctttctcgccgacgcgtaaggccgccatgctgaaccagttccagcagcagcagagcttgctgtctcctcgggccacggttgtccctgagccggtgtctccgatgagctccaggttgctctcggcccttgcgcaacgggagaagatgcagcagcaaacgctgagaagtatgagctctcgtgacctgggctccggcgcctccgtcctggttggctcaccggttacctctagctggtccaaatggggaatccccccgagcacaccagattggggtgctgacgccgaggagcttggccgcctcaagcgatcctcgtcctttgagctccggagtggtgccaacggtgatgagccggacctctcatgggtcaatacccttgtgaaggagccaacgccggagaagccatccatcaacgggacagccgcaaaggagtctattgcttctttgagccaggctgcaagtcatgagggtatcggcggtgaggacgacactgccggggtcatcggtggctggcttgaacagctccagctggatgagatggtagtctagaacaaacacaaacataaatcaaataagaaaggtgccattttttccctgtgatccaccatttgcttcaccaacttactacatctaccaaccttcataccttgctggtaattactggtgatacattcttttggagttggttagtgtaggtgttgagatttccatcaccatttagggtccaccacaagtgagaaattaaggaatggaaacctagccaattttatggaatttccacatcccatgcttcatgtgaaggagcagtagggtgacttgtcgttgcttcaaactcttctaaggcctgcaatggtattgtactacgtaggattgtgtctgatgtaaaatccaatggtcc

SEQ ID NO: 69374 - DNA, 360 bp, Zea mays
  Clone ID: MRT4577_163263C.1
tcctctagagtgggcgtccttgggttgtttttttcgaaatattttttatttgtttggtatggttcttttttaagtttggtaaaaaataccccggacttgaaaatccctggaagaacatccccaagaacacagactattgcatttgggacggggctgatgagctttgttatctttttagccgagcggtgatacggaaggttccaaccattggagcttccaatacagtttgggaaggtcaaaaaaatgaaatcttccttagctagtgtcggctttgggaaaatcatgcctgttaaccctgtcctttagccaggaagccgattccttggggtgggcgttttagggtgtgaaatgtccctttta

SEQ ID NO: 69375 - DNA, 461 bp, Zea mays
  Clone ID: MRT4577_163264C.1
agcagtggtaacaacgcagagtactttttttttttttttttttttttttttttttaaaataaggttgtagttcaaaccaccctttaaaagcttaatagaagaagaaaagaggattaaaggttaattaattgatttcagcaaaacccatctgagccttaactaaacttttaggagaataatataaggatcaatccacccttttcctttggttaaatcttaatatggaccctaaaggcaaactcctactgggggggatagatatcccccgggtccactaaaagagtaaaagacctcacgaaaggcccaaggacccaataaatcgtaaggtcattctttcgtgggcctggggagagacaaccagcaatgcagatcgacatgaggccggattgatgcaaacccggacggcacacaacgtcgagcgggtgaccgcaacccgcgtactctgcgttgttaccactggt

SEQ ID NO: 69376 - DNA, 3657 bp, Zea mays
  Clone ID: MRT4577_163265C.1
aattcggcacgaggagctagctagctaacccacgaggaaacctcggccgagaagaacgcgcgcagcagacttgtccgcgctctccctctttctgtggacctcgctcgcctagaaagcgccgtgcccgcctgcccagcgacaccgggcagcgggctgtgtagctaatgggcgccgacgcccgcgtccgcctcctcctgcttcttctcttcctcctggacctcggctgcagcaatggcggcggccgatgctcctcggcgcagacgatgctgccggcccaagaagttgaagcactcaaaggtatagcccgcaagcttaacaaagcagattgggattttagtgtggatccatgcagcggattaggaaattgggtcaatgtcactggtttgcttagcagtaatgtgacatgtgattgttcattcaacaaccacaccgagtgccatgttatcagcttggagcttatgcggcagaaccttagtggagttctaccagatgaagttgtcaatcttacttatctgcaaaatcttgacttgtcacgcaactccatccaaggaccaattccagcatcatgggctgacctacctgtttttaatctgtctctccagggaaatcgtatatttggaaccctgccgaaggagcttggacgcatgcccaagttgaaatctatacagctagaaggcaatcagcttgcaggttctattccaccagagctgggtaacatcatcagtctgcagagatttttcatttctgcgaataacatcacaggagagttgccctcaaccttttctaggctgacaaacatgacagattttcgtgttgatggaaacagtatctcagggaaaatacctagtttcataaagaactggcagagcgtcaacagaatcgatatgcagggtaccttgatgagtgggcctattcctccagaaatttccttgttgaagaacttgacagaactgagggtgactgatttgagtggaccaagaatgaaatttcctcccttacaaaatgcactacaccttacggaagtggtcttaagaaattgctccatatatggtgaaattccttcttaccttggtcaaatgcagtacctgaaagtattggatttaagcttcaacaagttgactgataaagttccagaaaattttggagcaatgatagcactacaatatttgtacctgactgacaatatgctgactggagatttgcctgcttggatgttgaaaaacaaggcgagcaataaagtaaacatggatatatcgtataatgacttcacgggcaaccctccatctgaatgtcagcaagcaaacgtaaatatggtgtcaagcttttcatcttcaaataacaattcattgcaaccatgtttaagaaagaatcttccttgcacaaccagaccacgccattcctccttattcataaactgtggcggaaagagtgttgtggtcgatgggaatacttatgaggatgactcgtctcaaataggaacatcaatgtattctgtatctgatgataagaaatgggcatatagtagcactggtgattttgttggcaatgagaatgctgactacattgctagaaacacatcaaagctaaatctggcttacccagagctttacactgaagctcgcctctcacctctgtcactgaaatactatggcctttgcatggagaatggtgaatatacggtaaaacttcactttgcagaaattgtgttcacagaagatcgtacttattccagcaatggcaaacgtgttttcgatgtcttcatccagggggtcaaagttttggaggattttgacatcaaagatgagtctggcggtgtccatcgtgcgaccataaaattttttgcaaccaacattagcgaaaatacactagaaatccacttctactggggaggcaaaggcaccacagcgataccttaccgtggcgtgtatggtccactgatctcagccatatcagtgacaaagatgggcaggaaccaccatggactctctactggagtggcggttgccatagtaatagttgcgacatgcttggctgttatagttctaatatctttatatttcaaagtcttccgaaagaagaatataaaaggaaatggtagacagttcttttaccaaggaaggaaaactgctacttcagagcttcaaacacgggcacagtatttctttagtttgaaagagatcgaatctgcaacaaaacattttgatcctgcaaataaaataggtgagggtggctttggacctgtttacaagggcacactagcaaatggtactatagttgcagttaaaaagctatcttcaaagtcgagccaaggaaatcgcgagtttttaaatgagataggaataatatctgctctaaggcatccgaatcttgtgaggctatttggttgctgtattgatggggatcagcttcttcttatatatgaattcttggaaaataatagtcttggccgtgcgctttttggccgcacagaacatcagttaaaattggattggccaacaaggtacaatatctgccttggaactgcaaaaggcctggtctatctgcatgaagagtctgcactaaaaatcgtccacagagatattaagccatcaaatattcttcttgatggaaagatgcgacctaaaatatcagattttggcttggctaaactgaatgatgactgtggacgtgtgagcactcggatcgctggaactgttggttatatggcccctgaatatgccacaagaggttgcttaacacgtaaagcggacatctatagttatggagtggtggctcttgaggttgttagtggaatgagcaatacgaatagcatgtcaaatgaagaatatctgcatcttcttgattgggctgaaagattgaagcagcaagggaagctgctggaaatggtggaccggcgtctcggttctgactactcccaagaacaggcactgaggctgctggatgtagctctcctctgtacaagcatacaaccaacccagcggccaagaatgtcttcagtggtgaagatgctttgtggtgagatccccgtcgagattgtacctgctgacgatgatctaagtgaagatctacgactcaacatcgctcaatcccggcaatcaatagataacagccaaacaaattggtcccagtactcagtaaataacagccaaacaaattggtctgaaacgctttcaagcgatcgttcggtcttgccccacagcagcaaggacagtggctacctcccatcttcgagctccctttctgtcaagctgtgaacttcagcatcgagaatagctagccaggtgtcggcttttttttggggcccgttgctgcagttgtacataggcaaatgttgggtttcatgcttgcaatgcaagtatttgatgtctcatctcgattgtcaagtgtcattcaagaatatcgtccacgacacatggcaattgatcacagtactgtctcaacgtcagccatatttcggctagctccttagtttgttgctttggatgtagaaagttataatgacttataatttggaacagatggagatgtagtatatcattaggacagtgcacttgagaaatgtaggccagaaatattgtttcatatatgcagatcttggagacagtgcaatactttatttaaaacttctttctattgtttacaagcgcagttgtgtgc

SEQ ID NO: 69377 - DNA, 1104 bp, Zea mays
  Clone ID: MRT4577_163266C.1
cgggactacccgctgagtttaagcataaataagcggaggagaagaaactacgctaaaggagttccagacttttggcttactgccatgaaaacaaacgaggttttgtctgaggagatacaagagcgcgatgaagccgctttgaaatatctaaaagatatcaagtggtctagaatcgaggatcctaagggtttcaagctggattttttctttgatacaaacccattcttcaagaattctgtcctgacaaaaacgtaccacatggttgatgaagatgacccaattttggagaaagctattggaactgaaatcgagtggtatcctgggaaaaacctaacacagaagattctaaaaaagaaacctaaaaaaggttcaaagaatacgaagcctatcactaaaaccgaggactgtgagagtttcttcaactttttcaatcccccgcaggtccctgaagatgatgatgacatcgatgaagacactgctgatgagctgcagagccaaatggagcatgattatgacattgggaccaccataagggataagattatccctcacgcagtttcctggtttactggtgaggctgtgcaaggtgaggattttgctgagttgggtgatgatgatgatgatgatgatgatgaggatgatgacgaagaatgagagaagaggatgatgatgaggaagagatgaggaggaagaaagcaagccagcaaggaattgggatccggtcacaaacagaaggagccgcaggaagtgttgcagccttgcagggaaatgccgaacaaccagcggagtgcaagcagcggagtgcaagataaccagtgtttggttgatgcagtattttccattgatctggagcactctgtgctgcgttagtggatggaaatcggtttgcaacttgtctcctagtgatctcagggttttcgctacgtgcaatcggatgatattatatggttgtgtaattatctttgcactcagccgataatggcgctttatttgtcctaggtctatattggctatcttaaattgatttgtagttagcttagagcatatacaatcgaccacccaaatcagggggtctatttttgatttgatgcccactttttttct

SEQ ID NO: 69378 - DNA, 139 bp, Zea mays
  Clone ID: MRT4577_163267C.1
atggagacaagaagggcaagtggaacatctcgcttctaagttactcatcgcccatctcgatgtgaggtgtgtggaaaaactcgtcaaatttcaatgttactgtgtagttctgaaagcaggtcatgcgtggtatcaaatt

SEQ ID NO: 69379 - DNA, 548 bp, Zea mays
  Clone ID: MRT4577_163268C.1
acctttcttcctccgatcttcccatcccatccaacctcgctctgctctgcccaccgcccccacctcccactcctctcctgcctcctcccgcgcccgccatgaacgaacccgcggcgtaggaccgtgaaccgaaccaaccatgggccgcgcgagggccagggacgccggccacggcggcgccaagtcgttcccgtcgccggcctcgtcctcggcgtcgtcgtccgagttcgagttcacggtgacgcagtcgccgggggccaagcagcggtcggcggcgcagctgtgccccgccgacgacctcttctacaagggccagctgctgccgctgcacctgtcgccgcgcatctccatggtgcgcacgctgctgctcgcgtcggcctccacctcctccgcctccgcctccgactccacctccgcctccaactcctcccgcgactccaacggcagcacctcctcctccttctccaccgactgcgccgcgctgctgctcccggactccgcgccctcctcctcccgccccagctccgccgccgacgacgaccgccacc

SEQ ID NO: 69380 - DNA, 2086 bp, Zea mays
  unsure (1)..(2086): unsure at all n locations
  Clone ID: MRT4577_163269C.1
cgatgtaagagaggacgatgacgttgacacagtcttccggaagctcaaagaggaaacagtcatcgactcaaactggggcatagggatttatgttaagtcggtagccctaaaacatggcatcactacccaaggatgctcaataggtaccaacaaacaaaggagaagaaatgcttgtgttaagccaacacccaacagagatggagcaaacagaaaagcacaatccacccactatttatttatctcccttactgaagcacaagccttgatgactgaatggacagtgaatcccgagaaaaactgaaaatttcattgagtgaactactaccagctccaattcatgctggacgctgtttgagtgtacacagccaccatatgtgcaataactgacttctggctgaaagccgagaaaggcgatgacttatgtagattggttntggggggantangcgcacgaggagaggactagttctcttcatctctctcttcctcttctcccgccgcccagcttctctcttctctcggcggcgccaccacggcgatcaagcgcgatacgggcgtaaccgaagaatcgacaatgggcggcgagaaggaaacctttgatacgtccgacctcaacgcctccctccccgcggccgctgcagccctcagcgccgaggaccgcgccggcctcgtcaatgcccttaaggataagctgcagagcctggcgggccagcacgccgatgtgttagagacgctgtcgcccaatgttaggaagcgggttgagtttttgagagagatccagagtcaacacgatgaaattgaggccaagttttttgaagaacgagctgcccttgaggcaaagtaccagaagctttatgaacctttatacacaaagaggtatggaattgtaaatggagaagtggaggtagatggtgtttgtgatgaaccggccagtgagaatactgttgagggaaaagaaccagacgctaaaggagttccagacttttggcttactgccatgaaaacaaacgaggttttgtctgaggagatacaagagcgcgatgaagccgctttgaaatatctaaaagatatcaagtggtctagaatcgaggatcctaagggtttcaagctggattttttctttgatacaaacccattcttcaagaattctgtcctgacaaaaacgtaccacatggttgatgaagatgacccaattttggagaaagctattggaactgaaatcgagtggtatcctgggaaaaacctaacacagaagattctaaaaaagaaacctaaaaaaggttcaaagaatacgaagcctatcactaaaaccgaggactgtgagagtttcttcaactttttcaatcccccgcaggtccctgaagatgatgatgacatcgatgaagacactgctgatgagctgcagagtcaaatggagcatgattatgacattgggaccaccataagggataagattatccctcatgcagtttcctggtttactggtgaggctgtgcaaggtgaggattttggtgagttgggcgatgatgatgaagatgatgatgatgaagacgatgacgaagatgatgaggatgaagaagaggatgatgatgaggaagaggatgatgaggaagaaagcaagccagcaaggaagtcaggatctggtcgcagacataaggcgccacagaaggtgtcgcagggaaatgcggaacaaccagcggagtgcaagcagcagtagaatggcctgttgatgttggttgatgcagtattttccattgagctgcctagaggttatgtgtgcgcaggccagatgttggtgttgatatctcaagtgtggtttttattagtaggcggtgagggtgttgtctggagcactttggtgctgcgttggtggatggatattggtttgcaacttgtctgctagtgtcttggggattcagctacgtgcaatcggatgatattatatggttgtaattatctttgcactcggcctataacgggctctttatttgcactgggtctaaaaaaaaaaaaaaaaaaaaaaaaaaaaaaaaaaaaaaaaaaaaaaaaaacccacgcgtccgcccacgcgtccgcggacgcgtgg

SEQ ID NO: 69381 - DNA, 378 bp, Zea mays
  Clone ID: MRT4577_16326C.1
agaacggggagttcgccccagcaaccttttgggtgggtgggaccttggtgaatctgggggaacataacccaacaacccagggctgggggtgggttaaacaccgccccccttaggcccccactttgggccaacccgtagctgttttatattcccttcacaaaggagcctccactttaccccaaatgctggacccaagaatgggaagcaaattgggcctccgtgccaaacctacacgggcaaacctttacctttttttccctaggcaaaatttttacgggtaaagacttaagccttgggcactagctttatcaagaagttggactcccgtcctttagctaatttggggtcgggccatttaagtccttccggcccccgttt

SEQ ID NO: 69382 - DNA, 341 bp, Zea mays
  Clone ID: MRT4577_163270C.1
ctacaaaaagcatgtgacgtattcggtgtttaagatgcacacctagaagatatcatccatgacgatgatcaggacgctgatggcctgatcgactacaactagtatgtcataacgatgcgaaaggctattaacccactacggaaaaaggggcactgccctatgtatttttgtcatacataatcttcgtaccttcattaacctgcatgctcaatggttattgcagtgacttttgctttcctatgcccactgtaggtgacgtaactacttccgagctttggtgacagcgttacaactggccgcatatgtgctggatacgacaatctcccagacaccacctctgc

SEQ ID NO: 69383 - DNA, 396 bp, Zea mays
  Clone ID: MRT4577_163271C.1
aaaaaataagaatagaaatctattgtttaaaactatacaaaatggaaggggctgtgtctcattttatataccaccataacaaatatgttttttttttacttgacccattattttgggccttatgtaagtttcaattgggctaacctaggtctatttaattatcacattttagataaaacagtaacattcgccgactaaattagtcaccctatcaactcactttagatggattgataatgtaacatcctatacttggaacacacaccatacctgatctataagatggtacaacaataaaaataatgtttacaaagaaaggattatttggaatacattttactaaagtaattaacttttaatgatccttctcttattataactaaaaaagagccacaa

SEQ ID NO: 69384 - DNA, 269 bp, Zea mays
  Clone ID: MRT4577_163272C.1
gtgggttgtttttttgacaatagggtccagtccacttggaacaaggtgaattttaaaaaacagaactagaccctatgtgatcgcgctaccaggacgttatatgataacagtcgatcggatgaaacaaaaacccaacggatacgggaatctcataggtgactaaaggaccagcacaactaaaatgtgacagaaaggatatactacaggcaaagaagtgctgcttgcctataagtattggcacaatttatggacagttggggaccacaaat

SEQ ID NO: 69385 - DNA, 392 bp, Zea mays
  Clone ID: MRT4577_163273C.1
gggcacccccccagaccggaggggcaaaacccaagcccagacccgaaccccaggcaggggccagggggagagacacgcaagccggaggccggccagcccacgccaaccgccacagacccaacagacgcaccggcggcgcaccagcacaacgagcagccacccccagcgacgcagccacaaacccgccgagcaagagccgccgcggcaccgaggaaaggccagcacagccggaggcagaagagagaggacagcgaggagagacagcatgcccaacgaacagacaagccggcgccaagcaagcgagaaagaggggagccgatagaaccaaccagccgcgaggtggaggcaaaaacgagagaagccgaaaacgagccacacgagggaaagagaaa

SEQ ID NO: 69386 - DNA, 165 bp, Zea mays
  unsure (1)..(165): unsure at all n locations
  Clone ID: MRT4577_163274C.1
gcccgcaggnaccagaacccgaattccacgccaccacccacgcttttctgccgagcgagacgacctcacaagggggggtttttttttggacgacgacaaggtccaaaatatccaaaaaacactggaaaatgaggactcatggcactacaacataacactttcaat

SEQ ID NO: 69387 - DNA, 519 bp, Zea mays
  Clone ID: MRT4577_163275C.1
gccgtccgggatacacatattattgagaccaactagcaacatagcaaaagcgcaagtacagtaccaacaattggtcagacacaaagagttgtgcttacttatgctccttgggctttctgcagagcgctgatacacgaaccacttccgccacaatgctcacaagctgctatagctaacttctttccccgatagcctgtcaccaagaggtgaatacagaatgagaaaacccaacaggttaaccgtggaggatccaacaggcattcgaaggaggcatgtaacctttgtcacaacaagcatctgcaactatcggaaaaaccaatcacagcgaatacctttggtgcatgagttggaacaaaacatcaacgaccaacaacgacaacaacttgtgataggaaacctggcgggcaacttgcagcaaaagtagagtatcacatttaaccaacaggcagcaaagaactcggcgggaaacttgcagcaaacacgaacattcaacaagttagatgatgccaaccaccagga

SEQ ID NO: 69388 - DNA, 477 bp, Zea mays
  Clone ID: MRT4577_163276C.1
aaaaaaacagggccaggggaattaccctagcaataccccagggggtatataactggggacatttaaaaacctttggtactggctacggggcgggctaacaaaggaacaggggattaaatccaaggggccccaaaattttgccggggggacaattttccgggggacacaaagatcttacatataaggggggtcctagctaaggccaagggaaaaaacatacttatccaaaaaagcaccgggggggtttaaaccctcggacaaacatttgggtaagggggggcccccaaagggggggatttgggggcaaccagcttcggggggggaaaaccacaaaaaaggggggggggaccccgcaaaacaaaaaaacggggtccaagggggaaagggagaaacaagcgggggggcaataaaaccatgatagggggcagttggcataacgaggggggtaacttttacttataagggggacggctcccc

SEQ ID NO: 69389 - DNA, 124 bp, Zea mays
  Clone ID: MRT4577_163277C.1
ctcaatacctggtgatgtgtgtgtaatgtggtcacagtgggtatggctaccctaagccctctcagaacataagtaccctcttggacatctgtgccgtcaaatgaatatatactagttgattcat

SEQ ID NO: 69390 - DNA, 358 bp, Zea mays
  Clone ID: MRT4577_163278C.1
ggcaaaaaccaggccccaaaactaggggtggggatcatttatccctggccaggttaatcttcaaaaaaaaaaaaaaaaaaccgccccatttaccaggtgttataaccctccccagggaaaagaccccccccccccgttttcagtttatcccactgaaaaaaagctgcctttgcagtttcctttgcccaaaatgcattttttttataggcccaccccccaaaaccccgtgaaaaaaacccttgaaaaagggacggttaaactcccaaaccatgcccttgtacaaaagggggaaacccaacccaattttcggtccaatggcctggaccccaataaaaaacaaggttccaatccccccccc

SEQ ID NO: 69391 - DNA, 417 bp, Zea mays
  Clone ID: MRT4577_163279C.1
tttctccttttttttttttattcttctctcttttagggggaggttttttttttttttttttttcgcaccccaaaaaaaaccaaaaagttggttttatccataatccatccaaccccatttttaaaaaaaaaaaaagacaattaccgcccccacaaaccaggaagccccaccctaaaaaaaaatcttacaatacaccattttttgaccaaatcttttttcttccccaaggttttggcattaaaaaaaaaaaaaccccaaccctcaaaaaaaccttccttttttaaaaacccaaaattttccaatggaagagaaaaaaaccccccaacctcttttttttttacaaaacttgggaaccccacaaaaccaataggcccttaccaaaccctccttcccaaaaggggataaaaaaccttaaca

SEQ ID NO: 69392 - DNA, 139 bp, Zea mays
  Clone ID: MRT4577_16327C.1
ggatgcacgcgttcacaatctggaattcggctcgaggcgattctttcagcagctacaaaacctcctacgtggtcattctggccactctcgccggcatcgccctctgcctcgaggccatcacgtgggccatcgtcatcct

SEQ ID NO: 69393 - DNA, 2107 bp, Zea mays
  Clone ID: MRT4577_163280C.1
agacaggcgctccaggaggagataaccaagctcagaggcgttcgttccaccagcagcgttgaagacgaggaagccatgagacacagtgcacttatctgcaagattcctgatgcggtcaagacacaggtcagcaatgtcctttgcaatggtgtagtcagcacgagctaatattttgggtgcttcgttttgatgaccgatgaactgctcaggacggcccccgaaccgggcactccggtcagctgcggcgccatcccttcgatccgcggcaatgcggctggtccccggatctcgtctcgtctcgggactgaggctggggctggggctggggctggggctgggggcgattgggtcctttttttttttttttttttttttttttttttttttttttttttgtctcactttgagtactgccaacaaccacagtacattgtaggataggattgatttatttcagtacaaatggaggaggaggaggatccaaatgttgttcccacacatggacatggcagcttccaagaaagaagaaacagacacacaggcacacttcagcagaatacgtcactagagctgggatgttctagtgacgaatctggctggcatttcagggtgcctggggaatcctcacgtacgactgaagaaactgcagccagacaggagaagccagcgacatcgtcgtcttgatctcgtccgcgttgtacaggttgccgcggcgcagcccttccagcattttggtgacggcggagaggtccggcgggcaggcgccgccgtggagcgtcgtcgccgtcgtcagcgctgcctcctcctcgtggtcatggacaaccacgatctcggccgccttggcttccacctcgcctccggccgccagggcctcgtcggcgaggccagcgtacggcaggcccgagtggcacgccgcgcagtcgtgctgcatgaacaccttgtgcccgccccgcgccccgtcctgtgaccacgggtaagccgggcatgcgctggatgccgacgcgacggtcccggcgctgaggaagcccgccgccacgcccacgcccacacctgtgctgcagagccggcgggtgctcgtggttccctgtggctgcaggagctcacgcacgaggcccatcgccgccgcggccattgcgccggattcgcagtcgcggcaccaactctagtggtgagtgccgcctgtcccggccggcctcgagggttcctattaagacaccccgggccggctggtggagttagaccagttcaaccggagggcacgtcgtggtctcctccgcgctccccacgctgacgcggcccccccccaccaccacgcccccgacggcgcgcagacccggcgggcacgcgccgctccctagcgctggcgcggtcgcccccgctgcccactcccccggggcctcggcgccccacggcatccgccgccccgttttttttttttttttttttttttttttttttttttttttttttttttttttttttttttttcgatttaagaaactgcagccgcgcgcccagacaggagaagccagcgacatcgtcgtcttgatctcgtccgcgctgtacaggttgccgcggcgcagcccttccagcattttggtgacggcggagaggtccggcgggcaggcgccgccgtggagcgtcgtcgccgtcgtcagcgctgcctcctcctcgtggtcatggacaaccacgatctcggccgccttggcttccacctcgcctccggccgccagggcctcgtcggcgaggccagcgtacggcaggcccgagtggcacgccgcgcagtcgtgctgcatgaacaccttgtgcccgccccgcgccccgtcctgtgaccacgggtaagccgggcatgcgctggatgccgacgcgacggtcccggcgctgaggaagcccgccgccacgcccaccacctgtgctgctgagccggcgggtgctcgtggttccctgtggccgcaggagctcacgcacgaggcccatcgccgccgcggccattgcgccggattcgcagtcgcggcactcaccactagagttggtgccgcgactcggacgcgtgggcggacgcgtgggcggacgcgtgggcggacgcgtgggcggacgcgtggctgga

SEQ ID NO: 69394 - DNA, 279 bp, Zea mays
  Clone ID: MRT4577_163281C.1
ggatgctggctgcagtgagggcgccgcactccccaggtcccctctgtcttctctttcgactttgcagctgtagccgttttgctcctctacccgcaggagctgacatggacccaaatcctcgggccgccctggagcgccagagctccgccttcgggagcggcaacaattcttcgaggacattcaccaggcagagacagagtttgtctttcctctgtcccatctgcatctcgagtcgcagagaccccccataggtagtctctcatccatggaagtgcatgt

SEQ ID NO: 69395 - DNA, 462 bp, Zea mays
  Clone ID: MRT4577_163282C.1
ggggaaatgctgcaaaaaacacttggcatttataaaactgcccccccaaccaaaaaggggccgcgggaccccttttttccccccaataataaacgtaaaaagtttgcgggcttcccaaattaaaaaaaaccccccccccccccccaaattaaaacccgatggccaaactagcccccctcctccattttgttttccccagggttttcctccaaaggaggcatgtgggggtcggcctccggagccttgtccttgttaatgctgaggcccaatttgaccatccgggggatgcggctcccaaaggggttggggtcctcaaggctgaacccccaggggagcaccccccttttaaaaaaaaacatgacaaggtccttgacaaacttgtcgtttttgggggcctccccgcgcttggccaatttctccatgagggggttccccggggggaactccagggccttttggggg

SEQ ID NO: 69396 - DNA, 355 bp, Zea mays
  Clone ID: MRT4577_163283C.1
caacattttatcttgatctatgtatctggaaaggagtatctttttttttttcttctcctaacttgtctaggggaacatcatcatttgaattgaacaagcagcaagcaatggtacatgcataagtttctttaaactctgaactgtacaaaaaccttgacagtgacactcttcacaagtttgaaaaacacttcaacctaaaaaactgccggcccgagcataaactaacctttcctgttctctcaatattacctcgagatgccatgtcaaaacctgtatcaacagaatcttctgactctgctttcaccctttgtggcaagatcatccacgaacgacaacaacaattagccccagagat

SEQ ID NO: 69397 - DNA, 307 bp, Zea mays
  Clone ID: MRT4577_163284C.1
catcacctgtgacatagaaggggaacgcgataataacggtccgttgtgatgattcattgctcgacgagatcatcgaaagcgatcgctctagcgggatctctgtcactcaggactgggactctcatgaccaggtgttactacccggtggcgtctttgggaggtagtgtcactgcttggcatatacctagctatgaccgaaaccttgggagatgattcacggattacaattcggtggaggaactttatgacatccttggcgaaatgcacccggtgcaccagctaatcgggaggctttagaagcctgtgc

SEQ ID NO: 69398 - DNA, 339 bp, Zea mays
  unsure (1)..(339): unsure at all n locations
  Clone ID: MRT4577_163285C.1
gtcccccgcatctgtagccgggcgggtacaaaacttgtactacgacgcgacgcctcccctccggcctccaggctcccggctccggctgcctctctctctcttctctcctgctcctttctataaagcgcggacctcccagtcccactcccttcccgcaccgcagacgcagagcagccaaacgccacctcgagcccccgagcgcctgcgcagaccgcagccaggaaaccgccttctccgacatccggctctcctccacgctcccgctactccgctccagctccaccgccaccaactccgctccagctccaccgncaccaccaccaccgaggcaccgaccca

SEQ ID NO: 69399 - DNA, 194 bp, Zea mays
  Clone ID: MRT4577_163286C.1
agcacggaattcggctcgaggcgggtcaaagaacatggtaaatacgcacaagcccgaccagatccggaacgaggagctccgaccagacaccacaaggcccgggcgggcagaaaacgcccagaggggcaagctcccgcagaggctgggagggcctgaacaggaaggtcacaggcacaaagaaaggccaaccgaac

SEQ ID NO: 69400 - DNA, 432 bp, Zea mays
  Clone ID: MRT4577_163287C.1
cggctgaagcatgagctgcatggcgagcactaacttggcctgcaataccggggaactgatacgtacgggggtgatcgttgggggcagatgggcatcatctgggtctacacttgcgattgcgaggagtgtgactttgacctgcaccccaagtgcgctttgcgtaagaagggcgaggaggaggaaaccaagtcgtccactgctgggtgttatgtgtgcaagggaagtgatgtgtgcattaaggcctagagttattctaccttggagctgctgaggtttgtttgttaataaatagaagtcgcacgctgaacccttaggagcatatgtgtatgcaaggctatgtgagtattgtgtccgatcaaagtaatgtggttttgcttgcatggtatttttggtcttaagcatgtaatggtggtggccgttcctttttttttg

SEQ ID NO: 69401 - DNA, 310 bp, Zea mays
  Clone ID: MRT4577_163288C.1
gggggtgaattataaagcccaaaccgttggaaagaagatcatatatgtgccatacacgaatggttggttgcataaatactgcatgaattttcgtccatgatccaactatatactatgtaataaggggctcgctggatgttactaaaagaacatggttctattattcatgttgagggagaacttagttggtgctttagaagccacaatggatgttattctgggggataccgactttaccagcttacagatagtggatgctctacatctttaggcctaacaggggatgcttgaacttgtaaggtcacaggaa

SEQ ID NO: 69402 - DNA, 474 bp, Zea mays
  Clone ID: MRT4577_163289C.1
aggctcagaaccctcgcgcactcattaactttagacaaaaaaacatcacagccgatgttattaagatccacgggtgctgaatgagacgggcaccactgatcacttatctcgcacctctgatgtttatttcacagctgtcttggggactagcgttctaggcctggtggtgacgggactctcaggcgcccccgaagaacatcgaccatgtggttcagttgacgcctggcatccgatgatcccacacgctacaccttcgtgagagcctccggggctcttgcttggctcgtgtccaccctggcctagatcataagggggagcgtgatcaacaacagctctgccacataatgagtttggcccgttcagagggatctggctgtcgggaaccttaatgcttgcaacaccatctgttccagctgccacatttgcaagatcaccgggatggtggggctcatcttctggagctccatgttactt

SEQ ID NO: 69403 - DNA, 949 bp, Zea mays
  Clone ID: MRT4577_16328C.1
ctcgaggccggccgggcgactccctgccgacctcccgcctacccccgctccgcgagttcctcctgctcccgctgctccgctccctgccccccggtcgcgcgctccacctgctcgactagatgccccgtcgcttcgtcgttgccccctcatacgccggttgtagtggccgcggcgctgctggtggtgtcgctggcggcatactgcagcacggacccgcttcggacgggcagcatggtggacttcccggggttcgagtcccacctcgtcgacctccctgatcccgacgagatgccgacgcacgcggacgaacgggagcggctccgcggagccgaggtgcggttccacggcgaggtgcaggggcccgagagcgtcgccttcgacccgcagggctgtacatgggtgtcgtcgatggccgggtcgtctcctgggacggcgagtggtgggtcccattcgcgacggcctccccgcgcgggacacaggagctctgcggcgggcccatggcctcgccgctggagtatctccccagcgagcacatctgcagccgcccgctcgggctctgtttcaataagattggggacctgtacatcgtcgacgcctactttggtttgctcaaagtcggccccgagggcgggctggccacgccgctcacaacggaggccgagggcgtgcgcttcaacttcaccaacgaccccgacctcgacgacgagggaaacatctacttcactaactccagaatccactaccagagacgggttggtgaccgtctgatcgttaacatcacgattcacgatcctgaaattggattggaacttgggaggttgtttgcttggattactttactttgaagtataaggtgtgcaaaccgtgcaaataggaaagtaacgtgttggtggaaatgtgaggatgcatttaaaaatatataagaagaggtacattatcgtttttgaac

SEQ ID NO: 69404 - DNA, 336 bp, Zea mays
  Clone ID: MRT4577_163290C.1
ccggattattgttgttattaaacgcagtaatgcagttattaatccggtgaccacggtccacggttgcggtgttgaactacaatataaaacacgcaataatcatgtttctagcatatgctagctcgtgatgacaagctctggtttatgtagcacatggtcacataaaaaaaaaaaaaaaaaaaaaaaaaaaaaaaggataaaaaaaaaaaaaaaaaaaaaagagggacaataaagctgtcgaagagaaagctgcccagacaggccaagccagcatctgtccggtgggaccgcgtccttcacggacaatagcgagaacatggcaggttgcaaaaagta

SEQ ID NO: 69405 - DNA, 322 bp, Zea mays
  Clone ID: MRT4577_163291C.1
cacttcacacactcacctggcttcaccagggggcggccaacaccattgttgaccttttcttctacccaccggccgcctatcacaccgcgaacccacagttctcttgctacccggtggacacaccaaccccacacggtaacttatttggtgctcaaatgcagaaggtgctcatgtgcacattttccccgggccacaccatagaaaagattcttcccctgccacgcgtagctcagacccaatggatcgctggccatgctcgtggctgccagtcccaggatggcgcctaccattcagaagccttacatgcgggagcactcttgcc

SEQ ID NO: 69406 - DNA, 417 bp, Zea mays
  unsure (1)..(417): unsure at all n locations
  Clone ID: MRT4577_163292C.1
acactatttcctcccatgcgggcgtgcgtgagcttctatcctctatatctgnnaaccttgatttttttttttttgcatatcaacactttattagtacaaggggacatcaccggggagggaccataatttaagtacgactttacaanatcacatggcaaacaaaccatccctgactgttatttctttgttctctttgataataatagcacgatacatgcatgacaccagtgaaacactacattagcatcagcttgtttgaatcctccatccagcaagcatacatttgtgtcaccttttctgcgacaccatatctaaattcctatccctagttcttctacttgggccaccatcattgtctatggcctcacacagcttcttctttttattggccttcccgacgctgtggtccacccctga

SEQ ID NO: 69407 - DNA, 161 bp, Zea mays
  Clone ID: MRT4577_163293C.1
gatcatcatacaaaattaaggggggtgggggtttatcctatggcgtgaactccaaaaaccagacagaaggggcgtgatacacctaaattaggcaaggagaacgggcacgaactcaggttgataaacagacagcatcaaatcggacaactaaaagggggggg

SEQ ID NO: 69408 - DNA, 263 bp, Zea mays
  Clone ID: MRT4577_163294C.1
actgtgacaatgcgtggcttggcattgatggaatgactggtgatattgtccagaggacggagctcaggatctgggattgcttcagcgtttaagtacaaacgtacaaggacagcaattgcagctgcttgcatgcttcagagaatggatgaccttgtcagcggtatcaataagacgcacgctcctggagcctcagcttcaaagcaacccccaatcgacactgtagtcgatgcttacattgagcaaatgataacagactagaggct

SEQ ID NO: 69409 - DNA, 304 bp, Zea mays
  Clone ID: MRT4577_163295C.1
atgcatcttatctccgaggcgtacgaggtgcttctttttttttgggccttgtcaacaccaagatcaacaacttttacataaatgtttcaacacacaacattggagcttgcggggccatatcaccatctgcatccaaaattaagatgacccaacgtgcggtacctacatcacaggtaaagcgctgcttcacaagattcttgacttgcctaccatacaaggcaaccttttattggaaccctgcagcttgcgtctagaacttgcagtggcaccacccacaaacgacaggttacccgacgggaggaac

SEQ ID NO: 69410 - DNA, 610 bp, Zea mays
  Clone ID: MRT4577_163296C.1
gttttgtactcaatcgtcgtcgtgtacgccaaagataggaagagcagagcgcaaggatgccggctagcctggtgacgtcgtcgctcctcccgccgtgccgcgcggccgcgacgtcggcgcgcgcgttgcgttcgttcgcccgccggccgccgccttcgtccgccggtctcgtccgcgtgcgctgccacgctgccactccgccgccgccggaggtcccgggccagatgacgccgcccgaggtgcctggcacggaccgccagccgctcgaggtgccggggacgaaccgcccgccggacgaggtgccgagcatcgacacgccgccagagttcaacgcgccgccgggcgtcgacgtgccgatgccggggcagccagcgcccggaccggagctcccgggtccggcgatgccgtcgccgccggcgccggaggtccctgtcgtgccgcccaaccccgacgtaccgccgccacagctcccggaggtggacccgcccagtccgccgcccgaggtcgtcccgccggagccgccaggcaccgcgacggcgccgcctccctttgtgtagctccgtggctccgccgccgtcgatggcgcgggccggtggcaggtggacagggc

SEQ ID NO: 69411 - DNA, 3204 bp, Zea mays
  Clone ID: MRT4577_163297C.1
atggcacctagcacaccaacatttactttgcgatcgattcttgaaaaggataagttaaatggaacaaaccatacggattggatccgtaacctgagaattgttctcagggctgaaaaaaaggaagacgttctagactccccactgccagaggatcctggtgaaaatgcaactgccgcagctaaaaccgcttacaagaaagcaatggatgctaatcttgaagtaagttgcctaatgcttgcttgcatggagcctgagctccagatgcagtttgagacaaaccatgaggtgtacgatatgatcgtggcgctcaaggatatgttccagactcaggctaggactgaaaggttcaatgtgtccaaagcctttctggaatgcaagctagcagaaggcgcagcagttgggccacacgtaatcaaaatggttggttacagtcagaggttggagaagctaggcttcccaataagccaagagttggccactgacttcattttggcatctcttccgcccagctatggaaacttcatcacgaactaccatatgcatggggcggagaggggcctcaatgaactatgtggcatgctgaaaactgcagagggggacataaagaaaagtgctggcagcagcggccatgtgatggcggtccaaaacaaacccaactttaagaagaagggtaagtctcaaaagaagaagggcaagggaaaggatacagtatccaagcccaatcaaaagcccaaggctggaccagctgcagatgcagagtgcttttattgcaaagaacttggtcactggaaaaggaattgcaagcagtacttggcctctattaaggatcgcggcggtaagggtacagccgcagcaggtacacttgctattcacattacagaaatttttcttgctgattcttatattaattcttgggtatttgataccggatcggttgcccatatttgcaattcgatgcagggaatgataagaagtagaagcgtgaaaagaggagaagttgatttccggcttacgccgcctggaacgcctcagaggaatggcgtgtctgagcgacgtaatcggactttattggatatggttcgatcaatgatgagccagtcggacctacctttgtcgttttggggatacgctctagaaacagcagctttcacactaaatagggtaccgtctaagtccgtagttaagacaccatatgagatgtggactgggaagactcccagcttgtcttttctgaagatttggggttgtgaggtttatgtcaagcgactacagtcggataaactcactccaaaatcggacaagtgcatgttcgtgggatatccaaaggaaactttaggatattacttttaccaccggtcagagggcaaagtgtttgtcgcccggaacggtgtgttcttagagaaagagtttctcaaaagagagaaaagtaaacaaaaggtgtatcttgaagaagttcaggatgagccagtgggacaagattcaacaagtgatgctaatgtagcagaacaagttgagacgtctatggcaagagaatcaccaccacaaccacgaaggtcagcaaggcttcgcgaggcacgaggagaagtgctattgttgggcaatggggaagtgttgttgttagacaacgacgaacctgcaacatattcagaagcgatgatggacccagattccgagaaatggcatgtcgccatgagatccgagatagattccatgggagaaaatcaagtttggaacttggttgacccgcctgatggtgttagacctatagaatgcaaatggatctataagaagaagaaagacatggatggaaatgttcacatctataaggctcgacttgttgcaaagggttttcgacaagttcaaggagttgactatgacgagacattctcgccagtagcgatgcttaaatctattcagatcattctagctattgccgcatatttcgattatgagatttggcagatggatgtcaaaacagctttccttaatggaaacctagatgaggacgtgtatatgatacagcccgagggttttgtcgatccgatcaatgctggaaagatatgcaaacttcagaaatccatttatgggttgaagcaagcatctcggagttggaacattcgttttgatgaagtgatcaaagggcttggttttcatcagaatgaagaagaagcttgtgtttacaagaaggaaagtgggagcgctgttgtatttctgatcttgtatgtggatgacatattattgattgggaatgacattcctatgctggagtccgtcaaggcttcactgaaaaagagtttttctatgaaggacttaggggaagcagcatatattttgggcataaggatctatagagataggtcgaagaggcttataggattaagtcaagatacgtacattgacaaggttttgaaacggttcaacatggaacagtccaagaaagggttcatacctatgtcacatggtaaacaccttagccagatgcaatgtcctgcaatggctaatgagcgggagcgcatgagtaaggtaccatacgcctcagcaattggttcaatcatgtatgccatgataagtacacgcccagatgtttcatacgctataagtgctacgagtagataccaggctgatccaggtgaggatcactggacagcggtaaaaggcattcttaagtacttaagaaggactaaagatatgttcctggtatatgggggtaaggaggagctcgttgtaactggttacaccgatgctagcttccaaactgacccagacgagttaaaatcgcaatcaggttttgtgttcacaataaatggtggtgctgttagttggaagagttccaaacaggagactgtgactgattctacaacagaagccgagtacattgcagcttctgaatctgcgaaggaaggtgtttggataaggaagttcctcatcgagcttggtgtgtttcctaatgcatctagcccattgaacctctactgtgacaacaatggggctattgcgcaagctaaggagccaaggaaccaccagaaaaacaaacacgtactgcggaagtttcacctcatacgggaattcattaggcggggtgagataaagatatgcaaaatacatacggatttgaatgttgctgatcctttgacaaaacctcttccacaacctaagcatgaggcacacgtgagatctatgggtattagatatcttctagattaa

SEQ ID NO: 69412 - DNA, 3039 bp, Zea mays
  Clone ID: MRT4577_163298C.1
atggttggttacagtcagaggttggagaagctaggcttcccaataagccaagagttggccactgacttcattttggcatctcttccgcccagctatggaaacttcattacgaactaccatatgcatggggcggagaggggcctcaatgaactatgtggcatgctgaaaacagcagagggggacataaagaaaagcgctggcagcagcggccatgtgatggcggtccaaaacaaacccaactttaagaagaagggtaaatctcaaaagaagaagggcaaggcaaaggatacagtatccaagccaaatcaaaagcccaaggctggaccagctgcagatgcagagtgcttttattgcaaagaacttggtcactggaaaaggaattgcaagcagtacttgtcctctattaaggatcgcggcggtaagggtacagccgcagcagttcctagtatgagtcgaaacattatgtctccttcatgtttgatgaaggatgattattcatttgcgagtgaaaacaatggttgtgtgatctctaagaatggcatgtttttggcttttgcatccattatgaatgggttattcattttaaatcttgatgatgcacctatctgtaatattagtgctaaaaggcctcgacctaatgatttaagtcctacctacatgtggcactgtcgtatgggtcatataagtgagaatcacatgaagaagcttcattctgatgggtttttaacttcgtttgattttgaatcatacgagacatgtgaagcttgcttacttggtaagatgaccaaggcacctttcacgggtttaccggagaggacattagatttattggaactcatacatactgatgtgtgcggaccaatgagtacgacagctaggggaggattccaatacttcataaccttcactgatgattttagtagatatgggtatgtctacttaatgaaacacaagtctgaatccttagaaaagttcaaagaatttcagaatgaagtagaaaatcagcgtgacaagaaaattaaagcactgcgatcagatcgtggaggtgaatatttgagtcatgagtttagcaatcatctaaagagttgtggaattgttccacagcttacgccgcctggaacacctcagaggaatggcgagtccgagcgacgtaatcggactttattggatatggttcgatcaatgatgagtcagtcagacctacctttgtcgttttggggatacgctctagaaacagcagctttcacactaaatagggtaccgtctaagtccgttgttaagacaccatatgagatgtggactgggaagactcctagtttgtcttttctgaagatttggggttgtgaggtttacgtcaagcgacttcagtcggataaactcactccaaaatcggacaattgcatgttcgtgggatatccaaaggaaactttaggatattacttttaccaccggtcagagggcaaagtgtttgtcgcctggaacgaagcgatgatggacctagattccgagaaatggcaagtcgccatgagatccgagatagattccatgggagaaaatcaagtttggaacttggttgacctgcctgatggtgttagacccatagaatgcaaatggatctataagaagaagaaagacatggatggaaatgttcacatctataaggctcgacttgttgcaaagggttttcgacaagttcaaggagttgactatgacgagacattctcgctagtagcgatgcttaaatctattcggatcattctagctattgccacatatttcgattatgagatttggcagatggatgtcaaaacagctttccttaatggaaacctagatgaggacgtgtatatgatacaacccgagggttttgtcgatccgatcaatgctggaaagatatgtaaacttcagaaatccatttatgggttgaagcaagcatctcggagttggaacattcgttttgatgaagtgatcaaagggcttggttttcatcagaatgaagaagaagcttgtgtttacaagaaggaaagtgggagcgctgttgtatttctgatcttgtatgtggatgacatattattgattgggaatgacattcctatgctggagtccgtcaaggcttcactgaaaaagagtttttctatgaaggacttaggggaagcagcatatattttgggcataaggatctatagagataggtcgaagaggcttataggattaagtcaagatacgtacattgacaaggttttgaaacggttcaacatggaacagtccaagaaagggttcatacctatgtcacatggtaaacaccttagccagatgcaatgtcctgcgacggctaatgagcgagagcgcatgagtaaggtaccatacgcctcagcgattggatcaatcatgtatgccatgataagtacacgcccagatgtttcatacgctataagtgctacgagtaggtaccaggctgatccaggtgaggatcactggacaacggtaaaaggcattcttaagtacttaagaaggactaaagatatgttcctggtatatgggggtaaggaggagctcgttgtaactggttacaccgatgctagcttccaaactgacccagacgagttaaaaccgcaatcaggttttgtgttcacaataaatggtggtgctgttagttggaagagttccaaacaggagactgtgactgattctacaacagaagccgagtatattgcagcttctgaatctgcgaaggaaggtgtttggataagaaagttcctcatcgagcttggtgtgtttcctaatgcttctagtccattgaacctctactgtgacaacaatggggctattgcgcaagctaaggagccaaggaaccaccagaaaaacaaacacgtactgcggaagtttcacctcatacgggaattcattaggcggggtgagataaagatatgcaaaatacatatagatttgaatgttgctgatcctttgacaaaacctcttccacaacctaagcatgaggcacacatgagatctatgggtattacatatcttctagattaa

SEQ ID NO: 69413 - DNA, 379 bp, Zea mays
  Clone ID: MRT4577_163299C.1
ggggccctctagggccgcccggaagcatagtaccattcactaacctaagaaaaacatggatgtgaatgagagaaccatgtggtcggtgatgcggtcacaggttgcgatggctgtggagctggagttcctggtgagcggtgcatggtgcggtcctgccaaagtccccccaggcacgaacatgacgggcacctatggcaaggactggctggacgctaaagcgacatggtatggcaagccgacgggtgccggacccgacgacaacgcaggaggctgcgggtacaaggacgtgaacaagccagccttgaatagcatgggcgcatgcgaaaacatgcgcatctttaaggatgggctgcagtgggggccctgctttaagaacaag

SEQ ID NO: 69414 - DNA, 520 bp, Zea mays
  unsure (1)..(520): unsure at all n locations
  Clone ID: MRT4577_16329C.1
cccacgcgtccgctctctcagctcagcagtttagagagagggatcacacaccctggggtggcgcatctgttcgcgcttggggacgccttgtgcccggcaggccctctcctggctcattcgtgaaggggcgcangggcggtcccgggggcggtttgcttttgtgcctctccttgcgggggtctgctgggggnnccnctcnctctncctccgccctccctgctcccgctgtttgggtcctccaccctggtggtggtgcctctggacccggctaggcgcgtgggcttcgcgcggtgacgcgctctggccctgatcgctcgcgtgggggcatgctgcccctgcctgggggtggcgcgcgccgacttgcgcgacccaagtgtgggggtctccncctcccctgcgtggtcgactgcctgggggcggtccgcgtggngngccgaccacctcctgcgtgctgtgtcggggctgcccgaaccggctctggtgcggcgcccgcgacgccagcgcggtcccccctggcacc

SEQ ID NO: 69415 - DNA, 176 bp, Zea mays
  Clone ID: MRT4577_1632C.1
ctaccaggcacacagtttttacaaaatttgttccaaattttttacatataagggggagtgaggtaaacaagtttatttccgaaccaaaagacccttttttttgaagggggaagtgtttaaaattggttcgctttatacttctactctttaattttaatattttttttataatttaa

SEQ ID NO: 69416 - DNA, 4275 bp, Zea mays
  Clone ID: MRT4577_163300C.1
atggcacctagcacaccaacatttactttgcgatcgattcttgaaaaggataagttaaatggaacaaactatacggattggatccgtaacctgagaattgttctcagggctgaaaaaaaggaagacgttctagacaccccactgccagaggatcctggtgaaaatgcaactgccgcagctaaaaccgcttacaagaaagcaatggatgctaatcttgaagtaagttgcctaatgcttgcttgcatggagcctgagctccagatgcagtttgagacaaaccatgaggtgtacgatatgatcgtggcgctcaaggatatgttccagactcaggctaggactgaaaggttcaatgtgtccaaagcctttctggaatgcaagctagcagaaggcgcagcagttgggccacacgtaatcaaaatggttggttacagtcagaggttggagaagctaggcttcccaataagccaagagttggccactgacttcattttggcatctcttccgcccagctatggaaacttcatcacgaactaccatatgcatggggcggagaggggcctcaatgaactatgtggcatgctgaaaactgcagagggggacataaagaaaagtgctggcagcagcggccatgtgatggcggtccaaaacaaacccaactttaagaagaagggtaagtctcaaaagaagaagggcaagggaaaggatacagtatccaagcccaatcaaaagcccaaggctggaccagctgcagatgcagagtgcttttattgcaaagaacttggtcactggaaaaggaattgcaagcagtacttggcctctattaaggatcgcggcggtaagggtacagccgcagcaggtacacttgctattcacattacagaaatttttcttgctgattcttatattaattcttgggtatttgataccggatcggttgcccatatttgcaattcgatgcagggaatgataagaagtacaagcgtgaaaagaggagaagttgatttccgggtaggcaataatgcaagagttgctgcgttgaccgtcgggacgatgcaactccacctcccatcaggatttattttggagttaaataattgttatctagttcctagtatgagtcgaaacattatgtctccttcatgtttgatgaaggatggttattcatttgcgagtgaaaacaatggttgtgtgatctctaagaatggcatgtttgtggcttttgcatccattatgaatgggttattcattttaaatcttgatgatgcacctatctgtaatattagtgctaaaaggcctcggcctaatgatttaagtcctacctacatgtggcactgtcgtttgggtcatataagtgagaatcgcatgaagaagcttcattctgatgggcttttaacttcgtttgattttgaatcatacgagacatgtgaagcttgcttacttggtaagatgaccaaggcgcccttcacgggtttaccggagaggacgttagttttattggaactcatacatactgatgtgtgcggaccaatgagtacgacagctaggggaggattccaatacttcataaccttcactgatgattttagtagatatgggtatgtctacttaatgaaacacaagtctgaatccttagaaaagttcaaagagtttcagaatgaagtagaaaatcagcgtggcaagaaaattaaagcactgcgatcagatcgtggtggtgaatatttgagtcatgagtttagcaatcatctaaagagttgtggaattgttccacagcttacgccgcctggaacgcctcagaggaatggcgtgtctgagcgacgtaatcggactttattggatatggttcgatcaatgatgagccagtcggacctacctttgtcgttttggggatacgctctagaaacagcagctttcacactaaatagggtaccgtctaagtccgtagttaagacaccatatgagatgtggactgggaagactcccagcttgtcttttctgaagatttggggttgtgaggtttacgtcaagcgactacagtcggataaactcactccaaaatcagacaagtgcatgttcgtgggatatccaaaggaaactttaggatattacttttaccaccggtcagagggcaaagtgtttgtcgcccggaacggtgtgttcttagagaaagagtttctcaaaagagagaaaagtaaacaaaaggtgtatcttgaagaagttcaggatgagccagtgggacaagattcaacaagtgatgctaatgtagcagaacaagttgagacgtctatggcaagagaatcaccaccacaaccacgaaggtcagcaaggcttcgcgaggcacgaggagaagtgctattgttgggcaatggggaagtgttgttgttagacaacgacgaacctgcaacatattcagaagcgatgatggacccagattccgagaaatggcatgtcgccatgagatccgagatagattccatgggagaaaatcaagtttggaacttggttgacccgcctgatggtgttagacctatagaatgcaaatggatctataagaagaagaaagacatggatagaaatgttcacatctataaggctcgacttgttgcaaagggttttcgacaagttcaaggagttgactatgacgagacattctcgccagtagcgatgcttaaatctattcggatcattctagctattgccgcatatttcgattatgagatttggcagatggatgtcaaaacagctttccttaatggaaacctagatgaggacgtgtatatgatacagcccgagggttttgtcgatccgatcaatgctggaaagatatgcaaacttcagaaatccatttatgggttgaagcaagcatctcggagttggaacattcgttttgatgaagtgatcaaagggcttggttttcatcagaatgaagaagaagcttgtgtttacaagaaggaaagtgggagcgctgttgtatttctgatcttgtatgtggatgacatattattgattgggaatgacattcctatgctggagtccgtcaaggcttcactgaaaaagagtttttctatgaaggacttaggggaagcagcatatattttgggcataaggatctatagagataggtcgaagaggcttataggattaagtcaagatacgtacattgacaaggttttgaaacggttcaacatggaacagtccaagaaagggttcatacctatgtcacatggtaaacaccttagccagatgcaatgtcctgcaacggctaatgagcgggagcgcatgagtaaggtaccatacgcctcagcaattggttcaatcatgtatgccatgataagtacacgcccagatgtttcatacgctataagtgctacgagtagataccaggctgatccaggttttgtgttcacaataaatggtggtgctgttagttggaagagttccaaacaggagactgtgactgattctacaacagaagccgagtacattgcagcttctgaatctgcgaaggaaggtgtttggataaggaagttcctcatcgagcttggtgtgtttcctaatgcatctagcccattgaacctctactgtgacaacaatggggctattgcgcaagctaaggagccaaggaaccaccagaaaaacaaacacgtactgcggaagtttcacctcatacgggaattcattaggcggggtgagataaagatatgcaaaatacatacggatttgaatgttgctgatcctttgacaaaacctcttccacaacctaagcatgaggcacaccgtagcctccccgtaatcctacagaatatacacattataactcctatcaaatcaagagatatcggactggacaagacgatgcacccattgggtccactacttcagatcatcagcgaagacatgcatggcgatcttctgaagaaagtgctatttgggaccttcgagtcgattgtttcccaagtcgtcccaaagctcgggggctacaccccttgggtgcacctacccaagacactcggcggaagttgcattccaagcaagtttctgcatctcagagctcaggcgccaatggtgacaaatgagattgttattgaagctatgatcaaggggcttcaaccaggaccaacaacacagtatttcgccaggaagcccccacaaactctggagaagcttcttcagaaaatggacgagtacatcagagccgataatgactttcgacagagaagggaagaagcctacagatactctgtaaggcccaaaatatgcataaaaacatataaataa

SEQ ID NO: 69417 - DNA, 678 bp, Zea mays
  unsure (1)..(678): unsure at all n locations
  Clone ID: MRT4577_163301C.1
cattgggtacctcgaggccggccgggctcttcctagcatacatagcagagcaggcgaacggcgcaccgtacatctcactgccgctcccttctcgtctcgtgacgtgtcctctcgtcacctctcctcggcgcatccggtaccgacccaccgcccctctgctctctccttccgccggaatcgctgctcctctctgtgtgctgtcgatttgtgcgacgactgttaaattgattaggacccatccttctgttgatcagtggctgacggtgatgatatccagccacttgtgcgtgacaatggtactgaaatgcccaaagctgagtttgctggtgatgatgcgcccaaagcacagctccctaagatagtcggacggcctcggcacacaggcgatatagttgcaatggaccagaacgacgactatgtacgtgaccaggaacagtctaaaagacgcatcttgaccttgaactaccctattgtagcacgtatctggaaccactgagatgacatagagagaatctgtcaccacaccttctacactgaactgcgcgttgctcctgaacagaacccagtttgctggtgatcagaaacactctctgaacctcatggtcaacagatagnagatgacccaaatgatgttcgagacattcaatgctccgtcgatgtatgctgctatccaagctg

SEQ ID NO: 69418 - DNA, 3903 bp, Zea mays
  Clone ID: MRT4577_163302C.1
atggcacctagcacaccaacatttactttgcgatcgattcttgaaaaggataagttaaatggaacaaactatacggattggatccgtaacctgagaattgttctcagggctgaaaaaaaggaagacgttctagacaccccactgccagaggatcctggtgaaaatgcaactgccgcagctaaaaccgcttacaagaaagcaatggatgctaatcttgaagtaagttgcctaatgcttgcttgcatggagcctgagctccagatgcagtttgagacaaaccatgaggtgtacgatatgatcgtggcgctcaaggatatgttccagactcaggctaggactgaaaggttcaatgtgtccaaagcctttctggaatgcaagctagcaaaaggcgcagcagttgggccacacgtaatcaaaatggttggttacagtcagaggttggagaagctaggcttcccaataagccaagagttggccactgacttcattttggcatctcttccgcccagctatggaaacttcatcacgaactaccatatgcatggggcggagaggggcctcaatgaactatgtggcatgctgaaaactgcagagggggacataaagaaaagtgctggcagcagcggccatgtgatggcggtccaaaacaaacccaactttaagaagaagggtaagtctcaaaagaagaagggcaagggaaaggatacagtatccaagcccaatcaaaagcccaaggctggaccagctgcagatgcagagtgcttttattgcaaagaacttggtcactggaaaaggaattgcaagcagtacttggcctctattaaggatcgcggcggtaagggtacagccgcagcaggtacacttgctattcacattacagaaatttttcttgctgattcttatattaattcttgggtatttgataccggatcggttgcccatatttgcaattcgatgcagggaatgataagaagtagaagcgtgaaaagaggagaagttgatttccgggtaggcaataatgcaagagttgctgcgttgaccgtcgggacgatgcaactccacctcccatcaggatttattttggagttaaataattgttatctagttcctagtatgagtcgaaacattatgtctccttcatgtttgatgaaggatggttattcatttgcgagtgaaaacaatggttgtgtgatctctaagaatggcatgtttgtggcttttgcatccattatgaatgggttattcattttaaatcttgatgatgcacctatctgtaatattagtgctaaaaggcctcggcctaatgatttaagtcctacctacatgtggcactgtcgtttgggtcatataagtgagaatcgcatgaagaagcttcattctgatgggcttttaacttcgtttgattttgaatcatacgagacatgtgaagcttgcttacttggtaagatgaccaaggcgcccttcacgggtttaccggagaggacgttagatttattggaactcatacatactgatgtgtgcggaccaatgagtacgacagctaggggaggattccaatacttcataaccttcactgatgattttagtagatatgggtatgtctacttaatgaaacacaagtctgaatccttagaaaagttcaaagagtttcagaatgaagtagaaaatcagcgtggcaagaaaattaaagcactgcgatcagatcgtggtggtgaatatttgagtcatgagtttagcaatcatctaaagagttgtggaattgttccacagcttacgccgcctggaacgcctcagaggaatggcgtgtctgagcgacgtaatcggactttattggatatggttcgatcaatgatgagccaggtaccgtctaagtccgtagttaagacaccatatgagatgtggactgggaagactcccagcttgtcttttctgaagatttggggttgtgaggtttacgtcaagcgactacagtcggataaactcactccaaaatcggacaagtgcatgttcgtgggatatccaaaggaaactttaggatattacttttaccaccggtcagagggcaaagtgtttgtcgcccggaacggtgtgttcttagagaaagagtttctcaaaagagagaaaagtaaacaaaaggtgtatcttgaagaagttcaggatgagccagtgggacaagattcaacaagtgatgctaatgtagcagaacaagttgagacgtctatggaaagagaatcaccaccacaaccacgaaggtcagcaaggcttcgcgaggcacgaggagaagtgctattgttgggcaatggggaagtgttgttgttagacaacgacgaacctgcaacatattcagaagcgatgatggacccagattccgagaaatggcatgtcgccatgagatccgagatagattccatgggagaaaatcaagtttggaacttggttgacccgcctgatggtgttagacctatagaatgcaaatggatctataagaagaagaaagacatggatggaaatgttcacatctataaggctcgacttgttgcaaagggttttcgacaagttcaaggagttgactatgacgagacattctcgccagtagcaatgcttaaatctattcggatcattctagctattgccgcatatttcgattatgagatttggcagatggatgtcaaaacagctttccttaatggaaacctagatgaggacgtgtatatgatacagcccgagggttttgtcgatccgatcaatgctggaaagatatgcaaacttcagaaatccatttatgggttgaagcaagcatctcggagttggaacattcgttttgatgaagtgatcaaagggcttggttttcatcagaatgaagaagaagcttgtgtttacaagaaggaaagtgggagcgctgttgtatttctgatcttgtatgtggatgacatattattgattgggaatgacattcctatgctggagtccgtcaaggcttcactgaaaaagagtttttctatgaaggacttaggggaagcagcatatattttgggcataaggatctatagagataggtcgaagaggcttataggattaagtcaagatacgtacattgacaaggttttgaaacggttcaacatggaacagtccaagaaagggttcatacctatgtcacatggtaaacaccttagccagatgcaatgtcctgcaacggctaatgagcgggagcgcatgagtaaggtaccatacgcctcagcaattggttcaatcatgtatgccatgataagtacacgcccagatgtttcatacgctataagtgctacgagtagataccaggctgatccaggtgaggatcactggacagcggtaaaaggcattcttaagtacttaagaaggactaaagatatgttcctggtatatgggggtaaggaggagctcgttgtaactggttacaccgatgctagcttccaaactgacccagacgagttaaaatcgcaatcaggttttgtgttcacaataaatggtggtgctgttagttggaagagttccaaacaggagactgtgactgattctacaacagaagccgagtacattgcagcttctgaatctgcgaaggaaggtgtttggataaggaagttcctcatcgagcttggtgtgtttcctaatgcatctagcccattgaacctctactgtgacaacaatggggctattgcgcaagctaaggagccaaggaaccaccagaaaaacaaacacgtactgcggaagtttcacctcatacgggaattcattaggcggggtgagataaagatatgcaaaatacatacggatttgaatgttgctgatcctttgacaaaacctcttccacaacctaagcatgaggcacacgtgagatctatgggtattagatatcttctagattaa

SEQ ID NO: 69419 - DNA, 744 bp, Zea mays
  Clone ID: MRT4577_163303C.1
cattgggtacctcgaggccggccggggttctgccgcccgcatccgcgccgcaacccgcagccgccctgcaggcaaccgcccgcatccgcggcagcgccgcggctgcttccatccatggcgccgcggcttccatcaatcgccagcgcgtcctccgtactcctgtcatccgaggaaagccttccatccatggcgccgttgctgcaattccccccgcgatccacgctacctccattgcccacacgatccgcgctccctccattgctaccgcgatgccccttcccaggaacccttccatccatggcgtcgttgctgcaggtgccccgcaatcaactccattgccgccacgatccccttccaccgacgacactcaccttccatcgacaaaactgatcttcctccattccaccgacggcactcacctctcagatcccgtgctcatcaccatcgtgcccctcgctcgccgcccccacctcaccaagagccttagccgtccctagagaagacacggaggtgcagtgccagtgctttcctcaagtgcacctcggattttcggtaccggccagattgggacgaattcaacattcatcggctccaccaaaacactgccactatgatgtgtatgcttgcgtcaggacaggggacccaaaagtacttcatagatgaatgtgacattttccacaagaacgagatacgaaatggccaaggactgctgacgatgatgacgacatgggcaccatcgctgcc

SEQ ID NO: 69420 - DNA, 513 bp, Zea mays
  Clone ID: MRT4577_163304C.1
actcctatgggcgattgcccccctcgaggccggccggggaaatcaacacttctctctaccaacacaaacctacatcctcaacattcaaaatgggtaacttccacgagagctccaacaacatctggctcgaggacggccacatcctccacgccgagtgcggcaacggcgagggcgactatgtcgagtcaactcttgaccttgactactatatcggtaacgacgatggctctttctcatggggaggcgagaacttctctggctctgcttccaacatcaccctcgacatcgaaggcgatgataacattcccgttctccgcgccgagttgaaccccatggatggtgatcccgtcgaggccaatgtcaacctttccgagcgcatcggcaacgactgtggcactcttatcttcctcgcttaaactggatagagaacagcacatgtgatgagaagagaggtagcatcaaacaataaacaaagttaaacatttcaaaaaaaaaaaaaaaaaacccgcggcc

SEQ ID NO: 69421 - DNA, 3567 bp, Zea mays
  Clone ID: MRT4577_163305C.1
atggcacctagcacaccaacatttactttgcgatcgattcttgaaaaggataagttaaatggaacaaactatacggattggatccgtaacctgagaattgttctcagggctgaaaaaaaggaagacgttctagacaccccactgccagaggatcctggtgaaaatgcaactgctgcagctaaaaccgcttacaagaaagcaatggatgctaatcttgaagtgagttgcctaatgcttgcttgcatggagcctgagctccagatgcagtttgagacaaaccatgagaggttggagaagctaggcttcccaataagccaagagttggccactgacttcattttggcatctcttccgcccagctatggaaacttcatcacgaactaccatatgcatggggcggaaaggggcctcaatgaactatgtggcatgctgaaaacagcagagggggacataaagaaaagcgctggcagcagcggccatgtgatggcggtccaaaacaaacccaactttaagaagaagggtaagtctcaaaagaagaagggcaaggcaaaggatacagtatccaagccaaatcaaaatcccaaggctggaccagctgcagatgcagagtgcttttattgcaaagaacttggtcactggaaaaggaattgcaagcagtacttggcctctatcaaggatcgcggcggtaagggtacagccgcagcaggtacacttgctattcacattacagaaatttttcttgctgattcttatattaattcttgggtatttgataccggatcggttgcccatatttgcaattcgatgcagggaatgataagaagtagaagcgtgaaaagaggagaagttgatttccgggatggttattcatttgcgagtgaaaacaatggttgtgtgatctctaagaatggcatgtttgtggcttttgcatccattatgaatgggttattcattttaaatcttgatgatgcacccatctgtaatattagtgctaaaaggcctcggcctattgatttaagtcctacctacatgtggcactgtcgtttgggtcatataagtgagaatcgcatgaagaagcttcattctgatgggcttttaacttcatttgattttgagtcatacgagacatgtgaagcttgcttacttggtaagatgaccaaggcgcctttcacgggtttaccggagaggacattagatttattggaactcatacatactgatgtgtgcggaccaatgagtacgacagctaggggaggattccaatacttcataaccttcactgatgattttagtagatatgggtatgtctacttaatgaaacacaagtctgaatccttagaaaagttcaaagagtttcagaatgaagtagaaaatcagcgtggcaagaaaattaaagcactgcgatcagatcgtggtggtgaatatttgagtcatgagtttagcaatcatctaaagagttgtggaattgttccacagcttacgccgcctggaacgcctcagaggaatggcgtgtctgagcgacgtaatcggactttattggatatggttcgatcaatgatgagccagtcggacctacctttgtcgttttggggatacgctctagaaacagcagctttcacactaaatagggtaccgtctaagtccgtagttaagacaccatatgagatgtggactgggaagactcccagtttgtcttttctgaagatttggggttgtgaggtttacgtcaagcgactacagtcggataaactcactccaaaatcggacaagtgcatgttcgtgggatatccaaaggaaactttaggatattacttttaccaccggtcagagggaaaagtgtttgtcgcccggaacggtgtgttcttagagaaagagtttctcaaaagagagaaaagtaaacaaaaggtgtatcttgaagaagttcaggatgagccagtgggacaagattcaacaagtgatgctaatgtagcagaacaagttgagacgtctatggcaagagaaacaccaccacaaccacgaaggtcagcaaggcttcgtgaggcacgaggagaagtgctattgttgggcaatggggaagtgttgttgttagacaacgacgaacctgcaacatattcagaagcgatgatggacccagattccgagaaatggcatgtcgccatgagatccgagatagattccatgggagaaaatcaagtttggaacttggttgacccgcctgatgttcaaggagttgactatgacgagacattctcgccagtagcgatgcttaaatctattcggatcattctagctattgctgcatatttcgattatgagatttggcagatggatgtcaaaacagctttccttaatggaaacctagatgaggacgtgtatatgatacagcccgagggttttgtcgatccgatcaatgctggaaagatatgcaaacttcagaaatccatttatgggttgaagcaagcatctcggagttggaacattcgttttgatgaagtgatcaaagggcttggttttcatcagaatgaagaagaagcttgtgtttacaagaaggaaagtgggagcgctgttgtatttctgatcttgtatgtggatgacatattattgattgggaatgacattcctatgctggagtccgtcaaggcttcactgaaaaagagtttttctatgaaggacttaggggaagcagcatatattttgggcataaggatctatagagataggtcgaagaggcttataggattaagtcaagatacgtacattgacaaggttttgaaacggttcaacatggaacagtccaagaaagggttcatacctatgtcacatggtaaacaccttagccagatgcaatgtcctgcaacggctaatgagcgggagcgcatgagtaaggtaccatacgcctcagcaattggttcaatcatgtatgccatgataagtacacgcccagatgtttcatacgctataagtgctacgagtagataccaggctgatccaggtgaggatcactggacagcagtaaaaggcattcttaagtacttaagaaggactaaagatatgttcctggtatatgggggtaaggaggagctcgttgtaactggttacaccgatgctagcttccaaactgacccagacgagttaaaatcgcaatcaggttttgtgttcacaataaatggtggtgttgttagttggaagagttccaaacaggagactgtgactgattctacaatagaagccgagtacattgcagcttctgaatctgcgaaggaaggtgtttggataagaaagttcctcatcgagcttggtgtgtttcctaatgcatctagcccattgaacctctactgtgacaacaatggggctattgcgcaagctaaggagccaaggaaccaccagaaaaacaaacacgtactgcggaagtttcacctcatacgggaattcattaggcggggtgagataaagatatgcaaaatacatacggatttgaatgttgctgatcctttgacaaaacctcttccacaacctaagcatgaggcacacgtgagatctatgggtattagatatcttctagattaa

SEQ ID NO: 69422 - DNA, 571 bp, Zea mays
  Clone ID: MRT4577_163306C.1
ccaatacttagacaagtatattagtacacaaaaccaatgtactaagacttagaaacatacctttgctcttgattttcactttattcatccataaacatgaattcacatttaagcacttgtgttggcactcaatcaccaaaatacttagaaatggcccaagggcacatttccctttcagacttcagtcagataaactcactccaaaatcggacaagtgcatgtttctgggatatccaaaggaaactttgggatattacttttaccaccggacagagggcaaagtgtttgttgcccagaatagtgtgttcttagagaaagagtttctcaaaagagagaaaagtaaacaaaaagtgtatcttgaagaagttcaggatgagccagtgtcacatgatccaacaagtgatgctaatgtagcagaataagttgagacgtctgtggcaagagaaacaccaccacaaccacgaaggtcagcaaggcttcgtgaagcacgtcaagaagtgctattgttgggcaatgaggaagtgttgttgttagacaacgttgaacctgcaacatatgcagaagcgatgat

SEQ ID NO: 69423 - DNA, 743 bp, Zea mays
  Clone ID: MRT4577_163307C.1
aatatattcaaggctgcttacagcagagagattgagccattgacagataaaacccaatggccacaagtagaactaccttttgctgttggcgcaccacttgctaagggaaccgcagggagacgaaggaaactaacactaaaaggatgtttggaaggtggccaaaaaaagaaaaatgttgaaggtgctaacgaaggcgaaaatggtgctgttccaatcaatgcaaagggacagaaaatgacaaggggaccaatgacttgcattcgatgtggagaaaaaggtcatagacaagctagttccaagtgtccactcaatgggactgcaaaaaagagaaagtggaatcaacctaggaggaatattacaaaagctaagccaagagaactttgcacaccacacaggccaactagtgaagaaatattacgggatagtccaggaaggatcactagaagccgccttgcgttcttgttaggagagggcagttcttcccagaccagtaccacaaatcctgtgagagttccagcaacgtctgcaccaaacaagatgactccaaagaggagactatacagtggataaatgatttgttaattctttttaccttctacacgagatatgacctttttacgatgagatgtaaactcgtcacattttttgattatttgtgactatttaacatttatgagatgaatagttggaagaggtcaggctgttgtacagctccggaaaaaaaaaaaaaaaaaaggccccta

SEQ ID NO: 69424 - DNA, 147 bp, Zea mays
  Clone ID: MRT4577_163308C.1
attcaaacagtattgcatcagacattgaacccaaatttgcgtaataccgttacattccaggacattaaaggccccctttatatatgaaaccatgactctagcaaatcccgcaaacagaagttagaaaggtccaccagctatcgcctg

SEQ ID NO: 69425 - DNA, 4179 bp, Zea mays
  Clone ID: MRT4577_163309C.1
atggggggtctggcgccggtgagaaattgcgacgcgaccgtccaagttctggggtggggaggccacgacactactgggacgcccctacgaccctcccaagtcaccaatcgagaacggagcatgacccaggacgtaggccggcgacggcgctcctccgccagcgattcaattggtgactgggtactcgacgagatggaaaagggagctggagcgatggcacctagcacaccaacatttactttgcgatcaattcttgaaaaggataagttaaatggaacaaactatacggattggatccgtaacctgagaattgttctcagggctgaaaaaaaggaagacgttctagacaccccactgccagaggatcctggtgaaaatgcaactgctgcagctaaaaccgcttacaagaaagcaatggatgctaatcttgaagtgagttgcctaatgcttgcttgcatggagcctgagctccagatgcagtttgagtcaaaccatgaggtgtacgatatgatcgtggcgctcaaggatatgttccagactcaggctaggactgaaaggttcaatgtgtccaaagcctttctggaatgcaagctagcagaaggcgcagcagttgggccacatgtaatcaaaatggttggttacagtcagaggttggagaagctaggcttcccaataagccaagagttggccactgacttcattttggcatctcttccgcccagctatggaaacttcatcacgaactaccatatgcatggggcggagaggggcctcaatgaactatgtggcatgctgaaaacagcagagggggacataaagaaaagcgctggcagcagcggccatgtgatggcggtccaaaacaaacccaactttaagaagaagggtaaatctcaaaagaagaagggcaaggcaaaggatacagtatccaagccaaatcaaaagcccaaggctggaccagctgcagatgcagagtgcttttattgcaaagaacttggtcactggaaaaggaattgcaagcagtacttggcctctattaaggatcgcggcggtaagggtacagccgcagcaggtacacttgctattcacattacagaaatttttcttgctgattcttatattaattcttgggtatttgataccggatcggttgcccatatttgcaattcgatgcagggaatgataagaagtagaagcgtgaaaagaggagaagttgatttccgggtaggcaataatgcaagagttgctacgttgactgtcgggacgatgcaactccacctcccatcaggatttattttggagttaaataattgttatctagttcctagtatgagtcaaaacattatgtctccttcatgtttgatgaaggatggttattcatttgcgagtgaaaacaatggttgtgtgatctctaagaatggcatgtttgtggcttttgcatccattatgaatgggttattcattttaaatcttgatgatgcacctatctgtaatattagtgctaaaaggcctcggcctaatgatttaagtcctacctacatgtggcactgtcgtttgggtcatataagtgagaatcgcatgaagaagcttcattctgatgggcttttaacttcgtttgattttgaatcatacgagacatgtgaagcttgcttacttggtaagatgaccaaggcgcccttcacgggtttaccggagaggacgttagatttattggaactcatacatactgatgtgtgcggaccaatgagtacgacagctaggggaggattccaatacttcataaccttcactgatgattttagtagatatgggtatgtctacttaatgaaacacaagtctgaatccttagaaaagttcaaagagtttcagaatgaagtagaaaatcagcgtggcaagaaaattaaagcactgcgatcagatcgtggtggtgaatatttgagtcatgagtttagcaatcatctaaagagttgtggaattgttccacagcttacgccgcctggaacgcctcagaggaatggcgtgtctgagcgacgtaatcggactttattggatatggttcgatcaatgatgagccagtcggacctacctttgtcgttttggggatacgctctagaaacagcagctttcacactaaatagggtaccgtctaagtccgtagttaagacaccatatgagatgtggactgggaagactcccagcttgtcttttctgaagatttggggttgtgaggtttacgtcaagcgactacagtcggataaactcactccaaaatcggacaagtgcatgttcgtgggatatccaaaggaaactttaggatattacttttaccaccggtcagagggcaaagtgtttgtcgcccggaacggtgtgttcttagagaaagagtttctcaaaagagagaaaagtaaacaaaaggtgtatcttgaagaagttcaggatgagccagtgggacaagattcaacaagtgatgctaatgtagcagaacaagttgagacgtctatggcaagagaatcaccaccacaaccacgaaggtcagcaaggcttcgcgaggcacgaggagaagtgctattgttgggcaatggggaagtgttgttgttagacaacgacgaacctgcaacatattcagaagcgatgatggacccagattccgagaaatggcatgtcgccatgagatccgagatagattccatgggagaaaatcaagtttggaacttggttgacccgcctgatggtgttagacctatagaatgcaaatggatctataagaagaagaaagacatggatggaaatgttcacatctataaggctcgacttgttgcaaagggttttcgacaagttcaaggagttgactatgacgagacattctcgccagtagcgatgcttaaatctattcggatcattctagctattgccgcatatttcgattatgagatttggcagatggatgtcaaaacagctttccttaatggaaacctagatgaggacgtgtatatgatacagcccgagggttttgtcgatccgatcaatgctggaaagatatgcaaacttcagaaatccatttatgggttgaagcaagcatctcggagttggaacattcgttttgatgaagtgatcaaagggcttggttttcatcagaatgaagaagaagcttgtgtttacaagaaggaaagtgggagcgctgttgtatttctgatcttgtatgtggatgacatattattgattgggaatgacattcctatgctggagtccgtcaaggcttcactgaaaaagagtttttctatgaaggacttaggggaagcagcatatattttgggcataaggatctatagagataggtcgaagaggcttataggattaagtcaagatacgtacattgacaaggttttgaaacggttcaacatggaacagtccaagaaaggtttcatacctatgtcacatggtaaacaccttagccagatgcaatgtcctgcgacggctaatgagcgagagcgcatgagtaaggtaccatacgcctcagcgattggatcaatcatgtatgccatgataagtacacgcccagatgtttcatacgctataagtgctacgagtagataccaggctgatccaggtgaggatcactggacagcggtaaaaggcattcttaagtacttaagaaggactaaagatatgttcctggtatatgggggtaaggaggagctcgttgtaactggttacactgatgctagcttccaaactgacccagacgagttaaaatcgcaatcaggttttgtgttcacaataaatggtggtgctgttagttggaagagttccaaacaggagactgtgactgattctacaacagaagccgagtacattgcagcttctgaatctgcgaaagaaggtgtttggataaggaagttcctcatcgagcttggtgtgtttcctaatgcatctagcccattgaacctctactgtgacaacaatggggctattgcgcaagctaaggagccaaggaaccaccagaaaaacaaacatgtactgcggaagtttcacctcatacgggaattcattaggcggggtgagataaagatatgcaaaatacatacggatttgaatgttgctgatcctttgacaaaacctcttccacaacctaagcatgaggcacacgtgagatctatgggtattagatatcttctagattaa

SEQ ID NO: 69426 - DNA, 321 bp, Zea mays
  Clone ID: MRT4577_16330C.1
acgcaaacgccagctcgtggacgaaaacggcggcctgcctctgcgcagcctgtttttccttttgaggagcgagaccccgagcgcggtcgagcgggtggtgcactacaacctccagcgggttcggtcgaggaaggtgctgggctgtgcttgcatgtgacatggcatgtgcgagtggtgtagtgtaaccgacactgacgcgggcccaccaacctcgaggagcatgcatctggcagagcaactctaatagctgtgtaaaaaataactccctaaatggatgcttagcacgctggtaaattaattttgacaggatggaatgaaatg

SEQ ID NO: 69427 - DNA, 160 bp, Zea mays
  Clone ID: MRT4577_163310C.1
ctttaagcggcgccttttttttttttttttgaattacagccatacgtccaagttttccaacgaatgaattctaccttcatcaataccatgccttgccatacccgaaaagaagaatccatcttcaaactgcgtgggccaatagccaaacttaactagtttt

SEQ ID NO: 69428 - DNA, 326 bp, Zea mays
  Clone ID: MRT4577_163311C.1
tgcctatccacttctccatcaccacctcgggctatcaagaccattcactttatttactttacttctcctaataaccctatcgacaccatctaggtacgcttatcattttcctacatctcctacatctagctataagctccttctttaccccttccctcggaggatgctggtgtcaaccaccgacaacacctaatctacaaccgtacaagcatcaaccacctacgggtaacctgcaacttaccttaaatatcccaccgccattaacaactgcctatgcctatttcacctaacaccctcggttcattttcctgcctcatttcatttat

SEQ ID NO: 69429 - DNA, 3324 bp, Zea mays
  Clone ID: MRT4577_163312C.1
atggcacctagcacaccaacatttactttgcgatcaattcttgaaaaggataagttaaatggaacaaactatacggattggatccgtaacctgagaattgttcttagggctgaaaaaaaggaagacgttctagacaccccactaccagaggatcctagtgaaaatgcaactgctgcagctaaaaccacttacaagaaagcaatggatactaatcttgaagtgagttgcctaatgcttgcttgcatggagcctgagctacagatgcagtttgagacaaaccatgagatgcacgatatgatcgtggcgctcaaggatatgttccagactcaggctaggactgaaaggttcaatgtgtccaaagcctttctggaatgcaagctagcagaaagcgcagcagttgggccacacgtaatgaaaatggttggttacagtcagaggttggagaagctaggcttcccaataagccaagagttggccactgacttcattttggcatctcttccgaccagctatggaaacttcatcacgaactaccatatgcatggggcggagaggggcctcaatgaactatgtggcatgctgaaaacagcagagggggacataaagaaaagcgctggcagcagcagccatgtgatggcggtccaaaacaaacccaactttaagaagaagggtaaatctcaaaagaagaagggcaaggcaaaggatacagtatccaagccaaatcaaaagcccaaggctggaccagctgcagatgcagagtgcttttattgcaaagaacttggtcactggaaaaggaattgcaagcagtacttggcctctattaaggatcgcggcggtaagggtacaaccgcagcaggtacacttgctattcacattacagaaatttttcttgctgattcttatattaattcctgggtattttataccggatcggttgcccatatttgcaattcgatgcagggaatgataagaagtagaagcgtgaaaagaggagaagttgatttccgggtaggcaataatgcaagagttgctgcgttgaccgtcgggacgatgcaactccacctcccatcaggatttattttggagttaaataattgttatctagttcctagtatgagtcgaaacattatgtctccttcatgtttgatgaaggatggttattcatttgcgagtgaaaacaatggttgtgtgatctctaagaatggcatgtttgtggcttttgcatccattatgaatgggttattcattttaaatcttgatgatgcacctatctgtaatattagtgctaaaaggcctcggcctaatgatttaagtcctacctacatgtggcactgtcgtttgggtcatataagtgagaatcgcatgaagaagcttcattctgatgggcttttaacttcgtttgattttgaatcatacgagacatgtgaagcttgcttacttggtaagatgaccaaggcgcccttcacgggtttaccggagaggacgttagatttattggaactcatacatactgatgtgtgcggaccaatgagtacgacagctaggggaggattccaatacttcataaccttcactgatgattttagtagatatgggtatgtctacttaatgaaacacaagtctgaatccttagaaaagttcaaagagtttcagaatgaagtagaaaatcagcgtggcaagaaaattaaagcactgcgatcagatcgtggtggtgaatatttgagtcatgagtttagcaatcatctaaagagttgtggaattgttccacagcttacgccgcctggaacgcctcagaggaatggcgtgtctgagcgacgtaatcggactttattggatatggttcgatcaatgatgagccagtcggacctacctttgtcgttttggggatacgctctagaaacagcagctttcacactaaatagggtaccgtctaagtccgtagttaagacaccatatgagatgtggactgggaagactcccagcttgtcttttctgaagatttggggttgtgaggtttacgtcaagcgactacagtcggataaactcactccaaaatcggacaagtgcatgttcgtgggatatccaaaggaaactttgggatattacttttaccaccggtcagagggcaaagtgtttgtcgcccggaacggtgtgttcttagagaaagagtttctcaaaagagagaaaagtaaacaaaaggtgtatcttgaagaagttcaggatgagccagtaggacaagattcaacaagtgatgctaatgtagcagaacaagttgagacgtctatggcaagagaatcaccaccacaaccacgaagacctatagaatgcaaatggatctataagaagaagaaagacatggatggaaatgttcacatctataaggctcgacttgttgcaaagggttttcgacaagttcaaggagttgactatgatgagacattctcgctaatggatgtcaaaacagctttccttaatggaaacctagatgaggacatgtatatgatacagcccgagggttttgtcgatccgatcaatgctggaaagatatgcaaacttcagaaatccatttatgggttgaagcaagcatctcggagttggaacattcgttttgatgaagtgatcaaagggcttggttttcatcagaataaagaagaagcttgtgtttacaagaaggaaagtgggagctctgttgtatttctaatcttgtatgtggatgacatattattgattgggaatgacattcctatgctggagtccgtcaaggcttcactgaaaaagagtttttctatgaaggacttaggggaagcagcatatattttgggcataaggatctatagagataggtcgaagaggcttataggattaagtcaagatacgtacattgacaaggttttgaaacggttcaacatggaacagtccaagaaagggttcatacctatgtcacatggtaaacaccttagccagatgcaatgtcctgcgacggctaatgagcgggagcgcatgagtaaggtaccatacgcctcagcaattggatcaatcatgtatgccatgataagtacacgcccagatgtttcatacgctataagtgctacgagtaggtaccaggctgatccaggtgaggattactggacagcggtaaaaggcattcttaagtacttaagaaggactaaagatatgttcctggtatatgggagtaagaaggagctctttgtaactggttacaccgatgctagcttccaaactgacccagacgagttaaaatcgcaatcaggttttgtgttcacaataaatggtggtgttgttagttggaagagttccaaatag

SEQ ID NO: 69430 - DNA, 349 bp, Zea mays
  Clone ID: MRT4577_163313C.1
agcataaaaataggccgacattcattaaggggtgacacccaaaaaagaagaaatacaattacaacaacgcacaatacacctgctgctgctaaacatatacgacgaacacactattaaatcaaaccgaacctaacacaaaaaacaagccggaagcagaaagctctgcgttattctctcctcgatcgtataacggggacggatggcaacacacaaaaaagagggtacaaaaaaaggtaacacagccctcttatcataatcattaccatcaacagttcatcttttccagctggctaagacacaacccttccaatgatccaaaccacctaaaatctccaaaaactaacaacaa

SEQ ID NO: 69431 - DNA, 403 bp, Zea mays
  Clone ID: MRT4577_163314C.1
gggaaaaacaagaaccacattttaaccaatccaaaaaacaaccacaagggggtaaaaagagaaaaccaaaaaaacaaacccaacttataacctggccaaaaagacaaccgctaacctgccaaaaaccccaaacaaaagggaaaaaaaagccactaaagggaccttacccagggaaaaaaaaaaagggaagcattcaaaccaaaacttaatcgaccccccccaaataggtttaaccaaagcgatcctaaaaccgaggaaaatcggcctttgcctcaaaaagcccaacctcatggaggccaaaacccagtttgaacaagccgggaaacccgtttccaaaagggttggggtaaaacacgctaaaacccgaggaaaaaaaaacaattttgaaacacagcataacaaa

SEQ ID NO: 69432 - DNA, 403 bp, Zea mays
  Clone ID: MRT4577_163315C.1
atggattcctacacggatatattattgccactggtcactggtatagtagtatactatgtgtgtgtgttgagcagatcatttctaaagcaagcaggattttatatatccgcttcttgttggcactagctaggatcttcttttgtgtgtaagggaagctgatctgagaatctcagatgaaggttcctgcaccaaacacccagatttgctgcgcgtcaagttaagctggtctgagaatctcagatgaagctggtctgagaaataacgaacaagtttcgaatgatggagcatcccagctgccattaaccattcctgtcgtgaacatggtcgcaattgcgctcaagacatgtcttgggctttaccttctgaagattttgagttaccgatcgtgcttacaagccacatg

SEQ ID NO: 69433 - DNA, 844 bp, Zea mays
  Clone ID: MRT4577_163316C.1
cccagcgtccgcccacgcgtccgcggacgcgtgggtcttgagcttgcatggatgaacaacatggtggactttgccttcccgtacctgttgcagttcatccgtgaatacactagcaaggtggatgatttagtgaaggacaagatcgagtcgcagaaggaagaaagagccaaggagaaggaggagaaagaccttgtggctcagcagaacatgtatgcgcagctgcttcctctcgctttgccggcgccgccaatgcctggcatgggtggccctccacctccgatgggtggaatgggcatgcctcccatgggcatggcgggatgggtatgccgccaatgggccctggtccgatgccagcattcggaatgggaggctactgagttgtggttttgcagggagcttagatgatgatgtgaattgttccattgcaagcataagtggaacctcattggagctgtagatggttttacagtttgggaaatcaatattctttattgtaccaggaaacttttttttgggcgagtgagtgaaatcagcctgacccatagtttgagaagcgcaacctgtgatatgttttacgatgggatcggaaataggatgattaggttgtttcagcatgagctgttaaaagctggtaccatgtgtatgtatagtggtgtgataaaatcttttgcgtgtcggcagagtgaagatagacaaatgtatgtttccttgttacgacctgttaatctatatattagcccgacttgtagttcaaatgccctacattattttcttctagctcctccaacttgtagttcaatcggtaatactatatttattaataaattcaatggctatgttctct

SEQ ID NO: 69434 - DNA, 580 bp, Zea mays
  unsure (1)..(580): unsure at all n locations
  Clone ID: MRT4577_163317C.1
aagaaagagccaaagagaaggaggagaaagaccttgtggctcagcagaacatgtatgcgcagctgcttcctctcgctttgcccgccccgccaatgcctggcatgggtggccctccacctccgatgggcggaatgggcatgcctccgatgggtatgccgccgatgccagcatttgggatgccaccgatgggaagctactgatttggttttgcagcataagtggaacttcattggagttgtagatggttgacagtttggaatcaatattcttcattgtaccaggaaactttttggcgagtgagtgaaatcagtcttacccgtagtttgagaagtgcaacctgtgatatgtttacgatgggatcggaaataggatgattaggttgtttcagcatgagctgttgaaagctggtaccatatgtatagtgtgataaaatctttgtagacatttttcttgtatgatacttgtcggcacagtgaatatatatatatatatatatatattcattttcagattcttgtatcttcccatcatttattcttattccttcattacttnnnnnnnnnnnnnnnnnnnnnnnnnn

SEQ ID NO: 69435 - DNA, 283 bp, Zea mays
  Clone ID: MRT4577_163318C.1
ggggaaaagcccaaaactggggacaaagtggaagggggaaaaccaaatttcggggtaattttgccagccaaaacagggtcaaaaaaaacctatactatccgaccctttagttccaacattttcatttgaaacacaaaaaagggggtagaaatcaactatcaagacaattaacttatcggggacccaaaagaaagccgcaaaaccttaactcccacctttaaaaaaaaaagaacattggggcatgcgggaactggacaaaaaaaaaactcccccaacaaaactg

SEQ ID NO: 69436 - DNA, 700 bp, Zea mays
  Clone ID: MRT4577_163319C.1
ccgggaaaaaaaaagacccatacacccacaggcctgccgtgacagcaccggggtatagcagatcaaagcggaggccgggggggccgaaggccgcgaagaaagccatgagcaaggacaacgcaccacaggcgcgagcaccacctgcaagactactgcgggtgcaaaggcgaagggcctcaaggggctgcccctgatcaaggccttcgtctaggtggggggggacctgagcgctgggcccgaagaaaggcaagcttatacctgcagacacccgaaattgacaaggtcaatgtgcgttgagcagacccacccgtgacatgcgtatgtgcaggagaggctggtccatcataaactcaatgatcgacgacatattttatacaatggtcgggaagggcgccaaacttacccgctacagcaacgaagacgaccattgcgtctctggagacgcagacctacgggcacctcgagttccccggctagctccccaagctcgccgtctatgacggcaccaatgccgtctacaaggtcaactccttgtaggatggcacgctcgccctctgtaggcatctgtagggcagaggggaccgtcgctgtaagtatatggtgctgagttgtgtgtccgggatgttcgaaactgtggtaagttaccctgcaaggacttgcgtattctagaatgatgaacactatgcctggtgatcactta

SEQ ID NO: 69437 - DNA, 619 bp, Zea mays
  Clone ID: MRT4577_16331C.1
ggcggcgggcggctgctgcagctggagccggcgagcagcaacgcatcctcctcgtccggcgagcagcgacgcatcctcctcgtccagcgagtgtttgctggattcaacggcacccccccctccttctccatctccggtgcggcggtggcttgcagctgcagcaggatcgcctgtatttactgaggatagcagttttgcaataggattcgttctacgagattgccacaatggtaatcaaatgaaggtggcaatatcagcaaaacgattccgtacagtaatgagagaattaatgagcgaactggaaaattcttccttaagattgaaaaagatgcagaaaggcaagaaggacggtgttgatttcactagaagatttcataaggaaaaaagaggtcgcgagattgatttggtctcaggtcacttgcgtgatggggactctaatcaagatgtattcgctaagctacctggctgggttaaatcagatatttgtaaaagtgttgtctcaatttctttgtgcaatggagacataaccttattttcttgctcgggcacagctatagcacacaagggatacccaccttacatgtgtctgacttctgcaagtttgggtagggcttttgat

SEQ ID NO: 69438 - DNA, 225 bp, Zea mays
  Clone ID: MRT4577_163320C.1
ctgtttctagacccactacatctgcgcccaacggcgactggatgtaacatggctgagccgattgacatcaccaaaggggacgacggctgcctatgtcggatctagtatacagtcagctccactcgattactacaactctacctcttgctgcagctataacataaagttgtagataacggccgcactggagatacaacctctacagctactactacttgaactaat

SEQ ID NO: 69439 - DNA, 223 bp, Zea mays
  Clone ID: MRT4577_163321C.1
atctcgggtacagagattttttatttttattctcttttttttacgatctcaatagctggaacacaaaaaaacaaaccaagcaaacattaactcttttttatgtattaacataaccaaatacacatgtaaacatcattacatactgaacttaacaacatactcttgtctcaataccttacaccataacatttccttttccttcccacagccaccccccacccac

SEQ ID NO: 69440 - DNA, 107 bp, Zea mays
  Clone ID: MRT4577_163322C.1
caagccatgaaccctacaagactcgaactgcaacattcgtatcctttaccgaggagaagttgaccctcgctcctcccatggctatacttgttacctcgtgagaaacc

SEQ ID NO: 69441 - DNA, 460 bp, Zea mays
  Clone ID: MRT4577_163323C.1
cgcggactgctcgtttttctgtgcagcacatcaaagtgccgggcaaccgtgaagcagcttcaatcgtcgcgatggggctcgtattgcatagtggggctgggaacaagatgccttcaaagcactcattgctgtaaaatacagagagatcagggttgagttgaccaaggattttgagatgggtgtctacaacaagaccggggagtttgttaagatgaacccccttgggaaggtgcctgctatggagactcctgatgtccttgatatggaggagacatgctatcccaccctatgttgctcgcttgagggatgacaaccctctttttgggtcttcccgtattgaacaagcccacattgatcaatggatggattatgcctgaacagaaggtgatcctggtgaagcatggtacttgtatccaacgcttgggtacctcccttatgttaacacagctgatgcaacagc

SEQ ID NO: 69442 - DNA, 837 bp, Zea mays
  Clone ID: MRT4577_163324C.1
ccggccttcgaaaaacctgctaagaagtttgacctatgatgaaactaaagtgaacttttttaatgattgccattcacccaataactgtaggtgttagtaatgtaacatggtgatgcaaagtgttcaggccacattactttttttttctcgaacgatgccagagatctgcatgtcatttcattaagaagagtagaaatagaattgtccagcatggccggacagagaacacaacaactgtacacacccttacaaaccaacctgaaaaattagataaaacagacagaaaagcctgaaactagaccagcaacaaactctgaagaaaaagacctgctgcaaatctaactgcacgaccaacagggagcacaaaaaatccgggataaacctccagaaaggcactgtagagagtcatcaattcctggacagggcccaggcaatgaagtccagaagctttgaagctccagcccaccccactttttgcatcccccccaatctgtgtaaggaggtcaggaatgcaggaattcaaagacgcatgaattcctgtgtttccatgtctcccaggctgtcaagatgattaacgaatccagacccttttgtctttcttttggcacaagtctagacatttttctccaccaattggggaagctggactcaatcaatgtaggagccaaatctggtagtttcagagcctggaaaatatgcgaccagaactgtctagtgaaaacacagctaaccagaaggtggtggatggtttcctcgccctgatcacaaagagggcaggcctcaggatgagatagctctcttttagctagcctatccgctatccagcagcgatttttg

SEQ ID NO: 69443 - DNA, 281 bp, Zea mays
  Clone ID: MRT4577_163325C.1
ctcctcatacagggaaacccatcactttatttattgcatgcatgacagggccagactgaattggaacaatgcgttattagccacggtgctggagagtatgcctccagaacctctcgtgggggaaaaaaaccgaaaattttcggttcgaaaccccaccccagttttttatgggctgcgcccacgtgatgaggcccccgatttttaatctggggtaagaatcttcttgctggacttctttgcggcctcaccctgttgcacccccgtggctgactccttcctgt

SEQ ID NO: 69444 - DNA, 1296 bp, Zea mays
  Clone ID: MRT4577_163326C.1
ccgacaactcgggcgggacacgggagacagccatggcgacgggcggccaggggaaggccgcgggctactaccagtacccgacatcgtacgccggtgctgcggacgaggagcgccggtggtggccgtggctcgtgcccaccgtgctcgtcgcctgcatcgcggtcttcgccgccgagatgttcgtcaacgactgcccgcgccacgggagcacgctcggcggcggcgccgggtgcgtggcggccggtctcctccgccggttctccttccagccgctccgcgagaacccgctcttcgggccttcctccgccaccttggagaagatgggagctctcaactgggccaaagtagttcatgagcaccaagggtggcgcctcattagctgtatctggctccatgctggcctagttcacttggttgtcaacatgctaagcttgctcttcattggaatccgccttgagcaacaatttgggtttgtgcgcattggtgtcatctacttgatatctggctttgggggcagtgtgttgtctgcacttttcttacacagtaactacgtctctgttggtgcctctggggctttgtttggcctccttggatctatgctttcagagcttattataaattggactatctattccaacaaggcagcggcaatcataactctactttttataattgtaattaatctggccattgggatattacctcatgctgataattttgcccacattggtggatttgcttctgggtttcttattggatttgtgctgctggcaagacctcaatttggttggatggaacgcagcgagctacctcagactagtcaacctccaaagtacaaatcgtaccagtatgtcttgtgggttgctgcactcctcttgctggtagttgggtttgccattatcttggtcatgctcttcacgggtaagaatgggaacgacagctgccactggtgccattacctgaactgcgtaccaacgtccagatggaagtgcgatacctgaattccgcaaagtatatgctccactggtgttcgtgtgttcgtggaaatgtacgaccaaatgtatcctccacttgaccatcctgcgcttcttttgcccggattctccctggttccatgaaatacaaatgttccagaattgtagcacgagcttgtaactgttgatttcggcataattgatgtattcatctcaccaaactctatagcaccaccttgataattttagacggccaatctaaagtattcagattttgcgaaaaaaaaaaaaaaaaaactcgagactagttctctcctcgtgc

SEQ ID NO: 69445 - DNA, 439 bp, Zea mays
  Clone ID: MRT4577_163327C.1
ccggttcggaattcccggctcgacccactcgtcctcggactcgtgggcggactcgtgggcgttctcgtgggaaaaaaaaaaaaaaaaaaaaaatggaaaataaaaaaattaaaaaaaaaaaaaaaaaaaaaaaaaaaaaaaaaaaaaaaaaaaaaaaaaaggccggccttttttaaggttccaacttttcttccccttccttccaacttcttaccttttttttagtgtcccctaatttcatttcattgcccttctttttacaacttcttgactggaaaaaccttggctttacccaacttattccctttgcatcacttccccttttccccagttggcttattaccaaaaagccccgcaccattcgcctttcccaacatttccccagcctaattggcaatttgaaccccccttttaccgtccctttaaccccggcggtttt

SEQ ID NO: 69446 - DNA, 485 bp, Zea mays
  unsure (1)..(485): unsure at all n locations
  Clone ID: MRT4577_163328C.1
tttttcttttcccncgcgcggncccgncgcgggggggggggccggcccccccggggccttggcccggctctgctcctgccggtgctccccccgntggcgtcggncatgagcctgttcctgcnccctctgctcgtncggctggggcacgcgcttccgctccncccctcgctccgcctccctgcccccccgggcatcccctccgcgngcttccccccccctccccnctggcccctngtccccgccccgngcccctcccctctgctgtgcgttttctttttttttttccnngnncgccccgnccttccttgcttgttngcccaacccctcccccccccnccgccctccccggcnccccccccgcccccgccctccccctttccccccgccttcttggtcttccntgcccgcatttccctccccnccctccccccaatttcccccctcgtcttctctttcgagcccccccccccccctaggggctgcat

SEQ ID NO: 69447 - DNA, 276 bp, Zea mays
  unsure (1)..(276): unsure at all n locations
  Clone ID: MRT4577_163329C.1
gacatgcaatagggatcacgatgttttttttgctccaagaatcccataacggggaacccaaatctgggggacgtttcccaggcaacttttggactcatcagtatgcgtttacattgaacacagccttttatgggtttacattgaacacagcctaaatctgggggggatgcgcaacttgaaaactcgacccttctgacaaacatcggacaaacagggttnttgtaaacagggagggacaccctccttttttccggaagcaaatagtcccttgcggga

SEQ ID NO: 69448 - DNA, 1171 bp, Zea mays
  unsure (1)..(1171): unsure at all n locations
  Clone ID: MRT4577_16332C.1
aattcggcacgaggcggcgggcggctgctgcagctggagccggcgagcagcaacgcatcctcctcgtccggcgagcagcgatgcatcctcctcgtccagcgagtgtttgctggattcaacggcacccccccctccttctccatctccggtgcggcggtggcttgcagctgcagggaggacttcaaccatgagtaccacaccaatgactgcagtacgagctatgaaatgtgttgtaactgtgacagacagaaggtctagtgagttttgttttggttgtgtcctagtcaagtcttggactgacccaataaccttagaacaaaancacacttgttgttgctccatcatcttttgtgaaagatcgaaacaagaatgaccttaatgtccagttttttgatgaagtccagtcagtggtatctgtggcagctaaagaggacactttccatcttcttagaaccaatgaccattcaaaatgtgaggaaattaaattaatcgaagatgaacttattcttgactatttgaaaccaagtcagacatttatgatgcctcatatggaccatcgtcacacatactactaccaaccaacttttatcacattagaaacccttgaanatatggttctcaggcatatggtccaattgtcaattcaagagattatttcttggtgtcatgcccatattttctggtgaatcacaatggagagaccagtttagcaggatcgcctgtatttactgaggatagcagttttgcaataggattcgttctacgagattgccacaatggtaatcaaatgaaggtggcaatatcagcaaaacgattccgtacagtaatgagagaattaatgagcgaactggaaaattcttccttaagattgaaaaagatgcagaaaggcaagaaggacggtgttgatttcactagaagatttcataaggaaaaaagaggtcgcgagattgatttggtctcaggtcacttgcgtgatggggactctaatcaagatgtattcgctaagctacctggctgggttaaatcagatatttgtaaaagtgttgtctcaatttctttgtgcaatggagacataaccttattttcttgctncggcacagctatagcacaacaaggataccaccttacaatgtgtctgacttctgcaagtttggttagggcttttgatggc

SEQ ID NO: 69449 - DNA, 477 bp, Zea mays
  unsure (1)..(477): unsure at all n locations
  Clone ID: MRT4577_163330C.1
atagcacaagaatccagaacggtaatatgtaaatatcgtttcctttaaactgcagtgttcatctctttcttggccttcgcacgagccctcgccgggggctggggtcactgctcccgccccgtgtcctgaggtggggtccgctggccgtcccccggggctggcctccgtgcccgcctggcctaggctgtgcctgctcggctgtgcgccaaacgcccgccgggccgctggttctcgctcgcccccgctcgtgcgctggncgctccgggtcgggagacgtttgtgccgtggcctccgtgcccgtgccccccgcccggggctgcgcccggtcgctcgtctttggccggtgcgccgccgtgccctcgggccgccgctcctgtgcctgggcgccgggtgggcgtgcctctccggctcttgtttcctcgggtgccgctcgggtcttgcctggtcgccgtgcgtcccggttgggggtctgccttc

SEQ ID NO: 69450 - DNA, 239 bp, Zea mays
  Clone ID: MRT4577_163331C.1
gtcggggtggcgatggcgtccgggattaaggccgccgtcgacccgaacatgcactatgggggctcgcgcagccacgacagttatgttctggctggcaagtacgactacgcgatcgaggtggttggggagccgctcctacacgcagacgttctgcgacaacctgaacctagcgatcccggggcccgtaccgagcgtgatccagtcggtgtacggagtcatcaattgcgtcgtgctcctta

SEQ ID NO: 69451 - DNA, 327 bp, Zea mays
  Clone ID: MRT4577_163332C.1
gccggccggtccgggtcgaaaaggccttcaaagtcacaggtcgtacgatcgtctgggaaggcgaaggcgtcaacgagatcggtcgagacgctgaatcaggcaaggtgcgtgtccgtatcgatcctaaatatttccgtcctgctgaagtcgatctcttgttgggtgatcctaccaaggccaatacagaattgaattggaaacgtaaggtgacctttgatgaattggtcactgaaatggttgtggctgatattgaaggaagtttgagctcttctactttggtgtaaatagaatctttttttgcaaaaaaaaaaaaaaaaaaggccccta

SEQ ID NO: 69452 - DNA, 758 bp, Zea mays
  Clone ID: MRT4577_163333C.1
gaattcggcacgagcattcatccacctcgtgcttatcgtctactccaacgccgactcctgctcgtcggtcatcgcctcgtccagctctctccgctcctccggcctagcctagcccctcctgctcaccacgtcgtctctagaatctagcctacgaccattggcggctggtgcccccaccagcaatcggtggtcatggtccgtccctactcaccccgttcggatccgctatgcgcgaggcgcaactgcatctatcgtattcctggctgctccctccctctccgcgggcgacgcgcatctctaggttcgatcggggtctgtccgaccggccttgagcgcgccttcgcaggccccttctctgccttcgatgagtgcatttggtgagtggtgacacaactgggcggagtggtgaactagtgattgatgcgcttgctggcgacatgcgaactggatcagtattgggtggtctgctgcctacacatgatgtgactatatgttgcaagaaattctttcttgtcattgctcaagggggtagctccagtgactatattgtcgaccttcgcatctcgctacaacaaagatacgatccatcttcccatcctcttactatctgatttccctgaattaatttttggttgactattcaattcatgctcggagaggatcatgggcgtggatcagaaagaacacccacaattttctatatgttggacaacgggggttatgattacttgaattatatcatttgtttaagtaattat

SEQ ID NO: 69453 - DNA, 616 bp, Zea mays
  Clone ID: MRT4577_163334C.1
ttgggacccctcgaggccggccgccagcgtaacaagtgtccttgctcctctttcttctgactcactcccagtcccaccacccccaaccccgtctctgcatgcggagcaggcttagattgggctacgctcggatcgagcagaaaatgcaacgggcagtgcaagccgcgaggccacacggcaatgatcttaaatatgctgttctacaacacatcagtgctcccaagccagcaatgctgcctgctgccttttctagtttcatgaacgcttcatctgctagactagaggatcggggatttgaaactgccactgtagcactatggtcttgaatgtctacaagggtaagagtagcgtgatgtgagtcttggcctgtggcgcaccacagaggatagcgcttatgacgctgtcaaatatatgactcagcacagcgagggagcttggaggctgtcaaaccgcacagataaataatcgtggattgcactgaggagagattatctcagaaacataggcagggaatgtcttgcaagacaactaacgctggcgacatgatgactgacgagaacagactgagcacagtgaataccgacaccgaggtcctgcaggcaatgcagctcatgac

SEQ ID NO: 69454 - DNA, 351 bp, Zea mays
  Clone ID: MRT4577_163335C.1
cttgcggtcgccctcatcgctgccgttgccgccgcaaccgctgcggggtcgccggccgcgggcacgtgcgcgcggaggggctcgccgactgtcattgatgcaatgcaatacggatagagacacgtgcgaatctaaaagtgcacgacgatagaggaaggagaagatacaagtgaatactttctgaaaataaagtaggaggagaggggatatatattgtaccacaactatgatacacctaaacgaacagatatcttaaaaaatgtattatatggagctcgtatgactgtgctattagacttaaatctgttataccgatgatgaatgttatgctataccaatgtctttttttta

SEQ ID NO: 69455 - DNA, 453 bp, Zea mays
  Clone ID: MRT4577_163336C.1
ccggccgggacactgagaaggatgcgcgggaggagattgcagcgccagatggggtcttgtacctcgggctcggaatgacaaaagcagagggacagacgacctcgctatcaccgaccaccggtggcgcccgcgaatgtccccgacgctgccagagcactgggcagacatcacgactcggactccggagaatcaccgggtcagcatcgattcccagtgagactcgtagtttaccacacacccataccgacgaccccatacatcttatggcgcctccatctcctccgcgcaacgtacaacgcgtccggggccaccgcagctgtggctgaccccattactacgtcaaagaccttggaacataaggagatatcacgatctgagaaaagtatttcaggtgatgactcagccaatcagaaagacacgaacgctgatgactatcctattgagaataatctc

SEQ ID NO: 69456 - DNA, 429 bp, Zea mays
  Clone ID: MRT4577_163337C.1
gatgaatctaaagaatcaagatctcctagagacgacgacggtcacggaactcacacctcatggaccgccgctggatccgtcgttgaaggagctagcttattaggctacgcttcaggaacagctcgtggtatggctccacgcgctcgtgtcgctgtttacaaagtctgttggctcggtggttgtttcagctcagatattttagctgcaatcgataaagccatcgccgataacgtcaatgtcctgtcgatgtcactcggcggtggaatgtcggattattatagagacggtgttgcgatcggagcattcgccgccatggaaagagggattttagtatcttgctcagctggtaatgctggtccgagtagttctagtttatcaaacgtagctccatggatcacaactggtggtgctggtactttagatcgtgat

SEQ ID NO: 69457 - DNA, 307 bp, Zea mays
  unsure (1)..(307): unsure at all n locations
  Clone ID: MRT4577_163338C.1
tgcctcgagcatggcattcaggctgatggccagatgcccggtgacaagaccattgggggaggtgctgnttgtgagcactgnctcggctnacatatgcatatttcttcatcttctcaagctgcggctgaatttccttcttgcctgcgggggggggggtttnanagcatactttgtgaaagccttcttcttgctcttgccccagntcttgtggaaccttgtgctcacttcttccctcngatgttggccccngacggagttgcctgggcggncgccccgccgggcgtttccttgtgccncccccccccct

SEQ ID NO: 69458 - DNA, 725 bp, Zea mays
  Clone ID: MRT4577_163339C.1
ctgcaagagcctttcctcgcactcgcccctctgcatttaccacattgccctcgtcggcggcgccgaccagctgccgccgcgtccagcaaaacaaccggccgctaggtccaaaatagttccccatggcgtccatatcgtcgcttccctttgcgccgctgcgcggagccgccgagtggaggccgtcgtcgacggcgccggccgtctccggcgccgtcgtgctcagcgcgaggtctcggcggggctcgggctcggtggtgcgctgcgtcgccacggcgagtggtgagctacctctatctatcctatcgagtgtgtagcttcagcgctacctcaaacaagtgaatccgaatcactatgccgtgcggttcaccgcagaactcctcataccaaatctgcctaccaatgtgcgatcccggcctcgccatctgtgataccttatgctgccgaatcgcgccacctcataatcttccgtcgtagtctttgcaataaactggcttttgttggcaagaaattctagcttgtttggatgattgttgcgatagttttgttccagcggatgggaataatgagctttgaacgtgacctcctgaaaggctgaaatgttttttttttgttaactaggcttaatcaaaatcttaatgcacttcacctgctactgctcagaaaatgcagtacccagaactttgatgtgttgcattccacgtaaacaggacgagtgtatgtccccc

SEQ ID NO: 69459 - DNA, 273 bp, Zea mays
  Clone ID: MRT4577_16333C.1
agcaccaaatgcacttaacataccacaaggtgttgctaaaagtccatgatgataaattaaagtgtttcttataaactaacaaaaaaaaaagagggtgcagaactcaaatttgtcaaactggcagagaatgtttcccgttccgaccatataaggggcttccacccgcgcctttgaagtaaatttctatcctacactctgttgtatcccacatttttactgaacaagcggcggatgtagaggacctgcaacgcgctatcagccatgaaagccagg

SEQ ID NO: 69460 - DNA, 1402 bp, Zea mays
  Clone ID: MRT4577_163340C.1
ctgcgagacgaacaggaacatagcctttcctctcactcgcccctctgcattaaccactttgccctcgtcggcggcgctgaccacccgccgccgagtccggcgaaacaaccgcctgtagttccagagtagtacctcatggcggccatatcgtcgcttcccttcgcggcgctgcgcggagccgccgagtggaggccttcgtcgtgctcagcgcgaggtctcgccggggctcgcgctcggtggtgcgatgtgtcgccacgacgggtgatgtcccacccactgtcgcagaaacaaaactgaacttccttaagtcatacaaacgcccaatcccaagcatttacagtgcagtcttacaggaacttttggtgcagcaacacctgatgagatacaaaaaaacctatcagtatgatgctgtgtttgctcttggcttcgtcactgtctatgatcagctcatggaagggtaccccagcaatgaggacagggattccatcttcaaggcatatataacagcattaaatgaagatcctgatcaatacagagctgatgcactaaagatggaagagtgggcacgttcccagaacggtagttccttagttgatttttcttccagagatggagaaatcgaggctattctgaaagatatatcagaaagggccaagggtaagggaaacttcagctacagccgattctttgcagttggcttgttccgtttgcttgagctctcaaatgcaacggagccaacaatactagacaagctttgcgctgcactaaacgtcagtaaaagaagtgtggatagggaccttgatgtttaccgcaacatactctcaaagttggttcaagccaaggaacttctcaaggaatacgtggatagggaaaagaagaagagagaagaaagatcggaagccccgaagccgaacgaagctgtcacaaaatttgatggaaacctttattccacaaggcattagaatcagccctttgcagaggagagtttcccaggataacagaattaacagtaacatctggaccgtgttgagaaaccaccaaatgttcccctttcatcacagacgtctttggctgctcgtcgtgtgatgtagcattctgccgtacaaaaggatccagattattcttactactggacagatatttgtattttctcatatgtcttgaaatcaaatgtatacattttctgtgtgtaggggtcaatgttactcaagcagagaaatatagttttctcttttgtatttaaattcaggtaatttgagaggccgtgttcacttatatataatatagtgtggcaaccatgaaaacaattggtaaaaaaaaaaaaaaaaaagcggcctccacccgtcgccgcttcctcccgttagactaggttaggcttaggctagggtgtcgaccagctcgc

SEQ ID NO: 69461 - DNA, 550 bp, Zea mays
  unsure (1)..(550): unsure at all n locations
  Clone ID: MRT4577_163341C.1
acccaggaaatgacataatgcatagcatcgaaccctgctgcattcatctatcanagatgcaccaatttacatcgttacatgtcaaattcttctataactttttccccgaaaacacaagagaactgcgcctaattatattaagaaaaagacaggaaaaaaggcttgagaagtccaaatacaaaggtctccttacggaggccaaaaacacaaaaagctaaaataatccatcagacacacacaaccactcaaaggatgttatatctagaaaaggagggcagcaaggtaagaaagccctttagcccctgccacctcccaaaacaatctctccttccctgctaacctaagagataaggccaaacttagagtccatccatcgaatacacatctgtttcgaagcttccaaattgtccaggctcccaaggcaagtttcccataccagaggataatggccaaaaccgtaaagaacctgtaaagaaaccttcatatgttgttttggacgagtatttgccgtctctagctaaactgaaaatatgtttatggtctacttcag

SEQ ID NO: 69462 - DNA, 526 bp, Zea mays
  Clone ID: MRT4577_163342C.1
agcaccttatactagcgaggaactaatgaaagtaactgaagaacaaattgctgcatcagctgctgctgcttggaatccacaacagcctgccacgtcgcaacagcaagaagaagcgtcctcacttcttggagtagtgggcgcttcttcttgctgttgactgcaagagcctttcctcgcactcgcccctctgcatttaccacattgccctcgtcggcggcgccgaccagctgccgccgcgtccagcaaaacaaccggccgtaggtccaaaatagttccccatggcgtccatatcgtcgcttccctttgcgccgctgcgcggagccgccgagtggaggccgtcgtgctcagcgcgaggtctcggcggggctcgggctcggtggtgcgctgcgtcgccacggcgagtgatgtcccacctactgttggagaaacaaagttgaactttcttaagtcataccaacgcccaatcccaagcatttacagtacggtcttacaagaactctggtgcgcaacacctgatgagatacaa

SEQ ID NO: 69463 - DNA, 3416 bp, Zea mays
  Clone ID: MRT4577_163343C.1
aattcggcacgaggccgcgccgcctgtcgccgtctgcccccacccttcccctccaaatccaacagcgggagcaaagccaaaccaaaccagcttactgctccgctccgctttgttgccaatttccgctccaagcgtcgcggtcgtgaagtctcgttgcgatggattcgaggccccgcgagactgacgcccccggcgacccggccaacggcgccgcccctccgctggccgcggcggtgacggccgcgaccggggacgtcgagatcatcaggccccgcaacgacaagcgtgggtaccgccgcgtcgtgctccctaactcgctcgagtgcctgctcatcagcgaccccgacaccgataaggcggcggcgtcaatgaatgtttcggtggggtacttctgcgaccccgatgggctggaagggctcgcacacttcctcgagcatatgcttttctatgccagtgaaaaatatccagaagaagacagttactcaaagtacattgcagagcatggtggttcaacgaatgctttcacatcttctgaacacacaaacttctattttgatgtgaacagtgatagcctgcacgatgctttagataggtttgcccaattttttatcaagccattgatgtccccagatgctacacttagggaaataaaagctgttgactctgaaaatcagaaaaacctcttgtcagatccttggcgaatgagtcagcttcagaagcatctttgtgcagagaatcatcctttccataagtttagccctggaaattggaacacacttgaagttaaagcaaaggagaaaggattggacacaaggcttgagcttattaaattttatgattcacactactcagctaacttgatgcaactcgttgtgtatggaaaagatagccttgataacctgcagaaccttgttgaaaataagttttgcgatattagagatgttgggaggaagccattttcatttcctggtcatccatgtacacctgaacatctccaggtccttgtcaaagcagttcccattaaacaagggcacactttgagaatcttatttccaatcactcccaatatccgttgttacaaagaaggcccttgcaagtacattagccatctgattggtcatgaaggagaaggatctcttttttacgtacttaagaagttgggatgggctatgagtttggaagctggtgaaggggattggagtcatgatttttcattcttctgcgttgttattcagctcacagatgtaggccaggaacacatggaggatactctcggactattgttcagatatataaagttgctgcagaactctggaactcctaagtggatatttgatgagcttcaagctatctgtgagacaggattccactaccgagacaagagcccccctatcaattatgttgtaaatatttcttctaacatgcagatttttccaccaaaagattggttgattgcgtcatctgtgccatcaaagttttcaccagatgctattcagaatgttttaaatgaactgactcctgagactgtaagaatattctgggaatcgaaaaagtttgaagggaaaacaaaattagcagagccatggtatggtacatcatattctgtcgaagttgtccctccatcaatcatacagaaatgggtagggaaagcccctgaggaagatctacacctgccaaagcgtaacatcttcattccaagtgatctttcactgagaagtgtagaggaaaaggtaagttttcctgccatgctgaggaagacacaattttcgagactctggtacaagcccgatacaatgtttttcacacccaaggcttatatcaagatggattttcactgtccactatctcaaagctcacctgagtcggcagttcttactgatgtattcacaaggttgcttatggattatttgaatgattatgcttatgacgcgcaagttgctggcctctattatgttgttaagccaaatgacactggttttcaggtaactatggttggcttcaatgacaaaatgagaacccttttggagactgttattggaaaaattgcagaatttgaagttaaggctgaccgtttttctgtgataaaggaagctatgacaaaggagtatgagaatttcaagtttcggcagccataccaacaagtcctatattattgttcgctaatactggaggaccaaacatggccatgggatgaggaattttctgcactttctcaccttgaagctagtgatctgggaatttttttgccccatttgctatcaaaaaccttcatcgagtgttattttgcaggtaatattgaacccaatgaagcaaacaatatcgttcaacatgttgaagatgtcttattcaatgcaccaattagtgcttgcaagccactatccccatcgcagcatcttgccaagaggattgtaaagcttgagaagggtttgagatactattatccagcaatgtgctcaaatcaccaagatgaaaattctgctcttctgcactatattcagactcatcaggataatgttaagcaaaatgttctacttcaactacttgctcttgttggcaagcagccagcttttcatcaattgcgatcagttgagcaacttggctacatagcgcttcttaggcaaagaaatgattcaggtgtccgtgggttgcaatttataatccagtcaacggtgaaggatcctgctaatctggatgccagagttgaaaattttctcaacatgtttgaaagcaatgtctacaatatgtctgatgcagagttcaagagtaatgtaagtgctcttattgatatgaaactggagaaatacaaaaacatacgcgaagaatcagctttcttctatggagagatttctgaaggaaccctcaaatttgatagaaaagaagcagaggttgctgcactgagggagctcaagaaggaagagttggtaggcttcttcaatgatcatgtcaaggtcaatgcaccacaaaagaagattcttagtatacaagtgtacggtggtctccattctgccgagtacgaaaccatagtgcaaaatgctccgccaccgccgtcgtgtgagataactgatatttatggcttcaggaggtcgaggcctttatatggatcattcaggggaggcgttggtcagatgaagctatagttcaacattttctcatcattctgtaaaattctgaaaaagagtcatctttctgttcaactgcatctacgttgattgttttttcattgcgaacactctagtaggccatttatctacggttttttcactatattcattaagatattatgagatttcacattgccttgtaaagacaaatctctagccatgtttggttggtctgagatacaccatatattagactaaaaaggaaaaaaaagaaatattcggttaaaaaaaaaaaagaaaaaaaaaaaaaaaaaa

SEQ ID NO: 69464 - DNA, 328 bp, Zea mays
  Clone ID: MRT4577_163344C.1
aaaagcgaaaagggccaagatgggcttattttttaacagcattcaggtttttgggtcattgcccggaaacggaataacaattttttttttatagatttaaagccgaaaaatacaattgaattttctgacaggcctccttgcttgagctttaaaaactgggggcacctgaaagatgtggacctaagccttttttttcgaagacttcttggggggtttcttttggggcttaagcttatcagattttgatgacatgcccttttctttccttctctggttttcctttttcaccttgaacattgtaattgccctgccgacattaaggggttta

SEQ ID NO: 69465 - DNA, 2252 bp, Zea mays
  Clone ID: MRT4577_163345C.1
ggaattcccggtcgacccaagccttccggcaagagcctttcctcgcactcgcccctctgcatttaccacattgccctcgtcggcggcgccgaccagctgccgccgcgtccagcaaaacaaccggccgtaggtccaaaatagttccccatggcgtccatatcgtcgcttccctttgcgccgctgcgcggagccgccgagtggaggccgtcgtcgacggcgccggccgtctccggcgccgtcgtgctcagcgcgaggtctcggcggggctcgggctcgggctcgggctcgggctcgggctcgggctcggtggtgcgctgcgtcgccacggcgagtgatgtcccacctactgttggagaaacaaagttgaacttccttaagtcatacaaacgcccaatcccaagcatttacagtacggtcttacaagaacttctggtacagcaacacctgatgagatacaaaagaacctatcagtatgatgctgtgtttgctcttggattcgtcactgtctatgatcagctcatggaagggtaccccagcatcgaggacagggattccatcttcaaggcatatataacagcattaaatgaagatcctaatcaatacagagctgatgcactaaagatggaagagtgggcacgttcccagaatggcagttccttagttgatttttcttctagagatggtgaaattgaatccattctgaaagatatatcagagagggccaagggtaagggaaacttcagctacagccgattctttgcagttggcttgttccgtttgcttgagcttgcaaatgcaacagaaccaacagtactagacaagctttgcgctgcgctaaatatcaataaaagaagtgtggatagggaccttgatgtttaccgcaacatactctcaaagctggttcaagccaaggaacttctcaaggaatacgtggatagggaaaagaagaagagagaagaaagatcagaaaccccaaagccaaatgaagctgtcacaaaatttgatggaaatctttattccataaggcattagatcaaccctttgcagaggagagtttcccagtataacagaattacgtgttgagaaactaccaaatgatctcctttcaccacagacatcttttgctgctcgtcttgtggtgtagcattcttgcggtacaaaaggatccagatcattcatactattggacagatatttgtattttctcatgagtcttcaaatcaaatgtatttattttctgtcagtctgaaagtatatgaagcggtgtgtagggttaatgttactcataagcagagaaatatagctttctcttttgtactttgtggagatactttgcgagcctgtgttcacttacatgtttttgcaaccatgaaatcagttgatgggttctttatctgaatttgtatgtaccggactcagtactgggaaaatatctgtggtggaaaagttcaaggaaccagacaattctgtgctggattcacgcttcaggaagacgtgaactgttgtaacctttttcacattttgggtgaaagtaatctgatacatacgttcaatctgtcattgtcacaagcggccttccagcaagtgcaggctttggagcaaaggctattggtaactgaagatgatgtatggggttacagatgagaatccaacaccttttcttcaacgaacttattataaagctttgattggacacattgaggtggatcctactttcaagtggttatggaagagttgctgtcaaacaaagcacatggctttctcttggctgcaaattaaagacagactgagctctaggaatatgctaagaaggagaaatatgactcttgattcgtgtaactgtggactctgtagtctgcagtggcagtggaagaggtttccttgtttaaggagcagctacaatctgaaatttttatggtggcaacgattcttatgagttgggaaatttgaacagtaaggagtaaaacaatctttgaacacctgcagatgagtagccaagattacagaatgtttttcaacaaggagaccttaatggtcagccatggagtgaagccttgcttaagttctttgtttgatcgatggatctaaagtgtttgttttattctttctttgctcattttctttgttttctaagcttgttcttccccttgctgtcgtataaagtctgcaactctttccctgtttcttgtactctacagattgaacatattgtatcagtttactttcattgatagccttttcaacttttctcc

SEQ ID NO: 69466 - DNA, 931 bp, Zea mays
  Clone ID: MRT4577_163346C.1
ccggaatcgaaaaagtttgaagggaaaacaaaattagcagagccatggtatggtacatcatattctgtcgaagttgtccctccatcaatcatacaggtacatttttggacatcattactttctgcggtcgggctagaaaagtacctgtgtcttgtatacggcaattattttgcagaaatgggtagggaaagcccctgaggaagatctacacctgccaaagcgtaacatcttcattccaagtgatctttcactgagaagtgtagaggaaaaggtaagttttcctgccatgctgaggaagacacaattttcgagactctggtacaagcccgatacaatgtttttcacacccaaggcttatatcaagatggattttcactgtccactatctcaaagctcacctgagtcggcagttcttactgatgtattcacaaggttgcttatggattatttgaatgattatgcttatgacgcccaagttgctggcctctattatgttgttaagccaaatgacactggttttcaggtaactatggttggcttcaatgacaaaatgagaacccttttggagactgttattggaaaaattgcagaatttgaagttaaggctgaccgtttttctgtgataaaggaagctatgacaaaggagtatgagaatttcaagtttcggcagccataccaacaagtcctatattattgttcgctaatactggaggaccaaacatggccatgggatgaggaattttctgcactttctcaccttgaagctagtgatctgggaattttcttgccccatttgctatcaaaaaccttcatcgagtgttattttgcaggtaatattgaacccagtgaagcaacaatatcgttcaacatgttgaagatgtcttatttcatgcaccattagtgcttgcaagccactatccccatcgcagca

SEQ ID NO: 69467 - DNA, 370 bp, Zea mays
  unsure (1)..(370): unsure at all n locations
  Clone ID: MRT4577_163347C.1
cggacgcgtgggcggacgcgtggggaagcatgctgatgaggagggcgtggagctcagcctgggtaacgcgggaacccgcgaggaccacgcttgagctcaccgagctgctgctgcaacgtacaagacgatgcgcgtgagctgattgctgggcgtgaagtcgtatgtagtttagcggttaaacgcgtttaactttagtctatcttattactatctatcttagtatcttattactactactacaaacagtccgtctagtatcttactatccaactagtatctcatcatacatcaccagtccagtcgttatccttccgtatctttttcctttgcgagaaatctatncaaaagaaaaaaaacagacctggcaatg

SEQ ID NO: 69468 - DNA, 270 bp, Zea mays
  Clone ID: MRT4577_163348C.1
tacagatgcgagacgacgacagaagggggccttcaatctattcactggataaggagactccggggcaaacatactgcatgtgtgtgtgccatatactcactcttcaatgctggggtgaggaccactccatacttacttccattgctatgatatggggcataaaaagcctgatacatatggcgggcacaagcacggataaagtggaggcatgaacagtttcaagttatgacaggcatagtgaaaccaaggcattcagaggattcaaagact

SEQ ID NO: 69469 - DNA, 1295 bp, Zea mays
  Clone ID: MRT4577_163349C.1
gagcaagactgcaagagcctttcctcgcactcgcccctctgcatttacacattgccctagtcggcggcgccgaccagctgccgccgcgtccagcaaaacaaccggccgttaggtccaaaatagttccccatggcgtccatatcgtcgcttccctttgcgccgctgcgcggagccgccgagtggaggccgtcgtgctcagcgcgaggtctcggcggggctcgggctcgggctcgggctcgggctcgggctcgggctcggtggtgcgctgcgtcgccacggcgagtgatgtcccacctactgttggagaaacaaagttgaacttccttaagtcatacaaacgcccaatcccaagcatttacagtacggtcttacaagaacttctggtatagcaacacctgatgagatacaaaagaacctatcagtatgatgctgtgtttgctcttggattcgtcactgtctatgatcagctcatggaagggtaccccagcaacgaggacagggattccatcttcaaggcatatataacagcattaaatgaagatcctaatcaatacagagctgatgcactaaagatggaagagtgggcacgttcccagaatggcagttccttagttgatttttcttctagagatggtgaaattgaatccattctgaaagatatatcagaaagggccaagggtaaggggaaacttcagcagtaaaagatgtgttggcaggtacttgatgtttaccgctttgcttgagcttgcaaatggttcaagccaaggaacttctcaaggaatacgtggatagggaaaagaagaagagagaagaaagatcggaagccccgaagccgaacgaagctgtcacaaaatttgatggaaacctttattccacaaggcattagaatcagccctttgcagaggagagtttcccaggataacagaattaacagtaacatctggaccgtgttgagaaaccaccaaatgttcccctttcatcacagacgtctttggctgctcgtcttgtgatgtagcattctgccgtacaaaaggatccagattattcttactactggacagatatttgtattttctcatatgtcttgaaatcaaatgtatacattttctgtgtgtaggggtcaatgttactcaagcagagaaatatagttttctcttttgtatttaaattcaggtaatttgggaggccgtgttcacttatatataatatagtgtggcaaccatgaaaacaattggtgaagttctttatgtgagtttgtatgtaccgggctcagcactgaaaaatatctgaggttg

SEQ ID NO: 69470 - DNA, 260 bp, Zea mays
  Clone ID: MRT4577_16334C.1
ccctcctcctcctcctcgcctttcctctctctctcgctcgctcgtgctctcctcctcgcggatcaccggaggctacctagctcgaccggcgcggccgatctagctcgccgccgctttcagctcgatcagctgcgcacgtcgaccacctgtgctgcgaggcggctgactagttgagagagagacagattcagatggctggtgcggggggtgcgacggctgtgcagcagccggcggtgggggcgcccgccgtcgttggtggg

SEQ ID NO: 69471 - DNA, 682 bp, Zea mays
  Clone ID: MRT4577_163350C.1
aaagttgaaaattttctcaacatgtttgaaagcaatgtctcaaaaatgttttatgcaaagttcaagagtaatgtaagtgctcttattgatatgaaactggagaaatacaaaaacatacgcgaagaatcagctttcttttatggaaagatttttgaaggaaccctcaaatttgataaaaaaaaaacaaaggttgctgccctgagggagctcaaaaagaaaaagttggtaggcttcttcaatgatcatgtcaaggtcaatgccccccaaaaaaaaatttttagtaaacaagtgtacggtggtttccattctgccgagtacgaaaccatagtgcaaaatgctccgcccccgccgtcgtgtgaaaaaactgatatttatggcttcaggaggtcgaggcctttatatggatcattcaggggaggcgttggtcaaatgaaactatagttcaacattttctcatcattctgtaaaattctgaaaaaaagtcatctttctgttcaactgcatctacgttgattgttttttcattgcgaaccctctagtaggccatttatctacggttttttccctatattcattaaaatattatgagatttcccattgccctgtaaaaaaaaaaaaaaaaaaaaaaaaaaaaaaaaaaaaaaaaaaaaaaaaaaaactcgaggggggggcgccggtaccc

SEQ ID NO: 69472 - DNA, 1763 bp, Zea mays
  Clone ID: MRT4577_163351C.1
ttgccagccccgacgccggcggcattgggtacctcgaggccggccgggagaggaacaatagcctttcctctcactcgcccctctgcatttaccactttgccctcgtcggcggcgctgaccacccgccgccgagtccggcgaaacaaccgcctgtagttccagagtagtacctcatggcggccatatcgtcgcttcccttcgcggcgctgcgcggagccgccgagtggaggccgtcgtcgacggcggcggccgtctccggcgccgtcgtgctcagcgcgaggtctcgccggggctcgcgctcggtggtgcgatgtgtcgccacgacgggtgatgtcccacccactgtcgcagaaacaaaactgaacttccttaagtcatacaaacgcccaatcccaagcatttacagtgcagtcttacaagaacttttggtgcagcaacacctgatgagatacaaaaaaacctatcagtatgatgctgtgtttgctcttggcttcgtcactgtctatgatcagctcatggaagggtaccccagcaatgaggacaaggattccatcttcaaggcatatataacagcattaaatgaagatcctgatcaatacagagctgatgcactaaagatggaagagtgggcacgttcccagaacggtagttccttagttgatttttcttccagagatggagaaatcgaggctattctgaaagatatatcagaaagggccaagggtaagggaaacttcagctacagccgattctttgcagttggcttgttccgtttgcttgagctctcaaatgcaacggagaccaaacaatactagacaagctttgcgctgcactaaacgtcagtaaaaaaagatcggaatgccccgaagccggacgaagttgtcacaaaatttgatggaaacctttattccacaaggcattagaatcagccctttgcagaggagagtttcccaggataacagaattaacagtaacatctggaccgtgttgagaaaccaccaaatgttcccctttcatcacagacgtctttggctgctcgtcttgtgatgtagcattctgccgtacaaaaggatccagattattcttactactggacagatatttgtattttctcatatgtcttgaaatcaaatgtatacattttctgtgtgtaggggtcaatgttactcaagcagagaaatatagttttctcttttgtatttaaattcaggtaatttgggaggccgtgttcacttatatataatatagtgtggcaaccatgaaaacgcagagaaatatagttttctcttttgtattcaaaaaaaaaaaaaaaaaagcggccagctacctctatctatcctatcgagtgtgagcttcagcgctacctcaaacaagtgaatccgaatcactatgccgtgcggttcaccgcagaactcctcataccaaatctgcctaccaatgtgcgatcccggcctcgccatctgtgataccttatgctgccgaatcgcgccacctcataatcttccgtcgtagtctttgcaataaactggcttttgttggcaaaaaattttagcttgtttggatgattgttgcgatagttttgttccagcggatgggaataatgagctttgaacgtgacctcctgaaaggctgaaatgttttttttttgttaactaggctcacccccaatcttaatgcacttcacctgctactgctcagaaaatgcagtacacagaactttgatgtgttgcattccacgtaaacaggacgagtgtatgtcaccc

SEQ ID NO: 69473 - DNA, 252 bp, Zea mays
  Clone ID: MRT4577_163352C.1
tgggctggggtcgagccctggtgttctgtgtgactcctcactcatgttctccacctacaggatcctattcgactacatgtacccagcctctattacttaggcacttacacattcagggggcagcattgcctggagtgcacaaggggctccgcctattactaaaggcagggcagggcctggcggtgttgtagagactgtagccaccgtgagactgagaggatcgggagaacctgctttgagtaagaagctggg

SEQ ID NO: 69474 - DNA, 646 bp, Zea mays
  Clone ID: MRT4577_163353C.1
gctcctttctgctgcaccaacatgatgcagccatcatgtggactgcttgtttcagccttcttgtagccactcttgcggctgcttcttcgacctctcctccgtattccgaccgctagcaccgagggctgcctgctgcttctatgtcctaaaggctgagaactcggccagtggtccggataccgttaccagcatcagatcaagtagctcgagctgcagggagtgactatggaggtaaagataccacgaggaggacgtgacggcgaggctcaacggacgatcacgagcgacgacacccaggcagtgctgatctagagctcagactacagcagcgtgggcatgcatgctgcctctccgccagacgcctgaagcccaggcacattcaccccacctcaccatatgcatctgtccttttatgtagtcagtgcgatgctgcccgtctcgcgtcgtattcctatctcgctggattgtacaagccgacagacccctgctgtctctggaacatataggtcctcctgatgtgctgcttctttccttctgatgatcttgctctctgtatctgccattgctgatgagagctatggcggtatgttgactccaacacacgaaatgcgatggcaactgctttgtacgtcagacttaagataca

SEQ ID NO: 69475 - DNA, 335 bp, Zea mays
  Clone ID: MRT4577_163354C.1
tgggtacctcgagccggccgagaatttgttgctgagtaggcatggaatcaacgttaaccaacctcagcacaccaaggagagtacgtggaggagaagccatggattcttcggggcccgccgcaggctagcacattcctggcgacccgctcgtgagtactcgcgtcaccacaaaacgtccgtcgatctggcccgatcccttctcggattgggtactaaggggaatcctgctccgaagaaggcgggaaataaaacaaccccctctgaccgtccgatgtggttccccgtggccgcggcccccgacaacctgcacgcctcgctgctggtggataacatgt

SEQ ID NO: 69476 - DNA, 254 bp, Zea mays
  Clone ID: MRT4577_163355C.1
aatgtacacaagaaagctttgatgttttcattcttgttaccctgtctggatgaggatcggtccatggatcatgctcccaaaactagttctgatccactgacagagctcgctccagtctgcgagttacagacaagagggagatctctttccttctcctatatacttttttttatactactgctagtgctatactgtcaccggcgctagttctattgtcgagggcggacgttgtccccggcgcgttcgacggacga

SEQ ID NO: 69477 - DNA, 324 bp, Zea mays
  unsure (1)..(324): unsure at all n locations
  Clone ID: MRT4577_163356C.1
ggacgcgtggcggacgcgtgagctgcgatctgatcgacatggctgccgccaccatggctatcagatcacgcgcgctcatcgagaagccggcggctggcacgagggacgtcttcggcgagggccgcatcagcatgcgcaagaccgccgccaagcccaagccggcggcgtccggcagcccctggtacggtgccgaccgcgtcgtgtagctgggcccgctgtccggctcggcgccgagataactgaacggcgagttcaccggcgctacgggtgggcnacgcggggctgtcgcagaccggagccttcgcaagaacgcgacttgagtga

SEQ ID NO: 69478 - DNA, 278 bp, Zea mays
  Clone ID: MRT4577_163357C.1
ccgcgggtccgggccacgcccacgcgcgacgtgaccttttgctgtttggcacgttccttttcacagctgcccagtgcctgtacgcgccgagatccagagccaggatggtcagcatgggtctgctgaaggaaggcgtcaacatggacgagggaaccctatagatcggaatggagtacaggactgtgtctggtgtggccgggcctctggttattttggataaaagaaagggcccaaagtaccacaaaattgtgaacatccgacttggggatggggccact

SEQ ID NO: 69479 - DNA, 3330 bp, Zea mays
  unsure (1)..(3330): unsure at all n locations
  Clone ID: MRT4577_163358C.1
cattgggtacctcgaggccgggggggctcacaccatcacttgttctctcctctctctctcgtcgtcgtcgtgtgcctgggtcgaccagcgacctggctagctagctctccagctgcgcgcgccatggccaacccaacagctaccaagcatgctttcaagcgtattttgacgagcctgcttaagcctggcggtggtgaatacggcaagttcttcagccttccggcgctaaatgatccaaggatcgataagcttccctactctatacgtgttctcctggaatcagctatccgccattgtgataacttccaagttacagagagtgatgttgagaaaatcattgattgggagaacacatctccaaagctggctgagatacctttcaagccagcgagatgcattctaatggacaacactggagtcccagcagttgtagaccttgcagctatgcgtgatatgatgccaaagttgggatgtgatccctacaagattaatccattgattcccgtggatgctgttattgaccacgcagtgcgagtggatgtagcagggacgtatgatgcattagatagaaacgaggagctggagttccaacgcaacaaagaaaggtttgcttttcttaaatgggcatccaatgctttccacaacatgcaggttttccctcctggttcgggcactgtacaccaggtaaatcttgagtatcttgcccgagttgtcttcaacgaagatggcattctttacttcgacagcgtggttggcacagactcacacaccactatgattaatagtcttggagttgctgggtggggagtaggcggtattgaagcagtcgttgcaatgcttggccagccaatgggcatggttttgcctggtgtggttggattcaaattgagtgggaagttacgggatggtgtcactactactgacattgttcttactatgacccaaatgctaaggaagcacggtgctattggcaaattcgttgaattctatggtgttggtgtgggcgagctatctttgcccgctagggccacaattgccaacatgtctccagaatatggagctaccatgggcttcttccctgtagaccaagtagcattggactatctcaaactgacaggccgaagcgatgaaactgtatcgatgattgaagcatacctgcgggctaacaaaatgtttgtggacaagcatgagcctgagacggaacgagttttctcttcatatctggagctagaccttagtgaggtggagccttgcgtttcaggccccaaaaggcctcatgatcgtgtccctttgaaggaaatgaagtcagactggcatgcttgcctggacaacgaagttggcttcaagggctatgcggtgccaaaagaacagcaaggcaaagttgtgaaattcgacttccatggaaggccagctgaaataaagcatggcagtgttgttcttgcagcaatatgtagctccacaaacacatcaaatcccagcgtcatgattggtgctggccttgtggcaaagaaagcctgcgaattgggccttgaggtgaagccatgggtaaagacaagccttacccctggatctgtggttgctaccgagtacttgaaacatagtggccttcaagattatctgaaccagcaagggttccatgtcgctgcgcatggttgcgccacttgtgtgggcaactccggtgacctggatggatctgtatcagctgctatcacagaaaatgatatggttgctgctgcggttctgtcggccaaccgaaacttcgaggggcgtgtgaaccctctcactcgggctaactaccttgcctcgccgcctctggttgttgcctatgctcttgccggcactgttgacattgactttgagaaagagcccattggagttggaaagggtggcaatgaagttttcttgagggacatatggccttcaaaccaagagatcgatgaggttgtggagtccagcgtgcagactcacctgttcaagaaagtgtacgactccatcatggaacgtaaccctaggtggaaccagctgccggttccaaaggaggcactgtacccatgggaagacaggtccacctacatccgcaagcctacgtacctggagggcatgtccatgacgccgcctgcagccccgcccacggtgacggaggcctactgcctgctcaaccttggggacagcatcaccacggaccacatctcctactcggggaagatccccgagggcacacctgcggccaagtatctgctcgagtatggcgtggagcccaagaactttagctcctatggtggccgccgcgggaacaatgaggtggtgatgaggggagcgtttgccaatatgaggatcgtgaataagcttcttgatggcaaggctggtccctggacgatccatgttccttccggggagaagctctatgtttacgacgcggcaatgaagtacaagtcggaaggtcatgacatggtcatcattgctggctccgagtacggcagtggcagctctcgtgactctgctgccaagggaccaatgctactgggtgtcaagtcggtgattgcaaagagcttcgagcggatccaccggagcaacttggtggggatggggatcattcctctctgctttaaagcaggagaggatgccgattcactcggcctcaccggacgtgagcgctacaccatccacctccctaccagcaccgccgagctcagtccaggccaggacgtgaccgtcacgacccacgacggcagatccttcacttgcactcttcgcttggacacacagcttgaggtcacatacttcaaccatggaggcatccttccctacatggtccgcaacctggcagcacagatgaaataagttaaaaaagcaagctagcttattggtgcggtgggaataaattaaaaaggtactcagtgccccacgtatttgacgtatgtctgtaaataagtggcacattcgagcgctcttcgctctgccattgaggtggatcgaagctgccacatattttctccgcaggacatcggcacgaattttgtcttagcaaaccagttaattttgtactctttagattctttaattggttccatgctctctttggtacttttcatgtcagtttgctttgcaaacattatcagcgtgcccttgtagatttcgtaatggttatatgtatatgccctattgaaattgtcattttgctttgcaaaaaaatatcagcgtgccgttgtagattttcaaatgtatatgtctgccgtcaaactctctcgtgaatatgtttggttacaataatggaacaggacggaatgaaccgattcccctcncnnnctcctttctcctctccctcctttc

SEQ ID NO: 69480 - DNA, 3427 bp, Zea mays
  Clone ID: MRT4577_163359C.1
ccggccgggatgtccctgctggccggctgctctctgtgttttctctgtgcgtataagaaagctgcttgcctggtcgtcgtcctcatcacttgttctttgtgttgaggcctccatcatctatctcctctctcgtcgtgctggccgaccggcgacgacctatagctcctgccgcctcacgtcgaacgcgccatggccgccaactcaacagctaccaagcatgctttcaagcgtatattgacgagcctgattaagcctggcggtggtgaatacggcaagttcttcagccttcccgcactaaatgatccaaggatcgataagcttccctactctatacgtgttctcctggaatcagctatccgccattgtgataacttccaagttacagagagtgatgtcgagaaaatcattgattgggagaacacatctcccaagctggctgagatacctttcaagccagcgagatgcattctaatggacaacactggagtcccagctgttgtagaccttgcagctatgcgtgatatgatgccaaagttgggttgtgatccctacaagatcaatccattgattcccgtggatgctgttattgaccatgcagtgcgagtggatgtagcagggacctatgatgcattggatagaaacgaggagttggagttccaacgcaacaaagaaaggtttgcttttcttaaatgggcatccaatgctttccacaacatgcaggttttccctcctggttcaggcactgtacaccaggtaaaccttgagtatcttgcccgagttgtcttcaacgaagatggcattctttacttcgacagcgtggttggcacagactcacacaccactatgattaatagtcttggagttgctggttggggagtaggcggtattgaagcagtcgttgcaatgcttggccagccaatgggcatggttttgcctggtgtggttggattcaagttgagtgggaagttacaggatggtgtcactactactgacattgttcttactatgacccaaatgctaaggaagcacggtgctattggcaaattcgttgaattctatggtgttggtgtgggcgagctatctttgcctgctagggccacaattgccaacatgtctccagaatatggagctaccatgggcttgttccctgtagaccaagtagcattggactatctcaaattgacaggccgaagcgatgaaactgtgtcgatgattgaagcatacctgcgagctaacaaaatgtttgtggacaagcatgagcctgagacggaacgagttttctcttcatatctggagctggaccttagtgaggtggagccttgcgtttcaggccccaaaaggcctcatgatcgtgtccctttgaaggaaatgaagtcagactggcatgcttgcctggacaacgaagttggtttcaagggctatgcggtgccaaaggaacagcaaggcaaagttgtgaaattcgacttccatggaaggccagctgaaatcaagcatggcagtgttgttcttgcagcaatatgtagctccacaaacacatcaaatcccagcgtcatgattggtgctggccttgtggcaaagaaagcctgcgaattgggccttgaggtgaagccatgggtaaagacaagccttacccctggatctgtggttgctaccgagtacttgaaacatagtggccttcaagattatctgaaccagcaagggttccatgtcgctgcgcatggctgcgccacttgtgtgggcaactctggtgacctggatggatctgtatccgctgctatcacagaaaatgatatcgttgctgctgcggtgctgtcggccaaccgaaacttcgaggggcgtgtgaaccctctcactcgggctaactaccttgcctcgccgcctctggttgttgcctatgctcttgccggcactgttgacattggttttgaggaagagcccattggagttggaaagggtggcaaggaaattttcttgagggacatatggccttcaaaccaagagatcgatgaggttgtggagtccagcgtgcagactcacttgttcaagaaagtgtacgactccatcatggaacgtaaccctaggtggaaccagctgccggttccaaaggaggcactgtacccatgggacgacaggtccacctacatccgcaagcccacttacctggagggcatgtccatgacgccgcctggcccgcccacggtgacggaggcctactgcctgctcaaccttggagacagcatcaccacggaccacatctcctactcggggaagatccccgagggcacacctgcggccaagtatctgctcgagtatggtgtggagcccaagaacttcagctcctatggtggccgccgcgggaacaatgaggtggtgatgaggggagcgtttgccaatatgaggatcgtgaataagcttcttaatggcgaggctggtccctggacgatccatgttcctaccggggagaagctctacgtttacgacgcggcaatgaaatacaagtcggaaggtcatgacatggtcatcgatcgctggctccgagtacggcagtggcatgctctcgtgactctgctgccaagggaccaatgcatacttgggtgtcaagtcggtgattgcaaagagcttcgagcgtatctactggaggcaacttggtagggatggggatcattcctctctgctttcaagcaggagaggatgccaactcactacctctcacccggcgcgagcgctacacctatccacctccctaccagcaccgccgagatcagtcctggtcaggacgtgaccgtcacgacccacgacggaagatcattcacttgcactcttcgcttcgacacacagcttgaggtcacatacttcaaccatggaggcatccttccctacatggtccgcaacctggcggctccaatgaaaataagttgaagtttattgtggggaataaattaaaaggtactcaatgccacgtatttggcgcatgtatgtaaataagtggcacattctaatcttcaattgtattattcgctctggcattgaggtgggtcatagctgcattatactttctccgcaggacatgagcatggattttgttttagcaacagattatttgtactcttgattctttggttccatgctctcttcggccatctccatgtcaatttgctttgcaaacaatataatatcagcgtgccgtgcccttgtagatttccaaatggttatatgcatatgtactattgaaattgtcattttagtttgcaaacaaataccaaaagaacctttgaagatttcaaaatggatatatatgttgtattcaaatttatatgcatatgtactattgaaattgtcattttagtttgcaaacaataccaacgtgcctttgtagatttcaaaatggatatatatgttgtattcaagtttgctaaaaaaaccgatt

SEQ ID NO: 69481 - DNA, 437 bp, Zea mays
  unsure (1)..(437): unsure at all n locations
  Clone ID: MRT4577_16335C.1
tccgcgccttcgatgggcggggtgcgagggcgtggtgtactctcaagagggcgtgatgcggcggctgatgcggtggagccggccgcgctgggccgtgccgcgacaggctgcgtgcgcggtttgcctcgacctgttcctctccgccgactccctctttctcttggggtttcgtctgggggtccattcctacaancacctcttctagctctcgtaccgtttgtccnttttctatgtcaccctgcgccgcgcgcgccgtctcctgctgctggacccgtgggcggagcacggcgtctcttttttcttctgcctctcgcctgcntggttccgtcgggcctgcctttgccttcgcgggttccttttttttctgctcngngcactccccttgttttttctcgattcgcccgggctcccctccgtttttttttcccgtctttttt

SEQ ID NO: 69482 - DNA, 3736 bp, Zea mays
  Clone ID: MRT4577_163360C.1
ggaccagctgctgcgtgcccgcctcgtccccgacgtcaccaccagcgccaagctacaaccacgcgacgacgctctccatcggatccgagtcggagtcggagctaccaagcatgctttcaagcgtatattgacgagcctgattaagcctggcggtggtgaatacggcaagttcttcagccttcccgcactaaatgatccaaggatcgataagcttccctactctatacgtgttctcctggaatcagctatccgccattgtgataacttccaagttacagagagtgatgtcgagaaaatcattgattgggagaacacatctcccaagctggctgagatacctttcaagccagcgagatgcattctaatggacaacactggagtcccagctgttgtagaccttgcagctatgcgtgatatgatgccaaagttgggttgtgatccctacaagatcaatccattgattcccgtggatgctgttattgaccatgcagtgcgagtggatgtagcagggacctatgatgcattggatagaaacgaggagttggagttccaacgcaacaaagaaaggtttgcttttcttaaatgggcatccaatgctttccacaacatgcaggttttccctcctggttcaggcactgtacaccaggtaaaccttgagtatcttgcccgagttgtcttcaacgaagatggcattctttacttcgacagcgtggttggcacagactcacacaccactatgattaatagtcttggagttgctggttggggagtaggcggtattgaagcagtcgttgcaatgcttggccagccaatgggcatggttttgcctggtgtggttggattcaagttgagtgggaagttacaggatggtgtcactactactgacattgttcttactatgacccaaatgctaaggaagcacggtgctattggcaaattcgttgaattctatggtgttggtgtgggcgagctatctttgcctgctagggccacaattgccaacatgtctccagaatatggagctaccatgggcttcttccctgtagaccaagtagcattggactatctcaaattgacaggccgaagcgatgaaactgtacatttcactatgtgcagactactcttttaccatacccgttccatcattctgatatgtatatatttttattaataaagcaaagttgtatatattgcattaaatgtgattcaggtgtcgatgattgaagcatacctgcgagctaacaaaatgtttgtggacaagcatgagcctgagacggaacgagttttctcttcatatctggagctggaccttagtgaggtggagccttgcgtttcaggccccaaaaggcctcatgatcgtgtccctttgaaggaaatgaagtcagactggcatgcttgcctggacaacgaagttggtttcaagggctatgcggtgccaaaggaacagcaaggcaaagttgtgaaattcgacttccatggaaggccagctgaaatcaagcatggcagtgttgttcttgcagcaatatgtagctccacaaacacatcaaatcccagcgtcatgattggtgctggccttgtggcaaagaaagcctgcgaattgggccttgaggtgaagccatgggccttacccctggatctgtggttgctaccgagtacttgaaacatagtggccttcaagattatctgaaccagcaagggttccatgtcgctgcgcatggctgcgccacttgtgtgggcaactctggtgacctggatggatctgtatccgctgctatcacagaaaatgatatcgttgctgctgcggtgctgtcggccaaccgaaacttcgaggggcgtgtgaaccctctcactcgggctaactaccttgcctcgccgcctctggttgttgcctatgctcttgccggcactgttgacattggttttgaggaagagcccattggagttggaaagggtggcaaggaaattttcttgagggacatatggccttcaaaccaagagatcgatgaggttgtggagtccagcgtgcagactcacttgttcaagaaagtgtacgactccatcatggaacgtaaccctaggtggaaccagctgccggttccaaaggaggcactgtacccatgggacgacaggtccacctacatccgcaagcccacttacctggagggcatgtccatgacgccgcctggcccgcccacggtgacggaggcctactgcctgctcaaccttggagacagcatcaccacggaccacatctcctactcggggaagatccccgagggcacacctgcggccaagtatctgctcgagtatggtgtggagcccaagaacttcagctcctatggtggccgccgcgggaacaatgaggtggtgatgaggggagcgtttgccaatatgaggatcgtgaataagcttcttaatggcgaggctggtccctggacgatccatgttcctaccggggagaagctctacgtttacgacgcggcaatgaaatacaagtcggaaggtcatgacatggtcatcatcgctggctccgagtacggcagtggcagctctcgtgactctgctgccaagggaccaatgctactgggtgtcaagtcggtgattgcaaagagcttcgagcggatccaccggagcaacttggtggggatggggatcattcctctctgctttcaagcaggagaggatgccgattcactcggcctcaccggacgtgagcgctacaccatccacctccctaccagcaccgccgagatcagtcctggtcaggacgtgaccgtcacgacccacgacggaagatcattcacttgcactcttcgcttggacacacaggtataaggatgcgtgtttttaaacatcccaaaaactacctgcttcaccatccagttcttcctgtgtaaatgacacacatctattgttcttgcctgtcgcgcagcttgaggtcacatacttcaaccatggaggcatccttccctacatggtccgcaacctggcggcacaaatgaaataagttgaagtttattggtgggaataaattaaaaggttggagtcttatcatatcggtctctctctgatctatgcatattgatgtactctttctgatgcaaaatatccattggcatggtgtacacattttggctagcatttttctatgaaaatatgatatgtttcaaatacaaataattacacattttagaatactattccatctatccatggtcaaagctattgaagtttgactgccaagaattctaaaaccatctctatacattttggatctgcaggagtattagtactatgtgcaaaagctctctaatcagtagggcggccatttctattatctgatctgatcatatattccttcatgttggctacctaggtactcaatgccacgtatttggcgcatgtatgtaaataagtggcacattctaatcttcaattgtattattcgctctggcattgaggtatgcatgtatattctaaaataaaaaattaaaagttagtagatttaatcaccatatgtatatgctgaatagtaagacattattgttcttggttgtggtgcaggtgggtcatagctgcattatactttctccgcaggacatgagcatggattttgttttagcaacagattatttgtactcttgattctttggttccatgctctcttcggccatctccatgtcaatttgctttgcaaacaatataatatcagcgtgccgtgcccttgtagatttcc

SEQ ID NO: 69483 - DNA, 386 bp, Zea mays
  Clone ID: MRT4577_163361C.1
aaacaaccaaggaaacgtttagttaaacctaaacaggaaaaaaaagcatccaggggcacaacacgggttggggcccccggaacaacgaccccattttggacactttttggaggaccaagcgcccccgcacaaacacccaaagcaaggtggctttgaaaaagggcaaaatggcccccggaagaagctgttgccgttttcaccctcaaaaaacaacaactgggatttgcagaaggacaacccccccttgcaacacgaggactggcacttgaaacactgtttgcaggaacaacacccaaacagggtggagcacttgaaggacttgaaacaaccgaagcaactgaaacagtttgagcacaaacagaatcccgcgcagttgaaacattggg

SEQ ID NO: 69484 - DNA, 250 bp, Zea mays
  Clone ID: MRT4577_163362C.1
acgcacaatagctatctaaccttacttttcaatccataacaaacacattacattgttacctatggtccagtccatttactatacgcccacgcttcttttcataaccatcctttaccaagtcatttttttctttatcgacattttccacatcccacacacaacttccacttactacctattcatgaaacccctcaacctttcctattgcacaacgagttaatccagcccctttctactccagtttacacca

SEQ ID NO: 69485 - DNA, 366 bp, Zea mays
  Clone ID: MRT4577_163363C.1
aacacaacgatattacgcgggcgcccaaaaaatatggggggccgttcttttaacttgcccaaggataagcatagagacctggtgctatttcggactcatggagttcaatttacattcgccagggcattaatattcagggaaacacatctagtctaggctatgtacacactctaatcaaataaccgtgcaagtgtggctaatatgacgctatgcagctttcccgaccagattttttcaaacaaaaaaaacagagcttttggaaaccactggtatctgggtcagaataaacttctccatcagctccttgtatagacgaaaaggataccgcttttaactcatgggggtaaagctaacaggcgagtgcga

SEQ ID NO: 69486 - DNA, 1611 bp, Zea mays
  Clone ID: MRT4577_163364C.1
gtcttcttcccccgcgcgcatcttcccccagctcggaccacgccctagttcccgctccctcctgctcagctctccagcacgcgccctgcttcctcctcgccggccaccaagaagctctctccgctgcagcaccatgcgcgtagcggcgtaggacgttctcctctcgacctcctcccacgctcggctcctggatcggatctccgggccgtgtgctccagtgctggcgcgcgcccgtctcccatggcgctcctctctgctgccacgcccatctccctgctcgccctctccatcgccgtgaccctccttgctcctcccaggtccaactgttgtcctccctattccacctcttcaagctcgcctccacctcggctctggtgcatgctcggccaccacgatgtcccagcgccgatgaaggtccgtcttgcagcagcaccgtggtggccttcgacttggagcactgcgatgactccatgccgtgcccctctgcttcctccatgcccgagtccgagatcctcctgcggctcgttcatcgcggacatgggcacagagcctgtacgctcggagtgctgacctcaacatgctgctcggcttgggcaatgaccccctcagacccagccatcgcttgccactgaaccaccatcggattggcttccagctccccctcgcacgtctcccaggagctaagtccgtccgccgtgcaatgtgcctcggtctctggtcgaaggacatcggtgccctctgcccttgctcacctctctggtcgtgctcgtcgggacattattctctagccaactgctgctgcgagctcgcccggacacctcgcctccttgtcgtatcatgcgccatcctcgagcaacgtgtgcacgccgcgtccctgctcttccttgccggtcttgtttggcttcaacgtccgcctcttggattccttgccgtttgttcctgcttcgactcctttgtggtgggcgaggaccgccactcaggtgctcagccatgcctaggctgctagacgcccgaacccggggtcgccacgccatcattttcgtcgaatagaatcggtgtgccaacacgtcgatgtcgtcatttgcctccgcactattgctggtaggcgatcttgctgtcgtcgtgctcgctccgactctgtctctacgtgctcgccttcgatcaccgctgtaatcttgggagtttgagtgaagtagtggaacccacggggcgcttgctagggactcgacaggaggcaggaacaagaatcatcaatgtttgcttggagttctagttaattcagtaatcgttctctagttcgctatttttattaattgattggatcgatggattgaacagatatattaatcacaatgattatcttgattgaagcataaaaatgtcgtagttatattagatggttgtcaaaatatcttgttgcatgtgaggacatgattgtggtgtactagtgtcgtgaggtaaagcttaggtttaaaatggtggttacataggagtacccgagcggacgtgtctgtcgagtgtgtttaaattggttttacttatgaagtgtggcgaattagtggcatgaagaatagatttagtattttaatcgatcatttgataagttgacac

SEQ ID NO: 69487 - DNA, 247 bp, Zea mays
  Clone ID: MRT4577_163365C.1
ccacctcgtgatggttttttactgtacaaagaaaccgggggggaatttttggtggcccttcaaaacaacacaacgtggacagtcataaacagtaacatttgtcccctctcaccaaacctgtcatcttatgtgacatctacagcgcactatctcggtacatcatccaagaacatccgaccattcacgatcctgctcgaccggctactggcttaagatgacacccataaacactagcctggctcctcac

SEQ ID NO: 69488 - DNA, 383 bp, Zea mays
  Clone ID: MRT4577_163366C.1
accgcgacacgggctccttaatgttgcctgacgaggctctgccacactctccatcttatatgctagagctgcttctattctgaagacctgcggaaccagagagcctattcaacgtatgcatattgcccttgttgctaccttctgactgagccttgaccgtaaactttatcttatgctaagggagtgtgtccgctttactaacagtgaaaactccatctgaagactttaccgcctatactcctactgacgttcctgccatttctgaatggcagacattattatctgtggctatattcttagccggtactgggcctgttataattgtggggattctagcttccatagcaccattccaatccttaaatgaaggcctgtcaccagtc

SEQ ID NO: 69489 - DNA, 307 bp, Zea mays
  Clone ID: MRT4577_163367C.1
cggacgcgtgggtcttttaactcatgcttttattttctgatctgttttgaaatcaaacgggcttttttccttggttccggcactaacttactacaaggactactccttgaaccaacatttgatactcaactctgtacccttaatactgctcacatatcttccatttaccaaccaactaacataaaaacccacccgcataagaatctaccctaaacttaccattccatgaccaaaacatccaattcgaaaaacaggcttattactactaaatcctaatgaatgaccacgtctaaatttttaagagaat

SEQ ID NO: 69490 - DNA, 393 bp, Zea mays
  Clone ID: MRT4577_163368C.1
catcatattataagcactgcatcagattaaatcggcaatacagaatttggccatttgctaagccatcggcatctactaattgcattgactaatcttacatgctacccttttggctgcatggcacagctgctaggatgagggtggcagccagtgagaaagcggaggctgagaagatactccagatcaagaaagccgagggagaggcggaatccaagtacctggctggcgtgggtattgcaaggcagcgccaggccattgtggatgggctgagggacagtgtgctcgccttctcagagaacgttccaggcaccactgccaaggacatcatggacatggtcctggtcacccagtactttgacaccatgagggagattggggcctcctccaagtcct

SEQ ID NO: 69491 - DNA, 580 bp, Zea mays
  Clone ID: MRT4577_163369C.1
ttacttagttagctcaacaacgcgtataaataagcttgttgcccgctggaacaaccccacgcgtccggcagcagcggcagcggcaggacgaaggcaggagcaagagcaacggcggccctcggctcaagtcacatggcgacgacggcgagcggatcaggacccgggtccgggacggcggcgctgtgctttctcgtggcctgtctcctcctggcctcgccgtcgtcgttcgttgctgggactgaagcggcggcggcctacggtgcaggcgcaggcgcaggtgcaggcaggaagctgatgcagacatctgcgggagctatgggataccccggaactaatctaccaccagcgacatacccggcggtgccttgttgcccgtgaactctgatcctacagctgccgcggccgatacaaccctgcatattttatacaaatccaacaaagtaactattacatgcatatgctacgcgcgtgcttgttacagtgtacagtatatatgctgtaggtgtgtgagctatattattgttcaaaataaaaataaaaaaacctagcttgtgtcaaaaaaaaaaaaaaaaaagcggcc

SEQ ID NO: 69492 - DNA, 1110 bp, Zea mays
  Clone ID: MRT4577_16336C.1
cccacacccacctacctacctacctaccaccaacgcctcggctcccctctccagcgagccgcgaccgcgcggcaggggaagcttagcacggacgggaccagctgacgaccaggccatggggaagtacatgcgcaagggcaagatgtccggggaggtggccgtcatggaggtccccggcggcgcgctgctgggtgtccgcacccgctcccgcacgctcgcgctgcagagggcgcagaggccgctcgacaagggggacgcggatgacgccgccggacagtacctcgagctcaggagccggaggctcgagaagcctcataaggaccatcagccgctgccgctgccgctgccgccgcccgcccccgcagccaagaggggcgccgggaggaaggccgcctccaccgccgccgcgccaaacgcgctggcggaggacgaggtcgaggtcgaggtctccttcggggagaacgtgcttgacttggacgccatggaaaggagtaccagagagacaacaccgtgtagtttgatcaggaacccagagatgataagcaccccaggatccacaactaaaagtaaaaccagcaactcgacgacttcccgtcgcaggatggaaacctcagtctgccgtttcataccgagttcgctcgagatggaagagttcttctcggccgctgaacaacaggagcagcataacttcagggagaagtataacttctgtcctgtgaacgactgccctctcccgggtcgatatgagtgggcgaggctagactgttagattcctccaagcacaagagcaccatttatctgatgtgtctaccacatgactagcgccgccgccgccgccgaggaggcgtaatcaactggatcgcattagctttcttgcctgttgtaaaaattagagtagttagcctgtagttgaatggtcctgtgtaacgaaacaggcgtggttctgagttacaccccgatccccaacctcactgtaaccgtttgactgctcgctcaagctgtagccgaaccatccatctcaagtagcgtaggcctagcgtattcatctgttcctagttctagttcttgaatggattaatcgaatgagatcattgttagaatctgcatggc

SEQ ID NO: 69493 - DNA, 1626 bp, Zea mays
  Clone ID: MRT4577_163370C.1
agcagtggtaacaacgcagagtactttttttttttttttttttttttttttttccacggatatcaaaaggctgttgaacagtgagtttatggcgcgacgtgcttattcatttgctttcaaagagttccaagggcatcactttttttagacgccctcatgttatgagattctaatctctatccattcaggttggcatgtactttttgacttgtgtgccgcatttttggctttctctatgatgtccaaacttgcattggtgtaccatcagcttcattcaagaagtactaatagttgatacctgaggctctgagttgtacgtgaaatgtctgttcttggagttaggatatgctcggatggcaaatgaatggccttgcctttacactcttgtccttgatgcattactggaccggtggtagcatacatgacagacgtccgtcttattgtgcgcaccccgcgtccggcgtcggctccggctccagctccagctctaccccctgctgtgttctgctctgctcttcttcgctcctgttcgccgcagggatccatcgatcggtactcgtgcaggataagacatgggtcaggctttgggtttagtgcaggttgatcagtcaactgtagccatcaaagaaaacttcggcaagttcagtgaggtcctggagcctggttgccacttcctgccctggtgcatcgggcagcagattgctggttacctctccttgcgtgtgcgccagctggatgtccgctgtgaaacaaagacaaaggacaatgtctttgtcactgttgttgcatctgtccaatatcgtgctctcgctgaaaaggcatctgacgccttctacaagctgagcaacactagggaacaaattcagtcgtatgtatttgatgtcatcagagctactgttccaaagctggacttggacgatgcatttgagcagaagaatgacatcgcgaaagcagtcgaagaggagcttgaaaaggcaatgtctatgtacggctatgagatagtgcaaacgctaattgttgatattgagcctgatgaccgtgtcaagagagcaatgaacgaaatcaatgcagctgctagaatgagggtggcagccagtgagaaagctgaggctgagaagatactccagatcaagaaagccgaaggagaggcggaatccaagtacctggctggtgttggtattgcaaggcagcgccaggccattgtggacgggctgagggacagtgtgctcgccttctcagagaacgttccaggcaccactgccaaggacatcatggacatggtcctggtcacccagtactttgacaccatgaaggagattggggcctcctccaagtcctcttcagtgttcatcccccatggccctggagctgtcaaggatgtcgcggcgcagataagggatggcctcctgcaggctaaactgcagtgagaggaccctgagaaaaaggattggttctgattcgcagaggggtgagggcatcggttcaatggtgctataaaattgctaattataatatagctagactttgcatggtttgcaaaagcttagttgtgacctgtgagtgagcctgggtatccaaacctgtcagctatttggtgatattctatgctctatgttctgcgtggat

SEQ ID NO: 69494 - DNA, 1874 bp, Zea mays
  Clone ID: MRT4577_163371C.1
tttcctcctttcatcatattataagcactgcatcagattaaattggcaatacagaatttggccatttgctaagccatcggcatctactaattgcattgactaatcttacatgctacccttttggctgcatggcacgggaacctcgagtccggccgggttttagcgttttagtttagcccctcctaaatttttttgtagatccgtccctgtttgccgctgtgtttagctctcttccccgcaaggatccatcgatcggtcggacaggataagacatgggtcagattttgggtttagttcaggttgatcagtcaactgtagccatcaaagaaaattttggcaagttcagcgaggtcctggagcctggttgccacttcctgccctggtgcatagggcagcagattgctggttacctctccttgcgtgtgcgccagctggatgtccgctgcgaaacaaagacaaaggacaatgtctttgtcactgttgttgcatctgttcaatatcgcgctcttgctgataaggcatctgacgccttctacaagctgagcaacaccagggaacaaatccagtcatacgtatttgatgtcatcagagctactgttccgaagctgggcttggacgatgcatttgagcagaagaatgagatcgcaaaagcagtggaagaggagcttgaaaaggcaatgtctacttatggctatcagatcgtgcaaacgctaattgttgatattgagcctgacgaccgcgtcaagagagcaatgaacgagatcaatgcagctgctaggatgagggtggcagccagtgagaaagctgaggctgagaagatactccagatcaagaaagccgagggagaggcggaatccaagtacctggctggcgtgggtattgcaaggcagcgccaggccattgtggatgggctgagggacagtgtgctcgccttctcagagaacgttccaggcaccactgccaaggacatcatggacatggtcctggtcacccagtactttgacaccatgagggagattggggcctcctccaagtcctcttcggtgttcatcccccacggtcctggagctgtcaaggatgtctcggcgcagataagagatggcctcctgcaggctaatctgcactgagggtaccctgagaaaacgaaggattcagagggatgagggcatcggtcctatgatgctataaaattgtcaattatagactatatatgatatatagaggcaggcttgattgatttgtaaaagcatagttaagcaccgattgagctataagtgcacttgtgagtgagcctgggtatccaaacctgtcagctatttggtatgtatatgttctgcgtgcaaaatcctactgtagccatagcgttgaacaggaagaattgtaaatggatttggtgagtttatcaaaaaaaaaacagcacaaaaaaaaaaaaaaaaaaaaaaaaaagtctgcgttgttaccactgctttgcagacgagggaacagcttcggaggtcaacgcagtcgagctgcgagaacatccgcgccatcacgtgtgccggggcccgcagcgccggcgccggcgcccgcatgctcctccccttgcctcggaggcgccatggccgatccgcccgcccgccgtcccggctcttgtattggagtggacaagtgggctgcagccctgcaggtgcagaaacctcgatcaattcccgaccatgccttgtgtcagtgtcaccgaggttgaagaactggacgaagcaattctttattgggattggttacgccacgaatccaattatccaaacttgattcatcgacggcggaagaagaaaaaaaatgccatctcattgtgacgcgacgagatgtccattgtttgtcagaacagaatacatgag

SEQ ID NO: 69495 - DNA, 1111 bp, Zea mays
  unsure (1)..(1111): unsure at all n locations
  Clone ID: MRT4577_163372C.1
tcccccagcgtggctgttttgcacttttgcggccgtcagtgcgaaagtggacaaagctaaagacttgggggctggttcagacggggatcgacatgtgtctagtaaattaagcagtttctttctatttgaagaaccgcttattagttgagcacttttttttcttctagacagttgtagatgtgatgtggagcagtgcacaaactgctccatatctgaacaccacatgataattgtatatttgcagtgtacaaagagtcaaattgcatattttatcttcagtttgtggtcaggtgccttgaatcgtgagagtttacactttgtgattcccatggctgcctcaatgcgacatgtatctacccttgtctatgaccaaagcaacttactgaacatgagtaattgtcttctctttgtgaattgtcttctcttttgttcttcaacggatatcaaaaggctgttgaacagtgagtttatggtgcgatgtgcttattcatttgctttcaaagagttccaagtgcatcactttttttagtcgccctcatgttatgagattctaatctctatccattcaggttggcatgtactttttgacttgtgtgccatatttttggctttctctatgatgtccaaacttgcattggtgtaccatcagcttcattcaagaagtactaatagttgatacctgaggctctgagttgtacgtgaaatgtctgttcttggagttaggatatgctcggatggcaaatgaatggccttgcctttacactcttgtccttgatgcattactggaccgctggtagcatacatgacagacgtccgtcttattgtgcgcagataagacatgggtcagattttgggttagttcaggttgatcagtcaactgtagccatcaaagaaaattttggcaaattcagcgaggtcctggagcctggttgccacttcctgccctggtgcatagggcagcagattgctggttacctctccttgcgtgtgcgccagctggatatccgctgcgaaacaaagacaaaggttttctccgtcgcattccattttgatgtctgatttgtgctttactgaagctactgtcatganccaaaggagaatatatttcccg

SEQ ID NO: 69496 - DNA, 338 bp, Zea mays
  Clone ID: MRT4577_163373C.1
gcgagagcgagagcgacagctagagcgagagcgactagagcgactgcgaggaggcgttcctgccgcacggcggccggacgcctcaaggacgcgtgcagcacagctaccgataccgcggccgcgcgtacaagcacgaggctgacaacctacacggcttgcgccgttaccagtcctactacagccgcgaggatctcggcgggcgactccgttacgagacctaccagagcaccatccagtacaccggctccgcgaccaagaaccggcacgtgctacgctacctcgcgtaggcatatatacgctctcatccaggtgcattgcagcacgtgcacctacgcata

SEQ ID NO: 69497 - DNA, 595 bp, Zea mays
  Clone ID: MRT4577_163374C.1
ggggggggggggggggtgtaaaaaaaaattttttttttttttttttttttttttttttttttttttttttttttttttttttttttttttttttttttttttaaaaaaaaaaaccccggcctgacggcccctgaaccaaaacaggaaagggggggggggggggggaaacttttcccccaccttaattccccaaaaaaagaaagaaagagggcaaaacatccccagggggaagaaaaacaaaaataaaaccccccaacggaaaaaccacaagtctccaaggaaacttgccccccccgccgaacctcaaggaaaccccccctggcccggggggggcccctcccccggaaccggggccctggggcaccggaacaacaagcgggccgtaaacaaacccggccacccccatggccgaaaaggtcggctcgggcacccggaacccccacctggaaagccccatgctggcccggggggggtcttctaaaggggcccgttggggggttccggcctgaacaaaaaccttgggaaccccgggggggacccggacggggcccaccccaacgggggggggggaacccccaccgggggccggccccaa

SEQ ID NO: 69498 - DNA, 253 bp, Zea mays
  unsure (1)..(253): unsure at all n locations
  Clone ID: MRT4577_163375C.1
cgagaccgcgattgctagctagctagtgcggggagccagcggtgtgtttctggtattgccngctgctccgccgacctgcaccatccgctgggcttctcactcaccccgtgctccgccttccgagccccaccgcgcatccaacgcgtgggcctggcaacttcctcggtcgcctccgtccgccctctttcccgcgccaagatctcaccgggctgcacctacttcggtggccccaaccctgcccctggtcctgggg

SEQ ID NO: 69499 - DNA, 296 bp, Zea mays
  Clone ID: MRT4577_163376C.1
acgctaaccgcgaccattgtgtaaacgccatgtccccaggcctcaacatcaatgtgggggcgctgaactggttcctagcaccacctcaccattatcaactggctcccaccgaatcccgcgaacatacagacacacacgctcttggtagcgtctgctctgcagacactcctgcagccctacgtgcgcacgcactgtcagctaatgctacatgaatacgcctgatacggaatgctaagagccctcgccaccgcccgcaactgggccttcttcaacctgaactcacaaaagtgcctcca

SEQ ID NO: 69500 - DNA, 119 bp, Zea mays
  Clone ID: MRT4577_163377C.1
tttaaatttcaccagcaaatccccatgtcgggggttttctagcgatcaggggttttcccaacaagggtcttaatggtcttgccaatggcggtgccaagcgtgacctcaaggctctacat

SEQ ID NO: 69501 - DNA, 298 bp, Zea mays
  unsure (1)..(298): unsure at all n locations
  Clone ID: MRT4577_163378C.1
ttttcgtctacgcgttcgctcacgcgttcgggcgggcgttcgggaaaattaaggtccccatcaccagcatgagaggggcaaatttgtgtgggaacaattttaatagaacctaaggggcggcaaaaagtatataaagatctcactcagnaataaatgaaggggcgcgggttttcaaaaggcgttagagggaaaaaacagggctggccgaatcaaaaaggagggtaagaaaaaccactttttcccagttcgggaaaagccaaagggggggaacccaggggtcttgccaaaaatttgccag

SEQ ID NO: 69502 - DNA, 627 bp, Zea mays
  Clone ID: MRT4577_163379C.1
cattgggtccctcgaggccggccgggatcgaccctacatatctctcctctcctgttttgcgcgcgcctcctctcccttcgctctcgagagaccctggatcgacctcaacgggcggcaaccgctgacaccgacgtgcagcctggtaggccacggcggcgcggagtgagtttcgaatccgacgcagactgagactgacgcgccgatggaggtggaatagagcttcgacgcgaacgtgccccactccttcgcgggggcctcggcgctctgccccctctcacgacggctgcgactactacttcgactcctactcccacttcagtcttcgtgatgaaaaggtagaacatgtcactcgtgcacttgcatattctgatgctctcacccgcagtagctttcttatcttgaactctccaatccttgatgtagttgtctggaactggcatcctttctcttttctgtcgtttggcacgattgttgcgtgactctgcgatatgatgtccctctaccgcgtacactatgcaccccccacactgtcacctggatgtacattccgatgtcgtaacggtcttgcacttctgcggggagtagcttcacctcctgagaccaggatccatttcctcatcgctcata

SEQ ID NO: 69503 - DNA, 448 bp, Zea mays
  Clone ID: MRT4577_16337C.1
tgttgttttttgatcaggcgaagcatacggctcagattttactccaaaaaagagaacctcagggaatatccctaattccagccgatcacagctaggtgtatgcattgtctatcaatcgccgatgcatccattccttctagtttctatacaacaaaattccttttttgctacggtacaggatgaacgttccaaacgtcgatcgcggctccactgataaatgaatgaatcaaacgaatactccaaacgcatctactgagtgagggcggaggtcaactatcggatccgttagtttgtgttccaaccgagaaatcatcagtcctcggactcggacacctcggctgcaacggttggaccacctgtgcatttttttctttgatgaagctctagcatttttacctctgggtggcatagccctgagcattttggaatgtcccaacagcaactgaag

SEQ ID NO: 69504 - DNA, 479 bp, Zea mays
  Clone ID: MRT4577_163380C.1
gccggtactgtagatagggcctggcgttccagctcgatcactgggacggcgtgaatggcgatctcaaccagacctatagcttagtcactacgccgccttgcatctttcggcttgagcacatcaggggtgtaggtatctacagcgagtgacactcaggcagtgccaatttggagcttgggcggtgcacacggatgaactggactaaatgacagggatccagtaacagcagggagcctaccagaaatgaccgagagcgacacatgaacacgcgacaccatcgataaatgaaacatgcgtaacgagaacctgttctacacccgacagccatgcccacgaggtcggaatcagttattgcatgatagagatccaggtgctctggccggcaccgaagaacatgacggacctcagagtgtaagacattaccattgagcttttatttgtagttcatctagatacgtggaactgcgcactcgacattg

SEQ ID NO: 69505 - DNA, 217 bp, Zea mays
  Clone ID: MRT4577_163381C.1
ctggcttctcgcccgtgccaccgcacggagaaatgaacgaagagggtggctatggacatgggcctgatcagagacgttgctgggtacgctccttatgagaagcacatcactgagctcatgaaggttggcaaggacaagcgtgccctgaatcttgctaagagaaagcttgtaactcacattagggcacataagaagatagaggagatggctggcgtac

SEQ ID NO: 69506 - DNA, 450 bp, Zea mays
  Clone ID: MRT4577_163382C.1
cttagctgaatccctgaaccctctccgtctgagccgcgttctgccctttattatttataaaggtgaccaccctggcgatgcgcccgggagcaagtgcgtcgtaaaagcagctgggcacagccaaaaagagtgagcccttgttaatgggcattttggggacggagcaggaaaagatgctgattgtacttgttcgtcacgcctttattagttttaagctttgcttcacattcacattctcgcgaacgcaagatgatgttccgcgcgtctccggcagaggagtaccgtgtgttgcgcaccactctgtcgcggacaaggttccattttccaaaacgggccactgtttagccggtccctctaaccaccaatcaggcagtctcggtactgctgctacaccacctaaactaatgtatctatcggtcaaggagttactactattggcggtatatatat

SEQ ID NO: 69507 - DNA, 1690 bp, Zea mays
  Clone ID: MRT4577_163383C.1
gggctgctggacacgcgcccgcggccgcgggggcggccgtggccaactctgggggcgtcgacctcacccccgccgcgcggcgcaacaagaagcgcaagctcccggtgaagcaactccctgaccgcgtcgccgcgcttctcccagagtccgcgctctatacgcagctgctcgagttcgaggcccgcgtggacgccgcgctcgcgcggaagaaggtagacatccaggaggcgctcaagacgccgccctcgctccagcgcacacttcgcatctacgtcttcaacaccttcgccaaccaggggccgcgcaccatcccacctcccaagaatgccgatccgccaacctggtccctcaagatcattggtcgcgtgcttgaggacggcgccgagctggatcctgccagtgttgtgcccaagcacaacccagtttatcccaagttctcccaattcttcaagagggtgacgatagcgctggacccgtctctgtacccagagaatccactcatcatctgggagaatgcacgggcagctgcccagcaggaagggtttgaggtaaagaggaaaggggataaggagtttgttgcaaacattcggctggagatgaactacagccctgagaagttcaagttatcacagccgcttatggaggtgcttggggtggaggtggacactcgtgcacgggtgattgctgccctctggcagtatattaaagcaaagaagcttcagaacccaaatgatccttccttcttcatgtgtgaccctcaattgaagaaggtgtttggggaggacaagctcaagtttgcaatgttgtcacagaagatatctcagcatctgtctgccccaccacccatcaatttggagcacaagattaagctgtcagggaatggagcacatagcagtgcttgctatgatgtgctcgtggatgttcctttcccgctgcagaaagagatgatggcgttccttgccaacacagagaagcacaaggacattgaggcttgcgacgaggtgatatctgcttcgatcaagaagatccatgagcaccgcaggaggagggcattcttcctgggtttcagccagtccccagtggagttcatcaatgcattgatagcttcccagagcaaggatttaaagctggtcgccggcgaggcgaatagaaacattgagaaggaaagacgtgccgacttctataaccaaccatgggtcgaagacgccgttataagatacttgaaccgcaaaccagctaatgagggcccaggtggtggtgctggtggttcttgaggcatggatttctcctagtgcggttttggtgtagaaacaaattatctgttctgtattgatagtaaaaatcagatgtatttgcaaagagaattgttcagtgttgtgaaaggatgttcaggctagtggaggttgttatgttcctgtctgattattgtggaagtataatgccaagtgctgaactgcaccataatgttgcttggcgtggccctgaaaatagtaagcctaaatgacattataaggaaactggaatgcaggagtatgagagtagcttttccatgattccttgagctggaagaagcattgaggtgtggttaccttttgtcaagaagattttcttactcttttctttaagaaacttctggtttcaggtagtagttgtaacacccactttgtaataatagagaaacaatttctcc

SEQ ID NO: 69508 - DNA, 375 bp, Zea mays
  unsure (1)..(375): unsure at all n locations
  Clone ID: MRT4577_163384C.1
gacctcaccgctnaaggcattcttccnccgcagcgtgatcaacggagcgcactacatctgccacagtggcggccactgccccatggacacctacatgcgtcccatgtgccaggagtgtgggcttctcaaatgccgccaggctgccatgcatcaagagtgtgtcctgtcagaagaacagatccgcctgaataatctgatgctgtaagaggaggaacaggctcatgccacatccttgccccccagggcttactaacccccccaaatcctgccccagttaactccggaacaactggggatgatcgagaaacttatctcttgccagcatcagtgtaacccgggctccttttctgaccggtcttcgaattaacggccttg

SEQ ID NO: 69509 - DNA, 882 bp, Zea mays
  Clone ID: MRT4577_163385C.1
tcggacgcgtgggctcgcgcacgggtgattgctgccctctggcagtatattaaagcaaagaagcttcagaacccaaatgatccttccttcttcatgtgtgaccctcaattgaagaaggtgtttggggaggacaagctcaagtttgcaatgctgtcacagaggatatctcagcatctgtctgccccgccacccatcaatttggagcacaagattaagctgtcggggaatgaagcgcatagcagtgcttgctatgatgtgctggtggatgttcccttcccgctgcagaaagagatgatggcattccttgccaacacagagaagcacaaggacattgaggcctgcgacgaggtgatatctgcttcgatcaagaagatccatgagcatcgcaggaggagggccttcttcctgggtttcagccagtccccagtggagttcatcaatgctctgatagcttctcagagcaaagatttaaagctggttgctggcgaggcgaataggaacattgagaaagaaagacgtgccgacttctataaccaaccatgggttgaagacgccgttataagatacttgaaccgcaaaccggctaacgagggcctaggtggtggtgctggtggttcttgaggcgtggatttctcctagctattttagtgtataaacaaattatctgttctgtattggcagtaaatttcaggcgtattagtgaagagatttgttcagtgttgtgaaatgatgttcaggctagtcattgtatgtttatgttgtgttctatattgtcaagtgctgaactgaaccgtaatgttgcttggtgtggccctgaaaatagtaagcctaaatcacattctaaaaaaaaaaaatgcaggattatgatagtagcctttccat

SEQ ID NO: 69510 - DNA, 374 bp, Zea mays
  Clone ID: MRT4577_163386C.1
cccacgcgtccgagcgcgggcgcgcacaagtgcggcaaccactaagccccaccgctcaccactcgcgctgtgcgcagagacgagaaccaaagatgtgtgtcactccagccgaggaataagaagaggccggcgaagagctcgtggagatttcgtgcttacaggactttggcgaagaagataggagccttgctgctaaacgccacaccccatcgcgagcggcagagagcatggatcctctgctggcatgggactccgtggacgggccggtggatgcggctctatagctatggctataccgggcagcccaccgacgatcgtgtgcatcaccggtcaaagatcttgcatgctggacacgctcctagataacccgtctg

SEQ ID NO: 69511 - DNA, 412 bp, Zea mays
  Clone ID: MRT4577_163387C.1
ggaacaaactaaaaccacttccaatttggaactggtggaatacaaaaaaaatgaccatgttttgcaaaggccttgcaggaaaacaatacaattaggacttggtgaattacaaatgtgaactttaaaaaagggtaaaaatccccctcaaaaaaatcttcccacgggaaaacaattttgcccacaaaccacattggccgggcattggtgggctcccttttgaactcaagccaagggcttatcggggggggaacttttggttttggttacccggctcttttggtcttggacttggaggaaaacaagcgtgggcccaaacaagtggttggggcttcccaccaccgttgagtgattcaagaccgtttaacacaagctgggttaaacaaaaaccttgggtggttttcctgagcccttt

SEQ ID NO: 69512 - DNA, 751 bp, Zea mays
  Clone ID: MRT4577_163388C.1
agcataaatagtagtggttgattgtgtaattccagagatataaacgaatatctctagagatctgcctcatcaacagctgcagtatttgctagccacatatatatacacagttcgacacgtagttataacggaagagagaagcaaagagagaggcagagtgactgcaaccatcagtagttctatgattttattttttaccgttttgttgctgtttcatggtgtttatttgattgtagggtggaggagaggtgaaagctgacagaagagagtgagcacacatggtgcctttcttgcatgatgtatgatcgagagagttcatgctcgaagctatgcgtgctcacttctctctctgtcagccattagaactcctctatctctcaatctcgatctccctctttctttgttgatctctcccatggtgatatttatttgcttcctacgtgttgtgttctctttcttcagcacacacacaacctgttcatgttaccttagggttaagtttttgcactttgcgtgaagatggaaagacaaacagtagatgggtttttttgaaggtttgacagaagagagtgagcacacacggtggtttcttaccatgagtgccatgctaggagctgtgcgtgctcaccctctatctgtcagtcactcatcaagcccatctgtcttagcttgtttccggctttccgctgctaataaatattctagactccagtgtatttgacacagagatcgatcgctatcatgttcgatg

SEQ ID NO: 69513 - DNA, 215 bp, Zea mays
  Clone ID: MRT4577_163389C.1
aggggggttggacttttttttttctttttggcccgggccctcggcatggttttagttacttaccacctgcttggaaccgtgaggttcccttctagacatcattagtgcgcgcccaaagtcccccacaccggaccgtgaaaccagttctgggccgcagccccctcaccttcgaacattgcaagacatatcggacaggtaaaacagggacatgcctt

SEQ ID NO: 69514 - DNA, 322 bp, Zea mays
  unsure (1)..(322): unsure at all n locations
  Clone ID: MRT4577_16338C.1
ttgcataccattccactcttaaattataccaacctttattactcncctcgacacgctctattaaataccaactcccaacccaaaccnnatcccaaatcntcacatcncacccactccgctcggacccttcgttcaccccccatcatccatccatccatccatccagccatttgcctcaaagactttcttaaccacccccaggacaaccttcttccgtcgttcccgctcctactaaccatccttctaatccttgccctcatcatgggcctcatcacgctcatcatatacctattggttcaacccacacacccgcgcttatacc

SEQ ID NO: 69515 - DNA, 481 bp, Zea mays
  Clone ID: MRT4577_163390C.1
aaaaaccgggaaagggaccctcttatttcgggggggccccccccctcccccaaaaaactttattatggaatcccccccaaaaaggcacctaaaaaaggcccccccccatgatggggggggggaaggaggcccctgggcctgccaaaccaagggggccaaagggcaccaattggtgtagttgaaaaagggggggggggttacccccaacccgcgggaaaaaaggcaccacctggtgctgggccaaaaaggaaccccggtttgctgcacctagcgggctaaaggggagaagaatttgccgccgcaaaaaacccggggggtccagggccgccaattggttaaagggaaaaagttgttgttgctgaaagtaggcaaaacccacccggctgaagggaaatagtgggggccccaaataaccagcagggttcagggtaaacagttggttgaatggaaaaaattgttgttgctgaaagtagggaaaaag

SEQ ID NO: 69516 - DNA, 589 bp, Zea mays
  Clone ID: MRT4577_163391C.1
cacgcctgcgtgtaccgggctgctattacacggtcgacctacgcgttcggtgataatggttgcggtagcaaaacttgctgaatgaccaatggtgaaaccctaacagatccaaaagcattcattgtaggcatcttacctatatcacccttgaaactgcaccaccgaaagacgtattacaggaagtacctttggggcatttgcaaacacagaacattaaagggcaacaactacaacaacttgagctaggaaaccttgctggctactctgagcaacagcaactgcttccattgaaccaactggatgaattgaactgtgctacttattttcaacaacaactaccattcagtcagctagctggtgactaaccccaacaatttattgcattcaaccaactgacaggaataaactctggtgttatgtacaacatcaacagctaccaccattcagccagctagctgatgtgagccctgtaatcttcttgacacaacaacaggagtaaacgttctacctgcacagtgcgcctaacgctggcaccctcatacaactgcaacaattgctgccattaaaccaacttgctttgacaaaccca

SEQ ID NO: 69517 - DNA, 641 bp, Zea mays
  Clone ID: MRT4577_163392C.1
tttcaaacattctccccctttcgttgtccttccccgtcccattccctccgcttcccagtccgcagcagttccgcaccgacaccctcaccctccccaaagccctaaccgctcgcccgctccgccgccatgaggtccaaggccaacggagacaccgcgttcaaggcctccggcaagaacaagacggccaccggcggcgtcgccaagccgaagcgcgcccccacccccttcttcgccttcctggctgagttcaggccacagtacatggagaagcaccccgaggcaaagggcgtcgcggccgtcaccaaggcggctggggagaagtggcgcagcatgtcggatgaggagaaggcaaagtatggcggcaagaaggcagatgccccagcaagcaaggcggtgaacaagaaggagagcaccagctccaagaagaccaagactaacgctgacgaagaaggttctgacgttgaggatgatgaggaggatgaggagtaaatagtagatgagggaacagcagcggtgcaaatcagcgtttgctgcttagggtttagattgccatgtcgatgtccggattatgtaatgttatgtaaggagaatgtttagatgcgtactcctgggctgtggcatgctggagatgtctttgtttg

SEQ ID NO: 69518 - DNA, 1249 bp, Zea mays
  Clone ID: MRT4577_163393C.1
ccggccggggcgcattttgtaaaggtacgaggagcaaggtgaggcaccaccagtaccaaccgggctccgagttcatcacgcacgcatggaaggctcggcggcacaggcgccggggaagaccgtcctgagggtggtggcgatctccggctcgctgcgcagggcgtcggccaacaccggcctcatccgcgccggtaagctcgctccatgcccacccccaccacgccttatctaaacattatccgaagcttcgagcgccagccagcgttctgtgtgtgtggcctgcagtgtgccgtgccgctgccgggcaaactaataaatttaacctaacgcgcccgcgcccgcgcgcagccgcggagatctgcagggagtcgatcccggggctggaggtggagcacgtggacatctcggagctgccgctgctgaacaccgacctggagggcccgggccccggcgcgttcccggcggccgtcgaggcgttccgcggcaaggtgcgcgccgccgactgcttcctgttcgcgtcgcccgagtacaactactccatctcgggcccgctcaagaacgcgctggactgggggtcgcgcccgcccaactgctggggcgacagggccgccgccatcctcagcgcgtcgggcgggtcggggggcagccgctcgcagtaccacgtccgccaggtcggcgtcttcctcgacctccacttcgtcaacaagcccgaggtgttcaccagggcgcaccagccgcccagcaagttcgacgacgacggcaacctcgtcgacccggacaccaaggaccaggtcaccaaggtgctcctggcgctgcaggctctcgcgctcaggctgcacctggggaagctcgctgttgctgcacactcttcttgaacgtcgtcgtcgtcgggggtgcactaaactacactacacatcgtcgccgagctccaaatgccgtgccgtgtccgtgtgtgcgcgcttcaataaattctcggcgtccaacttttaatgagtgatgcacaatcgtgttcatttgtgagatgccctgatcgaatcgatccgtttgcgttttgccacgatcatcaaagaccaaaaggttagctggttgaaaacaaattggctttgtcatttgctaggagatactgcgacttgagtaccctgcgtgcattcttggtctcatcgaagtcgccttgtaatttgactcagagaaagaagaagaggaggaggaagcttccgtgctgacagtaccaacatcagcaagcaacctc

SEQ ID NO: 69519 - DNA, 149 bp, Zea mays
  Clone ID: MRT4577_163394C.1
tgcatttacagtacgttcacccccgtggcccgacccttcagccatcgcaaaactgaggtattcttcttggctgaatgctggcgtcgacagcaaagtccacaactccatcctgcatgcgctcctccctgttctctgttctcactcagcac

SEQ ID NO: 69520 - DNA, 267 bp, Zea mays
  Clone ID: MRT4577_163395C.1
cagagctttgaacttaacttccaagaaaacacaagactagtcccacaaattatattttgacctccccacaccaaaaatatccatacatttactacaaaaacacccccaccccgtccaaaaagagtttacccccttatttctataaaaaacctatcaccacctgctgatcctatgttcatataccccagcactcactatctaccttctgcaaaagtatatgcactcaacgaatcccttcttatttctaacttcaccaaacatccccat

SEQ ID NO: 69521 - DNA, 448 bp, Zea mays
  Clone ID: MRT4577_163396C.1
cgcatgggaggttgaaggcacaacagagtacaagaacacacgacctggagcacgaccgtcccctgcccttcttttacttagggcgggcatcgaacacagcccacacatttttccccaacgttgggggacacaatctgcccacgtataccccccctatattagagaaaaaatttataccaaaacaacccccctcctaactgtcaaacgggcggtccaacattgattaggttcttgactcacgccagacacagtacactgtcaggttgactcttcaccgcccgatacacggaccacgtcttgccttccttcccgaaaccagcataaggtagcacatatttaatctactttgccaaccaccatccactagacataaaaaaaacaatggtgtcaactagaatctaccaaggcaaccaccaccacctgcttgacagataagatgccttggttc

SEQ ID NO: 69522 - DNA, 567 bp, Zea mays
  unsure (1)..(567): unsure at all n locations
  Clone ID: MRT4577_163397C.1
gtgtttttttttttttggaatgcaacagccgaacagcgtcggtgttattgacttgtctatacagatagacatgcaataaatatgtcagtgttacactcgatttccttttccaaaaacatgtatgcgcctagctacaatagcaggtgggggggggaggcaccaagttcgttcgttccttggcaagggacctcaactccggtggctaccctaacaaaactgtaccccttcctagaacgccaacttctctttctcttcagctgcaaccggcagcgatccctcctaggctgcgtcctgcatctcgttagccttctcgttgctaatgccgagcaggtactgcaaccttgatagcttctcaggcttaggaatgctcttcaggtagatggcaaanagancatctagctctcctggtgtgggccatgacaagggtcgtgatgcagggaccgcagcatcacatgcgagcatgttcagtaggcaaaccgacctgcttttgaatcttagcaagctggtcagccttagcctctgttaatttcccattagcaagaattacttccgtctgttgcacaaaaa

SEQ ID NO: 69523 - DNA, 309 bp, Zea mays
  Clone ID: MRT4577_163398C.1
ccgaagctgatcctctaagcggcccccttccttcttttttttttacccccccaacttccactaggggatgggtttttttttttttttaccaagcccaaaccaatttccggtcaaaaaaaaaacaaaacccgcttgttgaaacaagcaaaagcctggccctgctaaaaaaatgacccaagcaacccttaaggaaccctaaaaacacccatgcctcttatctttctcaaaaaaaaaaaacgggggaggggggcgcaacaacaaggatcctgaaccaccccattttattggaacccaaggcctcccaactcc

SEQ ID NO: 69524 - DNA, 3846 bp, Zea mays
  Clone ID: MRT4577_163399C.1
ggtaccaggcccccttctcgagtttttttttttttttttttttttttttttttttttttttttttttttttttttttttttttttttttttttttggagtttattttctgaatttgttcttatgagcaaaggtggcagtcatagccgtaaatgtaatacattcttaaaccaaaagagaaacaatgaaccagaaaacaaaacgcttccagtgtggcctggtggaatgcaacagccgaacagcgtctgtgtttaggttaacaacaaatccaggttataagcaagggtggcagtcatagctgtaatacattcttaaaccaaaagagaaacaatgaaccagaaaacaaaacgcttccagtgtggcctggtggaatgcaacagcctaacagcgtcggtgttattgacttgtctatacagatagacatgcaataaatatgtcagtgttacacgtcgatttccttttccaaaaacatgtatgcgcctagctacaatagcagctgtccgccacaggcaccaagttcgttcgttccttggcaagggacctcaactccggtggctaccctaacaaaactgtaccccttcctagaacgccaactcctctttctcttcagctgcaaccggcagcgatccctccgaggctgcgtactgcatctcgttagccttctcgttgctaatgccgagcaggtactgcaaccttgatagcttctcaggcttaggaatgctcttcaggtagatggcaaatagatcatctagctctcctggtgtgggccatgacaagggtcgtgatgcagggaccgcagcatcacatgcgagcatgtcattcagagatgaaagcacatcatctctcttcttctgccgaagcaacgcaatagcctggacaagggagttctccaacctaacctttgcaatatcctgtacaattgacttggccttctcagaacttattatgagatcagctggaatcttcacatacatttcctcttcatcgaaatcccctgtacctgaagaaaagagctcttcaacagtttttctataaatgctttctcgctgcggctccgcaatcaagctatctagttggaagtttgcttccttcaatcctcggacctgctgtataccgatctgaccccgagcaacagaggcttcaattgcagaagataactttgtagttgtaatacccttaatgattttctgtgcatgttcagtaggcaaaccgacctgcttttgaatcttagcaagctggtcagccttagcctctgttaatttcccatcagcaagaattacttccgcctgttgcacaaaagctttctctgcaaacttaatgtgaacatcttgagcttctttgcgagttaaaccaagtatgtcacccaattgctttagcattaaaaactctgaatcatctttctttgtagagatagctgttccaaatgatacattagtagtctccccagtgatgcagaacatcaggtacgtttcatacagctcagccctatccctcaatggaatgtcatccttgagagttatctctttctggcttgactttctcagcttttctttgagctctttatcaggtctagtcttcctcagtgtatccaatgattcccattcatgttcaccatcctctccttcagattctgcagctgcacttgatgcttcagtttcagcaactggagatagttctcctttaatgtcagctaaaagctcgcggccaacaactatgttgaaggaaattaacttcttcagttcttttgcagtttcaatgcggtttccagcttcttttgctctctgaatgtagctcaagaataacttccgtactgctttactaaagatcgtcatgacagcctccgttttcaggtttagactttgtgctgccttcctaacagcctcacgtctatcagcattatatccgtcaacagatgcaatggcttctttgacaaccttttcgaacagttgcccacaaatctcagtatgtgcagcgtccacagtttcttgagggatgcagagacgcacttggaatgccatcagagcttccacttcctccttgctcagctctccatcagctacaaactgctgaagcttctgtctgtaaatttcttcatgcatcttactagccagttcaggatcaaactgtaacttttcgcaaagagtttggagaaatgctgctttgctagggactgaagctaattcagtgttaaatgatttagcaagtgtccttctgtatatgtgagctttggcatcagataagattccttctgcttcccgcttccccagtccaaatatgtttctcagttcattcagaggggaaagcttcttatcatccacaattccatctgaaagtacttctgtagcataggccttatagagtatcttgaaatcatcagctctcccctggtgatcatcctctccagctaatgaaatagggccaagaccacgagcaaaattatcagcttcagggtgtttgcttaatgttgtaagcaaactattaaatttaattacaatattcacttcttccacagcctgagttagactatccggaatacgtgacttcaagatgtctaatgctgatgaaatgttttcttgaactagctgcttcgcgtgctcacggaacatctcagcagcaatctcatcagaaagtttatatgcaagttgtgctctccttacttcaatgagtgtgcctatgtcaagacctcttccaatagacttgagctgcaccgagtataaattcttggcattttccctcatagcaatgtcaatctgagaatcagtcaccccaaacagacgtttccaaggaagtaggaatacagatgcatctccaaagacaagattggacacataaattaacttctgaaatgcccgtctttgttccatgtcagcatcacgatcactcgtttccaacctctctctgtatatgcgtctaccaatctccatgtgcatgttagcagcatctacatcatcaagcccaagagcacttttaaattttataattgcctgaacctctgtacctttgagatcttcatctcctggaggaagtactgagtaaagatacctggcatacaagtcacagagctctgctttgaaggcgtcatcctgtgtgctaactccatatttcttcgcgattgcctccacctcgccgttgtccaggttggtggggtcgtcgtggcccgcgacgtaattgtgcagccccacggcggcgacctctgggaccacggagttcaccgcagctgctcccgccacgctggccgcgccgagcactgccgcccccgccaccgccacggcgcgcgacccgccacccgcgcggagcccgatgccgtatcccgccgccacggctgccgcggcgacggccagttccgccgccgtccgcgctgcgggcggcagcgcctccaccagcggctggatgcccgttagctcccgccgcgcgccgaacacctcctcgccaggggaagtctcgcccgcgtcagcggcagccgcgcggagccggagccggagccgcagcgccgccgctgcggtcctccgcggcgggaagcggaggagcgggaatggtttaagcggcgagaagataagtggcgggaaggcccccgccgcccgaggcgagggcttcgcggaggcgagcgccagctccatgcccggtagagatccctgctgcctctgcggacgggggtggggacacctcctcctcggcggcggcagggccggtggggtagggtgggatgtgatggattggggagggtggcggacgaggtggaagaggaggggggcgcggcgagggcagcggatagcgttgggatggggtgggattggtgcggcggggcgaggggcggctggaccaacacaagggtttgcccgtgccgaatt

SEQ ID NO: 69525 - DNA, 2435 bp, Zea mays
  Clone ID: MRT4577_16339C.1
gttccaaacggccgtgctcccgttccacccacccccatccctcctccactcacccggcctccgtccgatccgcccacgcagacgtgtcggcctcgtgcgcaacgaagaccggccggccggctcacccgccctcccgcccgccgccatgcctggctcgcccaaggtcttcttcgcttcctccgcctcgcgccgctccggggcactgcgccggctgctctcctcgccggccttctctgcggcctgcctcttcttcggcctcgccggctttctcgccgccgcgctcaccctctcgcgctccccgtccatcactcacagccgctgccccgactcctcgcgcccgctctccgtctccgtcgcgtgggaccgccgcccaggggatggctccgccgcgggctccgcggagctcccggcctcgctcgccaccggatcgcgcggccgtcacaaggtcatggccttcgtcgggatcttcaccgggtttggctccatcggccgccgccgcgcgctgcgccggacgtggctccccgcggatcgccagggtctacttcgactggaggaagccactggtctggcattccggtttgtgattgggaaaagcaattcaaagaacaagatggccgctcttaacagagaagttgaagaatatgatgattttgtgcttttagatctcgaggaggagtatagcaggctcccatacaaaacgttagctttctttaaggcggcctatgcattgtttgattctgatttctatgttaaagcggatgatgacatttacttgcgaccagatagactttccttacttttggctaaagagcggtcacatccacaaacatacattggatgcatgaagaaggggcctgtttttactgatcctaagttgaaatggtatgagccccaatccttcttactcggatcagaatactttcttcatgcatatgggccaatttatgctttatcagctgacgtggtggctagcttggttgctttgaggaacaacaggtgagttgcagtgaatgttccacccttatcataattcataaacacaaacttacctttttttgcaattattttctacacatgtttcttaattgtacttagcaaatatggttgtttgtctccacttttgtactaccaccaaattagtctttcaaactcatgcactagtttctggggaactgtactggctggtataactggaatacctgtattaatgtttgccaaaaaaaaattcttttgcttggcaaatatacctgaaaaatccttcttactcggatcagaatgctttcttcatgcatatgggccaatttatgctttatcagctgacgtggtggctagcttggttgctttgaggaacaacagtttccgtatgtttagcaacgaggacgttagaattggaacgtggacgcttgctatgaacgtcaactatgagaacacacatgcgctttgtgaacctgtctgcacggaatcttcatttgatggttgggacattccaaaatgctcatgattagtctctgtcaaagctatactatggcaatggacaagtatcattggttgctaatgctatattgaagtcacaaaccctggagcctggggtagaactgctacaggaacagcaaggaaactgacatttttagattaagaaacaccagaagattttgtgagactcaattctcatatatttgcataacttgcattgttaaatcctgtcaaaccttgcatatgttttctccagtttccgtatgtttggcaacgaggacgttacaattggatcgtggatgcttgctatgaacgtcaaccatgagaacacacatgcgctctgtgaacctgactgcacggagtcttcagttgctgtttgggacattccaaaatgctcagggctatgccacccagaggtaaaaatgctagagcttcatcaaagaaaagaatgcacaggtggtccaaccgttgcagccgaggtgtccgagtccgaggactgatgatttctcggttggaacacaaactaacggatccgatagttgacctccgccctcactcagtagatgcgtttggagtattcgtttgattcattcatttatcaggtgcaatcaatgtggcagcgctgctcaaggcagcactgtagcaaagccactcattgcattttttttttgcagtggagccgcgatcgacgtttggaacgttcatcctgtaccgtagcaaaaaaggaattttgttgtatagaaactagaaggaatggatgcatcggcgattgatagactggaattagggatattccctgaggttctcttttttggacaaaatctgaccgtctgcctgcctgatccatcatagctagtgagcaaagctgaccttgaggtgatactctagcagccgaaaaaaaaaaaaaaaaaaaaaaaaaaaaaaaaaaaaaaaaaaagaaaaaaaaaaaaaaaaaagcggcc

SEQ ID NO: 69526 - DNA, 365 bp, Zea mays
  unsure (1)..(365): unsure at all n locations
  Clone ID: MRT4577_1633C.1
cattgggtacctcgaggccggccgggagcatgtcagcacctaaggacagacttgcaggagcactcatgtttttctcgatgcacgccgcagaggaacacattccttctcaacctctggcacacatcgcaccacaatagacggtcgtatctcgccccggatacggttccgtctttggcggccacggaagcctgctaccgaacaaggtggcgaaaacatcgagctcctcttgaaggcctatgtggttctccagggttgaggaacctgaatatgttcacggntgcgctggaccgccaataactccttgaccagttccgtgtcgtcaatcccccccacgacctgcaattcgagttgcactccgtgcacca

SEQ ID NO: 69527 - DNA, 599 bp, Zea mays
  Clone ID: MRT4577_163400C.1
ctcgagatttttttttttttttttttttttttttttttttttttttttttttttttttaaggaggattcccttgaggccaactcaattaagggaaaaggggcaaaactttgttttgttttttaacctatcctacaacggacccggggggctaaaggcaactttcagccataaatatgcctttggggggaatggaaaacttgctaggccctttttggggcaacaaggtaacattccagtttccacttttgaacaggcaaaatctcacctgcaagggaactttttttaagcatttttcggggaaggggaaatgtttttgtaaaaaaaatcaaccgccctatttccaaaagggcagtaggattttttgacagtaccagccgacagccaacacctagttttcctaagtttttaagtttttttgaggcagccgaaggtatacaaggggttgccaaaatatttggagttgcaccctttgcagttttagtctccagaacaaccacctgatcgaagcccaaatcaaacttaaaaaaggcttcattgcactcttccaccaggggcgctaggggcttaaaattttaaaccggggggccattgaaggcaa

SEQ ID NO: 69528 - DNA, 240 bp, Zea mays
  Clone ID: MRT4577_163401C.1
ccggccgggggattgcggcaccacccttgccgccgctcaagaggacggcctgcccggggtggtcaacattggctagctagctgcatctgcatgtccggctcggctctctgccttcctcacttctttaccgactgcagccatgatttgatcttgtttcacatggacagatgatacttgttattcgtttataggttttattgagcactatttgtggcaaaaaaaaaaaaaaaaaaagcggcc

SEQ ID NO: 69529 - DNA, 2061 bp, Zea mays
  Clone ID: MRT4577_163402C.1
ggtggacctagaggctgcgggcggcgcacaaccgcctggtcccggtctcgctgttccagaagcccatcgtgaaggtcaagctcgctgacctgatggccgccacccatgacttcagcactagccacatcgtggtcgccgggagctcgcgggcggggacagcttaccgagctgtgctacgggacgggtctgcactgacggtcaagcgcctgcactcgtgcccactttcggagaaggcgttcagggcagagatgggtcggatggggcagctgcggcatcctaacatcgtgccactgctgggcttctgtgttgtcgaggacgagaggctgctggtgtataagcatatggagagtggggctctttcatcggtgatgaagaagccaggggaagcgccgctggattgggcaacgcgacttaggatcgccgtgggggcagcaagggggcttgcgtggctgcaccatgggttccaggttccgcagattcaccagaatttgagctcgagtgcagtgcttctcgacgaggattatgatgctcggatcacggatgttgggctcacaaggttggtccggatggcgcctggcgagggtggtgataccagtcctttcctgaacggggactttggggagtttggctatgttgctccagagtatgctagcaatccagttggtacgatgaaaggcgatgcgtatgcatttggggtgatattgtttgagcttgttagcgggcaggaggctgctgctgtggttactgacgtgacgggtgaaggattcaaggggacattggtggactgggttaaccagctcaaggcttctggtcgaatcagtgatgctattgataaaccattgcgtggaaagggccatgaggcagagattcaggagttcttgaagatagcttttgcttgcacccagccccgtgtgacggagaggcattcaatgtatcgggttttccacgctctgaagagcatcggagagggctgcgatgtcacggagcagtttgatgagttcccattggcctataacaaggatgattcagacgctatttagctgatgatgctgattgccaattcgattgtggaaatgtttggtcaggcttattgatgatatatatatttagccttgctatggacagaccggaagcataaatgagtgataagagaacaatatcgaggcaccaaatctagcgccggatgccgggtggtcaattacatcgttgtatcgacaggggatgtgataaccataagtaatattgctcgaaaatgtagagctgactcttgaagcctttgactacatgcagctgccattcacgctgaaagcgcattctaacacggcatgatacaccagcaactggaatgttgtcaacatcagcggcaacgacgacaacgccacatcgagaaacaacaactgtgggccagggagcacaatcccgtggtgcggtgacttgcccacgtttgccatgctgccttgatgcatggcacatcaacaagaagagcaccagtttggaaggctaattccgaaggaattgagatgtgcagagggagatgaagaatgtggagaaagacatcagggtagctaccaagcgcaatgacatgttatctgcaaagagctgatgctgctcggagtcatctcgctgctgctcagccagacgacactcttcatatcggagatctgcgtgccgtcctcgctcttcaccagccgcttctacatctgctctgagagcgactaccaggacctgctgcgcaacacggacgccaaccagacggcgctcgacaagaacatgttcggtggccagcggctgcacgtctgtggcgaggtattgttaacccagatgtcctgctcccagcctattaaggtcaatggaactgggagtggagtagactgttcactcatcgcttgggttggaacctaatctgtcacttgtagggccatgaaccttttgtttcgtacgagggccttgagcagctgcaccggtttctcttcatccttggtatcactcatgtgttgtacaattttgtaacagtggttctgtccatgatcaaggttcgtgctcactgcctgattgcggctc

SEQ ID NO: 69530 - DNA, 194 bp, Zea mays
  Clone ID: MRT4577_163403C.1
cccacgcgttctcccacgcgtccgcggacgcgtgggagaaactccaaaggaggcccggaagccaaaggtggttgaggtaccagcaaaagaagaagcaccaaagcctaatccaaagaattcttttgacttgctgccaccaatcaagatggtgcttgatgactggaagaagctatactcaaacacaaagaccaact

SEQ ID NO: 69531 - DNA, 565 bp, Zea mays
  unsure (1)..(565): unsure at all n locations
  Clone ID: MRT4577_163404C.1
ccggccggggaacgaaggacctctggtctggaggaccggactgtccggtgtacaccggacagtgtccggtgcaccaccgaacagtgtccggtgcaccagaggactccaactcaaacttgccaccttcgggaatttccagagggactccgctataattcaccggactgtccggtgtacaccggacagtgtccggtgctccaaggaagagcggcctccggaactcgccagcctcgggaaacgcagcggttgctccgctataattcaccggacatgtccggtgtacaccggactgtccggtgaaccagcagagcaacggctacttcgcgccaacggtcacctgtaggcgcattcaatgcgcgccagaagcacgcggaagtcagacacgcccatactggcgcaccggacattgaacagtacatgtccggtgtgcaccggacatctaggcgggcccagaagacagtagctccaacggtcgaatcccaacggcattggnggacgtggctggtgcaccggactgtccggggcaccatacgacagacagcctccaccaacggtcaaagtttgg

SEQ ID NO: 69532 - DNA, 687 bp, Zea mays
  unsure (1)..(687): unsure at all n locations
  Clone ID: MRT4577_163405C.1
aattcggcacgaggatcgaatagagagagagaggtggggggtatccatagccgtgaacaaatcgaatagagagagagaggtggggggttgagcttgaagccgctgccgtcgttgttcacctccgccgctgatgtgcgtccggtggggatgaccgggagaattccccaaggagcgcggaacgcgggcgcgcctcgcttacaagagcaggagccagtcccattccgggtgcacctcatcggagcttggggggggagagagagaaagccataagtcaagacgaagcagggaaggcaactctctgagtattaatatgtcttcatctgttagttctgcaaggcgattgggtggtggcgaccaagaatcaagaaactcaagtgaacctaagttgcggctgcagactgcaaaggattgaagggttctcgtgcccagtttccctagagttgtcattaaatcctcttggtgcttcacatttccagagtccttggtatccctcgaggtttaacactcgcaggactctaaactcagacaaggaggtatgaaggtggcatgtacaaacgagccgtcgacattatcttgatagatgaggtttgaactggatgagcaccgaccaaagtgacanaattctcatcaatggcctttgacactatagctcnagcatcacatcatgaaccccgcaagcatgagccc

SEQ ID NO: 69533 - DNA, 386 bp, Zea mays
  Clone ID: MRT4577_163406C.1
gcgtcaaccaacgcgtccggtcagttgttgacctcacggtcagaatcgagaacggggcctcttacgaggaactcaagagagctattaaggctgcctctgagggcgcactcaagggtattacgggctacgtcgaggacgatctggttgccaccgacttcagcggtgacagcatgtctagcctctgcgatcccgggggcaggattgcgactgcaactaccagttcatcgcgctcgtcacgtggtaccaccactcagtggggccaccggagccccgtcatcgagctgatccgtcagtcgatctcgacttagtcaacacacagctgtctgcgtcacgaacgccggtcgtccacaaccggactgggtcccacaggaacaatgccacggatc

SEQ ID NO: 69534 - DNA, 510 bp, Zea mays
  Clone ID: MRT4577_163407C.1
cggctcgaggacaattttgtcatttgcacttagcagcttgaacaacgcattctccctatgtcgtcttcctacgtcaacgtaacgaagcttgcttcgtcgcacttccattgatctatgtctgtaatacccactttgtaagaaaatctaaaaggagagattatattcctttacatgtatgtgtgttatccctatttatcatttcatgtggacacctcacctatacaaataaataattaacaaaagacactcaaataaattatgcatcatgctgagtttttacttgattgtgtatttgtggatagtaaaataaatgtgttactaaccatatattaaaatattaagggacacatagaatttaaactctaatttggagaaacatagcactagctttaataaaataaatattgaaaataaataagttcacccgtgtcatgtttaagggggacatgtgatagggaaacaaatttactatgaagtttgaatttgaatagggatttaaatttggaatct

SEQ ID NO: 69535 - DNA, 249 bp, Zea mays
  Clone ID: MRT4577_163408C.1
gggccattgtgactgttccttactgctcaaggctgacaccatttaacactcgtgtcgtccctcttcagggttttcaggcgacttctggttgcgttaggttggttttgtggtgcactgtccccctccggtggttgtgtgggcggggtacctcttccttctcggtgagccttgggcgctgcccgaattgctgttcttgcggtcctgggtacgtgttggcaccttccttcgccctttgcgggacctgctggg

SEQ ID NO: 69536 - DNA, 560 bp, Zea mays
  Clone ID: MRT4577_163409C.1
cgagtatacaaggatcaggaaaccatgggtcaaagggtgagctctaaagaacgacggccaagccactgataaaagtgcaatatatctatggccaagacgaacaagatcaaacgaccctacacaccaaagctcaagctggaggcctattcaacgaggatgcatcctttgatgacaataatcctgagcccttgacttatgctgaggctcttactctgatcgagatgcccgcgactatcgcatgtaccccatacatacagacacacctcagatctccatgcatgcaggacactcgtatccaaaacatctgtgtgatgcgctataaagcagctatactatctctatcaacgtgaccctctattcatacgaaataacttcatactaggcgaccctgatggagccatcacatggatcacttctctagccgcagctaccatcgaaatcttaactgatcttagggacatgtgcgcttcctcttttcagagatgagaaacaaacccctttacagatgatgctctggatcattgtataacactagcaccaagactaccttgacttctatg

SEQ ID NO: 69537 - DNA, 680 bp, Zea mays
  unsure (1)..(680): unsure at all n locations
  Clone ID: MRT4577_16340C.1
aattcggcacgaggtccgaccaccgcattgcgttcgaaatattgaaaacaccacaattccccgtattccgaaactcgggggagggtccccaaattttcagccccgcgtcggcgcgttgcctccgcctccgccttccacccgcagccccgcatatctccaaatccccaaccccctgctcgcggccccgaactcccccactgagcttgcttaaaatcccgacgcggcgctcgcggaggaggcggaaccctaaggcctggatccctccccgtccccgcgcccgaattgcacgcccgattccaggttctagtgtttcccatgccctagccaccagcgcccgtggtgccggtgccatgcccgcgtcccgcatccctttcaagcgctgcaccgccgccgtcccgggcgtggggaagcccggccccgctgccagcatgccgcccgccaagcgccgccgcgaccgcgtcgtcccgtcgcggtccagggactcgatgccgccgcccgcgccgcacgtggaggaaggtgacaacaggcacgngggaggtgtacaacgtagagttgctcatggccgagcccaaagtcgactcatttggtcccgtggagaccgcgttgtggacgcaagcgcggacggcgcccacggatgccgacctgtaccgagcgtgtcgtacataaacaagagggcagct

SEQ ID NO: 69538 - DNA, 383 bp, Zea mays
  Clone ID: MRT4577_163410C.1
cggctcgaggcgacgtgcctctagcttgttccgtcgtcgtcgtcgaagaagagcgctctccccctctgcctcgacgaccaccagctcccttccggccgccgctgtcgatcggcaggtggtggacgacgatcgagaggatgagaggagataggagtaaggccacacggccgctggcgccgccaccacgggcgatcggcgagagggacatggtggaggaccctagactgctgaagcaggtgagggagcttcggaggctggtgccagcgtgccgtgagccatgcgggctcggcgagctgttccaggacacggcgacctacatcgaggacttgcaggcgcaggtccaggtcatgcggatgctgctcgacaagctctccgatgaatga

SEQ ID NO: 69539 - DNA, 396 bp, Zea mays
  Clone ID: MRT4577_163411C.1
cataaacaaatccatgggggggtgttgcggtatacatatatcatttatcattcaccaaattatattatgaacaatgatgaacaaaatgtggctagctgaacaggctctacacacacctcagtatccatgccaatgcttctcaaggcctcccattcactaacacttgtcctgcacaatgatgacaagggcagttcctcaccagtttctatggagatagatagcaacacgatagcagcagtttgggcgggtccggctacacactactccatcggatcggccacatgaaagcgcggatgatcctatagtaccagtttgggggagtgtttgcggtcggatcacgtttgctgctagaggtgtatcaaaatgacacaacgcacgttcatcccatcaaccacc

SEQ ID NO: 69540 - DNA, 793 bp, Zea mays
  Clone ID: MRT4577_163412C.1
tcatgggcagttttggagctgattatacatgatggtgcagcgttccacatgggatgaggtgtgaagttgagctgaaaataaaagtacgaggacagaaacacactttgatagttcatgaatgattttttgaaacttttttgaaccgggaaaacagcaagatttcaatgtcagttaccaatttgtgctggtgctcttcactctcgttcgatctgaacgtgctggacccggtggttgatgggatgaacgtgcgttgcgtcactctgctacacctctagcagcaaacgtgaaccgaccgcaaacactcccccaaactggtactataggatcatccgcgctttcatgtggccgatccgatggagtagtgtgtagccggacccgcccaaactgctgctatcgtgttgctatctatctccatagaaactggttattactcttgacatggggctccttgttgctgcaactaaatatcgaggagagtttgaagagagactaaataaacttatgaagcaacttaagccaaatgaagacataattatctttaggcaaataatgcttataaggtgaggaactgcccttgtcatcattctgcaggacaagtgttagtgaatgggaggcttgagaagcattggcatggatactgaggtgtgtgtagagcctgttcagctagccacattttgttcatcattgttcataatataatttggtgaatgataaatgatatatgtataccacaacaccatcacatgcatttgtttatgacataagatgagcaacattaattgctttgtttggc

SEQ ID NO: 69541 - DNA, 388 bp, Zea mays
  unsure (1)..(388): unsure at all n locations
  Clone ID: MRT4577_163413C.1
ttttctcttttttttttttttttttttttttttttgggtttcttggaaccagaggccaaattttttaaataaatatggctggggccaaatggaaagagtagctttcccggcccctacttctaaaagaaagggggaaaccagctccccccccctaaaagataaaaaagggccatccaatagccccctttttttcctaaagacaatccaatagacaggggggatggcccaaaggagttctttatccccaagaaggcgggaaaaagaccctcttagaaaaaagaaacggccccctgagattgttccggacacggcctcttgaaaatgtncgaaaagacagcccccctgttgcttgcaatgttgcagatccatataggccaaccctttaacg

SEQ ID NO: 69542 - DNA, 474 bp, Zea mays
  Clone ID: MRT4577_163414C.1
gggccccggaaaacagaaatccaggggttcatggggcagccacaaaaaacggctggggcgggggggcctaaaaaaacacaaaaaatccctttttcgcttggaaaggggggctaaacaaacaacggggggaaggaagagccggcaacacgggctttttgtcggcacaggccatcgggggttaatttcctcgtaatcggggatcttgggggcccgggaaaatttaagggaacccatttaagggattttgtcctccaccaccactggaagctcggaccaaagggtgatagggacttgctcaaacagggaaaaccccttggggaaggggttcatgtcccccagggcaaagggcagggaaaccggctcctgcatttttataaggggagccctttttggcttggcaaaagttgggttctgcccgcaaacaagtttgcacccccaatttttccaaaggggaaaacttttcaccccctcctt

SEQ ID NO: 69543 - DNA, 638 bp, Zea mays
  Clone ID: MRT4577_163415C.1
ggccggctcgaggcgtagtcccctgctccattctcggtcgccgtcaatgcccttcgcgtggtccgcaaccgctgagtgataagaagagatggtctggcaagggcagattggaccggatatcggtcatgctatgtcgagcacgacgtactcttgtgtcgatgtgaggctcgcaaccgctgctagatcatggcctatggaccagagctaaccggagcacgtcctcgtacgtctccttgcaccgactcggatcgactgatcgaagtagtgctgtctttaaccaggtagccatgaaccccatcaacaccgtgtttgatgcctagcgtatcatcggtaggaggatcatagatgcgtcttgatcatacgctgaatctggctcgtagtgtccttacgggacatttctgggtctggcgagaatgcactgatagttgtccattgcgaggctgaggataatgattgtgctcctgaggagatctcctctatggttcctatgatgatgcgtgacatctgctgaagcttaccgttgaagaacgatacataatggtgtggccacagtcgctgactacttcaatgactcgcagaggctggacacaaaggatgctggagtgactgctggccgtaatgtgctgcggatcatcaac

SEQ ID NO: 69544 - DNA, 341 bp, Zea mays
  Clone ID: MRT4577_163416C.1
gtgaaggaaaaatatactcaaaccctagctgccgatctcgacggagaacacttgtgtctggttagacatgaccgtctgtggcacccattctgcccggatctttatggacctttacaccaactatgtgcctaaaaccggccataactttcgtgcgctgtgcacggccgagaaaggcgtgggttagtccgggaagccattccattacaagggatccaccttgcaccgcgttataccggagatcatgtgccacggcaagaacttcacccgaaggaacaggaccggcgacgaatccatctactgatagaagttccccgacaagaagataatgcgcaagcacaccg

SEQ ID NO: 69545 - DNA, 296 bp, Zea mays
  Clone ID: MRT4577_163417C.1
ggtgggaacccatcccacaaaaaaaccctggtcccccccccgggataagccttggggggggggcccccctagccccctaaaaggggggccctatttggttgggccaaaccttttggggttttggaaggcccaggaaaggggcctaccggcgaataaatgcgcccccaccgttttccaagccctgggtgaccatgggccttggcattctgaaataccccccccttcccataccacgggcgggaacaggttcacccccgggggcaaggtcacccctcaacagccccctcaccccgggg

SEQ ID NO: 69546 - DNA, 450 bp, Zea mays
  Clone ID: MRT4577_163418C.1
tgacgtccgcatgcgtcgcatacgtaagctcggtacacgtctcgagctgccagatccaattcgcgagttcttgctactactgcgccaggtcgctgtgtgagaggaagacctccactggacaggagttccaagtcaaggatctcgtgcacgcggactatggtcatcctcgacattgagctggccgaggactaaatgccctgactgatcgcatgccgctactagatcggaccgtccaagcatttaacctactctaggatctactaggatgctgacatgaccattcataccgtcgtcctaatcgagactctcaccgatctcggcgccaatgtacgatggtgctcatgcaacatcttctccactcaagaccacgccggcgacgtcatcgtacacgacttgatcggcgggttcgcctggaatgtggagacccctgatgattactggatgtgcacc

SEQ ID NO: 69547 - DNA, 523 bp, Zea mays
  unsure (1)..(523): unsure at all n locations
  Clone ID: MRT4577_163419C.1
tttttnttttttnttggttatacatgcatgttattatttaatttgttcaccaccatccatgtgcatgcatatattagataagacttggagacgtacacagccatataatatatatatatatatatatatatatatgtatatatatgtcggtcggggtgagaatgagcgagtgggagcgactagcgttgacgcacgtggcattgtacctatgcatagggatttataatagtaaagtgagtctatatacaaacctacatatatctacagagccgctttcttagacagacgcgtgtactcacgcgggcacttcggtacggtacctgaaggcgtacccgcgctccctagagcgagctcttttactatttggagttttctttgacataggtgtatacagggtgatagtgttatccggtgacagtttcacacaccctcacagtcgcacgcacaacacgtcacacatgcataacctgaggagcgagcgaggtctaatgagtgggcgtgctctcactgactgtgtctcact

SEQ ID NO: 69548 - DNA, 869 bp, Zea mays
  Clone ID: MRT4577_16341C.1
gaagaaggggcctgtttttactgatcctaagttgaaatggtatgagccccaatccttcttactcggatcagaatactttcttcatgcatatgggccaatttatgctttatcagctgacgtggtggctagcttggttgcattgcgaaacaacagtttccgtatgttcagcaacgaggacgttacaattggatcgtggatgcttgctatgaacgtcaaccatgagaacacacatgcactttgtgaacctgactgcacggagtcttcaattgctgtttgggacatcccaaaatgctcaggtctatgccacccagaggtaaaaatgctagagctccatgaaagaaaagaatgcacaggtggtccaactgtggcagctgaggtgtccgagtctgaggattgatgatttcttggttggggaacaaactacggatctgatagttgacctgtgtcctcacccaatagatgtgtttggagtattcatttgattcatcaggcgcaatcattgcgggagcactgctcaaggaacctataattggctggcgtcgtaacctagcgctgtagcaaaggcattctcattcagcattcttgtcacagcagccttcattgcttctcttgcaattggaaccgtggtcgacgtctggaacgttcaatcctgtatcgtagcagaaaggagttctgttgtatagaaattagaaggaaagaatgcattggcaattaattgataagaccatgcctacacctgatgctgtggctgattgagattagggatattccttgaggttctctttttggagtaaattattttctgagccgtagtctcgctgagccgtctactttttttctgatccataattaagcgagcaagctgagcc

SEQ ID NO: 69549 - DNA, 424 bp, Zea mays
  Clone ID: MRT4577_163420C.1
ggcttttaatcaagcagcattacgaggccgtaccaccattctttattgactcgcaccaaagcggtagcctagttccagaggaaacccataagccgtgcaaaaacctaataactagcgaagcaatctagcaagtgcggtcacacacccgcaataccgtacatcaccgaacgaatcatactcctgggccaacaaagacatcgtggtgatccacccagtggggacggtagggaggtactcaggactccacttgtaatggcaacgctgctgacttgatcacctagaagaacttgtggaacaactgcgcgggataggttatcaccatgtcgatacagagcgggaacatagaggcgactaaaaccaagcgccaaagcgtaactgacagcagtctccacagagaataccacgagacattatggactacgtg

SEQ ID NO: 69550 - DNA, 510 bp, Zea mays
  unsure (1)..(510): unsure at all n locations
  Clone ID: MRT4577_163421C.1
aaatctttattgaatcagtcactnnnnnnnnnnnnnnnnnnnnnnnnnnnnnnnnnnnnnnnnnnnnnnnnnnnnnnnnttggacaaaccttaaagccccttggctaccccactgccaggaatccacacgttattgattaatgcctcnnnnnncctacgtcgccaattggcgtctctcttggcttggtgaggtttggtgtttggaagaagccagtctgcattggcatttgttggctttgcaaacatccattgacccgctggatggattacggagggaaaattatataagatacctcataaatataactagaacatgaggcgcccattcgggcgccctatcgagaggttgtaagccaacaaaatcatatataatatgacatagtaaagataatgttgttgtggcattaaatagaacaatatttgaagttaaaacttatggataggannnnnnntgttaaattttatcagaggtcacaaatgattgaaatggacatatggtggcgtgggccc

SEQ ID NO: 69551 - DNA, 223 bp, Zea mays
  unsure (1)..(223): unsure at all n locations
  Clone ID: MRT4577_163422C.1
cggggggaccgagcccaacacagagacgcccccgcagccgcacgggaacaggcggaagaagacccccaacgggaagacggacgacgaggcccacaaggaggcacaggcgcacacccagccagggccgcaaccgcggcggggaggacccccgaagcaccgccgcacgccggaccacgaagagccncaaacgccaaccgccagccaggagagccccaagggaccc

SEQ ID NO: 69552 - DNA, 877 bp, Zea mays
  Clone ID: MRT4577_163423C.1
gtttctctatcagttgatcgtactgatgacaacagggtacataactagcttcaatattgtgtactattgctcatatgcaagtttggtgttcgctgcaacaagttggtaaaattgttcctgcaagtaacatgaccaatagtccaagtgttgtactgatgacaactgaatctgtaactccttattgtgactgtagttcagatgttgagagacctctgtagctttgaatttgtgttttagattataagttttgagaacgcagttgtttcaggtagtatgatgtacatgggttttttggggccgcttttttttttttttttttaacttggtaccatgtcagttcaaaaaaaaaaattatgccaatacactgattcactgcccagaagtttaactgtttataacttgtcaaccaatttgttgatcctgtactgaattgcttattttgagctgttgcagccgttgcaacacaatgcatgttgcctagcacctatgtcctaagtcctaactgtgtccctatgttttcgttgttccattgtgaattcagctgctcagggtcaggagttggtgtatccagatgttgatgcgtagaggaatacgagagcatgacttctgacaatagcatcaaggcgcatcttcttcagaaatcgaatgtatcattgctccggatacagtgaggttttggtagtaggttcgattgttgatctttcagcagtttgagaaattgagaactgctttctgtttggtgaatactgatacatattggtgttctatgaactgaaagtcgcagctctacgaccttttcttgatttaccgtcaggaaatgagaggaaaataatgtgacagattggtaggaaaggaaactctggaatcggcagctttc

SEQ ID NO: 69553 - DNA, 311 bp, Zea mays
  Clone ID: MRT4577_163424C.1
gttaccgaaaagaagagagtaccgtatcacttaagggttgccagtagccgcgataacatggaaccgaccgactatcacgaggtgcaaaaaaaaaataaaccccacaaaaatgcccggcccccccaaaaaaaagttaaaggggaaaacccgaaccgcccgacgacaataactcgggggaggaactgggccagccagaaactggagaacgctaaaaactgacaacaaaccgttaaggccacctcctcaattttggggccagggccgccttttccaggggggggttccttgtccatgccggcagggccggccat

SEQ ID NO: 69554 - DNA, 978 bp, Zea mays
  Clone ID: MRT4577_163425C.1
gtgagagagcagcaggttgctagccgaccaggttgccagctagccatggagccggggtcgacgcccccgaacgggtcggcgccggcgacgcccggcacgccggcgccgctgttctccagcggcgggccgcgggtggactcgctgtcgtacgagcgcaagtcgatgccgcggtgcaagtgcctgccgctgccggcggtggaggggtggggcgtggcgacgcacacctgcgtcgtcgagatccccgcgccggacgtctcgctcacccgcaaggtgcccgcgtacgtggccgtccaggcgctggcatccgtctgcgccgccttcgcgctcaagggcgtcttccacccgttcctctccggcggcgtcaccgtgcccgacgccaccatctccaccgcccaggcgttcttcaccgagttcatcatctccttcaacctcctcttcgtcgtcaccgccgtcgccaccgacacccgcgcagtgggtgaactcgccgggatcgcggtgggagcggccgtaacgctgaacatcctcgtcgccgggccgacgacgggcgggtccatgaacccggtgaggaccctggggccggccgtggcggcggggaactaccggcagctctggatctacctgctggccccgacgctgggcgcgttggcgggggccagcgtgtacacggcggtgaagctcagggacgagaacggtgagacgccgcgcacgcagcgcagcttccgccgctgacgacgcacactggccgcgggcgcgagacattgtccggccgtgtcacgcacgcccgcgtcctcctcctcctccgccgccgcgtaacgcacggccacgacgtgtccgtggtcgtaagtgctgtgtctgtgtgtaccaataaataagccccgttttgcttcgtccagaaaaaaaaaaaaaaaaaaaaaaaaaaaaaaaaaaaaaaaaaaaaaaaaaaaaaaaaaaaagaaaaaaaaaaaaaaaaaagcggcc

SEQ ID NO: 69555 - DNA, 2157 bp, Zea mays
  Clone ID: MRT4577_163426C.1
ttccgacccccagcacccaccccacctgcccacttcgtccgtcttcctcctctctgtcacctcgccacccttcttcttgcgttctccatcgcattgcatctgtagcacgcagttctccctggtcttcttccgcacgcgtctctccccgttctgccagtcctagttgaaccagagaggctgttcttgtgcgtgtgagagagagagctggacaccgtcgccccacccattacgccgtagccaaacctggagaaaaacctgtgaagcatgtaactccagtccctgtccaaaatccaaacccaagccccccaaaaaaaatcacaaaaaaaaaaacaccttcaagatcgttctccaaaagctagcaccggtaatcagcgtcgaggcgtaagtcggtaggctggatacgcccccactaattccttagcacaaaatcaacaaaagcctccggatcatgtaagtttcgccaccatcatctttgctcgccgcccagctaaaaaaacaaaaaaaaaataagaaacccagcagcatgcatcgtcattagtagccatcagtcgtagcctatcgatcgtcctgggagccatcccagcattatcgtagcattacctcagcaaaaaccatcaaatcatgtaattagtgtgctcccgcgtcctatttctgctgcactgccggcagtcgaaaaaaaacccaaaaaaaaaagattgtccttgagagtgagtgagagagcaagcaggttgctagctgctggtagagagagctagcagttacagccgaccaggtagctagatagctagccatggagccggggtcgacgcccccgaacgggtcggcgccggcgacgcccggcacgccggcgccgctgttctccagcggcgggccccgggtggactcgctgtcgtacgagcgcaagtcgatgccgcggtgcaagtgcctgccgctgccggcggtggaggggtggggcgtggcgacgcacacctgcgtcgtcgagatccccgcgccggacgtctcgctcacccgcaagctgggcgcggagttcgtgggcacgttcatcctcatcttcttcgcggaacggcggcgccgatcgtgaaccagaagtacggcggcgcgatcagcccgttcggcaacgcggcgtgcgcggggctggcggtggcgaccgtcatcctgtcgacggggcacatctccggggcgcacctgaacccgtcgctcaccatcgccttcgcggcgctgcgccacttcccctggctgcaggtgcccgcgtacgtggccgtccaggcgctggcatccgtctgcgccgccttcgcgctcaagggcgtcttccacccgttcctctccggcggcgtcaccgtgcccgacgccaccgtctccaccgcccaggcgttcttcaccgagttcatcatctccttcaacctcctcttcgtcgtcaccgccgtcgccaccgacacccgcgcagtgggtgaactcgccgggatcgcggtgggagcggccgtaacgctgaacatcctcgtcgccgggccgacgacgggcgggtccatgaacccggtgaggacgctggggccggccgtggcggcggggaactaccggcagctctggatctacctgctggccccgacgctgggcgcgttggcgggggccagcgtgtacacggcggtgaagctcagggacgagaacggtgagacgccgcgcacgcagcgcagcttccgccgctgacgacgcacactggccgcgggcgcgagacattgtccggccgtgtcacgcacgcccgcgtcctcctcctcctccgccgccgcgtaacgcacggccacgacgtgtccgtggtcgtaagtgctgtgtctgtgtgtaccaataaataagccccgttttgcttcgtccagaacggtccagtgctacgtgtagtgtatctgtgttgtgatttgcgaattggattattgtgggtcgtctcgtcgaggtctctcgggtgtcgggtgggtctgatgcgatccatcagcgtcgtgtccgaataaaagccacgccgatgcgccggctgacgggcatctggatgtgtgatttctgaacaagatttgcttaatttcacttgcttaaaaaaaaaaaaaaaaaaacggccggcccaaaacccccccacacccaaaaaaaaaaaaaagcaaaaaaaaaaaaaaaaaagcggcc

SEQ ID NO: 69556 - DNA, 184 bp, Zea mays
  Clone ID: MRT4577_163427C.1
ccggccgggaagatgtccacacacacaagactccgcacccggaccagctagcgcattcaccaacacctcaagatggctcaccgcggagggtcgctgccgctgcccccctcctactggtgcacgccgcagagaccgccgccacagcggatgacatggccgccccgtcgtcctcgagccagcaact

SEQ ID NO: 69557 - DNA, 1261 bp, Zea mays
  Clone ID: MRT4577_163428C.1
cattggtacctcgagccggcgggagctcgtctatttgagcggccagaaaaaaggttgcgcgtcgtgactcctgatttcactctaaagtagacgggtcccgttcgatttcgcccaaaaccatccaccggcatcggccggagagacagcatataggcaggccgcggtgagaggaatcggcatcagaggtacggtacgatgttccgggaggagcagctggacctggtgctggtgccgctggccctggcggcggtggccggctaccacctgtggctcctctgggcgatcctgcgccatcccacccggaccatcatcggcctcaacgccatcgcacgcaagcgctgggtcgccgccatgatggccaacacggagaagaacggcgtgctcgcggtgcagacgctgcggaacaacatcatggcgtcgacggtgctggcgaccacggccatcacgctggtctccgtcatcagcgtcttcatcggcgtcacgtctccggcctcctcctcttcctcgccgtcctccaaggcgccgcggctggtgtacgggagcaaggccggggaggtgttcgcggccaagtacctggccgtgtcgctctgcttcatgctcgccttcgtctgcaacgtgcaggccatccgcctgtacgcgcacgccagcttcctcctgggcggcctgccgcccgggcccggcgacgaggcgcgcgaggagttcgcgtcgtacgtggcgcggacggtgaaccgcggcagctacgcctggtcgctcggcctgcgcgccttctacgtctccctcgcgctcttcctctggacgttcggccccataccgatgctggcctgcagcgtgctcatgtgcggcctgctctacttcctcgacaccaccagcagcgccgaccacggccacgcgcacggccagcaacgggccggcgccgcccgaaaggatagcacagtctgatctcaatctacttctttacaagaatgccagctttgagaaactcgtatctcaaaacatataatatataatatcagctttgagaaaatgctatctctgtttctgtctcttctcttcactacatcttctttatttctgtagcctctacaacagatgtagtccctacagggatcaagtatgtaagggagaaaataccttgtcgttagaccgtgtgctcggcagagcgtgtatatagttgtgtataacaccgttttatactgtagactgtattgtttataaagtaaagtttaaaatacaggacaaaaaaaaaaaaaaaaaagcggcc

SEQ ID NO: 69558 - DNA, 356 bp, Zea mays
  Clone ID: MRT4577_163429C.1
acggtagaccgtgcttccttcatgacacagctacagctgctgactacctaccagcagtttggggctaaacccgagcccgtcttgcaactacaacaattgttgccctcggaccaactggctttgacagacccaacggcctactagcaactacagataattggtggcgccctcttttagatggctcattagtgggaattcaacaatcaagcgtgctagatgacgtacgtagactagcgcatgtcagaagcgacttacaacaaccattaggtgaattgcaacaacaatgggtggcacatctagcggtacaaagcataggtacgcatccacgacagcgtctacctcttctgtcatgactg

SEQ ID NO: 69559 - DNA, 247 bp, Zea mays
  Clone ID: MRT4577_16342C.1
gcacgaggttaattagcaatatctaagtagcttgtaaaatcagacgttacatagcttactaattacgtggtaatttgtataaacaaaatttaagatgtgtcttatgaggagactaagctgaaggaactctgcttcattgaatttcagtccaatggccaaaatatcgtccgaggaaaaaatggtgaaatcagggtttatatgatctcgaggatggggacaaacgcatcccggcgcgcctcgatgaaga

SEQ ID NO: 69560 - DNA, 576 bp, Zea mays
  Clone ID: MRT4577_163430C.1
aacaccggacacagccattattattctcaatacctccggtagcaatgcagggggaattcacagctcttacaacatgaggctgtatgataaccacacaattctcttacaacagacacacataacacgatagcaggagcaactctcggacgatcacgggttatgggcagcacactgggctgctgctgcgggatcagcaaactgttgtagtactcgcgaccctggtagccatcctaccccttatagcagctcagcatcgacctcctggtactccttgtggagcgccgtcaggtcctcacgggcctgcgagaactcaccttcctctataccctgcaccgacgtaccagctccttaacgcacgcttggcggacatgatgccgaacttgtggtctatgctgcagaacacctccacaacactggtggagacggagatcatgcgcacagtacgctgcagcttggccagatcgccacctggctcaactctaggaggctgttagatgaacccaaacttgacaccatgcaggcaccaatccacgaactggatggcgcgtttggtcttgatggtggtcacagcagaat

SEQ ID NO: 69561 - DNA, 1241 bp, Zea mays
  Clone ID: MRT4577_163431C.1
gagagacagcatataggcaggcaggcaggcgcggtgagaggaatcggcatcagaggtacggtacgatgttccgggaggagcagctggacctggtgctggtgccgctggccctggcggcggtggccggctaccacctgtggctcctctgggcgatcctgcgccatcccacccggaccatcatcggcctcaacgccatcgcacgcaagcgctgggtcgccgccatgatggccgtcggtaccatgcaccttcccatctcatcgatcggcctagctagctcctcccactcactctctccctcatcaccgtatcccattccattactctcttgctgcgtgcatacataccatggatggcgcaccggccggccggccagcagaacacggagaagaacggcgtgctcgcggtgcagacgctgcggaacaacatcatggcgtcgacggtgctggcgaccacggccatcacgctggtctccgtcatcagcgtcttcatcggcgtcacgtctccggcctcctcctcttcctcgccgtcctccaaggcgccgcggctggtgtacgggagcaaggccggggaggtgttcgcggccaagtacctggccgtgtcgctctgcttcatgctcgccttcgtctgcaacgtgcaggccatccgcctgtacgcgcacgccagcttcctcctgggcggcctgccgcccgggcccggcgacgaggcgcgcgaggagttcgcgtcgtacgtggcgcggacggtgaaccgcggcagctacgcctggtcgctcggcctgcgcgccttctacgtctccctcgcgctcttcctctggacgttcggccccataccgatgctggcctgcagcgtgctcatgtgcggcctgctctacttcctcgacaccaccagcagcgccgaccacggccacgcgcacggccagcaacgggccggcgccgcccgaaaggatagcacagtctgatctcaatctacttctttacaagaatgccagctttgagaaactcgtatctcaaaacatataatatataatatcagctttgagaaaatgctatctctgtttctgtctcttctcttcactacatcttctttatttctgtagcctctacaacagatgtagtccctacagggatcaagtatgtaagggagaaaataccttgtcgttagaccgtgtgctcggcagagcgtgtatatagttgtgtataacaccgttttatactgtagactgtattgtttataaagtaaagttt

SEQ ID NO: 69562 - DNA, 672 bp, Zea mays
  Clone ID: MRT4577_163432C.1
tggtcctcctctcccccaaatccactccgctctccgccacgcgccgctcccccctcctcctcctgcctgcctcactcctctcgcggtctcgcccccgcctccgacgccgcctcgacctccgcagagccactcgctctcgatcccagcgaccagcgcccggaagagggcgaggacgaggacgggcccgtccatgctgacctcctcgcccggtccctaggctctcgacagcgccacaggggcgcgcgtgtcgcggagagatggggtacctgccgtcgctgggcggcaaggcggcgcacctcgtctccgacctcgccaccgtcttcctcaaccctgtctccggccacgagcgggagcggtcctcccacctccccgaggccactgaagggcaggaaaatcgttatggcgatgaagaatctgaaattcctaatggccctgacacatcttcgtttcgagcatttctgatggcatttatgtctgcgtcaagctctagcaatgattcgatggagatcatacctgagcaggatctggagatggaatacccaactttaacacccgttgcgaggggaatcaaggaaaaggaaggtgttgcttattaccaggcaagccttccattggaaacattattaacaaggcaggcagacttggtggtctccgagaaaaatccggccacat

SEQ ID NO: 69563 - DNA, 339 bp, Zea mays
  unsure (1)..(339): unsure at all n locations
  Clone ID: MRT4577_163433C.1
gangagaagactatgcttgctgtagattcatcaaattgaaccagagcgtgcagggggcgcgcggcatagatttacattttttgagctcaaaagtngcatatcacacatttttgttccanntcagaaccatcatattctgttgtgcagcaaaggttcgatcgcttgctggttgctgcggcgcgcacgcngcggttcgcancgctgcntcttttctgcgccgctgcctggctcggcgcttgntcgctcgtggccgcgcgctgctcacttctcgctgtgttcctctgtcctgcccttgntgccggtctggccggtggtgggcgcggtgggtgggcccgtggt

SEQ ID NO: 69564 - DNA, 290 bp, Zea mays
  Clone ID: MRT4577_163434C.1
cgttgacctccctctcgtcttgtcccaccgaatcatatcctcttcttgttacaattggatctttccgttagacttgtatcttctgcctcccttctatttatttcccccctcccttctaaacctgtcctccaggttctctccattcgctatggcgtctactcacaactccaaacagcgcctggcgctcgctatctgcgatttcctctccgcttcgacaaatgacggcactctcaccgccgacgacaaggactccatcgatgtggctatcaactgtatcgccgaatccctca

SEQ ID NO: 69565 - DNA, 344 bp, Zea mays
  Clone ID: MRT4577_163435C.1
cactctacacgttcgtatcatacaagaatcaggctagctacatctgacgtgaagagaggaacggcacattgcacacagtgatgccgaacaagactataccacggccaggacacttcgcagtatggaacggaatccaacgcgccataggcgtggagataaacaagcaccgttaatgagctgattatgaagaagctatctcatgtgcgtgtggatcatgagcaggcattacgctgcacagaagagactatgctgatgaagtgtgacattgaccagcatgaaggcagatgctaaggatcgcgattgaggccatcactaccaagaggcagtcattgagccccaagcct

SEQ ID NO: 69566 - DNA, 243 bp, Zea mays
  Clone ID: MRT4577_163436C.1
caaacaactcacatgtaggggagcaagagaaataaaaaaatacctgttaacaattgggcaaattaatgagcacacatatgggaaaattctcgatttaaagaaacaataaatggatggttaataatataggcgactaagctttaaaattttaagtttgctttttttggtaacaggaagggggcaatagacgtatgagttttttcaactaagttccaaagttggtaataacaattgacatgaaaa

SEQ ID NO: 69567 - DNA, 400 bp, Zea mays
  unsure (1)..(400): unsure at all n locations
  Clone ID: MRT4577_163437C.1
ctccccccgcgctcgaggcagagggggctctgcgctgctcanctcacctcacccggatccttgcctgcactgcaaagatctctcgcccttcttcagtggcatctgcctgccctctgactctcagattcctcttctcctgcatcctccttcaaacactctgctgtccaggagtctctgtggagcggggacacgatgcatcttctgtcaaggcgctgtccagctcagccgtcgccgggtacagagtcacggtgaccggcccccgccgtgcctattgcgtgttccgcaagccgtttgtgtgcagagccggggacaagccatgcagatcgtcgcagcctatgggcggcgccggctcattggtcaacgaggctatcgcaggggccgaacggtttggagcccgggg

SEQ ID NO: 69568 - DNA, 527 bp, Zea mays
  Clone ID: MRT4577_163438C.1
tttttttttttttttttttattttttttttttttttaaaaacacaaatacatgcatataaatattaaatccggcacgagacggacatgaccgcgagcacgttacagatgaacatgaaccccaggagcgaccatggatcgataatggcgggtgcagttgacaggatcttatttagacgccgctattatatttatacgactcgtcgtcgtcctctcgactctcgtgcgccatcgcctgaccggctcagttgcaggtgttgcagtcgcagccgccgccctcggtggccgcctcgaagccgccggcgctggccttggtggtcggcgcggcgaggaccgtggtcttgatgctgctggcggcggcggtctccacgttaggggacatgcagttgcatgagctgccgcaggagcagctggagccacagtcgcacttgccgctgctgcaagacatgatcacaggcgaaggggagcaggcgctagctgtgctaggaggaggaggaagaagaagaagaggtgtgctcgtgccgaattc

SEQ ID NO: 69569 - DNA, 203 bp, Zea mays
  Clone ID: MRT4577_163439C.1
caccttgcacgggcgaaaacgaggtgaatcttcgaaccacccaagtcttagagtgaagacttaaaacacatattctcacgatcacttacgactgacacagctgaatcacatgaacaggctgggcctagaaggcggggacggggtcttaaggttcctggtcggaggcctgaccttgcggaacacgagtgggaacttgatctcac

SEQ ID NO: 69570 - DNA, 455 bp, Zea mays
  Clone ID: MRT4577_16343C.1
ccgggcgctctgtctatctttcatgcgttgaacctcataggttcaggagcgattctatagtgcccggcggatccacagccggcggaacgacctcatacttcctcggcactgttcatccgcttctctcttccactaatgtaaaatgcatggcgcgcctgtccagcgtagataaggtagggcatagtatcgtactgggtgaccgctctagcaacggccaaccccccatacctcttgaggtgcctgcttgaccaggtccacctgctaatgcaggtgctccacctgctgatgaaccaccctgagtgcccagtctgatgtcaccaactcagacttgctcgctgagtgtgacgcggcctaacgaattcctaccacaggaccgactgtcataacaactacaacgtccttactgaccggcctcctagcaaagttcactctcgctgcggaacgccgtgatctta

SEQ ID NO: 69571 - DNA, 842 bp, Zea mays
  Clone ID: MRT4577_163440C.1
ggccttttaatcgtattacccttctttaaaaaggggtttttcttgcaaaggggttattttatgaaaggccattattttccctttcgtgaggtttttaacggtcgccaatttatttaaatttggacattaaattgaatctttttgaacttcccccccatttttttttttttttttaatctttttttttgtcttccttttttttttttttttttttttttttttttttttttttttttttttttttttttttttttttttttttttttcgcagaaaaaacacaaatacatgtatatataaatattaaatccggcacgagacggacatgaccgcgagcatgttacagatgaacatgaaccccaggagcgaccatggatcgatgatggcgggtgcagttgacaggatcttatttagacgccgctattatatttatacgactcgtcgtcgtccttccgtcgactcgtgcgcgccatcgccgggccggccggcgctcagttgcagctgcagcaggagcagccgcagctggtgccgcacttgcaggtgttgcagtcgcagccgccgccctcggtggccgcctcgaagccgccggcgctggccttggtggtcggcgcagcgaggaccatggtcttgatgctgctggcggcggcggtctccacgttaggggacatgcagttgcatgagctgccgcaggagcagctggagccgcagtcgcacttgccgctgctgcaagacatgatcacaggcgaaggggagcaggcgctagctgtgctaggaggaggaggaagaagaagaagaggtgtggtgcctgttgccagtgagagcccgccgcctcgaggtcccaatg

SEQ ID NO: 69572 - DNA, 1041 bp, Zea mays
  Clone ID: MRT4577_163441C.1
gcccgcatccatcctttccgtccgccggccggctcccgttcgccctccactccgccgcccccgcctatttatacccatccccgcccgctgccatcatcctcatcacaggcaacaaggcaccacacctcttcttcttcttcctcctcctcctagcacagctagcgcctgctccccttcgcctgtgatcatgtcttgcagcagcggcaagtgcgactgtggctccagctgctcctgcggcagctcatgcaactgcatgtcccctaacgtggagaccgccgccgccagcagcatcaagaccacggtcctcgccgcgccgaccaccaaggccagcgccggcggcttcgaggcggccaccgaggggcggcggctgcgactgcaacacctgcaactgcggcaccagctgcggctgctcctgctgcagctgcaactgagccggcccgcccggcccggcgatggcgcacgagagtcgagaggacgacgacgacgaggcgtataaatataatagcggcgtctaagggcatgtttggtttcaattagttctaggactaaattttagtcctaggactaaactttagtccctatatgtttggttttagggactaaatagattctaaagtcattaaatacattgtccaaagactcaaatacccttagaatatactcataatattagttatctataaaaaggtaagggcaacatgataattatgagcttttagtctcttttagcacctatgtgaaggactaaagactaaatcattttagtctatattttagtcctagtgtttggcaaaaaagggactaaaagggactaaaaactagagactaatctttagtccctctaaccaaacaccccctaaataagatcctgtcaactgcacccgccattatcgacccatggtcgctcctggggttcatgttcatctgtaacgtgctcgcggtcatgtccgtctcgtgccggatttaatatttatatgcatgtatttgtgttttttctgcgttattacatgtgccggtttcttgcgtgtcttcaaaaaaaaa

SEQ ID NO: 69573 - DNA, 896 bp, Zea mays
  Clone ID: MRT4577_163442C.1
agcatcaccgttcttcaggaactttggctccttctcaagctccttgccagaccgcctgtaggcaccacacctcttcctcctcttcctcctcctagcacagctagcgcctgctccccttcgtctgtgatcatgtcttgcagcagcggcaagtgcaactgcggctccagctgctcctgcggcagctcatgcaactgcatgtcccctgacgtggagaccgccgccgccagcagcatcaagaccatggtcctcgctgcgccgaccaccaaggccagcgccggcggcttcgaggcggccaccgagggcggcggctgcgactgcaacacctgcaactgcggcaccagctgcggctgctcctgctgcagctgcaactgagccggcccgcccggcccggcgatggcgcacgagagtcgagaggacgacgacgacgaggcgtataaatataattaatagcagcgtctaaataagatcctgtcaactgcacccgccattatcgatccatggtcgctcctggggttcatgttcatctgtgtaacgtgctcgcggtcatgtccgtctcgtgccggaattaatatttatatgcatgtatttgtgtcaaaaaaaaaaaaaaaaaaaaaaaaaaaaaaaaaaaaaaaaaaaaaaaaaaaaaaaaaaaaaaaaaaaaaaaataaaaaaaaaaaaattaaaaaaaaaaaaaaaaaaaaaaaaataaaaaaaggcccccaaggccccccaacccccactttttttcccctttagggggggtaaatgccccctttgggaaaaccggggaaaaagttgttcccggggggaaattttaatcccttcaaatttccctaaaaaatttgccccgaaaaaataagttgaaaaccctggggggcttaaggggggagctaccc

SEQ ID NO: 69574 - DNA, 546 bp, Zea mays
  Clone ID: MRT4577_163443C.1
ttgggtacctcgaggccggccgggataaacttcaagcgagcaaacaacaactagcaagggaagaaagaaactacagaaaagaaatggcttccacttctgcagtttcaatggctatgccagtaacttatgctagccagaagagggtggtgcctagctcggatgcattcttcaagccactgcctctacggtcttccaaggcagtgacagcatcaaaactcaatggaaggtttcaagtgagggcctccatgaaggagaaagttgtgacggggctcaccgcagctgcattgacagcttcaatgatggttcctgatgtggctgaggctgccgttacaccttctctcaagaacttcttgctcagcatcgcggcaggtggagttgttgttgttgccattattggtgctgtgatcggtgtttccaatttcgatcccgtcaagcgtagctgatggagttctgaggcactgtgttttatttatttttttgttacctcttatcatgatatgtatctttaatgtaatgttcttcaaaaaaaaaaaaaaaaaagcggcc

SEQ ID NO: 69575 - DNA, 1611 bp, Zea mays
  Clone ID: MRT4577_163444C.1
ttgggtccctaccggccggccgcgggcggtgcacttgctgcaggagcagccgtagtacacacgcacaccgcctcgactcgactcccacctcccctgttctcaccgtgcttgccctgtttcgacctctgcccatccgcgctcgcgtgcccgccgtacagtacaggccagacagccatggtggtgctcgccaaaccgcctgtcgtcgaccagatcccgctcctgcggtccccgggccccagggacagcttctcgggagtgccggtcgtcgacctgtccagccacggcgcggcgcgggcgatcgtcgacgcctgcgagcgcttcgggttcttcaaggtcgtcaaccacggcgtggccgcggccaccatggacagggccgagtccgaggccgtcaggttcttcgcgcaggcgcaggcggacaaggaccgcgcggggccggcgtacccgttcgggtacggcagcaagcggatcgggctcaatggcgacatggggtggctcgagtacctcctcctcgccgtcgacgccgcgtcgctctccgacgcctgccccgtgccctccagcgccgcgttccggagcgcgctgaacgagtacgtcgcggccgtgcggaaggtggcggcgcgtgtgctggaggcgatggcggagggcctgggcattgcggacgcggacgcgctgagctccatggtgagcggcgccgggagcgaccaggtgttccgcgtgaaccactacccgccctgccccgcgctgcagggcctgggctgcagcgccacgggcttcggcgagcacaccgacccgcagatcatctccgtgctccgctccaacggcacctccggcctgcagatcgcgctccgcgacggcgcgcagtgggtctccgtgccctccgaccgcgacgccttcttcgttaacgtcggcgactcgttgcaggtgctgaccaacgggaggttcaggagcgtgaagcaccgggtggtgaccaacagcctcaagtccagagtttccttcatctacttcgcggggccgccgctggggcagcggatcgcgccgctgccgcaggtgctggcggagggagaggagagcctgtacaaggagttcacgtggggcgagtacaagaaggccgcgtacaagacgaggctcggcgacaacaggctggcccagtttgagaagcgtagcaacatctagctaagctagcaaggcgcgcggcccgggcatgcacgccgcgtcttcacaggacaacaataacaaccaccatgacgagcgagttacttgcaagaaatgatgacaaggaagaagaagaagaagaaggtgaagacgatgatgtgaacagccagggagcgtagtgactactccagtagctagatttttttgtgtggtgggtgcagggtttccgcaaagttgctaatggcctgttctggtgcttgcggtggggttagttgcctatttcggtatgctggagctggacgggcgatgagccgccgcctgtaattagggttaaccatgatagcatgcagcgaagcgaaggggacgatcctctctggctccgtagcttcccacgtttgcttccttgtgctttccctttcctggtttatatatattttcgtatatttaagcatcaaaaaaaaa

SEQ ID NO: 69576 - DNA, 288 bp, Zea mays
  unsure (1)..(288): unsure at all n locations
  Clone ID: MRT4577_163445C.1
cccttcnccccttctgttgtgtttttccntnncgtctgtcgcttgcngnttggccgnncngcntncctgnntgnntggcttnccnncntcntctgntgctcggtttttgtggctcncttgccngccnngctctttgggggggggcggcggtngctgttcnnttttgttcccctntgtnnggcctcggttggtttctgggcttgggcnccgttcccggtgttcgtttcctctcgcgggtcgctgcccctcccggtctcccggnggcngccggttcnttcttcggttccc

SEQ ID NO: 69577 - DNA, 1006 bp, Zea mays
  unsure (1)..(1006): unsure at all n locations
  Clone ID: MRT4577_163446C.1
ggcgtctgcttgtatctcacaatggcaggcacaaagctaatatcacttgggctccttgttctcataggcataggactagccaatgctgtgagggtggccagatactctagtgctgatgggactggcacaggagagggacagggtggtggatatgttaatggtgggggatcaggatctgggtctggcaccggatctggtgatagtagtccttatggtgcccatgcaagtgctggagggggtggtgcgggtggtggagctagccaaaatggtgggtctggatatggttcaggatcagggtcagggtcggggtcaagtacatacagtcagggagggtattattcaggttatggagaatcttctaatgctggtggtactggtgggggtgggggtggtggacaagctggaggttattggaattccaacgctcaaggatccggtagtggcactggttctggttctagctatgctaacaggtattgggatggatcaagtgaaggaggtgcaaatgctaatggcaatggcggtggcatggggaatagtcaaaatggtgggggcggcggtggttcaggtgatgggtctggatatggcaatgcctacccatgaacttgatatcagttaatctaatgttgggcccaccatctttccttgtttgaagttgtaggattattattttccttgcctctttgttgtgcttttggtagaaccgaattaataaagggtccaactatcttgtaaggtccaacttataagatgatgttgtaacagtgtttgttaatgaaaactatatatcaagaaatttcttatgtttaaaaaaaaaaaaaaaaaaaaaaaaaaaaaaaaaaaaaaagaaaaaanaaaaaaanaaaaaanaaaaaaaaaaaaaaaaaaaaaaanannnnnnnnnnnaaannggggggggccccccccttagggaccccccccccccggaaataatttcggacccggtcctggggggggccccatttttccttataggggggccttt

SEQ ID NO: 69578 - DNA, 498 bp, Zea mays
  Clone ID: MRT4577_163447C.1
ttttgttttgtaaagtctgacagaatctgattgtatgcgcaacctgtatgctcaaatcatgtacactggctccaagtcagatatcgactttcagtatcataacttcatcaatacatcaccaaccgtcgagacttgactcaaaatcggtctgctgactagctctttcattgtcgactgtgcggttgtatcggtagcggtagcggccctgcttattcaagcgggttaacgtgtgaagacttcagatcaagtggttgtgcggaggcgtgctgaggtgtcgctgctccagaggcaacatctggtgtaccgatcccagacaaggggcttaccgctccgctaggggccacagggatctggatatcctccggactactgcgaacgaagctttcgggaagaccgggtatcttgatgcgctttgcaacattgttgtagctcgatggaatgatctcgatgatctcgtctcgggggaactcgagctttggaaaatcagccgcgttgcac

SEQ ID NO: 69579 - DNA, 150 bp, Zea mays
  Clone ID: MRT4577_163448C.1
agaacctagaagcccgtgttttctttcgaaactttaaagtcagtttttatgaagctgttaagatgtctttatttttcagtgcacacatgctttgagatgtacgttcgtttttacttggaacatttttcttttctgttcttttctaaggag

SEQ ID NO: 69580 - DNA, 468 bp, Zea mays
  Clone ID: MRT4577_16344C.1
ataattcttttttttttttttttttttttttgggtttttttttttttttttttcttttttttctttttttttttttttttttttttttttgggggggggttttaaaaaaaaaattcttccccctcaaatttaggggggcccccccccaaacaaaaatattcgcgcgaacgcctggggttttaccggggggggcccccaagggatcgcctgcaaggggaccctccgggcccggaaaaaaatttttctttgggaggggggccccaccccgggggggctaaaacatgccaccctctttgggggcccccccgggggtccccttggggttggcaccttaaacacgggccttggtggagggccctcttttccaggggttgaacttttccctggaacccccccgccttgggccccttttaggccaaaacacgctttcccccctccggggggagagggcccccttattttttttaa

SEQ ID NO: 69581 - DNA, 257 bp, Zea mays
  unsure (1)..(257): unsure at all n locations
  Clone ID: MRT4577_163450C.1
gggatcctctaaagnctacttacgcggctgataacaagcaccagnntggctcgtctgtaccttttaacatgggggcgacgcgttactaaccccgctccccggtgatctgatgtcggcggcggcacgcgcgccaccgccgccgcgcgcactctacacgccgtctataaaagtcccctttcgtacccatgattctaatccgcgcctcgaccctgttctaggtttctcacgtcacgttctttctagggtaatgttcataa

SEQ ID NO: 69582 - DNA, 330 bp, Zea mays
  Clone ID: MRT4577_163451C.1
aggacgcgtgggaagcaacttttttctcttattaacaacaacttcttacattaaattaattggccgcactgatccccgctgcttattagcagcagcgaatactactaccatttagccagctagctgcagcaagccgtgcttccttcttgtcacatctacagttgctgtctttataccagcagcttgaggttatccccgcaaccctcttacaactactgcaattgatgtcgttttgtcaacttgttttgacaaacctatgtgactccttccaacaacacaatcatggaggtgcccctctttttgactgcttaattagttgtaatttcaatc

SEQ ID NO: 69583 - DNA, 435 bp, Zea mays
  Clone ID: MRT4577_163453C.1
gcgagctttgtgtctgcggccgccctttctttttttttttttgtttttttttggctacaagattaattatgcacaaccggagagggtctttccagttcacaaacctctacatttcatctaacaatagacgatgatatcatgtgaaaaatgcgccaagaacaacgtagcaaaaaaaaaagagaaaacatgcaaaaccaaatcacaggtacccttcgctgaatcacatcacttgttgtatacactacggaccagagcagagacctgaccttggctttcggctctattggacttgccattttacacaatcatcgaagtcactgctagagcagtcaagcaacgcgttctgctggcggtcgtaccggcagatgtagttcaggccgacgaggagctcgcagaccggcggctccgtcttctcccgggcgaggaagtacaggg

SEQ ID NO: 69584 - DNA, 377 bp, Zea mays
  Clone ID: MRT4577_163454C.1
gggggacccattttggggggacaaaaaaccaaggccccaaaatttaaacccccccccccaacccggatttggggggggggggggtcccacacaaaaatcgggagttgggaaaaaaaaaacccggttacaaaaacctaaaaaaaaaccttccccccccattaactttggcccttccaaggaaaaaacccagccccccctgggtcggcatcaagcccccaataaaaaaaaaaacaaaagggcccgcaaaaaaagggtttttaaccgggcttggttccccttaaaccccctttttttacttgggaacaaaaaaataattctttatttccgggcccgaaggggccctttttttaccgggggtgaatttttaggaaaggaaa

SEQ ID NO: 69585 - DNA, 223 bp, Zea mays
  Clone ID: MRT4577_163455C.1
caaaaaaaggaggcaacccaggtccttttaaaaaaaaggggcccctaacctccctgggttttaggggatcctttttttccagctaaactttaattttattcacatctaatgggggctttccccaaacttttccagcagtgcgttagacaaaaattgcccgggaccgtgaagacataatgataccatcctagtttacatttacacttttttggcttttttgcca

SEQ ID NO: 69586 - DNA, 205 bp, Zea mays
  Clone ID: MRT4577_163456C.1
acagaagaaataggaccggattatctgaaacaataatgagcgccattaaggcatcaactatatgttgcaaatacagcacccaatagctgtggacacttccagctggggagacaaatgctcccaatagatgttgacattaccagatctgcggacaactgaccaatctggctatgcaatcaactgccatacattaatctaacatcag

SEQ ID NO: 69587 - DNA, 265 bp, Zea mays
  Clone ID: MRT4577_163457C.1
ggcgattgggaccctcgaggccggccgggacagacgccgtcgccgcgtcccaggcctccatcaccgtttccgtcctcgttgtcatgggtaaggagcacgaatctgctggcgcgcgcctggaatggtccgcggttagacccccaaggggcggaagaacgactacgaagaagaagccctgcggccctcgatcttcaggttttgtgccctgttagcagaggactaatatgcgatgcttgtggcgtcgtgagccatagatggtgtcctg

SEQ ID NO: 69588 - DNA, 436 bp, Zea mays
  Clone ID: MRT4577_163458C.1
ccaaccaagggggggcaaaaggctcccttgccccaaaggcccaaaaacttcaccccccccccctagggggggggggacccaataccaacccccaaccccagggttaaaaggggggaccccccgaaattcggcaaaaaaaaggggggaccccccccgggcggcccttaaaaagggcaaatcccaccccccggggggccgttacaaggggacccaagccgggacccaagctgggggaaaaaagggcaaaagcggttcccgggggaaaatggtaacccgctaaaaatcccaaccaaaaaacaacccgaaaacaaaaagggaaaacccgggggggccaaaggagggaccaaccccacattaatgggggggcccccacgcccccctttccagagggaaaaccgggcgcgccagttgcataaaaaaaccgcccaccccccgg

SEQ ID NO: 69589 - DNA, 440 bp, Zea mays
  Clone ID: MRT4577_163459C.1
ctgattcctgggctcctgaggacggtgccttcgtcccctgcatctacggctgcgtcgtcggcgagcctgacaccgcgaatcggatccttcgacagagggagagggaagagatggggctcacgtacaccaagctggtcaggcggctgttcgccaagacggagatgcggatcctgatggtgggactactcgccgccgaagagactaacatgctctacatgctgaagctcgaggagactgcaccaccattcctaccatccgatacaatgtggaatactgaggacacaagagcatcatctccactgtctgggatgactgcggccacgacaagatcaggccactgggtaggcattacatgcagaacacgcacggtctgatttatgttgtgtacagcaatgataaggaccgtgttgttgaagcaagggatgagctcctccgaatgc

SEQ ID NO: 69590 - DNA, 400 bp, Zea mays
  Clone ID: MRT4577_16345C.1
gatgaacacacctcgtgcattgatgttgctttctccacgatcatgatgctagccatcaacaacggtgacgcgtgacggtcctaatgcatgaaaaagcgatccttgtacatttcagagcgccaagaatgaactttaactgctacaagatgtgtatacatgcatgcatgcttgatcgatccagcccttgatcgtttgatcattagtagtactccgtcggacactacttgacgatgatgaagtcagtagcgaggtacttgggcccgtcaacggtagataacctacgaaaccatggaacgcggctcgtcacgttatcccccagccgagtgcagcacaactcgcgaagcatcaactttttagagctgccgctgtaacctatggatgtgcaggccgacgacctgat

SEQ ID NO: 69591 - DNA, 556 bp, Zea mays
  Clone ID: MRT4577_163460C.1
ccggccgggccgggatcttcctcctcctccctactctgacctctcgtcgtcgacgaaggaaggaaggattccgcccccgcccccgccccggccgccttcgccctcgccgctgcattttccggtggcctctccacgtgcggccgcgagacgcctcgccgcgtctgcctagttgtctccccgtggggggtgttcctgggacttgtgaggaagccttacacctgttctgttcaagacggcaggtgttggtgtttcggttgcaatagagtgattggggaaactgatcagccagaattgttggtcaaccgatgggaagcaatgaccctaacacaccctcgaaggcttcaaaggcgtcagaacaagatcaacctccagctaccaccacatccagtggaacagcttcagtgtaccctgaatgggccaggtttcaggcctactcagcaattccaccgcatgcgttcttccctcctaccgttgctgcaaatcccaagcccctccatacattgtggggggctcatcccatagtggcaccttaagggacaccgccgccaccacctta

SEQ ID NO: 69592 - DNA, 594 bp, Zea mays
  unsure (1)..(594): unsure at all n locations
  Clone ID: MRT4577_163461C.1
ttattcggcacgaggatacggtccaccgagaaccgtgtccacgccactccacgccatcttcctcctcctccctactctgacctctcgtcgtcgacgaaggaaggaaggattccgcccccgccccagccgccttcgccctcgccgctgcattttccggtggcctctccacgtgcggccgcgatacgcctcgccgcgcctgcctagttgtatccccgtggggggtgtgcctgggacttgtgaggcgagtgttggtgtttcggttgcaatagagtgattggggaaactgatcagccagaattgttggtcaaccgatgggaagcaatgaccctaacacaccctcgaaggcttcaaaggcgtcagaacaagatcaacctccagctaccaccacatccagtggaacagcttcagtgtaccctgaatggcccagttntcaggcctactcagcaattccaccgcatgcgttcttcccccctaccgttgctgcanatccacaggcccatccatacatgtggggggctcagcccatagtgccaccttacgggacaccgncgccaccaccttatgtgatgtatccacctggacagtatatgccca

SEQ ID NO: 69593 - DNA, 480 bp, Zea mays
  Clone ID: MRT4577_163462C.1
aattcggcacgaggcccacggccaaacgctcctcggccacctctgtggcgtgatccgtcgtcgctgcgcaaagccatcgccgccagggtcgctctgccacgtcgccgaccggggctgatccggggccagtgcggggttccgggcgttcgcgtgggtgtaacacgagagttcatgtgacagttgggtccagtactggcaccgggcgtcgacgatttctcaccggagcactcaactccgtcgtaaatccgcctggtccgcggacagctttgcgcccaccgttttctctggtaaaattcctcaccctaactctgccttgatctcctctacgtgttgcacacgctgggttgttgtttggagcactacggcgtgaggggtggcttgccggcaatggcgccgccgcccctggttactggcgccaccgtggcacggctggtgttggggggaaacaccctgtgcgtgcggtgcctgttgggcggggtg

SEQ ID NO: 69594 - DNA, 385 bp, Zea mays
  Clone ID: MRT4577_163463C.1
cccaaaagggcaacattttttttccacaaacaaataaacatgacgctggtgtttgaatacatggaccttgttctttttaaactacaagcttgcccttttttttttacaatgctaacaataaagggtcccccaaaataaatagggtgcccttccagcactgatgactaaaatagggggggaaaaaaaattatttgcggggggaaaaatttttatacctgggctaaatttacaacttccgtaccttataaaacatttggcggccttttttgttttacacaaaatttacaagagttcaccgtgcctcattttttaggttggggaacccagggggaagggccccttacacttttttaatcttgcccaccaaaatttttttgccttttgg

SEQ ID NO: 69595 - DNA, 495 bp, Zea mays
  Clone ID: MRT4577_163464C.1
ccgtccttctggcgctgcagtaccgcggccgggagatcttcggcatcagcgagaaggccaacggcaccatgatcttcaacgccttcgtgctctgccaggtgttcaacgagttcaacgcgcgggagatcgagcgcaggaacgtcttcgccggcgtgctccggaacaagatgttcctgggcatcatcgccgtgacgatcgccatgcaggtgctgatggtggagctgctcacgaggtttgctggcacccagaggcttggcttggcccattggggtgtctgtgtcgccattgccgcggtgtcgtggcctattggatgggccgtcaagttcatccccgtgcctgaccggccgctacgtgagatcttagcaacgaggatgaaaacaatatctaggataattacacaataatgttattctttttttagaaaaaagtataattcatttattggtattttattgtaaatacagtttactaagataatggatttgttatatgctc

SEQ ID NO: 69596 - DNA, 283 bp, Zea mays
  Clone ID: MRT4577_163465C.1
gacgcgcgggtcgacgcacgcctctacactgagctccactagctgaggccggtacagcggcacagccgtgcgacgtagaactaccacgacccaggcgcggcacatggcatcccagctcgccgccgccgtgccccggttcgacggcctccggggctactccgcggacaggtcccccgtgggaccccagcggtacttgctggtcggcaggatgaggtcgtcgtcgcagggcgtcctctgcaacgacaccggctccgcgaccgccctgatgacccgcatcaagtgt

SEQ ID NO: 69597 - DNA, 298 bp, Zea mays
  unsure (1)..(298): unsure at all n locations
  Clone ID: MRT4577_163466C.1
tttttnnttttttnntttttttgagagnncctnntttcatctnnttccctcgcgggtaccttggttcgcttatcggtctcttccgcctgttatttaagccccttggcacgggagtttaatccgcccgnnatttgggctgcatttcccaagaccaacccggacttctgttgacgggggcgctcggtggtgcgacaggggtccgggaccggacggggactctcacccgtcccaggacgtccctcttccatgagaactttgggccctggtccgccagttgaggacgcacttagcagactac

SEQ ID NO: 69598 - DNA, 446 bp, Zea mays
  Clone ID: MRT4577_163467C.1
aaaagctaatctcagggcccattttagcgggcgggtctgtcccagatgggggccggggggggagcaaaagggcaaaacatggcccgacccagcatgaacccggggacccaaaggccccccccctccacatttttttttgggttacacaagcgggaaccctccctgagaagccggggggaaaaaacccccctactggggcttgaacatggggggggtcagggcgaccacccggttgctgtacccccactcgttggcgtaccccaagaccagcttgaccaaaggggcgttcaaagcgatccccgccttggggtcaaaaatgctcgacccggtggcaccaaggaaggcgggagaaaccaaatccccctccggataacccatgatacccttgggggggccctcggaagcagccctaatagccttcttggaatccccatagggggccccct

SEQ ID NO: 69599 - DNA, 469 bp, Zea mays
  Clone ID: MRT4577_163468C.1
cccgtgtaacccacggctcccacacgggctacgccaccaaagttagggttgaactatctgcactaccctcgagaacccggggaggggggaggtggagctagtcggacagcctaccctggcacactcggactccgcgtaggtgcgtccgtacttacgtacctcgacagaagaacgctacgacaacaaagattatcaagaccaaggagtagggctcctgtgtcaagggtcctcactgcaagactgagtaaaaggatgtcccagtgcgaaagggtccagctacgcctgaagtttcggattaccagttttttggagacctgcggagtgaggaaaaggtttgcgacatactcatgaacatggtagaaacagcaaacctgacggtccccgcaactacactcggtaggatacacaccgagtgtggaaagaagaaagctgcctttaggagggtgcaggatcggacccacagtcacgg

SEQ ID NO: 69600 - DNA, 700 bp, Zea mays
  Clone ID: MRT4577_163469C.1
tccggaaacaacttttttcattgattcttgcagataccagccttcttttgcaccacaaggtcaaaagatgtcttgcgactgcacatctatctgcgcctgcatgtcaggctggaagagctggatgaagaccctgacctgaaggagactggcaccgctcgcgctggacaccgtctccctcggcgtgaccccgtacaaaatggatgaccccgacctctacgagccctacttcgatctcgacaaggacgaccacgtctgcagcttgcctagcaactgcgaagcgagacccctgtcaactgctgatcacatcgatctgcaactatgcatatgattattatctatctagcttgagctgcaggctgaacaataataattcgagagccatatttgactgacatacataggtattgtgtgaagcgtgtgacagagagacaaacacagttcttcactttcgctatctcactctgcatgtttgtaggcagtctttgtagatcattgtacgcacgtgtgtatactctgtatggtggatgataccattgcatctgctgtgaccagatattaactggtcctctatgatatgctttcatactatatatatactagaacctgacttgttgttttacatggcctgtaattgtggctctaaggacattgtcgtctacaattatagcctgccccatcctccatcaattctgtctctatg

SEQ ID NO: 69601 - DNA, 334 bp, Zea mays
  unsure (1)..(334): unsure at all n locations
  Clone ID: MRT4577_16346C.1
acgcccgagnacccgagagcccgttggcacgccaccccgcccccagctcccaccctncgtcgccgcggcaggcggtggcggcggaggtctggaaatggcgtcggacgacgagcggtccattgcggcggattcatggtcagtgcggagcgagtacgggagcacgctcgacgatgaccagcgctacgccgacgctgctgaggtgctcgccgcttccgcgtcctccgccaacttcccctccgccgcctccgattactggtttacagacttaactggaacagattacagtaaaggagctgtggaacttgcgagaaacctanctgcaggngatggcttt

SEQ ID NO: 69602 - DNA, 374 bp, Zea mays
  unsure (1)..(374): unsure at all n locations
  Clone ID: MRT4577_163470C.1
tcttagtaacctagtgggaatcccccccgggcttggcaggacactcggcaccgaggcttcttcacccacacagcgtgggaccacttcccaacgctcttcccccttcaacacacttgtgacgcccgaaaatttctcctgacgacgcggccacctggggcccaaccttggccccgcacaaatttgttttgtgaacccgnaccgccgacacacggcgtgtccgtcggggccgcccgcacacacggcgcgcccccacccaggctgtcgggccgcgacacacgcgcccgcacgtatagcggcggnccggnnccaacantccaacacacgccggccagcgacaccgcacanggcaacaaaccaccacgaacccgaacgac

SEQ ID NO: 69603 - DNA, 224 bp, Zea mays
  Clone ID: MRT4577_163471C.1
aaagttagttcatgggtttacaaatgtatagccaataaagtttggaagaaaaaaaaacgaagttagggctgatttggtgtatagcaaatagcaaggggattactccccatggatcaccctgtccaccaaatcagtcccgtagtaaaaacacatgtatacatttgccaaaaatacaaatgtatacattaccgtagtaattatatcagatctggacggacgcgtgg

SEQ ID NO: 69604 - DNA, 168 bp, Zea mays
  Clone ID: MRT4577_163472C.1
ggtgttggggcactaaacactaaacaaattcaagaaatgagagaattcaggatacctcccggaacgactcatgcaatccatgatgatgtaccggaaaatacaaggactttatcatttgaccaaccatcaggaccagcacatacaaggggtgcactaattacacaactg

SEQ ID NO: 69605 - DNA, 229 bp, Zea mays
  Clone ID: MRT4577_163473C.1
gcacgagaattgggcagcctatggtcgaaattgtggagcagtgaagcactgggcgtaaaaatgggttgtcctgtgctcctagtggagtagtggttttgaaattgcctttttgtgtctcagggtgtaacacgaacacgaccatggtgttcgggcaggattctcataggtttgcctgtgttattaggtatctttaaattgccgtcagtggcggaggacaaaagaaaattaa

SEQ ID NO: 69606 - DNA, 264 bp, Zea mays
  Clone ID: MRT4577_163474C.1
tcagctttgacgaactcgaagcttgcgttcttgtagtagaggtcggcagcaagcggtggtagagcgagaggtcgagaagatgaagagcagcactctgttggcgatcctagttctccagccccttatgcgctctggcgtcgggtccaaaggacctgcagggcccacgacgaatatgcattgctggtgcgcccagttcaccagctgcccgcgataagtggacctgctgcgacctcttctcctggcgcggcgccacctcgcaaaact

SEQ ID NO: 69607 - DNA, 444 bp, Zea mays
  Clone ID: MRT4577_163475C.1
cccgctccgatccgccagagcaaaccctagtcaatggacgccgccgccgttcacaagcgcaagcgacctgaagaggccgacccaagcgcgggggagctcgacctctccgacgccgacgccgtcgagactccgagatcgcgctccacgccgagaccgaccgccttcgcctacttgccggcgcgcctgagctcttacccgacctcgtacccatcggcctcgcctcttccctcgcctcccttctcacccacgacaatgtcgatctcgcagctgccgccgcatcactcctcgtcgaccttaccgacttcgaggacccctccgacctcgccgctgtccaggcccttgccgacgcgctcgtcgacgccaacccgctcgaccttctcgttcacaatctcttccgctttttcgagaccgaccccgatgaggccgaggccgtgcacaacaccc

SEQ ID NO: 69608 - DNA, 604 bp, Zea mays
  Clone ID: MRT4577_163476C.1
atcgacatgtcggactcggaggagcaccacttacaaatcgaaggccgacactggggcgatcaagacctacccgcagtagggtggcaccgtccgtaagaacggattcatcggcatcaagaaccgaccctgcaaggactgcggaggtttttacctccaagactggaaaggatggccacgccaaatgccactttgacgacatagcacatattcaatgggaaaaagctcgaagatattgtgacttcatcacacaactgcgacatttcggatgagaaccgcactgagtatcagctgattgatatattcagaggatggatttgagagccttattacttcaaatggcaacactaaggatgatcttagactaccaactgatgagactccagtagcccaaattaaggaagggctagaaagcggcaaggatcttgttgagactgcccagacagagatggggaaggagcacaactgctcgaagaaggatgtaatgcctaaataacttccttgggttcggagacggaaccatactggatctcaacttagagcggataagagcgtaccaccaaaggattgctaccgagacattcacctggctcgagctggcttttgc

SEQ ID NO: 69609 - DNA, 1936 bp, Zea mays
  Clone ID: MRT4577_163477C.1
gcggccgggccgccggccggaacagaccgcactttctctggcagaccgtgttctcccgctccgatccgccagagcaaaccctagccaatggacgccgccgccgttcacaagcgcaagcgacctgaagaggccgacccaagcgcgggggagctcgacctctccgccgccgacgccgtcgaggtactcgacctccgggccgccaaacgcctccttctggccttcgagcgccgcctccgtgacaacctcgaggcgcgcatgaaataccccgacgaccctgcccgctttgcagactccgagatcgcgctccacgccgagaccgaccgcctccgcctccttgccggcgcgcctgagctcttccccgacctcgtccccatcggcctcgcctcttccctcgcctcccttctcacccacgacaatgtcgatctcgcagctgccgccgcatcactcctcgccgacctcaccgactccgaggacccctccgacctcgccgctgtccaggccctcgccgacgcgctcgtcgacgccaacgcgctcgacctcctcgtccacaatctctcccgcttttccgagaccgaccccgatgaggccgaggccgtgcacaacaccctcgccgtcctcgagaacctcctcgacctccgccccaacctcgccgacaaagtctgcggcggaaccaagcttctacgatggctcctctcgcgcgtcaaggcacgcgagttcgacgccaacaagcagtacgcctccgaaatcctcgcgatactcctgcagaacagccccgccaatcagaagcgcctcggccagatcaacggagtcgacgccctgcttcaggcggttgccatgtacaaatcaagggacccaaagacgtctgacgaggaggagatgctcgagaacctcttcgactgtctctgctgcgtgctcatgcccctggagaacaaggagaggtttgtcaaggctgaaggtgttgagctcatgatcatcattatgaaacagaagaagctggcatacagctctgcgacccgcaccctcgattttgccatgaccaagttcccgcctgcgtgcgaacgatttgttgatgtgcttggccttaagactgcttttgcggccttcatgggcaagattcccgtgaacaagaaaaacaagaaagagagttaccaggaggagctagaagagcgtatcatttcacttattgcttcattgtttggtggtattaccaaaggctcacgaaggatgaggctactaggaaaatttgttgagaatgaatgtgaaaagatagaccgccttatggagttatacacaaggtattcagacagagtgaaagaagagactgaaagacttgatagtcttgatttggaagatttagagatggacgatgatgagcggtataaccgaaaactcgaagctgggctttacacactgcagtctgtctacgtatcagttaattgcgcttattctgggacacatctggcactctgggaattcccagatgagagcaagagtagaattacttcttaagcagaacaaacttacaaagcaagatgtgaagagcatacttgaggagtaccatgacaacattggagatttggatggacctgaagagaaggaaagagcacaagtgcggaccaaggaaattattgacgcgttgtgatgtgcatgggcctagggtagttggttgtggagcaagacagaggctggtagatattttgagtatgttgagtgaatttatatccgcagtcagcaaagctgtgtaacttactaggttgtagatgatggatgtcagaaacaagggtgcattaattagttctgttgtattctatttttgtgtaaacttgctagttactatttgtcgttatatgctttgggaaggaatttgtaacacctcaaaaacttaacttgggaatttagtaaaattctccaaaggtttggagttagaatacctttt

SEQ ID NO: 69610 - DNA, 193 bp, Zea mays
  Clone ID: MRT4577_163478C.1
agcgcgaaccgtaacagggacagcgagagacgctgacaggcaggataagcgtcgcgaaacgcggccggcctcgtgccctacccctcgtcccgtcccttccatcacgggcacgagctcgagccctcgtaccctcgttcccttcctcgcgctcggtcctccgatcgaactgccggacccgagcggaggagagaag

SEQ ID NO: 69611 - DNA, 979 bp, Zea mays
  Clone ID: MRT4577_163479C.1
tttttttcttttttaaacttcaaaactccaacaatgattatctcaaatgtgggcaagatctgagagttctctgccatatgatagatatgctaaatcgtactcttctgaatatacttttctgacccgtagtcctccaccagggtgccacactgccaccaatgctaatgtcttaatgatgcaacgcgctagaattatagaactaaacaactgagggggatcgatcacagtttcgtctgggcgatcgacccgatcgtggtcgaggcgcacgggcggcggcggtcggggtacgtcgtgctgggatcaggttgggggcatgacgtggtaccggttgttgacgcggcgcgcatagaggtaggcggcgagcgcgacgtcgatggtggtcacggtggtgaccgtcgcggcgaggacccaaacgcgcaccttgccccagaaggcggcgccacgtaggcggcgggcggtggccgaggggatgagctcggccttagcagcctcggcgagcgccgtaaggaggcgcttggagcgcgggctgaggctgtcggctgcatgcagctcagacatggcgaggttgatttgctccaggactgggaggtctgcgtcgctgttggtggtggagtcggtgggcgcggcgacctgtagctcggtgacagtggagtcggcggaagatatcaccgcgtcatccggagcagcgaagatgacggaggaggaggaatcgccggagacgtcagggtctggcaggtccagcagaggcgcgaggtcgtcctccaggacgtcatccagaggcgtcgtggaggctgcgggagcagggagggtggtgtcgccgtcgtagtccagacacttacgcaccaccttggtgctggaggcgaggtccctggggacggcgctggcgaccgcgagcttcgctgcagaggagcgggcgccggcggtgaggaggcgcgaagggaggaagggcccggcgtctggaaaccagcatatgggtttt

SEQ ID NO: 69612 - DNA, 651 bp, Zea mays
  unsure (1)..(651): unsure at all n locations
  Clone ID: MRT4577_16347C.1
cccagncgtccgatagtatcaatggtgagcctggtggcattgtggtcataacgtcatgtaatcacacaaaggatgaggcatgaagtagaagatttcaccaagagaaaatttggcaaggagaacgtggatcaaggtgcacgagatgcgtctgagatcttccggtacatagaccatgtccgaacatatcctaccataatgtttggaggaattgagggctctcaagtctgcactgtggcctttcagcgggtgtgactgaaagctgaggcacacatagttcttggcctaacgtgtcacgttgggtccagaagaaatggataaaaaaattttgtgcttcgcctgtgggactgttcctaccgtattaaggaacagtccaaactgtgtcttcttctgttgttagcgtattaaggaacagtccaaactgtgccttcttctgttgttagctcatctatccaggatggtcgtgtaattttagatggaccagactatgagacgaatcagtcctgtattgttgtcaccgtgaacatttccttgtatttccgttcctcttatacatactctagccttaatttattactctttcttgtaaggaggtttcgaaaaagaaaaaagaaaagaaaanaaaaaaaaaaaaaaggggcggccgtccaccgc

SEQ ID NO: 69613 - DNA, 344 bp, Zea mays
  Clone ID: MRT4577_163480C.1
aaaaaaaaaaaaaaaaaaaaaaaaaaaaaaaaaaaaaaaaaaaaaaaaaaaaaaaaaaaattttacataaaaaaaaaacttgtccttgggccaatacctccctaagggataattttggggatatccttcaccctgcgctggccggtcccccatgcttccttaagggcccaattaatccctatagaggggcggattacattacaactggcccgactttttaaaaccctggggactggcaaaaaccaatggctttgcccaacttaatccttttgccggacttccccttttcgcaagagtgccgtaatagataaaaaggccccaaccgtatcgccctttccaacggt

SEQ ID NO: 69614 - DNA, 197 bp, Zea mays
  Clone ID: MRT4577_163481C.1
tcgttgatctccggcggaggcgagcaaccgcgcaccatgagtgaagaaggaacgctgatgcacgctggtgaccctcttgaggccatgcacaaacaactagcgtcatcatggttacaaacatccattgggtttatgtatggggagccattgaccaagagataacgcttatgcaagtggtgtggttgcaaccacaagat

SEQ ID NO: 69615 - DNA, 395 bp, Zea mays
  Clone ID: MRT4577_163482C.1
ctccgtcttttttttttttttttttttatcagcgggagaactttattattacagtgggagagattaaacacctaaaaaatggcaccaccattggtggtcggttgaaataaggaggaaggattcctcccagcctgctgagttaatggcacttaattgttgttggctgaaagaaggccacaatgtttgacacaatttgaggggagaatggtcacttcttctgcttaagaaagaaggcataaatgtttaccccctcttgagggtaaaaacacttccaatgttgttgtcccaagaaagcaacaatgtttgacacaccccggaaaatgaatggctgaacctgctgttgcaccaaaaaagccttattctggcgcggacccgggttttccagaccgggccct

SEQ ID NO: 69616 - DNA, 129 bp, Zea mays
  Clone ID: MRT4577_163483C.1
gcgatctaggcttggatgggaataaaaccttcatggaacaccacttggccaactttatcctctattaatgaaaaagggcttctttcagggttggcttgggagcacggggcttaaaggggattgaaggaa

SEQ ID NO: 69617 - DNA, 268 bp, Zea mays
  Clone ID: MRT4577_163484C.1
ataatttaatagcatgctaaggtaacgaagcatatgtacctccattgtcatgctgaaattttccacattgatattattttctctttggagttattgaatagataacaagttaagtactttagtagttcagtttctttcagctgacacctttttaatatgttatactatcaataaagagatgcataatagattggctgataggacttctgtttccctgtttgtacttttcctctgtaccttctgttttccagggagtaacattctattt

SEQ ID NO: 69618 - DNA, 574 bp, Zea mays
  unsure (1)..(574): unsure at all n locations
  Clone ID: MRT4577_163485C.1
ccggcctggtacgtgttgaaacancccccccccccccccggtaattagggatgttgagctgtggggaaggaggtgggaacagcatgtggcggagtggggggaatgcattgatgcccaacgacgatgaagtgtgcacattggtggctggcgctccagatggcgatgaacaaaataaatgaggctgggaggaatctatggcgctgatacagaacggaggaggctgacgacacatatataaagaaagaagagcgtgtagctgctaacagaagaaaggaggatgacatctttgaagggccatgtataatttttcgcttattgctggcaacaagggagatgaatgcatcattaaactgcaacataaatctacgggggagctttatgctaagaaatttctcgaagacgaaggaccacatccggtggaaactggaattgacagtaacagatattttgtactacgtgttgaagacaatatatatgggcgtatgcgccatgattgcttaagtatatgctcccggaattgatctgatctaaatgacttacaagaatgtgctacatgatcatatggaatatttaa

SEQ ID NO: 69619 - DNA, 294 bp, Zea mays
  unsure (1)..(294): unsure at all n locations
  Clone ID: MRT4577_163486C.1
atgaatgcttctttggcagaatatggtagnngggtgttccttcttaatgtgtggatcttagctacttgttaataaatgactgttgaactactattctttttatgcggaaaccttatttttggtcggcatgtgaaacttaatttgctactggataaccctattgtatattttaggtcattacgtcacctngtactgatgtacaattgtagatgatatgttatacatatttcttaattggtatacttgaagctacatgcactatctgtatatcactcgtgtttgtttgtttaactg

SEQ ID NO: 69620 - DNA, 442 bp, Zea mays
  Clone ID: MRT4577_163487C.1
aaaaaaaaaaaaaaaaagccgcagcataaaaacataaatcccccccataacaacccaggggggggggggggggccccctttattttacttaacgcacacgggcagttaaatttttggggacacacaagggaattaccggggcctaaaaaaaaaacggggtcaaggaaaaacccttaaaaggggggggggaaaaaaatgcttaaaaaaaacaaaaacccccccttgggggtggggcaaaaaaacccctaacaggggagcctgttattttcgccgaaagaggggcccaagccttgccttaaggggcgctgaaaagcccatttttggggggaaacaaaaaagggggcgttgaaaaaacaccaggcccatttgccccctgattccttaaaaggggggcccaaacccttgacccaattggggggccaaaaaagggggctgttatggg

SEQ ID NO: 69621 - DNA, 605 bp, Zea mays
  Clone ID: MRT4577_163488C.1
ggagcttcttcctatgcgcgcgactccctggtggggggcccctccccctccaccctgctcgctcggggcccatctccctgtgctctgtgcacgcgccgtgctcctctgtcgggcgctcctccctggctgctggtgctcgaccgcttggccctgccctaatgccgtgctcatctccctgggctagctcccctgcgcgcttgcttcctgcgcgcgagctcctgcgcgcccggatcctctcctcccttgctctcccttgccatgggcgcgatttctcttcgcatggggctcctccctgcctctgctcggatccgagccgactttgccatccgcgcgtgccctccatcgtccaagcgctcgggttgcggcgcccctgctcggttttctccatggggctggatcccctgcaagctcgcccaagtcgccgccgttgaagctccctgcgcgcgctgcttcttctctgctcggcgctctctgctcggatttagcccagctgctccctgctccttggcgtcgcaagctcgccgacgttgctcgccctctagctcggccgaccgcgctgctctatgcgcgccgagctcgtccctgcgcgtgcccctcaaactcgt

SEQ ID NO: 69622 - DNA, 337 bp, Zea mays
  Clone ID: MRT4577_163489C.1
gcctgcaggtaccggtccggggattattcccgggtcgacgagctcactagtcggcggccgccctttttttttttttttttttttttttttttttttttttttttttttttttttgaaaaactttggttttgggcaaaacatggggaaaaagccaaaaatgaccttctaaacatcaaatggagttttagagacaattgggcctttttatcaaaggggggcttttttttttcagggtaaacggggcccaactggttaactgatgtcaaatttaggaaaagatggtcaaacttgacctaagagtgaaccttggagcacaccggcttgtttagaacaaaat

SEQ ID NO: 69623 - DNA, 1783 bp, Zea mays
  Clone ID: MRT4577_16348C.1
cattgggtacctcgttgtgggtcgggatctcgaggccggccgggccgggagtcgacactcgagagtcgagaccctctcccagcatcaacccgccccgcgctgccctcgtcccgatctccgacccaaatacccgatccaccatggccggaataaggcttacgcccgaggaacccgagatgcccgttggcacgccaccccgcccccagctcccacccttcgtcgccgcggcaggcggtggcggcggaggtctggaaatggcgtcggacgacgagcggtccattgcggcggattcatggtcagtgcggagcgagtacgggagcacgctcgacgatgaccagcgctacgccgacgctgctgaggtgctcgccgcttccgcgtcctccgccaacttcccctccgccgcctccgattactgctctgataaggatgatcaagatcctggtgatgttgaaggatcaatgctgggtcttcaaagttattgggatgcttcttatttggaagatcttgcaaattttcaggaacatgggcacactggagaaatatggtttggtgcagatgtaatggacacagttgctgtttggacgaaaagtttgtgtaacattattgaaggcaagattccatctggtcaagacaacatcaaaagtgaagtcaatgaaaatttattctccaactaccctgttcttgatgttggaactggaaatggtcttcttttgcaagcattggctaagcaggggtttacagacttaactggaacagattacagtaaaggagctgttgaacttgcaagaaacctagctgctcgtgatggcttctcttcaataaactttttggttgatgatgtacttgagacaaagttagataggaaattcaaaattattacagacaaagggacattggatgccatcggattgcatccagatggtcgtgcgaaaagaatggtatattgggaatctgtatcaaacttggttgagcctggtggcattgtggtcataacgtcatgtaatcacacaaaggatgagcttctgcatgaagtagaagatttcaccaagagaaaatttggcaaggagaacgtggatgaaggtgcacgagatgcgtctgagatcttccggtacatagaccatgtccgaacatatcctaccataatgtttggaggaattgagggctctcaagtctgcactgtggcctttcagcgggtgtgactgaaagctgaggcacacatagttcttggcctgacgtgtcacgttgggtccagaagaaatggataaaaaattttgtgcttcgcctgtgggactgttcctaccgtattaaggaacagtccaaactgtgtcttcttctgttgttagctcatctatccaggatggtcgtgtaattttagatggaccagactatgagacgaatcagtcctgtattgttgtcaccgtgaacatttccttgtatttccgttcctcttatacatactctagccttaatttattactctttcttgtaaggaagtttcaacttgctaccagtggattgttttaagtgatcgtcgtctatttatgcaaaaaaaaaaaaaaaaaaaaaaaaagtcgacgcggccgtcaatacctttcattaatgaccgtttcagcatgtgaatacatagcccttgaaccctacaggcttcaacatgtaatcgcaacaagcaacttacctttatcacccatgttctttcaacaatagtaagccatatctttggtgcagtcattgttacacaccataatggcacaccagctgcagcaactcgtgctaccagtgatca

SEQ ID NO: 69624 - DNA, 248 bp, Zea mays
  Clone ID: MRT4577_163490C.1
cactccaaccaaatactaggggcaatatatatatcaaaccaaactaagctaacaaccgctgctagtgctagctgcagctctccgtagctattaaatactataaataacggagaatccaaagcctaatccttggataaaaattctagctaaaccgaggaataaagagcgataagcccggtgtctgtcaacactccagaagagccgcagcgcaaaggaaactcctttggggcgtgcgcgaccagcatgaa

SEQ ID NO: 69625 - DNA, 365 bp, Zea mays
  Clone ID: MRT4577_163491C.1
attaactaaagacaaaaaaaattgggaattgggattggatgtttttttttttttttttttgactatagaaaggttttttttttttttccttggccgcaacctcttgggggggggggtttcttagacgcgacccccccggggggggttagtgcggggacttggggggccatattccccctatgggggggggttatacgattctggggcccctccaaatccccgcatccctggggaaaaactgggtgtaacccacaaccttgacttaggaagatttcagcccttgcactgcatgcgtgacttgcgaggggccccccctgtggtctttggtaacactggctgcccccgaggaccggacggtccggcct

SEQ ID NO: 69626 - DNA, 280 bp, Zea mays
  Clone ID: MRT4577_163492C.1
gcatttttaagtgaacaacggagaggtgtatgtgtccacatgttaactctggagaagccaagcacacatctcctgtgtgatgcccatttgcaacaagatcaaagctgtctgccatatgagagaggtgagctggttactcttcaagatacctagaagtcgagacggctctggagtaacttgcaggacagaaatcaatctgctaacagtaactccgatggtgggaaatgaaaagatcttatacatgaatcaatctgtgtctgaacggcagtctactgattgt

SEQ ID NO: 69627 - DNA, 823 bp, Zea mays
  Clone ID: MRT4577_163493C.1
cattgggtacctcgaggccggccgggagcgacttcgacagccacccacgcctactaacctccgcagtcaatcacaatgtccgactccaaggcctccaaccccatgcgggagctccgcatccagaagctcgtcctcaacatctccgttggcgagtctggtgatcgtctcactcgtgccgccaaggtgctcgagcagctgtccggtcaaactcccgtctactccaaggcccgctataccgtccgtactttcggtatccgaaggaacgaaaagattgccgtccacgttaccgtccgtggccccaaggccgaggagatcctcgagcgtggtctcaaggtcaaggagtacgagctccgcaagcgcaacttctcagagtccggcaacttcggtttcggtatcagcgagcacatcgacttgggtatcaagtacgaccctagcatcggtatctacggtatggacttctacgtctgcatgactcgccccggtgagcgtgtcgccaagcgcaggaggtgcaagagcaagatcggcccatcccaccgcgtcaaccaggccgagaccatcaagtggtacaagaaccgattcgagggaattgttcgataaacgtatcgacggggaggtgaagagggaacgaagtgaagattctgcacgataaccagcattttcggtctcgggggttcggtccaacggagtcctggaatgtatcttacaaaaagagcaagcattgaacttgcggcctatcaatggagcttggcccttgtctcttatgagcgggtctacgaccacgtatacaatggaagcttcactagggcggatgttccgcataatc

SEQ ID NO: 69628 - DNA, 321 bp, Zea mays
  unsure (1)..(321): unsure at all n locations
  Clone ID: MRT4577_163494C.1
ctctctcacccctcctaaccctagccgcctcctgcacgcttctcctccgctccccgccccgcctcgagcagctcaggaacgcgcgcagccatggcgacggagaccgagaccttcgccttccaggccgagatcaaccagctcctctcgctcatcatcaacaccttctactccaacaaggagatcttcctccgcgagctcatctccaactcctccgatgccttggacaagatcaggttcgagagcctcacggacaagaagnccaagggctcgaatggcgccagccccggaggcttcccttcatcccacatcatccccccgaca

SEQ ID NO: 69629 - DNA, 383 bp, Zea mays
  Clone ID: MRT4577_163495C.1
acaatactactcatccctcatggaaagttatcaaaatcggcaaaaatgggactgtcaggaacggaaagctggtggccatatgtacgggcagacgaccacagcgggcccaattgactaaacgaccctaaccttagatccgttcccttgaccaaaaagaacaagtgtgacactgagctccgtcaggggccgcgccctgaagcccacgtaaggggaattccaaacccttctgtgtggcgatgaatagagggatacctgagcttctggcccgcaaggcatcgcgctgtaagtcaatggccattgagggtgtcggccttggcgcgtaaatagtgtatgccgatcactactggcacacaacactgaacccgaaagcgctgagggtcact

SEQ ID NO: 69630 - DNA, 568 bp, Zea mays
  Clone ID: MRT4577_163496C.1
cccacgcgtccgcacggatccttcttcctctccctccccagcgttcttctcccatccctctccctggccatggcggtatgcctctcgtagatgcccagcgcagcggccagcgcgcgcagcagcaggcgcggcttgcccggcgtggcgaccagcagccccggcgagccgccgcgcaccgcgaccagccgtccgtccatcagcgccctcgcccggcgccccaacctggcagtcgcggcgtggcccggctagcggccaggagcccccgtgctcggcgcggtgttgcggccagcgtgcagcagcggaagcggccagcccccagcggccagtccgcgcggccgtcggcggctcgcggcgtgcggctggcgcgcccagcgcggcttgtggccaaccaggatcccctgcttgcgcggcctcttcccgcgctcgtcccctagccatggatgccctcccctgcgctagatccgcggtcgcgtggcccccgcgcagggcgcggcgtggcggtcggtcggcgtggcggcgcgctagctacgcggctcgccctcgcgctgaggatggccggcggtgccaa

SEQ ID NO: 69631 - DNA, 932 bp, Zea mays
  Clone ID: MRT4577_163497C.1
cctcgaggccggccggggtgtgatgcaaacacagagggaaaccagctggattttctttccacttcggtgtgctggtcgacgtggtccttctctcctctcgtctccacagtccacacacaccgtgtgcggcggtagctgctgctgcccgtgcctaccgaagaagacaagtccaacactgttgttctgttccgtgattgcggaatttgcttcaccacaccttcatcagagagccgagacgacacgctcgagacccagcaaggcaagaagaacacgagagagacagcaggcaccaggcagggatcaatcatccgtccatggagaacctaaaggagcagcggggccacgacgcggcgggcgccaacgcctggatgacggtgccggcgttcggggactgggacacgaagaacggcgcgctgccggactactccatggacttctccaagatccgcgagatgcgcaagcagaacaagaaggagctctcccgcgccagcctcggcggcgacgacgacctcctcgcccacgcccagaagccgcagcccagtatcgccccgcccaagctcggccgcccccgccccggccccgccgacgaccactccccaacgggagggaagaagttcctgagctacttccggtgttgtatcaaggcctgaagaggtgctgctctagtgcctgcagtccctgtgtttttttttcgcagcagaacacttgtgagcaatcaggcctcggttttgttaagtaccccgtgtccaaaaacgtgtaatatatttgtccttatggatcagtcgttgggcctgtatgaagaacagaccagtttatggggtaagcaacgttctttttgtacacatacatcaccatcgatttgtccttgatacgatcaaggggcatggttcgaatgaattggttttgtaattatgatgggaaaatccgtacgg

SEQ ID NO: 69632 - DNA, 622 bp, Zea mays
  unsure (1)..(622): unsure at all n locations
  Clone ID: MRT4577_163498C.1
cattgggtacctcgaggccggccgggacagtcgtcatgagcgatcacgtacctgcacactccacagaaccacccgcgacgcgtgaaaacgcgcgcgttcaaactgttcgatgtgtcgctccgccgtctcctcctgcccagcgttcctgctgcctgcgcttctcctcactgcgatggcaaccacgacgcaccctcacggacgggggagcaaatctctcccgatcgcgtccaacaagtacaaggtgagattctacctgtcgcacctccgatagcacatggcacctgtactttccacctggccgttccgcctctacatgttctgttacaggcgctgcgaacacgcgcaccatccgccgacagacgtactctcctcctctccctctccaatacgtgcttgccgagcccctcaggctgccactgttgactcaccggcgctcttcaacgactaacatagccatggcaacgtcacccgacgaggagacctggctcgatcaacgcgccgactagtantcctcttctgcgccgctcgctgtaccggttcgaaatccagcgcgagggganttctgcccattggcaggtaattacgtgaatgaccatctgcatcctatgacttacaagtgtct

SEQ ID NO: 69633 - DNA, 684 bp, Zea mays
  Clone ID: MRT4577_163499C.1
ttttctttccacttcggtgtgctggtcgacgtggtccttctctcctctcgtctccacagtccacacacacggtgtgcggcggtagctgctgctgcccgtgcctaccgaagaagacaagtccaacactgttgttctgttccgtgattgcggaatttgcttcaccacaccttcatcagagagccgagacgacacgctcgggacccagcaaggcaagaagaacacgagagagatagcaggcaccaggcagggatcaatcatccgtccatggagaacctaaaggagcggggacacgacgcggcgggcgccaacgcctggatgacggtgccggcgttcggggactgggacacgaagaacggcgcgctgccggactactccatggacttctccaagatccgcgagatgcgcaagcagaacaagaaggagctctcccgcgccagcctcggcggcgacgacgacctcctcgcccacgcccaggcccaggccctgaagctcgccgccactaaggccccgcccaagctcgggcggccccgccccgggcccggcgacgaccacttcccaacgggagggaaaaaattcctgagctactttcggtgttgtatcaaggcctgaaaaagtgctgctctagtgcctgcagtccctgtgttttttttttcgcagcagaacacttgtgagcaataggcatcg

SEQ ID NO: 69634 - DNA, 256 bp, Zea mays
  Clone ID: MRT4577_16349C.1
tcgccacgcgtcgggaatcagcaggagcctacactggacggacttggcatggaggcgtccagtgcaggagagtatcacatggaatggacgacagtaaagaccaacttctatatggagccaaaacatccttacaacttcactggattaagcggcctaatgctaatgggatgaggaactagaaattggagccgggtactctacatgacattggatgggccaagagtgccaatacaggtagataagatttttgagaaca

SEQ ID NO: 69635 - DNA, 987 bp, Zea mays
  Clone ID: MRT4577_1634C.1
caaacacacgacagggtagctgtgatctactgtctagccaaagtaacttcagacaaccaatggaggaggatgttggaaacatagaggctagagccaatcatacactgaggcaaaagaaaccaagctttgatctccaggatttattaacagcaagtgattctccttcatggccagatagcaatttgagggtaaattttcagatgggagatgaaagagaagcaattggtggggactggatagataaggttgtagtgaacaacaataattcagccagtgattgggagggtgacaacgcagctttacctgactttttttaccagagatatcattcaggtatgagggagaagcagtaccagaggaacaacatgagacaaaaggatgaccacgagtatgaacagcaaaggcctcgattttactctacaaatactgatgattctgatgacattgacatagcaacaagtgattcctcagaatcagatgcattatggcagctcaatgtccaaagcatgaataactcaattagtgagagtggttcaaaggttaagaaaccacaaataaagcttagagatggttcagatgccaggacaccgattcattctcaaataccatcagggtcgagaaaagtcgcaaacggttcgagtagatctgttaggcagcctttaagcagaagcgacagcagaaggctttcatcaaatggaagacaaactggtggaaagtagggacttacaatgatcgcgtgcagtttttgcctttttcttttctgtgtttgtcacgagagattgtgaggttgctctcgagtacagcaatgagtgacaataaacccaattgagtgtgtcagtgtggtgagttgtgatctcaacaactggtgtgtgaggccattaactttttttccttattggcttatcaggctatgttgagttcttgctaattctctgtatcttgtccataatataaatacataatgaaaagaaaggaaattgattgatc

SEQ ID NO: 69636 - DNA, 441 bp, Zea mays
  Clone ID: MRT4577_163500C.1
gtggatccagggtaccgcgacacctggctggcattttgtttgattataagttatatacaagaagcttcgatacttttgtcatacatcgtatggtaagcgtcgtccattagccctgacagtctagcaagtcaggtcgaaaaacggggtgttgttctccttcggggtaatagcgaatgacaggtcggtttgggcagcgttcgcatccttcagagtgtaccagaaggtgttgcgagtgccgaagagggagcagccaacctcgtcccagtaacgcttggagttctcaagagaggcaacagcggcgccagagttggggccaattcgtggccatccagtctcggtgacccacacgggctttccaccagacacaccctcagtctgtcctacagcggcgaagaagttctcgcgagcctggtcatagagttcggctgggtggtctcaaag

SEQ ID NO: 69637 - DNA, 967 bp, Zea mays
  Clone ID: MRT4577_163501C.1
tcgaggccggccggggtccttctctcctctcgtctcacagtccacacacaccgtgtgcggcggtagctgctgctgcccgtgcctaccgaagaagacaagtccaacactgccggttctgttccgtgattgcggaatttgcttcaccacaccttcatcagagagccgagacgacacgctcgggacccagcaaggcaagaagaacacgagagagatagcaggcaccaggcagggatcaatcatccgtccatggagaacctaaaggagcagcggggccacgacgcggcgggcgccaacgcctggatgacggtgccggcgttcggggactgggacacgaagaacggcgcgctgccggactactccatggacttctccaagatccgcgagatgcgcaagcagaacaagaaggagctctcccgcgccagcctcggcggcgacgacgacctcctcgcccacgcccaggcccaggccctgaagccgcaggccagtaacgccccgcccaagctcggccgcccccgccccggccccgccgacgaccactccccaacgggagggaagaagttcctgagctacttccggtgttgtatcaaggcctgaagaggtgctgctctagtgcctgcagtccctgtgtttttttttcgcagcagaacacttgtgagcaatcaggcctcggttttgttaagtaccccgtgtccaaaaacgtgtaatatatttgtccttatggatcagtcgttgggcctgtatgaagaacagaccagtttatggggtaagcaacgttctttttgtacacatacatcaccatcgatttgtccttgttacgatcaaggggcatggttcgaatgaattggttttgtaattatgatgggaaaatacgtacggaaagcacaaatgactcctggcgaaaaaaaaaaaaaaaaaagcatggttcgaatgaattggttttgtccctatcatgggaaaatacgtcccg

SEQ ID NO: 69638 - DNA, 1159 bp, Zea mays
  Clone ID: MRT4577_163502C.1
ccacgcgtccggcagtcaccagctgtggccgcccgcctccgccctccgcgccgcggacgcgtggtgttggcgtggtatgcaacgggcagtcagcgcaacggatcgaagagagagctttgcaggaagattataaagctgcagtgggcacccactggtggctcgaaaccagctggattttctttccacttcggtgtgctggtcgacgtggtccttctctcctctcgtctccacagtccacacacaccgtgtgcggcggtagctgctgctgcccgtgcctaccgaagaagacaagtccaacactgttgttctgttccgtgattgcggaatttgcttcaccacaccttcatcagagagccgagacgacacgctcgagacccagcaaggcaagaagaacacgagagagacagcaggcaccaggcagggatcaatcatccgtccatggagaacctaaaggagcagcggggccacgacgcggcgggcgccaacgcctggatgacggtgccggcgttcggggactgggacacgaagaacggcgcgctgccggactactccatggacttctccaagatccgcgagatgcgcaagcagaacaagaaggagctctcccgcgccagcctcggcggcgacgacgacctcctcgcccacgcccacgcccacgcccagaagccgcagcccagtatcgccccgcccaagctcggccgcccctgccccgccgccgaccgccgaccgctccacgcccgcgaccactccccaacgggagggaagaagttcctgagctacttccagtgctgtatcaaggcctgaagaggagctgccgcaatgctatgtctgtgtgcctgtgctttgtcgcagcagaacactcgtgagcaattaggtcccggctttgttaagtatccaaaaaatgtgcaatgtatttgccctgatggtcactcgtttgacctgttagcctgtatgaagaacaagtcaggttatggggccaggcagccgtctatctgtacatggcaccatcgatttgtttgcgactggtggtataatgttgccctgtaatcattgtattggatgggaatttgcaccgcctccgtatttttgaacgatcacaaaaaaaaaaaaaaaaaaaaaaaaaaaaaaaaaaaaaaaaaaaaaaaaaaaaaaaaaaaaa

SEQ ID NO: 69639 - DNA, 1515 bp, Zea mays
  Clone ID: MRT4577_163503C.1
gctcgcgcgccccggggcctttccccttcatcgagtctacgctcttcgtctttctccggtccgaattccccaatcggactctcctcttcttgccggatctccccaccccattccaccccgcccatgggtgcccccacccctcgccgctgacctgtgggtacactgccccctgctcccccgccccgctcccgctcgcccacgcgaaccctaggcagctaggctttgctgctagaagagctccagcgaccgacgaggagaggagaataaagctcaaatcttggatgcgcccgaaccgatggcgacacctgccgcagagaagccggaagatgtagagatccgtgaggtttgggcggacaacctcgagacagagttcgccgtgatccgcgacatcgtcgacgactatccgtatgtggctatggacactgagtttccgggcgttgtgtgtcgtccgctcggcacttacaagtcggcggccgagttcaactacgccactcttaaagctaacgtggacatgctgaagcttattcagctcgggctcaccttgtccgacgagcatggtgggctgccctgcgctaggcccagacggtcgtccctgcgtctggcagttcaactttcgaggatttgaccctcggactgatgtggctgcagcggactccatcgatcttctacgccgtagtggtattgacttctctcgccatgctgctgatggagtcgactctcgctgctttgctgaactgctcatgtcctccggcgtagtattgaattcagatgtgcattgggtgacttttcatagcggctacgactttggctacctgctcaagctactcactggcacaaatctccctgatacgctgccaggattcttcgatctcatcaagatttactttcctgttatctacgatataaaacacttgatgaggttctccaatagcctccatggagggctgaacaagcttgctgagctgcttgatgttgcaagggttggaatctgccaccaggcagggtctgattcgcttctgacagcactgtccttcaagaagcttaaagaggcatacttcaacgggttaactgagaaatatgctggtgtgttgtatgggcttggctttgagggtgtagagaccacctctgctcactgagtaatggataattaaataaaagatgaactatttatgaaaatggagaaatctgtttggtgtctttgtctgacaatttcctgttgcttgcgctggtgaagattgtggcttgatggaatgtgctgttgaagtttctttgaggcctgtattgatacactgatcaccaagtcaccaactgaagactcaaacattatcgaactctgtaatgctatggtaatcaagtactctacaacaagtcatcaactgctgtgctaaatgttatttggtagcaaaaagaacacttaacttgccctttgatatgtgaaactgaaacccctcagttcttgttttacatggtttctggtgctaccccttgaataaaaaaaaaaaaaaaaaagcggcc

SEQ ID NO: 69640 - DNA, 289 bp, Zea mays
  Clone ID: MRT4577_163504C.1
atcaagcactgacacctcagcttcacagagacattgtgtcagcccaggaaatgtagagagaccaaatgcagaatctctgaaccattggagctggtagtttccgtggcctcggatgcggaatgttgctgttctcccctcaattttaatgtatccagggatcctctgcagacaattgcaggagatataaactgtagaaagaaacattcttcggggatttctcaataatatttaagagtattgggattctgtcgatgacacaaatggagggcaaatcattccatgctcaagg

SEQ ID NO: 69641 - DNA, 980 bp, Zea mays
  Clone ID: MRT4577_163505C.1
ctttccacttcggtgtgctggtcgacgtggtccttctctcctctcgtctccacagtccacacacaccgtgtgcggcggtagctgctgctgcccgtgcctaccgaagaagacaagtccaacactgttgttctgttccgtgattgcggaatttgcttcaccacaccttcatcagagagccgagacgacacgctcgggacccagcaaggcaagaagaacacgagagagatagcaggcaccaggcagggatcaatcatccgtccatggagaacctaaaggaggtaagtaaacctagcgatctctgcctccctggaccctctctctcttgattcctttcccgaggagctcagctcgctcggctagctaggcaccgggttcctgttcctgccgcgaggcgcgtctcacacgcggcgtgccgtgcgtcggtgcgcgcatgcagcagcggggccacgacgcggcgggcgccaacgcctggatgacggtgccggcgttcggggactgggacacgaagaacggcgcgctgccggactactccatggacttctccaagatccgcgagatgcgcaagcagaacaagaaggagctctcccgcgccagcctcggcggcgacgacgacctcctcgcccacgcccaggcccaggccctgaagccgcaggccagtaacgccccgcccaagctcggccgcccccgccccggccccgccgacgaccactccccaacgggagggaagaagttcctgagctacttccggtgttgtatcaaggcctgaagaggtgctgctctagtgcctgcaatccctgtgtttttttttctcagcacaacacttgtgagcaatcaggcatcggttttgttaagtaccccgtgtccaaaaacgtgtaatatatttgtccttatggatcagtcgttgggcctgtatgaagaacagaccagtttatggggtaagcaacgttctttttgtagaaaaaaaaaaaaaaaaagcggcc

SEQ ID NO: 69642 - DNA, 459 bp, Zea mays
  unsure (1)..(459): unsure at all n locations
  Clone ID: MRT4577_163506C.1
ccggtcacaaaactcccgggtgcgacctgcgacaggtgcggcgtggcagcgggtgtgcgggcgcgggcaccggcgcagacgatccgggcttatacaatggagttggaagccgaagttcagaaactgaaggaacaaaacgaagaattgcagaagaagcaggaagaaataatgggagatgcangaaaaaccaggtcttgtaagtgatcagcaatccatacgcacggaagaaacggtgcctgcggagaacattgacaggtccctggtaaccgagctgttgacgagcgaccgggcttgacaggatatttaacattatggcacctgtacatataccttgaggatttggagaacccgagtttccggtgtatattagcgaccaacagagtgtgagtgtacctgcgcttgacttccttatgctgccactgtgcctccttgactaacttatgcaggtgtgttagattc

SEQ ID NO: 69643 - DNA, 142 bp, Zea mays
  Clone ID: MRT4577_163507C.1
aaaacacccaaccgaaagatggtcaccattgcataaaacacccttttgtgtccggagaatacttccagaaccagattttttcttgccccacgttaaaacagacgggcgttgtttaaggtttcggaaggcatcactaaacatg

SEQ ID NO: 69644 - DNA, 373 bp, Zea mays
  Clone ID: MRT4577_163508C.1
actagttctagatcgcgacggccgccctttttttttttttttgcaaaagtaactccattgcatttgtgtacagatgtacaaatttgcttgtttgagctgctatacacattacattacacacttgctgcttcacttcactataggactatgtctcgcctcttcttgatgttcattggctcggcaccagccgtccctttcctcatcatcgccacaaactctgaataatctatccttccatcattgtcagagtcggcatcggagatgatgtctttgattttatcggcgtcatacaacccttgctccttcaaggcgtgctcaagctcttctttagtaatgtacccgctgttgtccttgtcgaaatactggaatgctg

SEQ ID NO: 69645 - DNA, 416 bp, Zea mays
  Clone ID: MRT4577_163509C.1
acgcggacgcgtgcggtggatctccgggagattcgtaggtgccaaagcagcacggagctgaggacacggaacctccctataagggcctggaaacggagatcgctctcaactgccagaccgatctcaggttccagtactccaccgactgtgttctgtatgaggccgtctaagcgtacctcgtggggctctttgatgacactaacctgtgcgccatccactccaagcgcgtcaccatcatgcctactgacatccaactcgcacgccgcatcaacggagacaaggcctgaacgatgcgagctcatctcactcaaggccccgtagttgctgatgcttacctgctagcaggacttgtgctcatcgcggttacctttgtgccatcaacgacatcttcgtgccactgtgcttgctcttagaat

SEQ ID NO: 69646 - DNA, 315 bp, Zea mays
  Clone ID: MRT4577_16350C.1
ccgacacggaggtacggggtcgccccatgcggtccgaccttttttttaaggagcgtgtcctactcgtacactacctgaatgaattttacatgtataaggataatagtggcactacactacaaggacgttctgaaaatgaatccttttgaagctacctgtactgctattagtcaagccacgtacaacccggagtctgaaaggagttatgttgaggtacatatggagcaaggacatgagcgtgaagcccttgattatccacttgaacctctctgaggaattgtcggacagactccattgaaggacatggtctatggg

SEQ ID NO: 69647 - DNA, 381 bp, Zea mays
  unsure (1)..(381): unsure at all n locations
  Clone ID: MRT4577_163510C.1
cggacgcgtgggcggacgcgtgggcggacgcgtggngaaaaaaaaaaaaaaaaaaaaaaaaaaaaaaaaaaaaaaaaaaaaaaaaaaaaaaaaaaaaaaaaaaaaaaaaaaaaaaaaaaaaaaaaaaaaataagggggggccaggtttagggggtttcaagtttacctaccctcttccttgccgatggggtgggggttttttttttttgaccttaagttaatttaattgggttttcgttttacaacgtttttcattgagaaaaaccctggatttccctaattttactcgcctttaagccctttccccttttggcccattttgggtttttcccaataggtccgcccgggtccgcccttcccttttttcccctccctgattgg

SEQ ID NO: 69648 - DNA, 298 bp, Zea mays
  Clone ID: MRT4577_163511C.1
gggaaatcaccaggttctaaagaacttggctgcctgttaagaaatgaagatgtaggatctgcgcagttcacatggaatattttcacaaactctgcatacatgaatgggccacacctatataaatggcaaaagtaagggcccaatgcccccctatgtattcaatcatcatttccacatttaggcttttgaaggacggaattttcattagggctcttaacccaaacttggaagcaccacatattgtgaaatcatttagctccttacagagtgcgggcagcacaagcacgttttgctgtcc

SEQ ID NO: 69649 - DNA, 404 bp, Zea mays
  Clone ID: MRT4577_163512C.1
atgtgacaatcataatatagcaggagacccacgtccatccaaaatacaatgtatacatttcacaaccatctaaagtaacaactttgtctaacatgattcatccaactgtatatttcaatcataatgcatccaacacataagagaacatgattcataatacttggttatgcagaattgacattttgtttaatatgacttgatcgttgtcttcctgaattctttatatttttgtcgcaatctgttggctattgccaaatttccttagccaaaacaaatcagtcagccttgggtgtgaatttgatctttatgtcctgttgattaacatctgcagaagactccttgatgcagctaggaaattcttctcttggccttgaacaatcatatcagatatcaccaccatagac

SEQ ID NO: 69650 - DNA, 879 bp, Zea mays
  Clone ID: MRT4577_163513C.1
taacatcatcagcttcaacgcctggaacctcaattacttttattgacattgccttaatggatgccttcaagtattgcatgccctgaacaacggtgtcaggtgttggagtgcggttgctcttgtaagcagggtacaacatatgacgaaaggtcattccttttgccatgtgacattctttagatggcatggcagtataatgaccatatgggactccatcgtggtcaaacacaaccgcagcatgagatggaatgaactccagcatgtcaagaagcagggatagagctttgaatatagttaaaacccaatccccatttccatcagcatgctccaactggccgtgctgcagctgtgctaatatcttgtagtaggatctatacatcatcgaagttccatcaactagcattattctgctctttgaaggatcagcatgagggacacccccagtcggattcgacaatgtatccaatatgcttgaggatacgctgtcatcatacagtggaatccgtggagtattcggcactgatggtccttggaaacactcaatcgaatctgtgactggcagaactgactgctcggaaaaacccttcctgaatacgttgagcggcgacgggagctgccgcggagcggcggcgcggtagatgaggaggcggggcgccgcagcgacgcggacgaagcagcaggccatcggcggaggctacctcttccgcatcacccagcgattttggatggatggtggtgtcgggaagaagggctagggtttaggagttttgaattgggaagacgtcgatgaggatgtagaggacgaggtgttcgacagaatgagcgggcagactggagaaggactggattgggagactagaggagcggcagcccggccgg

SEQ ID NO: 69651 - DNA, 504 bp, Zea mays
  Clone ID: MRT4577_163514C.1
atggctcaggtcagctcgacgacggcgcttgcgtgcttcaaccacgacggaaatcagcgcagccgcttccctctctctctctcggtttcgttctgctgggacagtggtgtggatgcgaggacttggcaccatggagcggagataggggtgcttggtatatgtggccaaggtatggtcaacggtgggcgggtgcgccatgctaggaggccgttggagggtttaccggggcgagctggcagcggcgagcgagatctccgtggagaggataaatctgtcggcaaggacccacgcgtcagtgcgcgcgacgggagacagacacacgggcccagcgtaccagagagttcccccagcgcgcgcgatatcccgatggctgacaaaccggccccaaagatcaggtgcacaggggcagtagcggtggcacacgactacgttattcatagctcaacagttgttagcgtcggcaccagtgctgatggggaggcgtcgctggcatacaggtcctaa

SEQ ID NO: 69652 - DNA, 945 bp, Zea mays
  Clone ID: MRT4577_163515C.1
cgcggacgcgtgggcggacgcgtgggcggttccacctctcccctccctctcgtgctcgatccatcgccgctgcctaatccccatggcctcagcgaacaacgacaaccgcgaggcggcgggcatcctgcggctgctgatggggatggcggcggcggcgcccgcctcggcattgcctcgggggggcggcggcggcggcggcggcggcctgatggtggtgcagcacgtcatcctcgacgtcgacggggaattgttctcgggcggggtcggcggcggcggcgtgccgccggcgtcgaaggccgcgatcgccgcgctgaaggaggtgaaggccggggagggcgagggcgagggcgaggacgcgctgggcgagtgcgccatctgcctggacgcggtggagggcaccggcaaggagatgccgtgcgggcaccgcttccacgggcgctgcctggagcggtggctcggcgtgcacggcaactgccccgtctgccgccgcgagctgccagcgccggccaaggaggaggaggaggacagcgcggcgtcggcggagggcggcgaggaggaaaggcggaggcccagggccgcggtcgtcgtcagctacctcgtgttcggaggcgggcgggcggaggcgcagcaggagccggagagggaggagccgtggaacattagaatagaggatgtggattagcattggtcgccttcccattggttttcagattggtttgatggcggaggaggttatgtacatactagtaatgtcatgaacgctggaaatgggcgaagggggaatttgtgaatatttcgggagttcaatctgttgatcaatgcttatattgccattaagcactattcttttgaaaatgagcagcggtttgcttctcagctgttttgatgctattctagaaagtctcgaagatgggcaggagtttgttcttctgccgttttgattgt

SEQ ID NO: 69653 - DNA, 682 bp, Zea mays
  unsure (1)..(682): unsure at all n locations
  Clone ID: MRT4577_163516C.1
tgaattcggcacgaggcctcatccgccgctgcctactccccatggcctcagcgaacaacgacgaccgcgaggcggcgggcatcctgcggctgctgatggggatggcggcggcggcggcgcccgcctcggcattgcctcggggcggcggcctgatgatggtgcagcacgtcatcctcgacgtcaacggggaactgttctcgggcggggtcggcggcggcggcgtgccgccggcgtcgaaggccgcgatcgccgcgctgaaggaggtgaaggccggggagggcgaggacgcgctgggcgagtgcgccatctgcctggacgcggtggagggcaccggcaaggagatgccgtgcgggcactgcttccacgggcgctgcctggagcggtggctaggcgtgcacggcaactgccccgtctgccgccgcgagctgccagcgccggccaaggaggaggaggaggaggacagcgcggcgtcggcggagggcggcgaggaggagaggcggaggcccagggccgcggtcgtcgtcagctacctcgtgttcngaggcgggcgggccggaggtgcagcaggagcccggagagngaggagccgtggaacattagaatagaggatgtggattagcattgatcactttgccattggntttcagaatggtttgatggcggaggagggtatgtacatact

SEQ ID NO: 69654 - DNA, 152 bp, Zea mays
  Clone ID: MRT4577_163517C.1
gaaatgcacagaatccgacttaattgacactcccctaacattgcgaatacaggaattcatcaaaaaaatctgggggcagggggtgctatttatacattcatgaaagggactgcaaatagcttgaacacaaacaggacataagcttatggtgc

SEQ ID NO: 69655 - DNA, 155 bp, Zea mays
  Clone ID: MRT4577_163518C.1
gatatagccaagctccggtctaagtccacagtatggtgctagtgaccaacacgttatttgactaccagaaatcgggcaacctacatatcaactgtcggaaaagatggctcctcaacgctattgagactcggcagaatattcggtcacgagtttga

SEQ ID NO: 69656 - DNA, 241 bp, Zea mays
  Clone ID: MRT4577_163519C.1
ttttctcataatcaccaggcggttaaatttggccccggggaaacccatttttttaattggcggtttccaaacccggtttggggaccgctggcgggttaattttccggggaaggatcagccaaaccgaatgatctggaacccgccttgtcccatgaatccccctttttttcccggggcccctaatccagttccggccggaaaacgtgccggttttcctgggccaaccctgcaaaaccctttt

SEQ ID NO: 69657 - DNA, 321 bp, Zea mays
  Clone ID: MRT4577_16351C.1
gctatgcataggacatgactcgttgcatgacagatgaggagtctggacagcagagtctagggtgcctcaaccccatgctcgtgaagcgtttcacggagttccctccgaggagcagtcttgaccctagcatgtacgtctacaacaccaccaccatcatgcacgcggacctagagaacaagctcgatgacctgacggtgcatcaggcgctgtacggaaacctgctatacatcctgtaccacaactacaacttcatgccgatcctgttcagggtgaacatcctgtaggacaactttatatactccaccagtaccgtgctattct

SEQ ID NO: 69658 - DNA, 387 bp, Zea mays
  Clone ID: MRT4577_163520C.1
aataacatatgggtgaagggtgttttttttttttaatttttcattaccggccccaagggggaaaccggaaaatcccgaccgggaccacgggggctaccaattttcacaaaagaggggtttaaaaaaacttgggggaacaacagatacaccagcacccggaggaaaaatggtaaccgatgaaaaatccacaaacaaacacaagcgcaaacattaagctaaaaaccggggccccctaaggggggcaagaacccaaattaattgcagtctcccaaagaacgcctttgaagaagggaaaccaccggggccaccacaaataaaaaactgcaaaaaacgccgagaaagggggctttctttttggcccacaggggggtttttttttttcccctg

SEQ ID NO: 69659 - DNA, 935 bp, Zea mays
  Clone ID: MRT4577_163521C.1
ccggccgggatccagcaaacctccttccatcaataaccagatacgactttgtctcctggtttactacatctcaagacgatctctatagttaccaacgatcgcgatagctcgcagcacctatcttagatacccccttctacacatcaaaaatggctcttaagcgtatcaacaaggagttgactgatctcggccgagaccctccttcatcctgctccgccggccctgttggcgaggatttgtttcactggcaagctacgatcatgggtccttctgactccccttactctggcggtgtcttcttccttgcgatccacttccctaccgactacccttcaagcctcccaaggtcaacttcactacacgcatctaccaccccaacatcaactctaacggaagcatctgcttggatattctccgtgaccagtggagccctgctttgaccatctctaaagttcttctgtccatctgctcaatgctaacggatcccaaccctgacgatcctttggtacccgagatcgcccatgtctacaagactgaccgaccccgatacgaggccacagcccgagagtggactcgaaagtacgccatttaaatgacgatatggacgaaggcggttggaccttgggtcgatttgttttccctatcatgagcgacgtgaaacgatcgagtggaagcttcgcacggcgttgcgatatgactttagtcggcgtgacctagaaggatgtttttgcctgtatcgaggcttcaactacggttgacgagacagcaagcgacgctgaagggaggaaagacaccagacaaacagactagttattaagggatatcatgcagctggattttaggtttgcattgacgatgtgtttttggcatccagaaacaggcagcgtatacaatttgtctctttgaccaaaaaaaaaaaaaaaaaacccgcggcc

SEQ ID NO: 69660 - DNA, 605 bp, Zea mays
  Clone ID: MRT4577_163522C.1
ataatcatggatgaataagaataatattgaattacatttgtaccttcggcttgacagaaggcaaaagtacaagcgtgacgcacaagcgagtacaagtcagcgtgaacagtacgggggtactgttcatctatttataggcacagggcgcagcctgtgtgaaattacattcatgtccttcatgttcactattggcttaagaacaatctattgaggactaaatagccttttcctccttaaatcagttcccttttctgctactgagccgaagctccctttcgcgcagcttcggcactggttcaaccttcgtccgaccctgctttccacattttgtacagcttcatcccgagtccgaagatttcgtctcgtcgaagccgtcggcattctcgcctgctggagcgccactcgtcgccgagatctctcagcctgctctgccgtttcccctgcccggagccactcccatgccgccatagccgaactccctcctcgtgcccgcaccgtaactccgcccagcgctccatgccctcgtcgcgctgtcaactgccgtcgcgtctccgctcgccgtgctgtcgtccccatgccgtgggccagtacttgctctcgtgccg

SEQ ID NO: 69661 - DNA, 215 bp, Zea mays
  Clone ID: MRT4577_163523C.1
gcaaagctgagttgctgcgcgttggcggtctttagagatggctgtagctggtgtcgccccttctgggtacaagaacagcaccagcaccagcattggtgccgcaaagttgcatgatcacatgaacgagctacagattagagatgataacgaagttgcagcaaccataatgaatgggagagggaccgaagctgggcacatacttatgcaccactact

SEQ ID NO: 69662 - DNA, 537 bp, Zea mays
  unsure (1)..(537): unsure at all n locations
  Clone ID: MRT4577_163524C.1
aattcacttacttgatctcaacaacattttgtgtcaccatgccaggaagaaaccagaagtggcatggtaagcattgccagtccaaccacacctctgcgaagcattatcccatcactggaaacctccacaaagtgtgtttgctaaggcaaatggcatgtatctccatctaatgaacatacaaannnnnccctgcctgatgttaagtaactacaggtaccaggtagactacaagtctacaactacaacattacataacagggatggaacaattacactcaaatgaacacttgaacagcaagagtcggcctggctaatcatagccccagtaaaccataacaacagttaaatcatccgtccaagattgtccaccctcaagaagtgcatgttgtgcaaattccccaatatatcctcggatgcatcaacatcgatatgaaagttgccgatatcttcaactccgccagcaccgctaacattaaccctaccagtgccatctgtagcatgtgctgcctcatttatgttaattctcctcacctcctc

SEQ ID NO: 69663 - DNA, 1468 bp, Zea mays
  Clone ID: MRT4577_163525C.1
cccacgcgtccggttctagatcgcgatctagaacctagttctagatcgctcgcttcgtcggggtcgctcgccgtcgctctctctgctctccaccatcctcctccccctcccctcgacctctcatcctcctcctgcttccccgcccggtcaacccataatccaaggcatccctgtgctgatggatcgattggaaatgcaggacgactcgaagagatccaataggcccaaatattctaagtttacgcagcaagagcttccagcatgcaagccactgctaactccagcaattgtcatttccgccttcttactggttggcatcctattcgtcccaattggtctcgcatcgctttctgcgtcacaagagattgtggagctggtagatagatatgatacaagttgtgtgaccgtggctgacaaagttgggttcattcagaacactaaaacggacaaatcatgcacaagaactctaactatccctaagcatatgaagagcccaattcaaatatattaccagatcggtgacttctatcaaaaccatcgacggtatgtgaaaagtcgcagtgataaacaattgcgatataaagatgctgcacacttgacaaaagattgtgagcctgaagtttatagtgctggtggtgccccaatcgttccatgtggcctcgttgcttggagtttgttcaatgatacatatacaatttcggtcaacaagaaagctattgtagtgaacaaaaaggatatagcctggcagagtgacaagaagaaaaaatttggcagtgatgtttatcccagtaactttcagaacggaaatcttataggtggcgctaggctaaatgagagcataccgctaagtgagcaagaagatctcattgtttggatgagaactgctgccctcccaactttcagaaagctttatggaagaattgagacagatattatggaaaatgatgaactcacagtggttatacagaacaactataacacatacagttttggagggtcaaaagcactggtcctctcaactacatcttggattggaggcaaaaataatttcattggtttcgcatatctgattgttggtggtttttgccttttccttgcactggtttttgtagttctctacatgattaagccaaggactcttggagacccctctttcttgtcatggaataggggtaccatggactatccaagctaatacatcgaaacattctctttataaaaatagtggaaggacccattgccaattggactgcactgcagagtctcatgcattgctcacctcaaagaatgacactgcaaacaaaggtggaaacgatgttactcctatctgttacggatgcactacctgtgtctgataaaggaaagtacaattctagcatatgatacctcaaacttgattaattatagataaaagaagttcagcttgtgtttcagaaacgtcatgctgagtacaattctagcatatgat

SEQ ID NO: 69664 - DNA, 281 bp, Zea mays
  Clone ID: MRT4577_163526C.1
cccctaataaaaaccaagccacggaaacacgccgagggggggttataggaggaggggggggcacaacaccaagcccgggaaaaaggcccgcgcggcgaggagaatgcagacaccatgcagaccaaaggggccaaaagaaaaaaggaagaccaaaagggcagggcaaagcaccacgccggcacaaacgaaaagagggaggagcagaagcacctgacgccggcacgagggaacacagggacgaccagcgagcccacggccacctggcgcgaagggacccccaa

SEQ ID NO: 69665 - DNA, 248 bp, Zea mays
  Clone ID: MRT4577_163527C.1
gggccccgggggtccccccggtatttccggcccggaccttggagcgcttccagtttttttttttttgggtgctttaagagttgggggtaaaaattgcaatgcttttttcttgggtaaaatttttttcttttaaaaatccaaaaaaaaatttggccgggagaaaaaatgtgtaaacccgggggttcttaatggggggataaaccaatattatttgggtggcgtttacggccctttttcaagggggaaaa

SEQ ID NO: 69666 - DNA, 660 bp, Zea mays
  Clone ID: MRT4577_163528C.1
gccggccgggtcgcgattataattatctttcccccccaactgtttagggcccgtgtgggtcccgaaatcccccccccccccctctagtcaactaacacgacctttctccacagtttttgcgtttgccttttaacatgctgatggatcgattggaaatgcaggacgactcgaagagatccaataggcccaaatattctaagtttacgcagcaagagcttccagcatgcaagccactgctaactccagcaattgtcatttccgccttcttactggttggcatcctattcgtcccaattggtctcgcatcgctttctgcgtcacaagagattgtggagctggtagatagatatgatacaagttgtgtgaccgtggctgacaaagttgggttcattcagaacactaaaacggacaaatcatgcacaagaactctaactatccctaagcatatgaagagcccaattcaaatatattaccagatcggtgacttctatcaaaaccatcgacggtatgtgaaaagtcacagcgataaacaattgcgatataaagatgctgcacacttgacaaaagattgtgagcctgaagtttatagtgctggtggtgccccaatcgctccatgtggactccatgcttggagtttgttccatgatacatatacaatta

SEQ ID NO: 69667 - DNA, 681 bp, Zea mays
  Clone ID: MRT4577_163529C.1
ccccactttcggtttttttttttttttttttttttttttttttttttttttttttttttttaaaagcaaaagattctgcccctatgatgccccccaaatttacaaaagccctgtctcaaaagcggttcgatcaacatttacgggcaaacagaaagcagctcgatcatttacaggcaacagagtgggatcccactagtataatacattggcccccaaccctagctaaaagccgaaatctttatataatctttaaagattaacagggggggggggggggtatatatatatatatatatatatatatatatataaatagagaaaccccgcggacccacaccaatgcggcaatgcaggaagtagaaaaaaattgagggcgccattgggatgttcccccaccttaagttgaggaaaacatcgttctccagaaaaaaaacttttttaaagttgattttgggaaggggctgctcccgcccccccacaaactacctgcggggggaaaaaaaatttgtttgtttataccctaaccaccattagccgtgtttgaatagggtgaaaaattttctttttttttttaaacaaatacaaaaacccccccacctggcggggcatgttggggttgggctttaatgaccttgggaaaaacaagggcaggaacaaagaccaagaaaacagcgggaccct

SEQ ID NO: 69668 - DNA, 256 bp, Zea mays
  Clone ID: MRT4577_16352C.1
gcacgcgcacgcaagcttaaattctctacatctagagccctcgctcttattttttttttttaaacaaaaacaaacatagggggaggcatgctttgaattagggaaaaaaacgcttattaggcattcatacattaaatgtgaacctgaagacaaatttacaaaatttacagttgcaatgcttaaacaattttgcaaaaaaaaatctgaattacaaaaaaaaaaaccagggtttcccttttaacaagaatttaattta

SEQ ID NO: 69669 - DNA, 566 bp, Zea mays
  unsure (1)..(566): unsure at all n locations
  Clone ID: MRT4577_163530C.1
gaaacacaagctgaacttcttttatctataattaatcaagtttgaggtatcatatgctagaattgtactttcctttatcagacacaggtagtgcatccgtaacagataggagtaacatcgtttccacctttgtttgcggggtcattctttgaggtgagcaatgcatgagactctgcagtgcagtccaattggcaatgggtcctttgttgcatgtgagtgtgtgacgtacaaaagacacatcctcttttggccataaaagggattaatgctgacacaattaataattgaaataaactggactggttgtatcaaatgaacaatgcccactatttttataaagagaatgtttcgatgtattagcttggatagtccatggtacccctattccatgacaagaaagaggtgtctccaagagtccttggcttaatcatgtagagaactacaaaaaccagtgcaaggaaaaggcaaaaaccaccaacaatcagatatgcgaaaccaatgaaattatttttgcctccaatccaagatgtanttgagaggaccagtgcttttgaccctccaaaact

SEQ ID NO: 69670 - DNA, 298 bp, Zea mays
  unsure (1)..(298): unsure at all n locations
  Clone ID: MRT4577_163531C.1
cgcttctatccaatctaccttcaacctctacaagtctaccctaatgttgtaagtacaggacatcnanaccaantactactccaaatctcatgactcattccacatacacaaacttctccaacaaccacaacccaataagcaccaccaccaccaccatcacgtcccctttaaatacttctcccacaacacaccaattccttcaactaattcttctaccaactcttccttttcaccctattaaacgtctatcactagatctaacacaaactccaaatcgctactctccaactaaaaccta

SEQ ID NO: 69671 - DNA, 429 bp, Zea mays
  Clone ID: MRT4577_163532C.1
cttttctttgcggcgacacgtcagggagagcggcgccgcccgtggctaggtctttgtcggggcgcttcgccggcgacgagcatccgccaggtgcccagccatgtcgtccaatgctggggcctccgtcgctcccatcggcggcggcgctgctcgtgcccgcagtcgcagcttcgggagcagcagcagcaacggccgggccgccgacggcaatggcgctggggtgttcgtgagggcgggggccgacaacgagatgtacgtgcgggcggataagatcgacctcaagaacctggacgtgcagctggagaagtcgcggtcccaggtgtggctggagcaccagcggtcgcagcggacggcgtcgccgcggccggagacgccgctgctcgagtgggagatcgacctcgccaagctcgacatccagaaccagatcgc

SEQ ID NO: 69672 - DNA, 267 bp, Zea mays
  Clone ID: MRT4577_163533C.1
cctgccgggccacgctccgcccgcgcctgaccaggatggaacggatcgtgattttgggaaggccatgggagccatgcggtcagcccagtccttatgcatggacatccatcgaagaggtttggttcgggtctctcggcagatctgtataaataggcgcctcccttctccgccattcctaggtcctctgaagcgtctcagttaatcgaggacagcacttgcctgaggatccaggaacaggacagaaacgggggaaggggcaggaggacc

SEQ ID NO: 69673 - DNA, 497 bp, Zea mays
  Clone ID: MRT4577_163534C.1
ggaaaaaatttaaataaattttttttttttttttaaaaaaaaaatgccggtttggggggccctttgggaagaactttttttttttaatttaaaaaatggcccctccaaaaatgggttttttaaagggagggtttaatgaaaaaagttggtttatttaaaaaaattttttttttttaaaatagggaaaaaggttttccaaaatttttttttttataaaaggtaaaaaaattttccccgggtactttgggggggaccaccttaaggggaaatttcaaaaaattggggggcgttttttggggatccgagcttgggaccaagtttggggaaaaaatgggaaaatagtttttccttgggaaaaatgtttttcgttaaaatttctccacaaaataaaacccggaaacataaagtgaaaaaccgggggggccttaagggggagctaacccaaattaatggggttgggctcattggccgtttttcaaggggaaaacctttggggc

SEQ ID NO: 69674 - DNA, 231 bp, Zea mays
  Clone ID: MRT4577_163535C.1
gaagtttggattctctattgcggtctccctcccttaatatttacctcaaggaaacaaagccgacggcgaggctttataaagaattgtgggggcttttacatagccagaattacagtatagttgatagaacaaaaaaagggagctgttcgattctacatcggcaggaccaactttacacgaattttaacagcaaagagacttaatttcattcaagctttaagataaccatta

SEQ ID NO: 69675 - DNA, 323 bp, Zea mays
  Clone ID: MRT4577_163536C.1
aaaaaggctagtacatacaactacaaaacatttacgttttccagtagatctgcaccgatcagaggtacggggtcatccgatcgagaagccggcctctaatgtcacctaccgctaattcattggccgcctctccataaccacggaccaccactaactctacaactccctaagtaactaccgttacgtcctatactccaatatcatcctggatcagtagacacaaagccccctcagatcccgcttcctaaccttctccacggatgaagcgatactgaacgccatccatggcatgaacagcaaggcactagactgccgcaacatca

SEQ ID NO: 69676 - DNA, 707 bp, Zea mays
  Clone ID: MRT4577_163537C.1
cagttgcaaggtgtatctcttcgtattcagaccctgaaatcaacacaagcaatgggggaagccatgaagggcgtcacaaaagccatgtcacaataccccgaagatcattgttcgctgacgccgcctccttggtctttcctctcctcccttcccctccgccgcgatcgaccccaagagcacgaaaccctagccctagcccaacccatcttctccatggccaacagcaacctcccccgccgcatcatcaaggagacgcagcggctgctcagcgagccagctcctggcatcagtgcttcaccatcagaggagaacatgcgctacttcaatgtcatgatccttggcccaactcagtcgccatatgaaggaggagtattcaaacttgagttgtttttacctgaagaatatccaatggctccgccaaaggttcgctttctcacaaaaatttaccatccaaacattgacaagcttgggaggatatgccttgatatcttaaaggacaagtggagtcctgcccttcagatccgaacagttcttttgagcattcaagcactcctcagcgctccaaatcctgacgatccgcttgctgacaatgtggcaaagcactggaaggccaacgagacagaagctgtggaaacagccaaagagtggacccgtgtctacgctaatgatgcatgagctctgcatgctatgactgattgctcagtagt

SEQ ID NO: 69677 - DNA, 778 bp, Zea mays
  Clone ID: MRT4577_163538C.1
ctccaaatatcctgcaatatttcaagtcagcatacaaatctgtatgcaattgctgataaatccttgaattacaatggcaaattgaccaggagtataactgccaaagaaccaaatgaacctgcttgcttgattactcctgatagaggacgaagctctagcctggatgatactatcaaggtgaaagcttgtgacagaaaaaaggatgcagctaattacaatgagaaaacaagagactttcattttcatttggcagaacatataaaggagttggtcaaaccagtatggaaaaaaaggtaatctgagtaaagatgctcatagactggtagtgagaaaatctgtcgagaaggttatgggctcgattgagccaaatcaagtacccactactgaagaattgattaccaagtacatagccacatgtggaccaaagatcgaaaaacttgtgaaggcatatgttgataggcacaatatagcatgtcatccaaccttcaagtacagcagcacttagatgggaggttgaaccttccgtcctaccaatctggttaactctcatttgtaggcccatggtgatactgacaacactgactataccgaatgaaaaatggagaaaattgctggtacacatgtgaatgtgagtggcaaggtgcaatatcttctttaggatatcaggaaggtttgcaattgcacgatccttacttaatggtattttagcttcctatgtattattcgaaggacacaatgctaatgcaaatgccaagagcatgaaggctgcattgccatg

SEQ ID NO: 69678 - DNA, 362 bp, Zea mays
  Clone ID: MRT4577_163539C.1
cttctggaaatgatgcaaggagaactgctctgtataatagagttttgtcagtcctttcaaatggcatcaatattggtgacaagcactttgagtttcttgccttttcttcaagtcagcttcgagataactctgcatggatgtttgcttctcggcagggattgactgcgagcgacataaggaagtggatgggggactttcgagatatcagaaatgtggcaaagtatgctgcaagacttgggcaatctttcagttcctcaacagaaactttaaaagtacacaaatctgaggtggaacgaattcctgatattacaaatggcacaaagtacatattctctgatggagttggaaagatctcagctaat

SEQ ID NO: 69679 - DNA, 312 bp, Zea mays
  Clone ID: MRT4577_16353C.1
ggatgaacgctgacagcgcagcatccgaagagatgggtatagacctagtaggaggcgggaggaacacgaggaccaagcgcactgcgccgaagtgcgacgatgtctatgtcaagctggttgcgaagctctaccgtttgttggtgaggaggtccaagaccaactggaatgctgtaattctcaagaggctcttgatgagcaataccaatacgtcacctatgtcaatgcgctgacttgtgaagctaatggaacgataggacaagaacattggtgtgattgtcggcacagtcacagatgacaggaggatacaagagg

SEQ ID NO: 69680 - DNA, 169 bp, Zea mays
  Clone ID: MRT4577_163540C.1
aaaccaccgccgataaaaatattcaaatatcgcccactttccacctgtcaaatttagtcacatttgagcccaaaccattttttattgtcagaaagccattcaaatagtgtcaccatttgaaattttataataaccgtgtttacctaaacatcattaaaagaaaaaatat

SEQ ID NO: 69681 - DNA, 447 bp, Zea mays
  Clone ID: MRT4577_163541C.1
aactgttgatttttacttaatgttttttttttttttgtgaattctaatttctttttttagttttggaggaccaaaaggctcccccaatgcaaaaaaaaagtttcaggggggggctttgatgtccgcgaggttgaagacccacggggaggagcctcactcaaagaaaaacctggagatgacctaaaaaatgtcatcccccatgaccataggaagagcggcgacaatggttaaacgagacttggggcacctcgaagggacctacaaaaccctaaggagggagaccttatgaattttcttgagctctaaaagcggtgtttcccgtcacgcctgttttacaaggtccccaaggcttttttcagcagacctaaccacaaggggggcggctgatacaaaacgggtagacacggggcacccgaacaaggggaactagagcttgcagttggggag

SEQ ID NO: 69682 - DNA, 900 bp, Zea mays
  unsure (1)..(900): unsure at all n locations
  Clone ID: MRT4577_163542C.1
ggcatgatcccatggtattgtgcaatttctggcgaatacatttacagacaaatcgtgctagtacgtgccacagcgtgcggtcattctaaatatcacctncagcaaggaaatgctagacacaacacaagagagttatgcctctacaagcagcgccgccgtagatcctcactggattttctccatcccgtaggtatcttcagctccactggctacatttcttcttctctctgctatcatctcggtgtatgccttagggtacgagtagagaaatatgtaccaccatgcggatattacaaaagaaaccccagcagtaattacaacagattggataagcacccaactacaggcaacggcaccagttcccgtgagcaatattgtccaaggctgacaccaggcaggcttggtgtcccagacagagtcgtactcgagggacaggtagttgaggtacccgtccatgtcgtccaccaccccgtcctcatcaaagaacgccgccgcgccgttcttgccactctcccccttgcccccaccgccgccgccacctacccgcgccacgccgccgcgcctctggctcctgccgcagagctgcagccttgtttgtgcaccggtggcagcacatgatgagaggaaaggggaaggcgcgaaggccgcggtcgcgtccgcgcgggcgccgcatgggcagcgcggcggcgtggatgggtagagcaggcagagcgcgcccatttcttggcttgtgctagcagtacggcgtcggcctcctcttcctaagctgctcccgtccggcggctcccgatgctgcggttatggccagtgtttgctttgatttcctggcaaatttttgtgccgtacatcatctttgcaattaaaagaatttggccccggccggcctcgaggtacccaatg

SEQ ID NO: 69683 - DNA, 247 bp, Zea mays
  Clone ID: MRT4577_163543C.1
atccattaaccttttctattatcataatctttttccatcttcgcttccatcaccatttagacccgttttcgtataaattcaaccttatctcaatctccgatatcaaacttcatcaaatccactatgccactcctttgatacgacgaccatctactctttctacaactgtaactctctatccacttttttctccaacctatcctttaacttatcacaaagatataattgtttataccctattctaccc

SEQ ID NO: 69684 - DNA, 2134 bp, Zea mays
  Clone ID: MRT4577_163544C.1
gcacagctaggctggctgggccaattggtccagatcagtaacacaaagacgacgatatgaacaaagcaagcacatgacatgattccatggtattgttgcaatttctggcgaatacatttacagacaaatcgtgctagtacgtgccacagcgtgcggtcatttctaaatatcaccctcagcaaggaaatgctagacacaacacaagagagttatgcactctacaagcagcgccgccgtagatcctcactggattttctccatcccgtaggtatcttcagctccactggctacatttcttcttctctctgctatcatctcggtgtatgcctgagagaaggcaccacagggtcagttgttaagaacagggtgaggcggttgccggttaggccaaaggtatttgacatggaagaaatgcttcattggcaggtatgctgcagttagaggttggagctggtaacacagacgatgctcctgaccactaatagccatctcaagatatggaactagaagctttgggagccagctcagcattccaagttttggcatggatgatgagtagtggctaccctataatttgtatatggcaaactaaggtaaatctgcatttattaagtccatttgcagtttgaaaacaccatatgccaaatacaatactgggtcttttttaataaagctatgtcagaggacatggtgtaatgagttgcttaagtgatactacctccgttcataaatctatgacaccgttgacatttttcaaaaaactttaatcaatcatctaaaaagcgaaaatgtagaacagaaattaaattattagataaaatgatgtgcaaaccttagggtacgagtagagaaatatgtaccaccatgcggatattacaaaagaaaccccagcagtaattacaacagattggataagcacccaactacaggcaacggcaccagttcccgtaagcaatattgtccaaggctgacacctgaaaaaggggaaaatatagttgtcttgattataacactttgagcatagaagctaagcttatagaagaaacgttatcttcacatatggccaaactcgtgatgtttggtaaaaaatggcaacatgagaagaggtgtggaaaaatctaatagctcctttttagactgtagggcaccattctcacagctatggccattagttcatgatgacctttggaagctgaatgatgttattgtgtacaagaaagacaggcaataaaaattatcatcaattacatcatcatgcaaacaaaaaaaaactgaaagggctaaatcatggagctgacactagaacataatttggtgagctattcatttaaataaatatataagttcaaaagagatttatctattgtgttagtacacacgacattcaaaaatggttggcagagccaatgttgataataatagtaaagtaatttagaatcttttttttcttttaaacgaacaagcaggaggaacaatttggaatctagctacatctgacaataaacacagctacgataacaaatttgggcaatctctacgatatgcgttggaaaaaaaccatgctaaaccatcataatcttcgccagtattaatcactacagcgtggagcaagaaccaactaccggcaacggtattgtccagggaacgcaccaggcaggcttggtgtcccagacagagtcgtactcgagggacaggtagttgaggtacccgtccatgtcgtccaccaccccgtcctcatcaaagaacgccgccgcgccgttcttgccactctcccccttgcccccaccgccgccgccacctacccgcgccacgccgccgcgcctctggctcctgccgcagagctgcagccttgtttgtgcaccggtggcagcacatgatgagaggaaaggggaaggcgcgaaggccgcggtcgcgtccgcgcgggcgccgcatgggcagcgcggcggcgtggatgggtagagcaggcagagcgcgcccatttcttggcttgtgctagcagtacggcgtcggcctcctcttcctaagctgctcccgtccggcggctgacgatgctgcggttatggccagtgtttgctttgatttcctggcaaatttttgtgccgtacatcatctttgcaattaaaagttttttggc

SEQ ID NO: 69685 - DNA, 482 bp, Zea mays
  Clone ID: MRT4577_163545C.1
gggcacgttagaacgttacattacaacggcaggggggttacagcagcagcagcaaaggatcttgcaaagccttctttgcgcccaccttaattaagcccaaaacctttggcactaaattcatgcaactatgcaaaaagcagctcgccggccggggacctccgaaaaaagcggcaatctcggcctcgcgggagctgcttttgccttctcgttaagggaaaaaaggacctttttttctgggggggggggggagtagaagctaaagctaaatctaggggttcatacagaatgcaagggtacctgcatggcggggcccccccggccgggttattggacgggaagcatcctgcccgggtgcacctgccctgcctaaaactggcagggaaatggcgggcaaaaaaggccgttgcgggtccaaaggtcggcaaaggcgtggagaaaaacccggtggtggccccccaaattgagggaaaggaactggggga

SEQ ID NO: 69686 - DNA, 236 bp, Zea mays
  Clone ID: MRT4577_163546C.1
attaccacagcttattaccgcggtgccatgggcatattgcttgtttatgatgatactgtttaagcatctctcaacaatattaggaattggattcgcaacattgaacaacatgcttctgacaatgtatacaagatacttgtgggtaacaaggctgatatggatgaaagtaaaagggctgtgcctacctccaaaggtcaagcccttgctgatgagtatggtatcaagttttttgaaac

SEQ ID NO: 69687 - DNA, 377 bp, Zea mays
  Clone ID: MRT4577_163547C.1
cgaaatccgggtcgaccacacccttccgccccccttccgcaacggtttggtgtattacttttgttcgttctgatttttaaccggctttttgttttaagaatgggggggaccctctaaataataaactgcatgtattttgtccaatccattaaggaataaattgtggccagcattttggtttacttaaaaaaaaaaaaaattaaataaaaaaaataaaaaaaaaataaatattattaaaaaataaaattaaaaaaaataaaaaaaaataatttatggggttccccttttaataatccaacatatctaccccttcattccaatttttataatttttttttggttctccaaaaaaatattaatttgcccttttttttaat

SEQ ID NO: 69688 - DNA, 444 bp, Zea mays
  Clone ID: MRT4577_163548C.1
acactatagaagagctatgacgtcgcatgcacgcgtacgtaagctcggaattcggctcgagcggcgagcaaggtggtggaactcatatacagtgtcgggtggccgaatcccgaggccgcgctggaccgcgtcgagcgagtcgtcaaggtccacagcatggagaggcgggtggaccggttcaaggagtacatggaggaggtgaagggcagggcggcgaggctgcccaacaagcacccccgctgcgtcgccgacggcaacgagctgctccagttccacggcaccaccgtctcctgctccctcggcagcggcggctcgcacagcgtctgcacgtcgagcctgtgcaacgtctgccgcatcatccggcacggcttctcggcgaccaggaagtccaggaacagcggcggcggcgtgttcaccaccttcacgagcaggcacgcgctggag

SEQ ID NO: 69689 - DNA, 395 bp, Zea mays
  Clone ID: MRT4577_163549C.1
gcgacggctccgcttcataccggcctttctgtttcttcagctccagcaaacatccagggagcagggtatagtctttctaaacgtaccctccaccaaaagcaccacaagcttgaacagaaccccaccagccttcccatgatatacccactccgcctcatagctccaataactgactcctccacatgctcagaagactgctgatccaaaatcctcataagcgagcgctccggctgagctactcaatgcgctgctccctattcatgaaaccactctcaatgtcaaaactattatgcttctaccataaaaacaatccttctttctaccactcttattcagaacacatcatatactaaggatgttcatcattcactgccaacgaagacgctgataacact

SEQ ID NO: 69690 - DNA, 321 bp, Zea mays
  Clone ID: MRT4577_16354C.1
attggctcacattttcctttttcacatagaaacaacaggccacatgaataccaaaggtagaaagaaaaaaaatcgaacacaggcaaacggtaccccccccaatttcaaaaaaagggtcaaatctaaaaccccccaagatttgagccacaaaattaacactaaaattcgttccggcacaaaaccgggccacaggtaaatcacgggaccggggcgggccccaaaaaccaaaaagggggattaaactaagtgggggagagccacacctacggggacaagaagggggacccttactgtcctattggaaaaccctcggggtccccc

SEQ ID NO: 69691 - DNA, 429 bp, Zea mays
  Clone ID: MRT4577_163550C.1
attcctgcttgacatgttacaacacttggaatttggtcgaatctggtgcaaccttattagtctactgttttgcacttcctctacacggatccttgttaatggtgagcctggggaatacattctgcatcatcggggtcttcggcaaggcgatcctttgtcccccatgttgtttattcttgtcatggaggctttgaatgctatggtcagttatgctttcagggaacatatcctgcagccgattgcaaatcaacatgcgaaacattgtatctccttctatgctgatgatgttgttttgttcatgcggccctctcatcaggatatctcaacaatgatcggcattttagacatctttggtcattctacagggctaaaaacaaacatctccaaaagttctgttacacccattcaatgtggagcaaatgagctgac

SEQ ID NO: 69692 - DNA, 891 bp, Zea mays
  Clone ID: MRT4577_163551C.1
tttcgctcgtctgcaaatctgcaaatggctagcatcagcagtcttgcagcacttagcctcttgcttctcgtgagcgttggattaagcgacgccatccgggtggccagatactccagctctcaaggagcgggacagggaggggggaatggtggggcggatcagaacggctcaggttcaggggttgggctcggttcgggatccggtgagagcggtgcggacggcgtctacgtgagtgccggaggcggaggtgagggcggtggctggtcacagtacggtggtactgcttttggtggcgggtctggtacggggtccagttccagccagtatagctcgggatcatctttcggtaatggcgggtctactcttgccgggggcatcggtggcggcggcggcggtggacagggctcggagaaccaaggctccggtggctacggtaccggcggtggcaccggatccggctctagtgaggctagctccggcgacccgccctcggccacaccaccgtacgcaagcgcagatgcttctggcaatggtggtggcatgggcggtggtcgcgacggtgggactggtggcggtaaaggccacggatctggattcggcgaaggacagccttaagagtttcctatcagattttcaaagctggaggccaaaagatgctatttcattttcatttgctttgcgtacgttgatttttttatagttttacttgtggcccttttttgtacttctagttctagacaggaactaataatggcttccagcaaccctagctagccatgacctagcaatgcgagttcaacagatcagatgtttgaagattattgtgtggtcattattatagtaactcattgtgttctatgtgtaaaaaaaaagggcggccgctctagagga

SEQ ID NO: 69693 - DNA, 2126 bp, Zea mays
  Clone ID: MRT4577_163552C.1
gatatctcagctgtaccagtgcctcttcctgcgatctggtcactggtattttgaccactggtgcccactgcccagacccggtgctcgccttctcccctcccctcaatctccagcctctctttctcgctcgctggccacccgccgcaccctccccatcaggccagcagcgaggaagaatggagtacgagaggattcatcagaaagcccagcctggtgctctttctccaacaaagctgaggatgaagatcctgggagcccacaatcgagttagagtcatcaccagcaactcgtcatcgcggacgtcgcctgcgaaaaccatcgaggcttcacaggcgcagaacaggctactagtttgtgatgttcttgaagaagtttcagacagcgcagatagcacaaaacacccgtcggcaactaacaaaaccgaagccgtagaaaaggttcaaaaggatccagcagtggacatcagtcaagtgcagaacgcttccaccagttcggctgctaagccagcgacaggcagctcgagtatgatacagatacacccagtgagacccgcggaagaagacagcactaccgaatgcgacagtggtctcgacaacgccagcactagcagcttcgagttccacggagtggagaaggcgacggcggcgacgcagaatccagcagccgggtacttgtccagacagacttccatttcctccaagtggaatgacgcagagaaatggatcgtgagccgccagaatgtcagtcagaagaacaacgtcgccaagggcgcgttgcagaaccagacagtaaaccagatgagctccgccgcagccaggggcgccgttgtgcccaaaatctctgctcgtcccgtgcagaaaatgaagagagtgaatccagctttgtctgctccgcgcagcatactggagaggttgtccttcgcttcgtatcagcctaagttggttaggcatgcagatgtctgtccagttagtaacgctggtgctaactcagagcatcacaaggcaactgatactggttcatcgattgaagtgaagccctgcaacgatacgaatgatattccaacagtccagtcgtcggtgtccgtgagagatgtgggcacagagatgactccaatacctagccaggaaccttcaagaactggaactccactagggtcaaggacaccaactcgaagccctaactgttcagtaccgtcaacacctgtaggggggaggtcaatagcatctcctcctggagaagactgcacagacgatggcccatttttccacaggaaatgcggcgtacatgcaaatgaattgtcagatactgagacgaggcttaaaacaaggcaagaaatcgctgcgcttggcatacagctaggaaagatgaacattgctacgtgggccagcaaagaggagctagagctagtctctgcggcaccgagcatcgctgatttggagcgcatcaggaaggaatatgctgctcgtgctgcatcgtatgaggaggcagaaaatactaaacatacagcaagattcaaaaaagaagaggtgaagattgaagcttgggagggtcgtcaaagagcaaaaattgaatatgaaatgagaagaatagaggaatttgctgagagaatgagaagtgaggccatggaaaagatggccgaaaagctagagatgacgcgccgcatagccgaagagaaacgagcttcggccaacgccaaaatgaaccagcaagcagctatagcggttcagaaggccgagaagattcgccaaacgggacgagtcccaggatcgagtatcctacgctgcggtggctgcttctgtggaccgtagtagatcatacataggattcgacagctagtatgttggtctgggatatatagtggtgggaaacctgaactccaccctctacaagtcagcattccttgattttagcatgaaaaaaggaatgtctctaaggtattcagatgcaaacgtgttcttgtttgtcatgtatgtaaattattccaatgattttaacttgggtcggtgtacaaggtaaccagctgttcgttggttaacgaagaagtcacgaatcgttcaaaaaaaaaaaaaaaaaaaaaaaaaaaaaaaaaaaaaagaaaaaaaaaaaaaaaaaaggcccctagggcc

SEQ ID NO: 69694 - DNA, 393 bp, Zea mays
  Clone ID: MRT4577_163553C.1
taacctcggaattcgctctagctcaacaaaaacttttttcacacgtctcatgttttgaacttggggcgtgccgacaacgccagcttacgaccacaacttcattatttttcctgtaattatctttaaatacacgaatcttatctcgtcaatctcgtaaatgtcttacgggcattttcttttcacattctccgatgaagcataccaatctagaacgaaagctctgtctcttatccaatggcaacaacaatctgatgtccctaccatagcacagatctaacagtaccattcctatcacaggattatcaattctaccgcttcaaaatataatattgatctactgttcagcaatgattagttatatttacaatgcgcctataaaacttttccaaacaa

SEQ ID NO: 69695 - DNA, 411 bp, Zea mays
  Clone ID: MRT4577_163554C.1
cggacgcgtgggaaaaaaaaaaaaaaaaaaaaaaaaaaaaaaaaaaaaaaaaaaaagaaaaaaaaaaaaaaaaaaaaaaaaaaaaaaaaaaaaaaaaaaaaaaaaaaaaaaaaaaaaaaaaaaaaaaaaaaaaaaggggggggccgttttaaagaatcaaagtttacttcccgttgcttgcaaagaaataatttttttttagggccacctaaattaaattaactggccggggtttaaaaacgtcgggattggaaaaaccttgggtttaccaaatttaatggctttgaaaaaaatcccctttttgccagttgggttaaaaaaaaaaaggcccgaaccgatggccttttcaaaaatttgcccaacctaattgggaaatggaaccccccttttatcggccatttaagcgcgggg

SEQ ID NO: 69696 - DNA, 405 bp, Zea mays
  Clone ID: MRT4577_163555C.1
ccggccgggaaattatatatcgagctaagcagctaagatatgatctcctatctcctactacacaaggatttattgagcaaataggcaaagtctacgactcccataatgaattgtataacacagaacatactatatatgaatatgaaagagaactttattactttcctcaagatattatagttgactgcttaagcgttttagtcccccaaaagactaagagaataaatgattataagaataatataaaataaatattacgtcactactatactatgatttcataaatcaccatgccaatagtatagtatggatggacacaatagtatgatgtatgaactgaagcgattgcacagtaactacgattactgtattcattgcaaaaaaaaaaaaaaaaaatttgcggcc

SEQ ID NO: 69697 - DNA, 329 bp, Zea mays
  Clone ID: MRT4577_163556C.1
ctcgagggccttggccgggccggctaaaaaaaaaaaaaaaaaacaaaaaaaaaaaaaaaaaaaaaaaaaaaaaaaaaaaagaacaaaagatcattgggcccttgcccgtggcggcccttgagctctgggtttagttacgtttatggagggttcctgggtgactttgttctccgatgactattgccgctacctgcgggccaacagcatacagtcacaagcccgcagagcctaaagcgggggggccctaagagtgagggctgtgaggtcaatggcgtgtttcaacttgggaaatttgccgtgcgcccacctttcaagtttcggccaccaaa

SEQ ID NO: 69698 - DNA, 756 bp, Zea mays
  Clone ID: MRT4577_163557C.1
ccggccggggcggccatgccgcttccgagttccgacgctcccggctccccgctgggctctctgtcgtgccgccaaaatttttgccgcctcgtctctcgtctcgggcaggtaaggccgtaaggggattcttccggcgaccggcgggagctcggagaggcggcagccgatttgacgattccctgattcgtgctgacccgtcggtgtcatctagacgaattcccttccccataatgacaacaggtgccaaaatttcatccaagtcgtccttctctagtgttcggttggttcgttgtagggtttggctgggactaaaggtatttctaccttgttgcctaattgtcaaagtaaccattaaagtatagagtgcgtgttttaggttgtggtcttatccttttttttttcagtgcaaaagtgatttgtaacttatttttttagatgtgtgatgttttctaagtgtctttttatcttctttttaatataacgatacttagctttcccttccaaaaaggccatcctacagtgcggtagttgttatcacttatgagtgctgtctttcgaccaggcaggatgcccgaaatagagtttagctgtgctttggcttctatgtccttactttgtaggacttcagctttatttaacacgttcaaacgcacggttcatgaaagacccatattcctgatgcatctaatatataatcaacgagcttgcattctcattcttttatggatccatagttgacgcccgaactaccttaga

SEQ ID NO: 69699 - DNA, 345 bp, Zea mays
  Clone ID: MRT4577_163558C.1
cgggctcccacttccttcccagcagctacctgttcagccccaaggacaagagcgacgtcatggtgtcaaccacctgctggtgcatcatgctcgcctccctcctcgccatggcgtgcgcgttcggcccactccaggtgctcaagatgtacggcatcccatacctggcgttcgtgatgtggctagacctggagacgtacctgcaccaccatgggcaccatcagctatctctgccctggtaccacggtcaggaatggagctacctgcgcagcggccttaccacggcggacagggactacagctggatcaacaacgtccaccacgacatcaggacccacgtgattcatc

SEQ ID NO: 69700 - DNA, 242 bp, Zea mays
  Clone ID: MRT4577_163559C.1
ttctatattatccagaacatgcgcccggaccggacctttacttcgggggcggggcgacacacctacaaactctaggcaggccccaatggagcaggctctaccttcgccttctagaccgatactgcctcctgtacgccaaactctctgcaacgacactgagggcctcttgagacctgcgcgcgctctgcacgctctacaccacgctgcggcccggctctcgacaggacaagatcgatcgcatc

SEQ ID NO: 69701 - DNA, 213 bp, Zea mays
  Clone ID: MRT4577_16355C.1
atcctccgaaccgtaggtgcgggggcgatccatggacacccacatcgcacccgcgaacggggcggcgtctaaccaaacagctggctgcccggcgtaggctccggtgtgcccgatggctttcacacctgctcattctgcggagaccctgttatcgggggaggcgtattggggcgccaccttctgcgtcgcctcatgcatttatgcatcaacgac

SEQ ID NO: 69702 - DNA, 612 bp, Zea mays
  unsure (1)..(612): unsure at all n locations
  Clone ID: MRT4577_163560C.1
ccgggcccgggaaaanaanaaaaaaaaaaaaaaaaaaaaaaaaaaaaaaaaaaaaaaaaaaaaaaaaaaaaaaaaaaaaaaaaaaaaaaaaaaaaaaaaaaaaaaaaaaaaaaaaaaaggcggggccggggtgggggcccccggggtcccctttttcccctaataccggggggaaaattaaagggggatcggggggaaagggtggggggtgccattgcctggattcggggggacccccgttatataaaaatatataaatttaaggactttaatttggggccgaacatggccattggccccttctttttttttggtttggcatttccccccctttgggtaatttccaaatggaaagggggggaaaggggaaaaactatttgtttggacatggcaaccggaaattaatcaaaacccctttgcaaaaaaaaaaaaaaaaaagggccctagggccccccagcccccccttttgttccccttaagggggggaaattgggcgcttgggggaaaccggggcaaaactggttcccgggggaaaatgttatcccctcacaattccccaaaaaataaaaaggccggaaaaaaaaaagggaaaccctggggggcccaaagggg

SEQ ID NO: 69703 - DNA, 991 bp, Zea mays
  Clone ID: MRT4577_163561C.1
ataaattcccaattaagcacatgtgttggcactcaatcaccaaaatacatagaaatggcccaagggcacatttccctttcaatctccccctttttggtgatttatgccaacacaacatcaagcaactagaacaagtgcaaaatcactttaaataaaaactcaaattggttttattcaattttggcatatatggatcatcctttgccaccacttggtttgtttttgcaaatcaaactcaaatctctatctctaagtcttccaaaagagattgatcaaagatttcaaaaactccccctatttcccataatcaatacttctccccacaagaagccaacttttgacaagagagacaataaaagcttttgacacaacaaaaactctattctactattttcaaaatctctcaagtggtagttgatccatttatcgctttggcctttattttctccccctttggcatcaagcaccaaaacgggatcaatcttggccttttaacctcattgcctcaccaaaatcttcacttaagagcaaatggcaataagatttcatgatatgaacttggaattagttaccctctcatcggagtgcagtggaagtctttcatggtccaagtccacctttttccctttcaatccatcttcgagactaaatcatcaaactcaagcatatggttagtctcaaagggtcaagttgtaacatatatccccctaaacatatgcatcactttgcaacggacttgtgaggtccagggagtgtttgtacaacttgagcaccacaataagcaacaaaatgcagaatgaacatgatcaaaggcataaacacatgtatgctacaattcaatccaagttccgtgaatctaagacatttagctcactacgcaacctgcaaaaggtcttctcatctagaggcttggtaaagatatcggctagctggttctcggtgctaacatgaaacacttcgatatctcccttttgctggtcccacgcgtccg

SEQ ID NO: 69704 - DNA, 1393 bp, Zea mays
  Clone ID: MRT4577_163562C.1
gaataccatggtgttttgctttgcttttcttaatcccgtttgcgaggaatctccacaacttggagtctcttgcccttacaaagatgttcacaaagaagcacggagcaagggagggattagcaactcacacaagacacaaagatcacagcaaatacgcacacacagaacctagacttaagctcgaatggctagcacactagaacggagctcaaatcactataatggcgaacaagtgcacaagaatgatgtgtgagtgatcaatagtgctcaaaggatgcttggtgtactcctccatgcgcctaggggtcccttttatagccccaaggcagctaggagccgttgagagcaatctgggaaggcaattcttgccttctgtcgcgtggcgcaccggacagtccggtgcacaccgtacactgtccggtgcccgatttctttccttaactaccgcagccgaccgttggcagatccgggagccgttggcgcaccggacatgtccggtgcacaccggacagtccggtgcccccttccgaccgttggctcggccacgtgtcccgcgcagatcgcgcggccgaccgttggccctggccgaccgttggctcaccggatagtccggtgcacaccggacagtccggtgaattttagccgaacgccgtcagcaaattcccgagagcggcctcttcggccgaggcagcctggcgcaccggacactgtccggtgcaccaccggacactgtccggtgcaccaccggacagtccggtgccccagaccgaaacagcctgttggttgtacacagccaactttcttctcttccccttcttcctgtttctaatacttagacaagtatattagtacacaaaaccaatgtactaagacttagaaacatacctttgctgtagatttgcactttgttcattcatgggcattggttcacatctaagcacttgtgttgacacttaatcaccaaaatacttagaaatggcccaagggctcatttccctttcaatctccccctttttggtgatttatgccaacacaacataaagtagatagaacaagtgcaaaatcacttcaaataaaaactcaaattggttttgattcaattttggcatatatggatcatcctttgccaccacttggtttgtttttacaaatcaaactcaaatctctatttctatgtcaaacacacatgttgaggcataaagagagtcattccaaaagagattgatcaaggatttcaaaaactccccctatttcccataatcaacacttctccccacaagaagccaacttttgacaatagagacactaaaagcttttgacaaaacaaaaactcacaaaaactctattctactattttcaaaatctctcaagtggtagctgatccatttattac

SEQ ID NO: 69705 - DNA, 1523 bp, Zea mays
  Clone ID: MRT4577_163563C.1
agaagaaactgggtacactaatatatcagctcgtgcagatagatcaaaaaaaaaccctggtagcctggcctgatcctgcatgcatgttgcatgcccatgccaccacaccacaagtccatgctcatctagtctagaagaagcaatgataggaacccccagaaacattcagcaacaacctgacgccgaggtcaaccccgccccttgcatgccccccttccgcgcggtgacaccatagctgacgtccagctagcggctcgctccgtcgcacaggattattattgccgtgcttctcaggcctcagttcgctgacgtccagctttgttgaagatttgcagtttgttcatccatgggcattgatttacatttaagcacttgtgttggcacttaatcaccaaaatacttagaaatggcccaaaggcacatttccctttcaatctccccctttttggtgatttatgccaacaccacataaagcaactagaacaagtgcaaaatcacttcaaataaaaactcaaattggttttgattcaattttggcatatatggatcatcctttgccaccacttggtttgtttttgcaaatcaaactcaaatctctatctctaagtcaaacacacatgttgaagcataaagagagtcattccaaaagagattgatcaaggatttcaaaaactccccctatttcccataatcaacacttctccccacaagaagccaacttttgacaatagagacaataagagacaataaaagcttttgacaaaacaaaaactctattctactattttcaaaatttctcaagtggtagctgatccatttattgctttggcctttattttctccccctttggcatcaagcaccaaaacgggatcaatcttggccctttaaccccattgcgacaccaaaatcttcaattaagagcaaatggcaataagagttcatgagatgaacttggagtaagttaccctctcatcggagtgcagtggaagtctttcatggtccaagtccaccttttctctttcaattctcctttgagactaaatcaagcaaactcaagcatatggttagtctcagagggtcaagttgtaactcatctccccctatacatgtgcatcactttgcaacggatttgtgaggtccacggagtgtttgtacaacttgagcaccacaataagcaacaaaatgcagaatgaacatgatcaaaggcataaacacatgtatgctacaattcaatccaagttccgcgaatctaagacatttagctcactacgcatatatatgtgtgtgaatatgtttgtatggattcgagttagggaaggagaagaaagcgaagtagaaaagaacccggatgtttcttaggttttcagaggattgtggttgtattggatgtgtgttgaaaatgcctcctcgcaaagagtgtatggtcccatgcatgcgatgtgtgatttttgttggtgaatgcgaaataagtttagtgtttcaaaacggttaattgatagtctctgttagtgctattgtgttg

SEQ ID NO: 69706 - DNA, 582 bp, Zea mays
  Clone ID: MRT4577_163564C.1
ttttttttttttttttttttttttttttttttttttttttttttttttttttttttttttttttttttttttttttggcccaaaaatggctttcgggaaaatcttttattgggaccccccttttcaggggcccccagaaaacctaaccggcgaacaacaaaactaaaaaggggcaaacaaagttaattctttccccccccccaggttaaccaaaaatctaaaacccaaaaaaaaaagggggggaaaagggaccccccaaaccaaaattaaagggccccttatgggggggcttaccccccccccaaaggaaaccaacccaattttatcccccccaacgggccccccaccccattcgaacgggtcgcccccatttccaccctgggacccccactatccacccggggggccccaaacccaaattaattggctttttccgggggtggaacaattggtcccccctttttggggaagccccccttttggggggtttcaccccctggaccggggctataatggacccaaccgttgggggaccaaaaaaacccggtctgctggcccttggttttggctccccccccgagg

SEQ ID NO: 69707 - DNA, 558 bp, Zea mays
  Clone ID: MRT4577_163565C.1
atcccgtggttcggccaagaccaacgcttgcctactccacgttgtggcgtcccaatggacgagggttgcaatcaacccctctcaagcggtccaaagaccaacttgaataccacggtgttgctttgcttttcttaatcccgtttgcgaggaatctccacagcttggagcctctcgcccttacaaaagatgttcacaaagaatcacggagcaagggagggattagcaactcacacacgacacaaagatcacagcgaatacgcacacacaaaacccagacttgagctcaagagactagcacactagaacggagctcaaatcactagaatgtcgaataagtgcgcaagaatgaagtgtgagtgatcaacaatgctcaaaggatgcttgggtgtactcctccatgcgcctaggggtcccttttatagccccaaggcagctaggagccgttgagagcaatcagggaaggcaattcttgccttctgtcgtctggcgcaccggacagtccggtgcccgatttccttccttaaatagcgaagccgaccgttgcggatttgagagccg

SEQ ID NO: 69708 - DNA, 928 bp, Zea mays
  Clone ID: MRT4577_163566C.1
ggaccctcgaggccggccgggccggcatcccttcctcgccaagaactcgtctcggtctcctctcctgtaccgcaagtccacgcgcttcctcccctctcctctctgcctcttttctccctcctcggtgctcctccaccagaaccctagctgccgtctcccactctcgtcgggcagctctctcagcagcacctgcggccgttgtctctccttgcgcggtctgccccagccctgacccccggagatccggggctgttctcggttctttacgcggaggcggaggttggtttctgatctggggatcggttcgtgcggggatgaatacgaggccggtggtgctcgtcttcctcctgctcgtgctcgtcatcacgtcgcagttcgagtggaagcagcagatcggggaggccgcggacgccgacccggccgctgcccgccgccggcagcagctgcacgccagggaggatgccgtcaaggaaaagattatattatcccaggagaaaaatatccaacagcttaaccagcttatcgagagccttcagcgccagctactgcactgccgtggtagcaataacactgttcatgctgctgccgccgttgccacagaagcgagtgaagtcgagggacatgaggtcattgaagatgagaatagacgatgatccttggcgtacatgcttctacgatgccggtacagctgctaaagagcagaacagtcgtctgaatgcttgaattcactgtattgtatatttgatactccgccgactagtggattcccccgaccctgtaagcctgtagagaattgtaattttttataatgtgatttatttaggtcgcggctactaattcacctggaaagttaccttgccattctttcttctgatgatggcgctccatcgatgcttgattgctccctcgaaaaaaaaaaaaaaaaagc

SEQ ID NO: 69709 - DNA, 270 bp, Zea mays
  Clone ID: MRT4577_163567C.1
gggggaatcctggattacacaaacacacacagatttaggggcagatggagagcccagcagcagctagctggccgtttttttcaattaccacaacccaaccggttttcggtcgcacattatatcattttttttgccggttaataaaacaggccagtacgggtggcccgggggggccaacccaaggggccgttactcgcccaagggcccgggtacacttccatcccttttttacggggcgagtcaacgggagggactgcatgcatgcaggca

SEQ ID NO: 69710 - DNA, 297 bp, Zea mays
  unsure (1)..(297): unsure at all n locations
  Clone ID: MRT4577_163568C.1
tactgagagccccaaagattcnagctgtattggggcaagctttgctctctccttttgcgccacgcggtcccctgtccgtcttcggtccaccttcctggtgccggtcttgcctgcctaccacatacaatacagttgtgaccattccagtcacatttcccatgaccgggcccactgcctagcctggctgcctgtcccggcgctccgccgtactgtcctgcttctgctttgcccccctctgcgccaaatgccggtgcacgcaacgaacctatcatccttccattgtttcagccttccggc

SEQ ID NO: 69711 - DNA, 103 bp, Zea mays
  Clone ID: MRT4577_163569C.1
cttttgtcagttgaagaacggttgaatggtttgctgagtagcccttggcaaaatccacaatatagcatttgttggcgcaatgcggttctcaaggcttcagatg

SEQ ID NO: 69712 - DNA, 753 bp, Zea mays
  Clone ID: MRT4577_16356C.1
ctctcacttctgtactctcgcccaacagtgtcggcgtggtagatctccgagcacgtcgacgattgagctgcgccaagccacatgagcatctcgcgtgactcgatgcactagcgccgagccaccgctggaaagcagaacgcctggaggaagcaagcgaaagtatgatgttgctactcagccagccaacaccaagttgacaagcaatacgacagtgaggcaccgccccgtgctcgaggaggtaatgtgcaatggagggctcttctacttgatactggtaactactcatgggcaatagaagctgttacccgcaagacccgtatcctccacgtgggctacaatgaatcagacaatgatcttgtgaggacaccacccttgtgaagagtgtcattgagcaagctgcatagtctgtcgcatctcgagtagtggaacctcactcactatggagctgcacattgcgagtatagaagaatacccctgtctgcactgaacgataatggtgatgtacaagatgctcgatagcatgcatgctgtaggagacaagacaacagcagccatgtgacgaggaaccttgataagcgccaggagggacgtacccttgacgctcacattgaggagcaatttgcccgtggacgcatgcttgcctgcatatcttcccggcctgaacagtgtgttcgatctgatgggtacatccttgagggccctgagcttgagttctacctgattaagctaccgattgaagagggctagagcgct

SEQ ID NO: 69713 - DNA, 179 bp, Zea mays
  Clone ID: MRT4577_163570C.1
acaatgatacatcacaaccctttttatggtgcaagcgtgcggatataccacggaaaacactcactgtgaacacataacaacaacaatattaggtggcaaaatcatacttcttaagtcgacacagtatacattaccactggtacgactaccaagacagccagctaacatcacactgcaac

SEQ ID NO: 69714 - DNA, 267 bp, Zea mays
  Clone ID: MRT4577_163571C.1
gggtaggcggaacaacgctaaccggaacaaaacttaactacaggactggctctttttgaatgaatctacacaggggaataactcatttcccaaaaaaaacctacaaaaacaagcttgttcactcctggagggatgggatggcggcggccacaacggcgacagatttcacgtggaatataaatggacgggcgcaaaaaaggattctccatttctgccacggattgtcgaccacctgctccctgctatttggtccacggcggcccattt

SEQ ID NO: 69715 - DNA, 469 bp, Zea mays
  Clone ID: MRT4577_163572C.1
aaaaaaaaaaaaagttttttttaaatgggcagggggggggggggggcccccccaaaaataggaattacaaggggggtgcgttttttaattaagggaaaagggggggcctttttctttactcaaaaaggggaaggggaaaaaaattggggcacaaaaaaacaaaatattttaggggggcacattttccctgaaaagggggagggggggccttcccaaaacccctaaaagccccaaaaggacccttggaaaccaaaaaaaaacgggggggggcgcccggggaaaaaaaaaaccaaaattttttgcccctggcggggaaccaaaagggggagtttacccccccaaagggttaaggggagggcgggttcccccttcgcggggcattaaaggggggggcccaccggggggcggggggggggggcctaaaacccgcccccttttcccaaaagtaggggtcccaggacgggggggg

SEQ ID NO: 69716 - DNA, 415 bp, Zea mays
  Clone ID: MRT4577_163573C.1
gcgaccaaaccatcctgataaccgactgcgtgggtacagccattgcgaccatgaccactatcttgaacgggcatcctaagaagcgcgggcacgtgtctgctagctagcgagctgctctcttctatcctctccctcttgttgtggctgcaattcctccgcttatactcgaccgcatttcttagcaagtacctacctggcgtctactttgtgctgctcatcttcctgggctacatggtgtacgccacttatgatgtcatccatagggcgcaccacagggacatggactacatcaagcaccccctcacccttttcaccgacttcgtgactgaccttgtcctcatccttctcatcatgctcaacaactcggctgacaagtcggaggacaagaggaggaagaggaggaggtgatgaaaat

SEQ ID NO: 69717 - DNA, 341 bp, Zea mays
  Clone ID: MRT4577_163574C.1
aaaaaaaaaaaaaaaaaaaaaaaataaaaaaaaaggaaaaaataaatcgggggcccctgtggaaggccaagcttaccaaccaatgtatgcaccgtaccaagacccttgtattatccccgacgttctgatcaatggcagggtgtcaacaaggaatatactgagcaaaacatgacgtaatccatatacaatgctgggcagtgataaaacatttaacgactgatgcacagaggagaaatgctcctgctctatcagccttttcaacagagtctcagactgaatgggcttggggaccctccatgaattggacctttaaccgctgcgtgtatatcgggtacacccat

SEQ ID NO: 69718 - DNA, 386 bp, Zea mays
  unsure (1)..(386): unsure at all n locations
  Clone ID: MRT4577_163575C.1
gngaggctgaagcagaaccttgagatattcgactgggagctgaccgaggaggacaggctcaagatcagccagatcccgcagaggaaggttgtccaggctaccagcttgttctcggaagagggtgagttcacgtctgttgatcctgaagaaatgaatattgcagaggaatagcaactgaaaaaaatgttcggcctcgatcggtgttgctgcgtagtagaggagtacttcgtactagtccagatatgaataaggcaatgtttcatcctcagtgtgtttctgtgtgttgatgatgttttccatccccgttcagttcagtaaatattgtaatcataacattcagatgttgcatactccaagtccaattcgaggttatcataatttcgcat

SEQ ID NO: 69719 - DNA, 385 bp, Zea mays
  Clone ID: MRT4577_163576C.1
agacgatcaagattgcaccatactatctcttagttgtctcctataattaaaaaactgagccaattctctaggttgtacatgccctaaggacatcattactaaatgaatatttcttagggaccttattggttatttcttctttagctacagttagacaaaagcagtttctagggagctaattaaaacaatcaagagacgagctcttcgtgaaaagcatgttctacacgactctctatacttatatattatgtattgactgtatttagaatttatacgatcaagattgtatcatactatctcttagttgtctcttgtaattaaaaaaaaactgagccaattctctaggttgtacatactctaaggacatcattactaaatgaatatt

SEQ ID NO: 69720 - DNA, 252 bp, Zea mays
  Clone ID: MRT4577_163577C.1
tctttcccccaaaatttactgcagcggctacgggggatgtttagaaagctagtgggcacatcgcgactacccaagcaagcgaggcaccgccgatcacagatgcagccagcggcgccaacgttcgcttgctgagcaaagactactggctcacttatggcggactcacatggtgacactgcactaaaacttgttggaccagatacactggcatctactggcctaaacacagctggttaggagaccaccaagaaa

SEQ ID NO: 69721 - DNA, 2665 bp, Zea mays
  Clone ID: MRT4577_163578C.1
cattgggatcctcgaggccggccgggccgggatatcacgcatcaaactagtagcaaattaataatccagcgaacacactatactactgagcaaataaagccaccgatgtcatcactcctgttgcgagtgctgctcatccagcttgcagcagtggagtgcctctccgccgcgattccaggctgcctaacgcaatgtggaggcgtagagataccctatccattcggcgtcggcaccaactgctcccgcaaagggttccggatcaagtgcatcaacggcagcgcgggcgaggagattccagtgctgctacctactacgcgctaccagaacatccgggtgctgaacctgtccgtgtcgccgttgccggaggctcgagtgcttcttccggtggcatggcagtgcttcaacgccaccgggggcgtcactgggatctactcgggagatgtggacttcaacccagagggcgtataccgcatctccaacacacagaacgagctcttcgtcctcggctgcgacacctatgcgttcaccaaaggcgtgagggtgcacaacgttaacgcacgcttcccttacagatacttcacggggtgtatcaccgtcagtgtagacgagaaggacccgcgcgacggtgcctgcgcgggcctcggctgctgccgcgtcgacatcccgccaggcatcacggacaccagcatgaccttctcgtctacctggacgcgtgccaaccagaccttctgcccctgcgactacgccttcatcgtggagaagggcaactacaccttcaaggcatccgaccttgtgtcgcacacacccgacaaccgtctgcctttggactggtggaccatgccactgcgtctcgactgggccatccgcgacaacaacggcgactccatgacttccatctcctgcgcccaggcacccaacgaacctgactatggctgccgcagcaagcatagcgagtgcactaattcaaccaatggccctggctacttctgcaagtgtgcccatggctacgacggaaacccctatgtccagagtgatggtgaatgcacgaatatcaacgagtgccaagatccaaagtcacataattgttcaagtggcagcaaatgcattgacacagacggaggctattattgtcaatgcaatttcttccgaagagggcagcaatgtgatcccttaattcctatggctgccgttgcactgttaacaacatttgctgccgtcgtccttggatgtgtcgcaattgttttgcttcagactctaaacaacaggaaaagattcaacagaaatggaggtaaactactgaatgcccagggcataaccacctacaccaaaagggagctgaagaagataactaatggctacagcaaacgccttggaggagggcactttggcaatgtttacgagggcaccatcgtcgacggcagaaaggtcgccgtcaaatgtcctttgcggacaagggtgtcgtcgcaccgctgccattggaagaatttgattcgacctcgccgtgtaccgctaccgcaacagagggtggaggaagatgggtcgttcatgaacgagatcaggttccagttcgaagtcagtcgtcacaagaacttggtccagctcctgggatgctgcctagagaccgacattccgatcctagtcttcgagtttgtcgccaatggaagcctggaggacatacttcatagtgccaagaaaccatgtaccctctcgctgccggagcggctggacatcgccattggctccgcggaagctatcgcctacatgcactcccttgacaatcaaaagcgtgtccatggagacatcaagccttccaacatcctccttgacgatgacctcaatccaaaagtctctgactttggttcctccaagctcctggcaatccatagctactacgttagggcagtggctgcagatataggctacatggacccattatatatgaagaccgagcacttcacattggagtgcgatgtctacagcttcggcgtggtgcttctggagctcatcacgaggagaagggccagctggtatgaacaagatcagcaagggaacaagatcctccccatcgagttcgtcaagtgcttcaaggaccacggtagcggatgtgcgatgtatgatagcagacttgatttctcaggcgaggatactcaatctcgatgcaacaagcgttgcctcgacatgattggcatgttggccgtccgatgcctcaaggaagacaagagggagaggccaaccatggcagaggttgtcgaggagcttaagcgagtcaaggtactactgctgggtacacatatataaaataatggcctgcagctctcaagcgagttcgaagcacgcagatgaatggaagcgaagcaagcaacaagaatggtcggtcagcacatgtgaagcgctgaacatggcggcggtactgatacaagcaataataagggttcctcaactcaaataaatatacatgatttattcttccaataaaacagcaatgtctatctgtaaacatagtaattcgcatgaattgcttcgctttatacttcttaatttgatgtatgtccatacaaattaatagttgacactgttgagtaccaaaagtgacggacagtccgaccttagggcccggacggtccacggtcctacgatttaaaaaaaaaaaaaaaaaaggccccta

SEQ ID NO: 69722 - DNA, 819 bp, Zea mays
  unsure (1)..(819): unsure at all n locations
  Clone ID: MRT4577_163579C.1
accactcagctttcccccttccgcactcctcgccggcagccggcggcggcgagtatctctcctgccgtttccacggaattttccccattgcggccactcttccccttccctcgtcctgcttcgtcgcgccttggctgtgctcctctcttcttcctccgagtccaggtgcgcggtgaacaggcgcagggactgggaggaggtccagatgctactatgctgctgtacttttccccaacaaatccagacctgtgctccgcgctcgtcgtttcacccaagctgcttgccgcggagcttgctcagctccggcgagcaggggaggagcaaaaagagcaagctccaccgcgtcagggcgcatgttttcaagtccaagaaccagtctttgcgctctcaatcccacctggttgatagccacgggggccctgcggataaaatcccgagaaaggattttccttgttccgcagcgccgtcgctgccggacgcggaggcggtcgcgttctggctgcgtttctgccggagggagctcgacgtccggagagcgcacgcggttgccctgcggtcgctcggcagcctgggggtgttcgtctccaacaatctgatcagcgcttatgtgcggttcaacgaggttgctaatgcgaggaaggtgttcgacgaaatgcccgagaggagtatcgtgtcgtggacagcaatgatgaatgggtatcagaagcttggctgccacggtgaggttgcgaggcttttgatggatatgctgatcgctggcgtccaggtaacagcttgacttttgnttgcctgntgaatcttgtgnggagcgatgtgatg

SEQ ID NO: 69723 - DNA, 1454 bp, Zea mays
  Clone ID: MRT4577_16357C.1
cactcctatgggcgattgggatcctcgaggccggccgggcacgcgtccagtgcatgcactactagctctagcttcgcactactagctctagcttcgccattgcattcgcttactggagtacgtctggtacttgcacaactggctatcatggcgccccacattgtcgtcaacaaaaccgtgatcacattcacagcggtggccctgacgattcttgctgtgacaaccatgatggccgaggcccgagacctgtcatccacctccaccggtggctatggcgaggaagccatgaaagtgaggcatcagcagtggatggcggagcatggccgcacctacagggacgaggctgagaaggcgcaccggttccaggtattcaaggcgaacgccgattttgttgacgcgtccaatgccgcaggtgacgacaagaagagctatcggctggagctcaacgagttcgccgacatgaccaacgacgagttcatggccatgtacactggcttgagaccagtcccggcaggggcaaagaagatggccggtttcaagtacgggaacgtgactctctcagacgccgacgacgaccagcagacggttgactggaggcagaaaggcgcggtcaccggtatcaagaaccagggccagtgtggttgttgctgggccttcgctgcggtggcggccgtggagggcatccaccagatcacgacgggcaacttggtgtcgctatcggagcagcaggtgctggactgcgacaccgacgggaacaacggctgcaacggcggctacatcgacaacgccttccaatacatcgtcggcaacggcggcctcggcaccgaggatgcctacccgtacaccgccgcgcaggccatgtgccagtccgtgcagccggtggccgccatcagcggctaccaggacgtgccgagcggcgacgaggcagcgctcgccgcggccgtcgccaaccagccggtgtcggttgccatcgacgcacataacttccagctctacggtggcggggtgatgaccgcggccagctgcagcacgccgccgaacctgaaccacgccgtcacggcggtaggctacggcacggcggaggatgggaccccgtactggctgctcaagaaccagtggggccagaactggggagagggaggatacctcaggctcgagagaggcgcaaacgcctgtggtgtcgcccagcaagcctcctacccggtcgcatgatgaataaagcatatattctacatatacacgaaggcatgcataaaaatggctagtaaggaataaagcatgcaaacacattgacagtacatacatacatagcttaaaattgaatcacaattgtcatgtacaacactccagatatcatttatttctatttggccttcttttcaaagatcgatattctatatatacatatatgtaagggaacaagtttttatagcataataagtccttcgcacctc

SEQ ID NO: 69724 - DNA, 2318 bp, Zea mays
  Clone ID: MRT4577_163580C.1
ggctattattgtcaatgcaatttcttccgaagaggcagcaatgtgatcccttaattcctatggctgccgttgcactgttaagtaagcacaaaattctattaacaccttgttacattacatcattctctttaatttgcacttagcttgttgatccttaattatcatgttctgtttcgtcctaaaagtgactaaaacgacaaaacttttgcaccattttagtcatttttagctctttgtacttggacctttagctaccgggataaagtggccaagggagaaaaatgtaaggctatgagtcgccttgagttgtgatttgcgacaacacgggcgtgagcctatctagcgacttagcgaggtttctccatgaattttttggtgatgttagcctggtttataatttaaaaaaatcatttatagtggtagttttattaataaaactgctattattgtaaacctagtgtctgagaatgtaaatatttatagtggcggtttttaaccaatgtctggccttgcacacgtacgggcggttaaagaaaccatcaataagggctagtttgagaactccattttctcatggaatttctatttttccattgtaaaatgaactaatttttcttggaaaaatgaaaatccattgggaaaattaggtttccaaactagccctaaagatcagttttctaccgtaggtaaaagtcttttgtgtagtgttctgataatttcttaaacattcaattacacaaatagaagaactaagagcgttgcctaggccttaaaaaattctaaaaatgaataaaagaaacaagaagcattatgattttgagttagcaaaaaaaaagatagcagcaaccgactagatcaaaatttgaaaaactcaaatatagattcacggggatagatatgcaataagattcatgctatgttctgttagttgaatggttgaacatgcatgtatctttcttgaattctgtctgcagcaacatttgctgccgtcgtccttggatgtgtcgcaattgttttgcttcagactctaaacaacaggaaaagattcaacagaaatggaggtaaactactgaatgcccagggcataaccacctacaccaaaagggagctgaagaagataactaatggctacagcaaacgccttggaggagggcactttggcaatgtttacgagggcaccatcgtcgacggcagaaaggtcgccgtcaaatgtcctttgcggacaagggtgtcgtcgcaccgctgccattggaagaatttgattcgacctcgccgtgtaccgctaccgcaacagagggtggaggaagatgggtcgttcatgaacgagatcaggttccagttcgaagtcagtcgtcacaagaacttggtccagctcctgggatgctgcctagagaccgacattccgatcctagtcttcgagtttgtcgccaatggaagcctggaggacatacttcatagtgccaagaaaccatgtaccctctcgctgccggagcggctggacatcgccattggctccgcggaagctatcgcctacatgcactcccttgacaatcaaaagcgtgtccatggagacatcaagccttccaacatcctccttgacgatgacctcaatccaaaagtctctgactttggttcctccaagctcctggcaatccatagctactacgttagggcagtggctgcagatataggctacatggacccattatatatgaagaccgagcacttcacattggagtgcgatgtctacagcttcggcgtggtgcttctggagctcatcacgaggagaagggccagctggtatgaacaagatcagcaagggaacaagatcctccccatcgagttcgtcaagtgcttcaaggaccacggtagcggatgtgcgatgtatgatagcagacttgatttctcaggcgaggatactcaatctcgatgcaacaagcgttgcctcgacatgattggcatgttggccgtccgatgcctcaaggaagacaagagggagaggccaaccatggcagaggttgtcgaggagcttaagcgagtgaaggtactactgctgggtacacatatataaaataatggcctctgcagctctcaagcgagttcgaagcacgcagatgaatggaagcgaagcaagcaataagaatggtcggtcggcacatgtgaagcgctgaacatggcggcaataataaaacagcaatgtctatctgtaaacatagtaattcgcatgaattgcttcgctttatacttcttaatttgatgtatgtccatacaaataattgacattgttgaacaccaaaaaaaaaaaaaaaaaagcggcc

SEQ ID NO: 69725 - DNA, 718 bp, Zea mays
  unsure (1)..(718): unsure at all n locations
  Clone ID: MRT4577_163581C.1
ccgggcccgccagncatcacggacaccagcatgaccttctcgtctacctggacgcgtgccaaccagaccttctgcccctgcgactacgccttcatcgtggagaagggcaactacaccttcaaggcatccgaccttgtgtcgcacacacccgacaaccgtctgcctttggagtactggaccatgccactgcgtctcgactgggccatccgcgacaacggcgactccatgacttccatctcctgcgcccaggcacccaacgaacctgactatggctgccgcagcaaccatagcgagtgcactaattcaaccaatggccctggctacttctgcaagtgtgcccatggctacgacggaaacccctatgtccagagtgatggtgaatgcacgagtttttggacaaatatggtcggcggtaattggctgaggaggaggaggggngaggaggagtaggacggcggacgaggcagagcaggcagcgcctcaggacgaccttgtccagcatcaggcggcgcctcaggacgacgacgaccagcagcaggacgacgacgaccaacaacaggacgcctcaggttctggcagctcaagttcgaggagcatctacctgcgaggtcccgcgagtctccctcagcgtcccatagtttgggacaggcgaccgctgattcggccggatgggggagagggtctggacggttgtgggatatgctaggggtcatcgtcg

SEQ ID NO: 69726 - DNA, 817 bp, Zea mays
  Clone ID: MRT4577_163582C.1
atagctcatcgcccggcccgactgttgcagatcgcccccgagaaacccaccaaattcgcagaacctacaccgggtcactcacgcggccccacccggcagcgaggggggcaagggcaaaggcggaggcagtttgcaggaaagcccccgtactattctgcctcgcctcgcgcttccttccttgctgccgttgctgcctgcctcctcgtcctcctccctctcgtcgcctcgcctcggcccagggacggcgacgccaaccggcgagcgggcgggcgggctcatcccatctcctctcctctcttgccggcggggagggtctgcgcggccggccgccattgccgcgtcttcccgagtgtagctctgattggggaagagtggaagatggttgtcaaggagttcaccgttgatctcaaccagcctcttgttttccaggttggccatctcgaggaacattaccaggaatgggttcaccagcctatcgtcagcaaagaaggtccgcgctttttcgcaaatgataccatggagttcttgacacgcacaaagtggtgggctgtgccagtcatatggctacctgtcgtctgctggctgtttgccaagtcgattcggatgggtcacaccattcaggaagtaatcctgatggccctatttggagtgtttgtttggacgttcattgagtacgctttgcaccgcttccttttccacatcgagacgaaaagctattggtcgaacaccgcacactaccttatccatggatgccgccataagcatcctatggactcactcaggctcgtattccctcctgctggggcagcaatcatat

SEQ ID NO: 69727 - DNA, 264 bp, Zea mays
  Clone ID: MRT4577_163583C.1
tcgccgttgcttcctagctgtacctccgtccggtcggtcgaagaagacgccgacgatgaaggtgtcggtgctggcgctgtggtcggcggctgcggcgctgttgctggtggcgcaggcgccgtcggtcgctgaggcctccctccacggtggcgcgggcctcaagctggggtactacaagaagacctgctcgggcgtcgagaacgtggtcaagtaccacgtcgtcaaggccatcaaggcctaccgcggcgccggcgccgcgctcgt

SEQ ID NO: 69728 - DNA, 318 bp, Zea mays
  unsure (1)..(318): unsure at all n locations
  Clone ID: MRT4577_163584C.1
tccttaagtagtggtaacaacgcagagtacgcggggttggcgaacatctagatctaacttcctttattactggaattaaaattaggataagaactggaagaagtgaagttcctaatttatttgctatcgtgtgtgctatgtatgattaccctttgggtagagtacccttggcagcgagtggtgtaaaaaaaaaaaaaaaaaaaaaaaaaaaaaaaaaaaaaaaaaaaaaaaaaaaaaaaaaaaaaaaaaaaaaaaaaaaaaaaaaaaaaaaaaaaaaanaaaaaaaaaaaaaaaaaaaaaaaaanaaanannnaaaaa

SEQ ID NO: 69729 - DNA, 130 bp, Zea mays
  Clone ID: MRT4577_163585C.1
aagaccaaaaaacttaaggacccataaagggggccaagccctttccatatataaccatgcctgggggtccttttaaaagggcaggccacctttcccaaagggaaattaacctttaaaaccaatggccatt

SEQ ID NO: 69730 - DNA, 255 bp, Zea mays
  Clone ID: MRT4577_163586C.1
ggaggttcacctatcgattcgtctcatgagggttaattgcacgcttggtatgttattaacactacctgtcacctggcataaattgttatatcataacacttccacactactttctagcaacaggcatacagggtaaatcctgcaatgcctactgagtgaactcactcacattaatcgagcgaggctaactgactggtttcgagtgacggaacctttgttgcccattccctcattcaatcgcccacccacccttaa

SEQ ID NO: 69731 - DNA, 199 bp, Zea mays
  unsure (1)..(199): unsure at all n locations
  Clone ID: MRT4577_163587C.1
cctgagcgaaagaccttttgtacatatgtgaggggcccaaatcctcnntttctctgttagaagcccatactaatgctagtctagatcttggattgcttcttgcacagttcaaattcatcatattgcacagttcctctcagttatatattaggcattacataatattttcatcaaatgctacttgctaaccgtattcctt

SEQ ID NO: 69732 - DNA, 331 bp, Zea mays
  Clone ID: MRT4577_163588C.1
cccaaacccgggaaaccaaccaaaaaaaaaggccccattcccgttggcggaaaaaaccgtccatgaattataaccctcgggccacctaaaaaccaggggggtttaaaaacattgttttatttcctggcagagcacctaaaaaaaccccctcccccaccccattcaggggttttttcccttggaaaaaaccggggaaggggaaccccctttccttggtcttttaaagagccccaacttgaatcccctgccctggggggggcccccccccggtttattccccctgcccggggggaaccccttcccccacccggggggaaaccgggggccaagg

SEQ ID NO: 69733 - DNA, 484 bp, Zea mays
  unsure (1)..(484): unsure at all n locations
  Clone ID: MRT4577_163589C.1
cgcgggtcgacccaagcctctacactagagtcagtgagtagccagaaccctgttcgccacctcaacccgcgcactcttctcccgtccttcgctcattctccgccagcagtccacaaaagccatgtctgtccctactttgctctctgtcgctgacctcaagagcaagctcggtgggcccgtagtggtcgatggcagctggcacatgcccgccgccaacagagacccgtacaaggagtttaaaggaaacggccatatcccaggagcacgctactttgatattgagtccatcaaggacaagacgagcagccttccccacatgatgccgtctgcggagcaattcgcacagcaagtcggagagctaggcatctcgaacgatgatcatgttgtcgtatacgacactgtcggcttcttctctgcaccacgcgtatactggatgtttaaggcatttgggcacaagaaagtgtctgtnttggatggtggattc

SEQ ID NO: 69734 - DNA, 537 bp, Zea mays
  Clone ID: MRT4577_16358C.1
acctcgaggccggccgggtcgtcctttgcagcctccataaaagccagccgtagggccatagctcctctcccgtttcaagtctctgttgagccaagtcgtgtggttgagagcccgtcgttgtcgggagataagttgtgaggggtagaaggtcaggtgctagaacttgccgatgctttggggttcgtcgaaggacgttaaagagcgccgaagccttggtgagttttctccatagtctgaagttcggcgccgagctgttgcagcaagggtcgacgtcatcgcggtctcgtcgccgcgcgaggttacgagtcatctgaagatcatcctggtacctggaatctcaagtcccaggtcaagaacaggtaccgcaagatgaggcgcatggaggttgctgcgatgtgttcgtgagaggtctaggctgtcgtctcccagtcaactttgggttgctggaccgttgtctccttatatgtaattatttattttgtatagaactcctattatatagtaaagttgtgaaaaaaaaaaaaaaaaaaagcggcc

SEQ ID NO: 69735 - DNA, 353 bp, Zea mays
  unsure (1)..(353): unsure at all n locations
  Clone ID: MRT4577_163590C.1
gcttagcggactctaatctgaacaacggcctccagcccgggcgcagcgaggtgttcttggagccgcagtccgaggagatcaggctgttccggctgagggagttcggcagccgggacggtagcgaggagctgagccaggcgagctggaggagccggagagacctgtgaacagacacactcggtacaaggtcattaacattctttttttttgggggccattctttacatgtaattatcntcgtttacatgattctttcttccttcttacttttcgtttgttactttactcctccctgaggcaattcttggtcctggtggaatagattttgcattttcgttcgggagataagtaaa

SEQ ID NO: 69736 - DNA, 494 bp, Zea mays
  Clone ID: MRT4577_163591C.1
cggccgggatgacacttcccttccatcgcgtgccatctctacagtctacaggcatctcaccgcaaccggaacccgcagccatggggacggaggaggagcacccggacatggacagccaccgaaacgacgctgtcctgctggtgccagtgtcgagcccgccgaaggcgctcgattactgcgcgctcgacctgcttgagcccctcgccgcggacctcggccacgacaagaccaactcgatccactggctctccggcaacttcacccccgtcgtcgaggagaccccgccagccccaaactcttaccgtacgtgaacacctcccgtagtgcttgaatgaagagtttgttacgcttggaactaatccgaaggttgctcctgttgcgaggtatcactggaatgatggagacgacatgagtcatgccatgcgaatgaaggatgcaaaagctacctatgtatcaagatatgtgaagaatgtccgcctcaaagaagaggagta

SEQ ID NO: 69737 - DNA, 225 bp, Zea mays
  Clone ID: MRT4577_163592C.1
gacccaaacaggccccttgtttcctatgccctttgtaaaaattataaaaaaagggaggggacacgagcgcccctgtggctaaaagataaaatcacggttggaccttttgatgtctcctaaacctggggattccaatcctctatctaaggttgactgcgtactgaactattcacaatgtatacatggggtttgaagcaaaaattcatgatgccttgtactaaacct

SEQ ID NO: 69738 - DNA, 399 bp, Zea mays
  Clone ID: MRT4577_163593C.1
attcgcacctccgccgcgccgcccaaaccctagccgccgccgccgtcgccgccatggtcgccgtgaaccgccctctcgtctccgtgaaggccctagagggagacatggtaaccgacgcccccggcatcgccttaccgcccgtcttcggggcgccgatccgccccgacgtggtcaggttcacccacaagctgctgtcctgcaacaagcgccagccctacgcagtctcccgccgcgccggccaccagacgtcggccgagtcctggggtaccggccgcgccgtgtctcgtatcccccgcgtccccggcggcggcacccaccgcgccggccagggagcgttcggcaacatgtgccgcggcgggcgcatgttcgcgcccaccaagatctggcgcaagtggcacc

SEQ ID NO: 69739 - DNA, 368 bp, Zea mays
  Clone ID: MRT4577_163594C.1
cctgcgggagccgggccggagtatatagccgggtcgacgagcttattacgtcggcggtcgccacgcagtctgtgttgcactcggcgcgagatcatgatgccggaatccaacgggctggcctcgaccccataggacaggaacgcgcgcatgtagcagatcggcatattgcacgacatgttggctgaggtcgcgatcgcagcgctgtcggaagtgacgttgacaacgtggccgaccatggcctgggtgtataggcccgtggacatggtgaccaagaggagcttctttgaaccctgtcacaccagccggcggcgtgggtactcgatggccggggcggtggcccatagactgagtacagtgacgctctcacc

SEQ ID NO: 69740 - DNA, 1767 bp, Zea mays
  Clone ID: MRT4577_163595C.1
aataaagggagggtgactgtgaaccttggaggtcgccccaatagcgatctccaggcccagcccacccgatttttctcaaatcccaccgcttgttccaatccaacggaccagatcgctccaactaacccccacacacaaaccctagtcagctccacctatatagcctcttcccctttcgccgcgcctccattcgcaccaccgccgcgccgcccaaaccctagccgccgccgccgccgccgccgccatggtcgccgtcaaccgccccctcgtctccgtgaaggccctagagggcgacatggtaaccgacgcccccggcatcgccttaccgcccgtcttcggggcgccgatccgcccccgacgtggtcaggttcacccacaagctgctgtcctgcaacaagcgccagccctacgcagtctcccgccgcgccggccaccagacgtcggccgagtcctggggtaccggccgcgccgtgtctcgtatcccccgcgtccccggcggcggcacccaccgcgccggccagggagcgttcggcaacatgtgccgcggcgggcgcatgttcgcgcccaccaagatctggcgcaagtggcaccgccgcgtcaacatcaacctccgccgcgtcgccgtcgcctccgcgctcgccgccaccgccgtcccggccctggtccaggcgcgtggccaccgcatcgagactgtccccgagatgccccttgtcatttccgactccgcggagtccattgagaagacctcccaggcgctcaagatcctcaagcagatcggcgcccacgccgacgccgagaaggccaaggactccgtcggcatccgccccggcaagggtaagatgcgcaaccgccgctacatcaaccgcaagggcccgctcatcgtctacggcaccgagggctccaaggtcgtcaaggccttccgcaaccttcccggtgtggatgttgccaacgtcgagcgcctcaacctactagaccttgcccccggtggccaccttgggcgctttgtgatctggacccagagcgcgttcaataagctcgaggaggtgtatgggagctatgacgccccgtcgcagaagaagaagggcttcgtgctgccgaggcctaagatgtccaacgctgacctgggcaggatcatcaactctgacgaggtgcagtctgtggtgaagccactcaacaaggaggtgaagcgcagggagaagaggaagaacccactcaagaacatggctgctgtgctcaaactcaacccctacctcggcactgcccggaagatggccacccttgctgaggctgctcgtgtgaaggccaggaaggcgaagctcgactccaagaggaccaagcttaccccggagactgccaaggttaaggctgctggcaaggcatggtacaagaccatggtctcggacagcgactacaccgagtttgagaacttctcaaagtggctcggcgtgactcagtgagcggcaagggtagttaagttttgagtagctcagcttatgttgagaggaaagagaatccatcaaatctgttttatcctgcatcatcataacaagttgctacaagtcttgcatgttcgtgttgtttgtgcatttccgcgagaacatagtatttttatattcgaaccagttgtctgaactgtgcttggattttgtgaactgatgctttggcgcaacctttctgtatcacgaatgagctggtccttctgaaaatggtttacagaaaaagaaaacatgaatacttcgttcatgaaaagatgaaatttagaaagat

SEQ ID NO: 69741 - DNA, 479 bp, Zea mays
  Clone ID: MRT4577_163596C.1
ggcaacatatcaaccacatggaaaccaaaaaatggtcattcgaagcttgcgccagatcaaaacatgggggggggggggggggccctaaaattcaagaacggtaaattcttttaaaaggaggttgggcacacatcgggtagaccaatcgcaggacaccacagccatttgcatgggggtctttaaaagtttgccgaagcttcatgcccttcaaaaaaaaaaaaaaaaggcccccatatttacatgggggtttcttaaacgtttccctaacaaggttaacttggcacacatggggatggacaaaaaaacggcccggaacaaggaaaggtggcctctgtattgagcaaaatccttggagcgttcttttacgggagcaatgagcatgttccggaccaaaaggaactcttgggcctcgctgcagctgcaaagttcaaaaaaaaaggcacttgtccctgcaaaaaactacatggaacggggatttg

SEQ ID NO: 69742 - DNA, 615 bp, Zea mays
  unsure (1)..(615): unsure at all n locations
  Clone ID: MRT4577_163597C.1
gttttcagttttaactgcttatacctgcactcatttacatccgtccaaccatactcacgataaggaagtgagcctagctcaactggttaggttggaggtgtggtcgtacacccaaccaaccaggttcaagtcttctccagcttgaatttaggtgcctactttctctattttctctttgttgataatgaaaaaccacctactttctcttagctactataaatggattatttttaaccttgaagtggtgctaccgttacaaataaaagttacttgagccaaatgcttgctctggaatcacttcggactatcacctatagcagttgccacatgcagcaccaagattacttgcacgttacaaattggctaggactgacagacaaccttgttattgctatcctccatgtagtatcgctggtaggtgaatcagctcctccagaaatgcttcagaagttgacatatctggctatcagacaccatcctcagattaagcgtgttgacaccgttcgagcatacacctttggggtgctttactttgttgaggttagnggttcttaattttactctctcccttccaaactttatgttggttttaatggaaaaaaatttcttactttg

SEQ ID NO: 69743 - DNA, 350 bp, Zea mays
  Clone ID: MRT4577_163598C.1
cgggcccacatatattatgaccaagatgactgggagccgcggccgttagtgctactaatgagccgatgagaggatagggggcgatagacacggacccttctctcagggacccgttagaaggagctatctataggacgaatgattagcgatcttgaggagcctatcgacaatcagggtcctgtggatactagtgcagcaatttcctattcatgagatctgcgcctgcctttatcgagttagatacgaaattatctatctttgaaacaggtattaaggtggtcgatcttttagctccctatcgacgtggaggaaaaatcggactgtttgggggggcaggagtaggtaaaaca

SEQ ID NO: 69744 - DNA, 1956 bp, Zea mays
  Clone ID: MRT4577_163599C.1
tggaatacttcggacatacctagagcagttgccacatgcagcaccaagattacttgcacgttacaaattggctaggactgacagacaaccttgtattgctatcctccatgtgttggacgtctcgaggccggccggagaacgcgcgggtacggggcgtccttgccatttcccaccctacttgagctaggcggcaggacggacgcggacgggcgggggaggagaacacacgaccgcgacggaatcgcgaggggtaggcgaggcgaggcgaggcggcgaccgagggaggagcagtcgagcagagcgtagggggcgcgagggatggacgcgaacgggtgcggggagaatgacgacgcgcgggcgccgctcctggccgggcctgggcggcggcgcaactccgtcgcgtccatgcgcggggagttcgtgtcgcggttgcccaagaaggtgctcgacgccgtcgaccccgagcgcccgtcgcacgtcgacttctcccgctccaagggcctcctcgaaggggagagagagtactatgagaaacaatttgccacattgaggtcctttgaggaagttgactcactagaagaatccaatgaaatcaacgaggatgaggagcttgcggagcaaatccagagtgaatttgctatgaagatatcaaattatgcaaacattgttctcttagcgttgaaggtatacgctacaataaaaagtggatcaattgctatagctgcctcaacactggattcactgcttgatctcatggctggtggtatcctttggttcacacatctgtcaatgaagagcatcaatgtctacaagtaccccattggcaaactgagggtacagcctgtaggcattatcatcttcgctgctgtcatggccactttaggcttccaagtatttattcaggctgttgaaaagctggtagtgaatgaggctccagataaactgaaccaagtgcaattattgtggctatattcaatcatgatctttgcaacaatagtgaaattaggtctgtggctctactgccgaacgtctggtaacaagattgtccgtgcttatgctaaggatcactatttcgatgttgtcacaaatgttgtgggtttggctgctgctgtccttggtgatagattctactggtggattgacccaattggtgcaattgttcttgcagtgtacacgatttcaaactggtctggaacagtgtgggaaaatgcagtatcgctggtaggtgaatcagctcctccagaaatgcttcagaagttgacatatctggctatcagacaccatcctcagattaagcgtgttgacaccgttcgagcatacacctttggggtgctttactttgttgaggttgacattgagcttccagaggacttgccacttaaggaggcacacgccattggagaatctctccaaatcaagattgaggagctacctgaagttgagcgagcattcgttcacctagatttcgaatgtgaccataagccggagcattcaattctcaacaagcttcccagcagccagccttgatccgaacgaatcctgtgtggtagattgtcgtgcagaatctgctgcagttcttgcattggcgtcttgtgctgtatgacaaaactaagagttcaattagttttgtggcggtgagtttaagatcaggcgcatctaagactacgagagatgaaggtgccgaatgcagagatttctcgagtgtggaaccctttgtggttctgttggtatggtcttcgttttgagcgaaattaagcattttgctgttggcatcatggcatgtgattggcggcgatctagctgtgtgctatcgactacggtgatgtttagacatggtttcgagaaagagagtagatccttgatttctttaagcaaaaaaaaaaaaaaaaaaaaaaaaaaaaaaaaaaaaaaaaaaaaaaaaaaaaaaaaaaaaaaaaaaaaacaaaaaaaaagaaa

SEQ ID NO: 69745 - DNA, 180 bp, Zea mays
  unsure (1)..(180): unsure at all n locations
  Clone ID: MRT4577_16359C.1
accacaaccccgaggacaacaccgagaagagagcgcggcaacagacggaccggcggaccgggcacggaccacacgagcaaagcaaggacccacgccggcccggggaccgaacccagcaagcngcccaggggggacgacgacggaaccagcacgggccaggcccccggagaggacagcgag

SEQ ID NO: 69746 - DNA, 417 bp, Zea mays
  unsure (1)..(417): unsure at all n locations
  Clone ID: MRT4577_1635C.1
caaaaaatagngnatcggnataactctcaaaagggctaaagtgccagnagcaagtcttgttcgtgtggcatcaacaatggatgtcatggaattgatgaatgttgggcacaagaatcgtgctgttggtgccactgcactaaatgacaggagtagtcgttcccacagttgtttaactgttcatgttaagggaagggatctgacatcagggacaatccttcgcggttgcatgcatttagttgatcttgctggcagtgaacgggttgataaatcagaggtcactggagaaggttaaaagaagcacagcatataaacaaatcattgtcagccttaggggatgtaattgcttcgcttgcccaaaagaatcacatgtaccttacaggaatagtaaattaacacaacttctccaaaattcacttg

SEQ ID NO: 69747 - DNA, 460 bp, Zea mays
  Clone ID: MRT4577_163600C.1
gtaagcttggatcctgtatagttgccgccctgggtgtgttcttttatttaaacaagtccatccaatgaggctgggatattaattgattattacaactcagcatgcctattgtacaatgcttattattacactttgtttaagatgccacgattcctcacttggacttgacatcacgagtgattttcaagaggcgggaaattacatatacatatggaaaacagacgctgacatttccgcttttgcatgcaaaattgacaaaactccaccatccacgaagctgattattgctggagcactctgcacgcgagggaatagaagccggctatccattgttctagatgccgctggcgatgcccttcatgtagaggatcaccgtgtcttgcatgccgggcgggtactcgatcgcctggttgagcttaaccagtacgggaggcttgttctccgccggttaactcctttt

SEQ ID NO: 69748 - DNA, 420 bp, Zea mays
  Clone ID: MRT4577_163601C.1
ggccaagcctaatactcacaagggccccgggcctaaaaaaacaggggggcctttgggccccactccccccactccccgggaacctttaaaccccccccggggcccccttgttttgttgttgccgaacccgggttatggccaggccgggccctcagcttttttttccccacgacgggggcccaacccccaatctccggaggggggtccccttttcacttgccccccgcaggggggaccccctgctgggaaaccgcccccaccagggtgggccccgcctttttgtaactgacaaaacccatgaaccaaaaatcgtgggaatccacggggaccacgtggacctactttttcggggggcttttctttattgtgaccgggtccaccggggcgatcttgccaaggggggacataaccctgtaaaaa

SEQ ID NO: 69749 - DNA, 342 bp, Zea mays
  Clone ID: MRT4577_163602C.1
agctaatgatcgtcgcatgcacccgcggaagctcggaattcggctcgaggcgagtttctcatcccctgttgtttcgccttcaccctctaaccacaccggggcggactttaacctctgacgctgcataccatatggaccatgaccacctgcttccaagctcaactgacctcaagctggactacataggagctgttccagacggcgccttccgtctccggagaaaacgtcctaactcaaccagaacacgcctcaccgttcctgctcccaactgcccaggacccacactaccacacgtatcctacgatatcaccaaccaccaccgctggaccatgctcccagcca

SEQ ID NO: 69750 - DNA, 738 bp, Zea mays
  Clone ID: MRT4577_163603C.1
tcttaggttccgctccccaatttcccctgattttcctggggctgctgcgccgcgcttcctctctctcgccttctccctcttcgcggcgatccgggttccgctgcaacggcccctgtcgactgtcgtcttctcttctccctcacggcgctcgatccctccggattgccgcgtagcgggatcagtgattcagctggttgaacagaactagtaaagatggcatcagaagggaacaaagatgtgcctaatgaagctttgtccgtggatctgtcatcgatttctggtgcaaagcgcaagcgtggccgcccaaggaaatatgagcatcctgcatatgaactaccacagaaggtacagcccctccaaagcgccccgcctcttcactgctcacaagatggctcaagtatggccagccatacatcaggcggctatgctcatggtagttggtccgcacaacctaggaattcggttaatgcttctattcaaggtaattctggcaaggatgacgttctcggcaagcattttgttggcaagctgaccaagaaaatccctgggttttccctcattacggtaaaagtgaaggacaatcaggtgctcaaaggttgggttccagatgaaattaatctccgtccaataacacctaaggatgaccttgccccagagctacccatgcttcgaccgagtcatgttcggaagcgagcatcagcaatccacatgcaaacagctcttactgtgccattgcac

SEQ ID NO: 69751 - DNA, 218 bp, Zea mays
  Clone ID: MRT4577_163604C.1
gcgaggcatccccgcacgtcgcagccacaacccaagcgcaacgatctgccttcgtccgatgagctccgcgtgcctccgcgtcatttcgcgagcggcctcccacaccagcgccacacccggagaactggcttctgctgtgcatctctagaagggcgagcgaccgaccatggacggcgtccactgcaaaggcacccacttggaggaggcaatgctggcga

SEQ ID NO: 69752 - DNA, 604 bp, Zea mays
  unsure (1)..(604): unsure at all n locations
  Clone ID: MRT4577_163605C.1
aagcagtggtaacaacgcagagtacgcgggctacgccaaactattttaactcgtactacatggtcacccgtcatagtagttagcatgcatgggttgcgtgcaaaaaaaaaaaaaaaaaaaaaaaaaaaaaaaaaaaaaaaaaaaaaatttttttaaaaaaaaaaaccaaaaaaaaaggggggaaaaaaaaaaaaagtccttggggtggtacccccggttaaaggggaaatttgggaaaattccttaaactggggggccgttggggctggtttttggggggcccatttccccctttggggggggggtttcaattttctgggcgggggttttaaaccggctggctgggaaaaacctgggggttccccaatttattgggtttgggggnattccccttttgccccggtgggttttattggaaagggccgggcccgttggcctttcccaatttttgcccccttgtttgtggatgggcccccctcttttgggggctttttggccggggggtgtggggggttcccccccccttttccggttactttggcggggcctttgggcgcgttctttgggtttttttcccttctttttttggccttttgccgggttt

SEQ ID NO: 69753 - DNA, 256 bp, Zea mays
  Clone ID: MRT4577_163606C.1
accgcatgctggagaagctagttcagtaaagatgaaaagcgtcaaactagttgtggaatggtggtattgtttatagtacatgtgtttggactttggacactgggttccaatgacattatgagattccaagttcacacagcaggagttgctagcttgcaagccgattcttactccaaaatgggtaggcttacgggttgtgaagattatgatgctactggtaacgcctaatctttatggcaatttggtggctaacacg

SEQ ID NO: 69754 - DNA, 455 bp, Zea mays
  Clone ID: MRT4577_163607C.1
gccctaagatcaaaaaaaagcaaaacaaacaaaaaaggacaaaaaaaaaaaggaaaggaacaacaaggagcagcaccaacaaaagcacgcgggaacagggcattcaattaaaacacaacaaaaaggggaaaaagccactacccaaagggaaagccgcgggggggaaggggggagggccaggctttggttggggcccggactaaagtcctggcggggggtctgggtcgggctaagggtcggggttgggggggggctctgggtttggggcggggtaaggctctggggttggaccaagctaaagctctggcttgggggggggctccgggtctgggttcgggtttgggccagggtaaagctctggctttgggtccggggccgggcccggggcggggttaggctcaggctttggctctgggtttgggtcgggccaaagctctggctttggctctgggttg

SEQ ID NO: 69755 - DNA, 347 bp, Zea mays
  Clone ID: MRT4577_163608C.1
gcgtccgggcttctgggaccagaccctcagaaagcatccaggctccaactctcttcttggaggtcagtgggcgataggcagagggcctgtggggagatgctgcaggggtgggcagccctggaccttttcctcaggcttctaggcataacatttgaggtgagtcacctgatctcacagtttctcagaagaaaaactttttttgttgttattgccagaaaaaagcgttacaagtgtcaaaacggtattggctatctaaattgtgaaacacgggtcacggttttctttattcttcagtttacaggtggcaaaagatttatcaagtgagaaaatgaaaatggaaaaactat

SEQ ID NO: 69756 - DNA, 194 bp, Zea mays
  Clone ID: MRT4577_163609C.1
ttctttcgcagcggacgctgctagccagctccagggtaggcgccgccgcttaacaagacgacgacgagtaggcctcgccgccttggctcgcccgtccggtcccgttgatcgccagcaagaaccaacaagcccttctgtctgtttaattccagttccagttcgattatcatggggaataatcatgtatcatgtgg

SEQ ID NO: 69757 - DNA, 222 bp, Zea mays
  Clone ID: MRT4577_16360C.1
tcgcttgaggacactgttgtgtccttttccttaagaagggggctttaagaatgatatacggggggcattttgtccacatggatgcctaccccaatgtgggtatgtaaggcatgattatgcctgtccggctgaaaaaaaggctacctaaggaccctatacctgtccggactccagttttgtagatctattctttcactgaaagtacaattttaattgacaatt

SEQ ID NO: 69758 - DNA, 576 bp, Zea mays
  Clone ID: MRT4577_163610C.1
ctgaagccgggatgaaattcaggagttctattcccccttctccttttaattgtcatggtggtgtctttcgaccctagcagagaatatgtggtcgatattagaatcacctggggagattttacaaagcatctatgcttgggtttctttggagccaataggaaaaaaatgaagaactgtgtacaatggtgactaaagagcctcagcatgacttccgcccctcagcgccatctataacctgttttaccatgtcggatcccgtctggagaagcccaccgagtgcaggtgaaccagggaggcgaagtccatagaaacagctgtcttgggggtccgggaagagtttaacactggaatcacatctgcggaaaccgggaactggaagcaaattgaggatgcggccagaagggaaaatcaagtttttcaagcaatgaggttcggccttggcctaaccaatagtttctaccactctccgcacccctaaaatttccatctattcatctggttccagaaacagattatccagcgtctttgtagatctacgaatatcccttaaagtcgggtgcggtggttcacgcctgt

SEQ ID NO: 69759 - DNA, 195 bp, Zea mays
  Clone ID: MRT4577_163611C.1
ggccaagtctccaacgtttaatttggtttattactggggcccataggccatacctacctgaaagaacaagattccaccgggggttcaccgcgtaaaaaaacacatgccttttatcaggtaataattaaacaaaccttccgggacaaaatggaagaaggtcggaacaaattggggggaaaacccatctggtttttt

SEQ ID NO: 69760 - DNA, 374 bp, Zea mays
  Clone ID: MRT4577_163612C.1
attcacatatgcaaacaagaagttcagcacccactacaaggttacgataggggcggatttcctaacacaacgaggtgcagctcgaggacaggctcttcactctacaagaaacattgattaccctacaccgatgccttgccgcgatctgcaagtagttatatttctttacaccaacttcagacccgattagtactcacttaattagttagcgaacttattaataacattgggttatttagaaagtttagcaaaggcaatttgccgataaacattagtaaggtttggccgtcttactattccagtctattcaactttcctaatataccggttctattaagcaatttgcttacaatcggaatggataacttcagcta

SEQ ID NO: 69761 - DNA, 434 bp, Zea mays
  Clone ID: MRT4577_163613C.1
acaaagggaaaacccgggtttttcttccccaggggggggaaaaaaaaaaaattcgggtctggggggttgcccggggggcccaaacaagaacaaagcaataaccggttcaacaggaaaaaaagggggggacccacccaacaaaggggggaaaaaggtttcgggggtttggattggccgggggggggtacttttccccaaaaaggggaaagaaaaaccagggggggggggggactttggatcttttgaaaaaaaccccaagggccgaaaaaacatcctgggggaaaagcccgggagggcttgaaaaacccccaaagttctccttcacccgccccaaggggggccccccaaagagggggccaggggggaaagggccaacacccccaaaacccagggcaaactggactggggttaaccccggctttttgggaaggtta

SEQ ID NO: 69762 - DNA, 388 bp, Zea mays
  Clone ID: MRT4577_163614C.1
cccacgcgtccggctagctcaaacgaccactgatctggacacacctgacctggctacgggcggcggtgaatggttgtttactcctgtcctgacgacagggaataatcagcggcgtatcattcccggaaacttcggccttggttcagcccacatgaaccagacctggctagctaacaaccacggcctccgctgtctgctcaactcccattgagctaatccagttttttaatgctgccaggttttatttacacgcttgctatggggagcagggaaggtgagcagtgcgttcctcgagcaaactcacgggttaagattcggcatgacaaactcgctttcttttctttttctttttgagttaaatttgacagcggacatgtaataccaaaac

SEQ ID NO: 69763 - DNA, 1214 bp, Zea mays
  unsure (1)..(1214): unsure at all n locations
  Clone ID: MRT4577_163615C.1
tgccacgtactaagctcggaattcggctcgagattttgccctaggtgtatttgagaatgctgttaacagaggagttcagaatataagctttggagatctgtcaggaaatcttggacgaacaatgtataaattcaagttccagataccgtcttacttttcccttgtaattcgaagccttgctgttttagaaggtatcgcaatcagcttcaatccaaagtataaagttctggggagttcatatccatggattgcaagaaaagttctcactgacagttcgccaaagcttcgatcaactttgcagactcttctttataaggatggcactttccaaattgatcgcctggaatctttgttaactgagtcacttcgtgcaagaacagagcaatcattggtcagaaatgaacaagatgtcgacagtacgagatatgcaattaagcaagtcttgtcattcacactcgctgaccagggtgcctttgtgaaggacttacttcttcaggagattgctaagggaatagatgcacttggtgtagccacattaagttctgcaacgtctgcagcagcctccagattgccattcggtggtggaccatccccattgacctcactagatgacgaagatgccacaaacttaagaaatctgtatcgcctgctcctacttttatctaaggtttctcagaaggaaaatccatctccaattcctgaatataacagtgccatagagaaggaaggtggtagcacggatgaacttgctcttgcgctgtatggaatgacctctctgccagaatttcttccagttctttctgtcattcctgagcttccaccggagtcccaacagcagttgcttcttctgccagcggatttaaccaatcgtattttatctcgggctctcgcgagaaccattagaagactcatgtaaagccataggtgcagaaattttcggtccctgcttaatttttattttactattctttttggttcactgctagaagatggggatttttttagcatctcatctacaacccaagatcaatcccttttttgttatctacgattactatgtacatattgttcaaactaaagcaggcattgtaaatggcccatgttgttatgcacatatggtgtaactgataaactttaaatatatgtgaacatagaaataattctgtaataaaaaaaaaaaaaagcggccnnnnnnnnnnnnnnnnnnnnnnngg

SEQ ID NO: 69764 - DNA, 187 bp, Zea mays
  Clone ID: MRT4577_163616C.1
acccttccgacaaatcggatttaattttatgggaaacgttttacgggaacaaaaccctgggtgggggggctaatttgaatctgtgaaattttctaacttttaagcctcaccgttttccatgttgagggcccagattttcaccacatggcgtccgttaaaattataaatgttgtacaaatgtacaggc

SEQ ID NO: 69765 - DNA, 352 bp, Zea mays
  Clone ID: MRT4577_163617C.1
taaaacatatcataagtcctgatggtggaaaatccgatccatccgtaagttttagaagttgagatatcgaatactaaggaatagatgaatggtacttaatcagtgatgagaaatatggccggaaagaacaattgaatcaaatgtatctggacatggtagcattgcgtgaagataaattaaagctggaggcgatattggataataagactgatgaagagcgcatactttgtatgcatagtataagatcttgatttgcaattgatcaaagagaaagatgatttccaaaggatgacctccaatatcaaaaagtttattaaagcatatgggcggtatataaaagctcatgaggatt

SEQ ID NO: 69766 - DNA, 798 bp, Zea mays
  Clone ID: MRT4577_163618C.1
attggtacctcgaggcggcgggtaagaagtcttgtcttccactcgctgaccagggtgcctttgtgaaggacttacttcttcaggagattgctaagcttaggttccacttttgaacattctatggcatggatgctaacaagggagggaatagatgcacttggtgtagccacattaagttctgcaacgtctgcagcagcctccagattgccattcggtggtggaccatccccattgacctcactagatgacgaagatgccacaaacttaagaaatctgtatcgcctgctcctacttttatctaaggtttctcagaaggaaaatccatctccaattcctgaatataacagtgccatagagaaggaaggtggtagcacggatgaacttgctcttgcgctgtatggaatgacctctctgccagaatttcttccagttctttctgtcattcctgagcttccaccggagtcccaacagcagttgcttcttctgccagcggatttaaccaatcgtattttatctcgggctctcgcgagaaccattagaagactcatgtaaagccataggtgcagaaattttcggtccctgcttccttaatttttatttaactattctttttggttcactgctagaagatggggattttttttagcatctcatctacaacccaagatcaatcccttttttgttatttacgattaatgcttttgaaacactgctatgtacatattgttcaaactaaagcaggcattgtaaatgaccatgttgttatgcacatatggtgtaactgataaactttgagtt

SEQ ID NO: 69767 - DNA, 793 bp, Zea mays
  unsure (1)..(793): unsure at all n locations
  Clone ID: MRT4577_163619C.1
ccggccgggactccaaactttcatacaaacacaattacatcaagataacaaagcctaaggcgcatcaagatgttctaaacaacccccttccccgttgttcccccccaacctcagtcaaaattacgtctcaggactctaacagatcaatccccactcttaacaaacccgttcagctcacctcacggtcgacctgaacttcagcattgctttgaatagcttcggctccagttcctttacaaccgccaacatttcaggccaagacttcccagtcttcaccacggatccccaatcaccatggcttctctccaccagtcccagcctgccggcacaatccgcgcaacaacagttacagagtcccgaatcaccgcatcaggactttgtcttgttcgatcagctccctaatcgccatacaacaacatcgctgccacaccagcgtcgtcactcgtctcatctgcaaaaccgtcaccaacaacagcctgcatcccctgctgttcagaatcagcgagtagcccagttgctccaggcttttggtcgtccttcgtctactgttaacaacaaccgccccacgaaccagttttacgcttcttcggccccttcgtcatctaccacattgaacaagcagaaccgtgctgctcgacccccagtacctcttttctcccagagtacaggtagcgtcccgcaacaaaccgcanagatgatgaacgctgcagacgtcgaactcgaagagttcactgccttcgagggcggngcccacacggccttttcctcacctgctngtgcctcagtctttgac

SEQ ID NO: 69768 - DNA, 304 bp, Zea mays
  unsure (1)..(304): unsure at all n locations
  Clone ID: MRT4577_16361C.1
cagctccgtcggcctgctctggtcgcgccagtggctcaggtgcgccgacgccgtggaggccgtgctcaggggggaccccgtcgtgctggtcgacgccgggtgcgacgccatcgctgccccgccgttgctcgccggcgcggggtcggcgccgtcggccgtcttcggcttccggctcgtcccgcgggggtgccggcggccccggcggggtcctcctccggggcgggcgccngggggttatgcgcgcggtttcgtcttgcttcgccttcgcggcgaggcctctgcccctcgcgctcgtggggggggc

SEQ ID NO: 69769 - DNA, 323 bp, Zea mays
  unsure (1)..(323): unsure at all n locations
  Clone ID: MRT4577_163620C.1
ttttggttgtatgtaaagtttcatgcatcataaagaattgagttacaagcagcttatttattacattcaaaattataaaaatactacacactttgttcagcaaatattacattccaaatgtttttacaataacagctattcttcttttaaaactacttccgcagcttcgtttaacaggtgagaaatagcttcatccaaaatagcttcggccattttagtgatttcttcctctttttttgcttctgggtcggacgttggctcgaaagacttcgggggaggagatagctcagctatctgnctttaagtttcacagcttttttagc

SEQ ID NO: 69770 - DNA, 244 bp, Zea mays
  Clone ID: MRT4577_163621C.1
cggccgggggtcatttcctcctgggccctctcactctcagattttcgtcctcggctcctcctcctcctcctcctcctcccttccttcgttccttccagatctccctcccagtcgagagtcgagatccaccgcctccgcgccccctcaccggggcagcgggaggaagtggcgggctagaggacagccatggttaaggaaggggccagagacgggggtctgccggagcaggagacccgcaaggacc

SEQ ID NO: 69771 - DNA, 294 bp, Zea mays
  Clone ID: MRT4577_163622C.1
cccttctttttaatattatttttttttttttttggggggggtatctttaaacaacatttgagcagacaccatgcaaagatgaaggaagtcaagatttaacccttattgcaggtggtggctgctgtaaacacaacctaacgtgaggaacattatcgcttcttatgttgcaatattactacatatatctttgatagaaaattcacatcttatcggtatgcaatcatgccgatttcaaacctaagaactttaacagctgggctcgtatgccgtgtaaacaacatttgaacaccttca

SEQ ID NO: 69772 - DNA, 1253 bp, Zea mays
  Clone ID: MRT4577_163623C.1
gctcagatacatcaaatcagaatgttgctttttacaagattccaatgcaacgcaacaagatagcagatagactagccaaacaggctcgccagtctggtgttcctcaaacatgtaactttgtaagaatcagtctcgtgctagcacttatcaaccaaaaaagaaaactttcaaccttcaaccctgctatccagctttctgttgccactggatacgcgacggcagtatgcaatttctgatagagttcttgttttataaaggagagacgaatgttatttcaagttgatcccgttcatagcatatcgctggttccgtacgtgaatggcaacggaactttatcttcaatacacacaggaattcacaccacaccacacacacgagtcactaaaagccataatccaactactacatgtctacaagcttacataatctgtatcatctttgcatcttggggcggtatatatatggtttttcttgtctccagtccgacggtatatatttgattccaacgtgtatatatgcacagaagaagaaaaaaagaacagcctgcagacgctgaaaacacccaacccagcattcttctattctttggtcaataacctgtccagtccaatcaccaatctgatcctgagctgcaaacagatccagacgctaccagctacgatacggaggaaacagttctgctgatgcacacaggcagcttagggcaatggatgagctggattacccaagagtcagcatcgaaaacggatgacaatgcatgagatatcgtccttgctcatccttcccagggcctcggacgtcagtcgcttcgccgctgtttgcgggtccttggttgacttcaccagatcaacggcttcctggttcttcattaccttccataacccgtcactggcaagtatgacaaactctgtgcttgaatttatctttatatgcttaacatcaggctctgagctcaagtgtgccttgaggctctgatcaccaaatgctcttgcaaccgcaagttggccgtttacacgaggaacgtcaccggggaacgtagagacaaaaccaccttttcttctatcctctttcgttcattagtggtatgaggttcgtgatcaacagtaacctggctggcagtaccagtttcagacaaaacagctcttgaatcacctatatttgcaatccacatatctgtaccatcaactacaatagcagtgactgctgttgaccccctggtcctagtggctaggtcttccagaataatttgtttg

SEQ ID NO: 69773 - DNA, 127 bp, Zea mays
  Clone ID: MRT4577_163624C.1
gggggcgccgacgacagctacgcccgcgtggaggagcgcctctccgacaaggagtaattgatgctaaactttaaagagctgggggaataaaggccttagtcatgggaagaccactgatatgcagagg

SEQ ID NO: 69774 - DNA, 216 bp, Zea mays
  Clone ID: MRT4577_163625C.1
cccgcggacgtatgctcggaattcggctcgagctaacgccaatttttttttcaaccttctaaccagaaccactgggggggtctgtttaaggggttgttgattaccaacaaaaatactcatgggatcctgaatgcggtgagctgggggcttatgctgcccatgggagccatttcacctagataccttaagacgttcaggcgggctgacccttcatgg

SEQ ID NO: 69775 - DNA, 179 bp, Zea mays
  Clone ID: MRT4577_163626C.1
gggaagtctgatggcgaggagaggctgctccaaccactctgctccactccgccatagccacctccctcctacgcctctctcgccaccgacgcgcgctgatcgccatctcctccgaccgacttgcgctctccacccagacccacgaaccatctaccgaaaaaaaaaaaaaaaaaagaaaa

SEQ ID NO: 69776 - DNA, 434 bp, Zea mays
  unsure (1)..(434): unsure at all n locations
  Clone ID: MRT4577_163627C.1
aagggactccgccacggtgttggcggcctcatttctgcttctgcagcaccagcacttgggaaccagtgttttccggaggaaccggcaaaggtggccgcagcggcgctcgtcgtctccgtctttcttgagcctcacgcgccgtacgaagacgaagtcgtcgacgatgtcctcacagcaggagagcttgctgagccagagacacaaggcagcttctttgccgtaccggtccggctttcccagggacagggagtggctgatgaggttgagctgcgaggtcttcccggaccaccgccgcgtctgccagcgcttggcggcctgcctcagcgacgcgagccagcggaggcgcggngtgctggtcctggtctccaggtacaccttggcgcggttggagaagatgaggagcgcggcgaccaggcancaggagcagatgcagc

SEQ ID NO: 69777 - DNA, 416 bp, Zea mays
  unsure (1)..(416): unsure at all n locations
  Clone ID: MRT4577_163628C.1
ttaggtattattctgatctaccactttcattgtcaaagtgaatgagggtgtnngccccttcttttgcatgtacctctgcncnncgggcggcgccgcttcgnnaaagggcgaatattctcagcactactgnnngcggccgtctgactgagtggngnatccgaggnctctggtactcaagtcttttgtgcgttaatcattggtncaataaagctgttctcccttgtgtgcaaaaattgtttatcgcgctttcacaatgtccacagcaactatacgtagcncggcaagtcataacagtgtgaaagctctggtggtgccctaatgaggtgagcctaacctcacaaattaattgcgtttgcggctcactgtcccgtctttgcccagttcggggaaaccttgtcggcgccattctgcattta

SEQ ID NO: 69778 - DNA, 430 bp, Zea mays
  Clone ID: MRT4577_163629C.1
ggcccgggcccggaaaccccggggggcccccccgcccaggacaagagcggcgcaccacagaggagcgacggagagagacccgccccagaggccaggaccaggggcaacagcaagcagaccggcgccagagggcccaccacagagaagaagaaagcagccaccagagaggcccggccagacgaggcagcaaacgacgaggagacgccacccgcaagagaggggcggagagcaacagccagaagccccggagccagccagccccgagcgaggagaccaagggagaccccaagcagccgcacgaaccagaccgaaggcacaccagaggagagagaccgaggcaacaaaggcaacagccagaagacgcaacgcaagaacaagcagcagcagagcgagggagagaggagacagcccaggacagcacaagcaagac

SEQ ID NO: 69779 - DNA, 252 bp, Zea mays
  Clone ID: MRT4577_16362C.1
tactctacatccatgtggaggttgctacatcagataactgctattgggtcagcacaattcacttcatcggccgtcattttacaacctctagacggggaaactgctgccgtttcccaacataatcgccgtgtatcagatcgccctttcaccagctggcggtataacgtggaggccagctccgatcacacttctcatcaattgatcatcctgaatgcagaatgggacgcgcactgtaccagagcatcaaccgcg

SEQ ID NO: 69780 - DNA, 565 bp, Zea mays
  Clone ID: MRT4577_163630C.1
ggccgcttttttttttttttttttattttttttttttttttttttttttttttttttttttttattttttttttttttttttttatttgtttttttttttttctttttttttttcttttttagggcaaaaaacacccccgcacggacacaaaggggggggggagctaaattgggtgcccgtctacaggggggggctaaaccccccgcacagccaagggaggggggggagccttaaacgcctcagggaaagccggggagccgcagccccccgaggggattataccgggctcgcggcccgaacccccctctggcaagccatgatccaggaactcccccgaggccatatccaggacccccaggaattccaggtgatggaaggacacggggcgcaaaaaatgcacaaggcgcttcctgggcaccccaaacatccccaatggcccaagggggcggagggaccagagggaaaaggggccttgttgcttaagccaagaaccctgaaaacccctaaggcgggaagaatgcatgggacaaagcccctgcgcggctagcccctgactgaaggaaa

SEQ ID NO: 69781 - DNA, 2188 bp, Zea mays
  Clone ID: MRT4577_163631C.1
cctcgaggtccgggccggggatttcgtcgcaatcctcaaaaagggaagacatggcggcgagcgcactgctgacggggtcgccgtggctgcgcatgcgcctcctaccggacgcgcccgcgcgccccttccgccacctccacctccgccggagcttctccgtccgcgcctccggcgccgacggcagccccgcccccgtccgcgtccgcttcgcgccgtcgcccaccggcaacctccacgtcggcggcgcccgcaccgcgctcttcaactacctcttcgcgcgctccaaggggggccgcttcgtgctccgcgtcgaggacaccgacctcgagcgctccaccaggaagtccgaggaggccgtcctcgccgacctcgcctggctcggtctagactgggacgaaggtcccgatgtcggtggggattttgggccttatcgccagtcagagcggaactcactgtacaaacagtatgctgagaagcttttggactctggtgcggtttaccgctgcttttgctccagcgaggaactcgagcaaatgaaggaagtcgcaaagcagagacaacttcctcctgtgtatatggggaagtgggcaagtgcttcagatgcagaagtacaacaggagttagagaaagggacaccttacacttaccgcttccgtgtgccaaaggaagggtctttgaaaattagtgacttaattcgtggtgaggtaatgagtcaaagtctagaacataagcttcaggctacctacgtatgttgataattgtgtatcgtgaaaagcgatcacacgcactaattagcggatagtttcataaaggtcagttggaacttagacacgcttggtgatttcgtgattatgagaagcaatggacagcctgtgtataacttttgtgtgacaggtgacgacgctaccatgcaaatatctcatgttatcagagctgaagagcatctaccaaacacattgcgacaggctttaatttacaaagctcttggattcgcaatgccttcatttgctcatgtttcgcttattctggctcctgacaggagtaaactgtctaaacggcatggagctacttctgtcgggcagtataaaaatatgggctatctacctcaggcaataggtcaattatttagcactactgggctggggtgatggcactgagaatgagttcttcactattgatgacctagtccagaaattcactataaaccgtgtcaataaaagtggagcagtctttgatgcaacaaaattgaaatggatgaacggacaacatctaagatcatttccccatgatgaactcatcaaagcttttgaagatcggtggacggacacaggcattctccaggaatctgaaagtggttttgctaaggaagctgccgagcttttgaaggatggtatcgatttgataacagatgcggacgcagctcttacgaatctgttgtcatatccccttcatactactctaagcagcgaggaagctaaacctgtggtgcaagacaagatctccgaggttgcttggagtcttatttccgcgtacgacagcggcgaactcggccaagcgctagctgagggccgtgatggctggcagaagtgggttaaaggttttggcaagtctatcaaaagaaagggcaaggggctcttcatgccgcttcgggtactgctgaccgggaagcttcatgggcctgacatgggtggcagcatcgccctaatacacaaggccggcgtctgctgcgctgtgactccgcagtccaacttcgtgactctagacgagcggttcaggatgctcaaggacgtcgactgggagtcgctggcgaaggagcaggaaacccctgctgtccctgccgccgcttcctagactgccaggaggaggacgacgttgcgcgcaatgtcgctcttgagtttttttttaaaaaaaaaatccattttggcgtgtttttgtcaccgttcgtttccatggagtaggagaggagctcagtggtttggtcataggtcgttggtgctgtaatgtgggcaataatattgaattattattattagatgatgatgatgatgcctgtaatctgcgtgtctacagcttctcgtttgctgaatacttcatctttttttttgacaagtgaatacacgattatttacaggtgttcaaaaaaaaaaaaaaaaaaaaaaaaaaaaaaaaaaaaaaaactcgaagaggg

SEQ ID NO: 69782 - DNA, 300 bp, Zea mays
  Clone ID: MRT4577_163632C.1
acgcaaaacgcaaattcattggtttgaattcaacaggcggttcggaaaaacagacccttatccacaagagtttaacaccctgtcccacgcacagtccggttgaccgagctgacatttgcactggttagtaacgggtcaacacaaaaaacagctggggcctggggaagggcccttagacccacgcatcatcacggtgaacaaacaaaaaccttggggccggacagggcgtggccacacgtgaatggtagatcccataacgtaacgtccggtgtgctcaggccaccgattgagggggggtag

SEQ ID NO: 69783 - DNA, 148 bp, Zea mays
  Clone ID: MRT4577_163633C.1
ctgcgagaattcggcacgaggcagaaagccttattactgcaacacagaagcgccgccccctctcatggccctccacgacgacgcccttcaccaacccctgagcgcaggatctgagttctgaagtacgcctcttcgccttccaccgaat

SEQ ID NO: 69784 - DNA, 782 bp, Zea mays
  unsure (1)..(782): unsure at all n locations
  Clone ID: MRT4577_163634C.1
ccggcctgattcctcacccctgctcgccgcgaagcacagctctgtcaccgcggtttgccgtggccggcgaagatgatgtccggcggtgggtactccgccctcgacgaccccaaggcctccggatccgtcccggcggccacggggacagatccgccggccatcaggttcgccgactccaacctccagaccttcccgccgtccgaggccaggggcaagatctccggcgcctaccgcccgcccaccgacgccgatgacaccttctcgtccaagggcggaggagccggaagcggtggcagagggcggcagcgccgggttggatgatgccgcgcagggcggctggttccgcatgttctccgtggcagcgtacaagccctacttcgacgttgacacctctgacgttgtcgagagaatctgggagtccgtcttccccttccgcggcacatttaccgagaagacctccgagaaccctgacctgtatgcttttcaaccagttccccttccagatgccagagtatgggccattttggacatgcatcaccctgattttcgttgctgcatctattgccacttttgtcacctacctatctcacaaatggcacaagaaggaatggaactatgatatcaacttggttacctggtctgctggcttattctatggctacgtaacctttgttcctccttctctatatgttattctcaagtacttctcagctcctgctggtctagtgcanatgtggtgcctatacggatactccctggtcatcttcattccagcatcgctt

SEQ ID NO: 69785 - DNA, 242 bp, Zea mays
  Clone ID: MRT4577_163635C.1
gtcaacaccattatctaaatctactccagatcgcagaaaaacgcgatcgacacaataagggtgttgtgggccaccgtgtctagtttgtgtggcattagtagagccagatggacacatactagtggtggcttgagttgcaatccacgggggagcattgatgtaaggacgtcagggcatttgagacctacgattgatatgagacgatctgtgcatttgtcatcgagtgtatacttgacgacgag

SEQ ID NO: 69786 - DNA, 1247 bp, Zea mays
  Clone ID: MRT4577_163636C.1
aaacagagcgcgtcaggtgggcacaattggtacaacccaacccaacgagcagcagaagccggcgccagatcccgcataaagcacgcggctctaccctccttcgcgcgggcggcctgattcctcacccctgctcgccgcgaagcacagctctgtcaccgcggtttgccgtggccggcgaagatgatgtccggcggtgggtactccgccctcgacgaccccaaggcctccggatccgtcccggcggccacggggacagatccgccggccatcaggttcgccgactccaacctccagaccttcccgccgtccgaggccaggggcaagatctccggcgcctaccgcccgcccaccgacgccgatgacaccttctcgtccaagggcggaggagccggaagcggtggcagaggcggcagcgccgggttggatgatgccgcgcagggcggctggttccgcatgttctccgtggcagcgtacaagccctacttcgacgttgacacctctgacgttgtcgagagaatctgggagtccgtcttccccttccgcggcacatttaccgagaagacctccgagaaccctgacctgtatgggccattttggacatgcaccaccctgattttcgttgctgcatctattgccacttttgtcacctacctatctcacaaatggcacaagaaggaatggaactatgatatcaacttggttacctggtctgctggcttattctatggctacgtaacctttgttcctcttcttctatatgttattctcaagtacttctcagctcctgctggtctagtgcaattgtggtgcctatacggatactccctgttcatcttcattccagcatcgcttctgtctattgtgccaatagaaatattcagatgggtgattgctggtgttgctggtttcatgtctgctactttcgttgctgtaaatctccgtgcgcacattgtaaactctggcgagcgatggttcctgatcgttgcagggatattcctgttgcagctggggcttgctgttttgctgaaactctatttcttcacgataactgtatagggttatttacatctgtgcttgtactagtcaggaaaacacacaattttccatgtggagtcacctccatgttcattggacatcgatgtaatttcatcgggtatacaacgtgttgagcaccatttgtggtactgagaagcccctgaaattgaattacagcagccaaacaagtacacatgtgattgatatgggtg

SEQ ID NO: 69787 - DNA, 358 bp, Zea mays
  Clone ID: MRT4577_163637C.1
ccaatgcttgctttgagccagccaaccagatggtgaaatgtgaccctcgccatggtaaatacatggcttgctgcctgttgtaccgtggtgacgtggttcccaaagatgtcaatgctgccattgccaccatcaaaaccaagcgcagcatccagtttgtggattggtgccccactggcttcaaggttggcatcaactaccagcctcccactgtggtgcctggtggagacctggccaaggtacagagagctgtgtgcatgctgagcaacaccacagccattgctgaggcctgggctcgcctggaccacaagtttgacctgatgtatgccaagcgtgcctgtgttcactggtacgtgggtga

SEQ ID NO: 69788 - DNA, 194 bp, Zea mays
  Clone ID: MRT4577_163638C.1
ccaccaaacgatttttagctttttaacaacacacaatctacaaaagtttttttcacagtttacaacccacagcaactttttccacagtcacagcccacagtaactttttttacagccaaagcccaaccaaacagaccctaagttggtcgccatcccctctaaatgcctataaggacacacaaaatttgagcacc

SEQ ID NO: 69789 - DNA, 849 bp, Zea mays
  unsure (1)..(849): unsure at all n locations
  Clone ID: MRT4577_163639C.1
ttgggtacctcgaggccggccgggcttgctattgtcttgcgttgcggcaacccgcccagcctcccagtagctgtgcaatcttttcttcagcgttgtataaagtcatgttctgaacactgccgtttgcctcttcctgaccgcatattcaagtccccgcataccgctactctcttccctacttacggcaaccatggctgcaaatggctcatcctcgggtatcgacatctcgctacctgaaaacccagggaatggaaatggaccatgggctcctggaacaggagacaggcagcccccaaacgtagctcctgccgctcagccaaggaatctaaacgccatctctccagatttctacccccacggcaagcgttcgctatcaggaatttctgtgcgtgccttttgcttaggttgcgcccttgtttccggcctggctggagctgcgcttctcgcatatcacggaagccatctatggcggccttgcctattccttagcacgcttgctctcttccacttcctcgagttctacacaacagccgcatacaacactccagttgccaaggttgcatcatttcttctcagcaacggtgatcagtaccgcatagctcataccatggcctttatcgagacattcatcacatcctattttttccccggctaccaatcctatacccacccaccatgggccatcgcaatcggtgtcgttctgattgcggttgggcagactgtccgcagcattgcaatgatacaagctggaactaatttcaaccacatggtacagtcgagcaagaacgacggncatgaactggtgacacatggactataccactacttccgacaccccctcgtatttgg

SEQ ID NO: 69790 - DNA, 580 bp, Zea mays
  Clone ID: MRT4577_16363C.1
cttgctaggcttaacatggcggcgccggcgtcggaggcgcctgaagcgagcgacttcaatggcggcggcggaggcctctccactggccggaagctggtgccgtggtcgagctggacagagtggcgcttcgtgcgtgacggcctcttctcccccttccccgccgccgctcttcgcaggattgcggcgtggcggagcaggggttcccttccgatccccgtggacgtcaccgccgccttcgtcgatatacggctgcgggatcccttcttccggaacggattggctggggatgatgcactggactcagaggagatgctagcgatgctgtacagcatggcaatcatgaggcttgtaaatggttttgtggagaatccgtataagaaaactggcctttcaatatctgaactagctgatgctgttggaataccacgagttctggttgacattcgtcatgagagttcccatcgtagtcttccctctctacgactgttacgcttggcaagcattaaggcatttgattggctgaagtgtatttaatgcgatcgacagatcaattcaatattccgattggcaagcagaaatg

SEQ ID NO: 69791 - DNA, 808 bp, Zea mays
  Clone ID: MRT4577_163640C.1
cgtagatcggtttgtgagaccccaacttgtgagcttaatcattcatccgcaatattctagattgtgttctttcttgttcttgcttgtgtcttcgattctcaggcaggaattagccctcgtggcgaggtcaatcgcgcagcgcacggttgataaccagaggagaagtggtgctgcgattgcggggttctagtcgtgttgattggaagccggatcgtttgtgtgacatctccaccaaatcaatagttatcttcacctgacggaagatcgaacaccccgttcctatcagcagatctcggatgtcagggcacaagaagattgctccagcagcaagcattagtagctccaagtactacatccgttatgttcctgggcccacatgccggggctcagtattcttgtacatacccccttagctataaaaggggaggtatgcagcgttacaagacaagctctctcaggaccagacttagacagactctcgattcccaagcttccacaacaatccaacccacagtggagtagggtattacgatccggcggcccgaaccactctaaatcctcgcgtgttcatgtgcttggtgatcgcttagcaagacagacaaaacgcttaagccccttcctcatattaggatttagggcgagtgcactctgccacccggtcggagaattccctctctgacactctctatatagagtttctctaaacgattctctattcatttgaatactttaaataaccggtttagcaaaactaaaatatgtacaatatatttgagagaatgacaaataatgtacaaaaataaaaaat

SEQ ID NO: 69792 - DNA, 1059 bp, Zea mays
  Clone ID: MRT4577_163641C.1
atggaaccttatgtgttcttctggtgggcaaagatgcaaattgaaattgcacactatgtggctagacgtgacacttgtaaacgtgtcaaggccatatacatgaagactgttggtccattacaatccttacctggaaaggggaagacattagtatggactttattgtgggattacccaggactaaaaaatgtcaagacagatcacccagttattgtctatgcccaattgtacattgctcgtattcttagtctgcacggtgttccgaagaccatagtgtcggatcgtggatctgggcagactgagaaaatgaaccaaatacttgaagatatgctacaggcatgtgttctggacttctcacagaaatgggatgaatgtttgcccttagcggagttttcatataataatagctatcaagaaagtatcaagatggcaccctttgaagctttatatggacgtcgatgtcgtactccgctaaattggtctgaacctggtgaaaggtgcttctttaggcctgatatggtgaaagaggccgaggataagattcagaaaattatttataatatgaagaaggcacaagctcgtcagaagagttatgcagacaaacggcgaatgcccttgtatttccttgaaggggactatgtctacttgaaggtttcaccaatgaagggagtatcgcgtttcgggataaaagggaagcttgcacccagatacattggtccatttcctatacttgaaagatatgggccagtggcataccgactccaactacccgaaacattgtctgctgtgcataatgtgttccacgtgtcacaattgaagaagtgtcttcgggttcccgatcgaaccattgaagtaacagacgttgtccttgaaccggacttgacatactctgagcaccctatacgagtcttggatcaaaaggacagggttacccggagaaaaactctcaagttttataagatacagtggaaccagcattctgaagatgaagctacttgggaaactcaagacttcttgaataagaatttcccaggctttctagcctcatgtaatttgtaa

SEQ ID NO: 69793 - DNA, 406 bp, Zea mays
  Clone ID: MRT4577_163643C.1
gtggagactgttatagggcctgttacgggggggggttcttaccctgagcgggggcggccccccacaagcggaagctcttgtctatgcgattaaagccatggacgtggggggaggcccccccaacaacaggatcgggggggccccaaacaacaaagcaggggggggaaaaagaaaaaacccggggccccccccccagtgcgccaagcgaaaggggggcgcgggcccaaaaaaaagggaaaaaaccccggggggggggaaaaaaaaagaggcccccccccaaaaaacccccgggaaagacgcacagggggcggggaaccaagccgaacgaaaaaagggaaaagggcggggggttccttttcccccccccaccccccggggggaaaaagggggcgcccacgggcccccc

SEQ ID NO: 69794 - DNA, 378 bp, Zea mays
  Clone ID: MRT4577_163644C.1
ctgacccgctagaaacctcccaggggggttttttttaaataacagaacgctccacccaccgccaacacaaaggaagggaccggggcaccgaaccagccacaaccacacagccgcggccgacaccccccccgggggaacacaagaggcacccgagaagacgaaccagggcctgaaaggcccacccaaggggggggaagaacccgaacaccacgaaacagcgaagaccacatgccggggaaaacacgcgccgggggagcaatcttaccgacacgccccccgcgggggaaaaaactcccccgcccgggcgggcgaccacgcgacaaacccccaattactgccggggccccccaggccccccaacaatcgaaaaccccccca

SEQ ID NO: 69795 - DNA, 851 bp, Zea mays
  Clone ID: MRT4577_163645C.1
cattgggtacctcgaggccggccggggactactctcaatccccggcgcctcaacaccgaagcaagtcaccatgcagcttctttcagtcattgccgtgtgcggcctcgcagccagtgtctccgctcggagcgctcgttccgttggcaggaaggtggaatttcctcgccctcgcgtcggtatcccgatgcagaatgtgcaccctcacaagcgtcaggctgctcagatcataaacactgaggcttccaaggcctttgctgtcaatggcactgcaggagccattcccgaagtctacttcgatattggcgagtcttatgctggtcttcttcctattagcaaagctgccaatgagtctcgtgagctctacttttggttctttccttcggagaacccagatgcttgtgacgaaatcaccatctggttgaacggtggccccggttgctcttctcttgaaggatttctccaggaaaacggtcctatctcgtggcaatacggcagcggtccaggacccgtctacaacccatggaactgggcgaacctcaccaacatggtctgggtcgaacagcctgtcggcactggcttctcccagggaaagcccactgctactagtcaagaggagactgccgaggagttcctcggtttcttcaagaactttgtcgacactttcggtctgcagaaccgcaaagtgtacattactggcgagtcatacgccggccgctacgttccctacatcgccgatgccatgctgagcaagaacgactcgacatactacgacgtcaagggtgtcatgttttacgatcccagcgtagctgaggatggtctccctcacgacatccccgcagtcccctacgtcg

SEQ ID NO: 69796 - DNA, 636 bp, Zea mays
  Clone ID: MRT4577_163646C.1
cgggacagacgatgtaaccccgaattttccttctccccgtctactcgccggcgctccttcggcccttcctctctcccatctcgggtagggatgggtcgagtagccaagacgccatgatgcaggatcccccgccgcagcagtcgcatgcgggcatggcgccgcctacgtctccgtaggctgctgtcggtcagccaccgaagtgtagtgagatcccgccgccgatggctcatctgaacagcacaccgacttctgatcatacttacgggatggggagccagcactcctgacgcaggccgcactgaccgtacaggcacgcaaccgctcagcacagctacgacctaccgtcgtggccggatggatggccagtccatcccgaataccaaggacgacgacaggactgctgtgcaacgccgacgtgcgatactggctggaccaaatctacgatgaggatggctattcaaccttgggaggttaggatgtgaagctagtcagacggattcatatatgtcacggtatggtcggccatcgtacctgcccgtgataagacacgtcacattacatggactgggacccacatgatgcggcttatcaagtggatgttgcaacgctgtgatgagactgtcatacggaacactg

SEQ ID NO: 69797 - DNA, 231 bp, Zea mays
  Clone ID: MRT4577_163647C.1
gccacgcgtactggacgcccaagcgagtatgcagttgagccaatgcagcggtgcgtacgaatacatacagaatgaacggatctatacaatggaaggatggctaataagactggctgcctcatgaccaggcactaactctgcagctctctatggcaaggaacttatggccttgtcgactaatgccggtacctggggctcggggattctgtaccagtgaccgtcatcccactg

SEQ ID NO: 69798 - DNA, 1601 bp, Zea mays
  Clone ID: MRT4577_163648C.1
aaaccttctagaaacccaccttccttctttcgttcactacttcaccgctccattccgaacctttttaagctctcccatggagtctgacctcatgcccgcgggagagcttatatagcaaaacaatagaagtagaagaagcacataactgttaagctccgcaggctgcagctcgtccccaatgtcgtctgcttctcttgcatcttctctcttgtgcagcagcagtgcttctactagtagaagcgcaaccgtgccaagagtaaccaggacccctcttttttccaagaaccagtacaaaccgcctcttcggcctcttaggagtagttcagtagtaaggcgatcgttgcagcaggagcaagaggagagggtgggcccggcgtcctctgtctccgtggcctccggcgagcgacaggaggaggcgacggcgtcgcatcatattggaggggtggatgaggccaaggcgtcgggccatgttggagaggcagataaaggaggccaaggagaaggcgaaggagaaggcgacggcgaggagaagaggagcacggacgagcagcaggaggtggactggaagtcagacgaggagttcaagaagttcatgggcaatccctccatcgaggccgccatcaagttggagaagaagcgcgccgacaggaagctccgcgagctggaccgcgagcccgacgccaaccccgtcgccggcctgttccggggcttggtgaaggaccagctggcccgcgagaagcagaggctggagctggcggagcagaccttcaaggcactcgacctcaacaagctgaagagctgtttcgggtacgacacgttcttcgcggtggacgtccggaggttcggcgacggcgggatcttcatcgggaacctgcgtaagcccatcgaggaggtgcggtctaagctggagaagaagatctccgaggcggccggaacagaggtcaccctctggttcatggaggagaagaacgacgacatcacaaagcaggtctgcatggttcagcccaaggcagagatcgacgtccagctcgagatcaccaagctgagcacgccgtggggctacctcagcgccgtggcgttggcggtcacgaccttcgggacgatcgcgctcatgagcggattcttcctcaagcccggcgccacgttcgacgactacgtctctgacgtgcttcctctgttcggtggcttcctcacgatactcggcgtctctgagattgcgactaggctgacggcggcgaagtacggtgtgaagctgagcccgtcattcctcgtgccgtccaactggacggggtgcctcggcgtgataaacaactacgagtcgttgctgcccaacaagaaggccctgttcgacataccagtcgcgcgcacggccagcgcgtacgtcacgtcggtggtgcttgccgtctcggcgttcatcgtcgacggcagcttcaacggcggcgagaacgccctgttcgtgcggccggagttcttctacaacaacccgctgctatcgttcgtgcagctggtgatcgggccctacgcggacgagctcgggaacgtgctcccgaacgcggtggagggcgttggcgtgcccgtggacccgctggcgttcgcggggc

SEQ ID NO: 69799 - DNA, 453 bp, Zea mays
  Clone ID: MRT4577_163649C.1
atggcggcagaggcccaggccgagggacgcgcgctgccccgagcgcctcctccgcccctggcgcgcgggggctcttccgcttccccggagaagcgcgggctcccgatcccggggttcgacggcgtggccgaggaggaggaggagcgggtgcccgagccaaagcggcgccgcgcgtgggtcgccgcgctcgacagtgcggtggcgggctgcggcggggacggggatggcgggtcgttctcgttccagcacgcgccgggctgcttcgtggcgccggaggccacgcccaagttcgggtccttcaacccgccaggggaccaagccgagctagcgggcctagatccgaagcccgtggggcgcgaagctgacgcggaagactcgccggaggcgggcgacgaggtctccgctgcgtcggcgcctggggcggaggccaaagacgagaggttgatggcatga

SEQ ID NO: 69800 - DNA, 539 bp, Zea mays
  Clone ID: MRT4577_16364C.1
tttaaaaacagacaaaaaaaaaaagaacaaaacaaaaaaaaaaaaaaaaaaaaaaaaaaaaaaacaaaaaaaaaaaaaaaaaaaaaaaaaaattttttttccttccccgggcggccttttaaaggggcattttttgaaattttccttcaccttggcgggcctttaaaacctttcttttaggggccccttttccccttttggggggtcgttttaaatttcattggccgttttttaccacccccggggggggaaaaacctttgggtttaccaaattaaatccctttgaagaaaatccctttttccccacttgggttaataacaaaaaggcccgcccctttcgcctttcccaacttttccccactttgattgggaaaggccccccccttttggcggccttttaagcgcggggggggggggggttccccccattttgccctttatttttgccagccccttagccccccctcttttggttttttccctttcttttcgcgccgggttgggggtttttccccgtaaacttataaatggggggctcc

SEQ ID NO: 69801 - DNA, 641 bp, Zea mays
  Clone ID: MRT4577_163650C.1
gggaaaaacaggccccactttttccccattccaaaaaaaacccccaaccggtaaaaagggggaaccaaaaaaaaaaaccccccttttttcccggccccgaggaacacccgggggggggccaaaacccccaaacaaagggaaaaataaaccttccccagggggctaacctggggaaaaaaaaaacggaaaccctccaaggcaacctttaacccccccccccctttttgttttccccagggggcccccaaagcgggggaatttaaccctttgccaaaaaaggctcgccctaattaatcccaaaaccgattttaaccacccggggaaccccgttcccaaaggggtgggggccacccagcctaaacccgggggcaaaaaaaaaattttaaaacagaaaattcaaaaaaccctgggcggactggaaatttttgaaaccccgggcccccttggggagccaacccaaaaaagggtccttggggggaacccccatggctttttgccccaaaaggaacccccccttcctaaaacccctaagggccggggccttaaaaaccccccccagggggggggcccacccaacctccccagtcaaaagggaaccgggggggcccacaccggaataaaacccccccccttttaaattt

SEQ ID NO: 69802 - DNA, 288 bp, Zea mays
  unsure (1)..(288): unsure at all n locations
  Clone ID: MRT4577_163651C.1
cccacgcgtccggagctatttctgtcaaaatttgtcctatcctcgtcagattttccagctagggtaaaggttcacttctcaatgaagcttagctacaagaccccagaatatgatcatgataatgaaactttagattctgaagctactgagccattgactgaaaatgaagttgtgaaccaccctagaaaactatgggacgatgattgcccttgggcagagtggtactctgctgaggatcctgttaaaggtaactanagttttatgacttttacaaagaaaatatggata

SEQ ID NO: 69803 - DNA, 153 bp, Zea mays
  Clone ID: MRT4577_163652C.1
gacgtacgattaactaccaaaatagtgagcgaaccagcataggcaccccatcaatggcaggaggaaatattactctccagccaggggcggtcccattccctcgaagctggccctgaccctgctgctgctcctactcctgtactgctcctgcac

SEQ ID NO: 69804 - DNA, 164 bp, Zea mays
  Clone ID: MRT4577_163653C.1
acgcccacgcgtccgaaaaaaaaaaacaatactttatcatttatgtaatatctaataaataatgggaaagtaacaaacctatacctcccaaaatttcatctgacttacccttatcatacccttaacttaataacctactctctccaaatcttatattataatta

SEQ ID NO: 69805 - DNA, 870 bp, Zea mays
  Clone ID: MRT4577_163654C.1
atgacttcccacggatcctcccatgacggaaatgcactgacccacactgacggacttgcacgagagggctttccccgcattttgtgggaggtacttcagggggctggatacacgacaccccctcagtacgcggtgcagcagttcgagaagcaccgagtgcctcgctgtcgggtgaggatgaccttggagcctcatcccctgcagccaggctggcgctctttggactccgagtctttcggataccgagcggaggacacgatcgaggcgatcgctctgcatggattgactactttctgcggattccatcccttggagctggctacccaccccattggcttgttccccgctgagaaggaggacgacccaatgtggaaggatcgggtggagcatgccaaggacatctgggccatctacccaggtcagactgcgcacttgacagtacggtgcatgaatgctctgtaccgtctgcaggtgatgcgcggtgaggcaatgtcccatctgatggcactgctggaggcaacaaagatcatgctggataacagagaggagctcatggttgatttatctcaagaaatggtggagaaggacttgcaggtggagcagctatccactgagattcaggagttggaggagctagtgggcaccagggagaacaccatcgaggtcctggaggatcagctcattaacactcagcagcagcttgctgaggctaacgagcacctggacatgcatcaccaggagatccaggaccaggaggccaacgaggacgtcgacattgagggaggagatgagcctgcctccagtgtggacactgctggctcgggaagaccaccttcccccgagtcgagtgttgcttcgttcgctcactag

SEQ ID NO: 69806 - DNA, 373 bp, Zea mays
  Clone ID: MRT4577_163655C.1
cgcgtgaccgttctcgagagcgagagcgagaacgggagcgggagcgttccttggagagggagagggagcgggagcgggagcgtggccgttctctggagagggagcgggagcgggttcgagagctggagcgttcccgcgagggtgaccgtgaacggcagcgaggcagggacagggacagggactcacgcagagaggccagagcatcaccaggggccattaatgatagttcctcgatgaggcggaatgataggtcgaggtcccagccggacaggtcggagcgtggcccgccgcagccgtccagccccgaccggcagtcgcgtcgctcctcctccggcaagaagcgttcctcctccgaccgctacgacgacatgcc

SEQ ID NO: 69807 - DNA, 443 bp, Zea mays
  unsure (1)..(443): unsure at all n locations
  Clone ID: MRT4577_163656C.1
aaaaaagaaaagaaanccgattgggtacctcgcggccggccgggccggggatttccaaaaaagggatacccgacgcgctattttcccctattgccgcgcaccccagatctcgaggagggactgcctcgtgcagctaattatgctccacacaatggccaccacggtgaccgaggcggcgccggcgcaggagcagcacgtcaacggtaacggcgagcacaagacgcggcactccgaggtcgtccgcaagagtctgagcaagagggaccacctctaccagaacatcctggagacgagcgtgtacccgcgcgaggcggagatgatgaacgacgtccgcgagatcaccggcaagcacccatggaacctgatgacgacctccgacgaggaggggcttttcctgaacacgcccatcacggtcatcggcgccaagaagaccatgggagatc

SEQ ID NO: 69808 - DNA, 520 bp, Zea mays
  Clone ID: MRT4577_163657C.1
ttttttttttttttttttttttttttttttttttttaattatttttttttttttttttttttttttgagagggaggaaaaaaagttctttgtaaaaaaaagattgggggggggggcagaattttttaagggcacaaccaacacaaaaggagcttgatggtcggtaaagggggagcccacctaaaaaagaaaaggggggggggcgaagcccaaggctccaaaaaaaaaccccggccggataaatttggcgccaagggagcacttatgacaacccacggggaaaaacaaggaaagaaggccgcccgaagaaaaaacgggtgaatcccccaagggacggtgactggaaaaaattcggggggaaaaatcgcctcagccggggagacttaagaagagtccatgtgggaggtggcccaacccgaggcaagggcaacctccatgatgggagacatccagcaacccacgggggggggaatctccagaatataaaaaatggagacaaaaaaagccgggggtatgagcgg

SEQ ID NO: 69809 - DNA, 219 bp, Zea mays
  unsure (1)..(219): unsure at all n locations
  Clone ID: MRT4577_163658C.1
gttgttggcaccccaacacgagangaaattcgnngtatgantcccaactanacagantgcaaggttccgcagataaaagcatgtccaagggcacaagatcttccacaagngaatgccgccatnagcantagancttgtgcccngtntgntncagnnttcgttngantcgttgtggttgtcgctcttgntggggttngtntntcntgntnggagtacgag

SEQ ID NO: 69810 - DNA, 400 bp, Zea mays
  Clone ID: MRT4577_163659C.1
gtgcggcgctcgaggcggccggttcgggagctgatgattagattgtttgcacaaagaacggagatctgaatgcgtttcctcgtcgaagcccgcttgactgtttctcatagcaggcttgcttgctccagctcggattgttgacaacttaacactccctcagtccctctgttttgttatgtctggtgtagttttcctccttgagaggaaacctgcaaccacacatacacgaacatgcatgcatatatacatatatacacacatatcctctgctcctgcttttccgctgatctgtctgagcgggctccggggaatgctcctgtagatgcaaaagttatgaaggcggtatgaaaacttaaacacaaacctacactaataaaaaaaaaaaaaaaaaaggccccta

SEQ ID NO: 69811 - DNA, 391 bp, Zea mays
  Clone ID: MRT4577_16365C.1
cgctatctttcaaacacaaacagctctggccgaataatctttctttaagtacctcttttgtgtgaggatgtatatcgccatgaattactcgattccctctctataaacccatcaaagtaaaccaatttctcctgtcactcgtacctaactcgatctcaccagactgtcgatggcctctttgaaccctatcgatcttctaggaaatgatgctagagagccaagccaggtcgctgtgtcttaacctcacaaagtcgggaaagctcctgctgatgttcaagctgctaaggccgctaagtgacgaaccaagcgtgctactactcctcaagcataaagcagtctaggaatgctcctcaaagaggacgaattggtactggtggactccatgcatttt

SEQ ID NO: 69812 - DNA, 520 bp, Zea mays
  Clone ID: MRT4577_163660C.1
acaagctttttttttttttttttttttttttttttgttttttttttttttttttttttttttttttttttttttttttttcctttttcttaaccccggccagggccaccccaagggcaaagtccaccacaccggggggcgccaaaaggggaacccagctggggaccaaaatgggggaaaccggggccaaagggaaacccggggggaaaaagaaatccccccaaaataccacccaaaaaacaaaccggaaaaaaaaggggggaaaccgggggggcccaaaaaaggagaaaacccaaatgaacgggggccggcccacagcccggaaaccaggggggaaacccggattgccaaatccaaaaaaaaaacggccaaagcccggggagaagggggccccttattgggcccccttccacttaccccctaaaaaaagccctgcggctgggggaaccggtttcggaaaacgtaaaagcccacacaaaggggggcacacggttatcccaaaaaacaggggataacccggg

SEQ ID NO: 69813 - DNA, 321 bp, Zea mays
  unsure (1)..(321): unsure at all n locations
  Clone ID: MRT4577_163661C.1
tttcagacagtcatagcgctgcacatctttgctagccctatgtatgacagcttgcagataccctatatgagggactccccgggcaccttttcgagccaccacgacttgttcacagtaacagtcacaggacgctacctcgacggtgaacacgcttgtggtcgcggtgctcccattcctcggcgactttatgagcctgacgggcgccctcagcaccttcnnnnngaacctggcgacggcgaatgacatgaacccgatggggaaggggcctaagctgggtgccatccaaaaatcatggcactggctcaatagtcttgggttcac

SEQ ID NO: 69814 - DNA, 260 bp, Zea mays
  Clone ID: MRT4577_163662C.1
acgtttacttttacgctcaccggcggctatcaggggagaggttaatgtcaactggcgccatgacacactgactctctcctagcactcaaacaccaggtgcaatcccacctccgctacgaaggtaaggccaatggtctaccagacagaatgcaacaactaagcaatcatgaatcattgacgccacaacaacatacatacaaagctcgctacttgccccaaccatcacgctaaaaagggcgaatatctgaatagaaacggag

SEQ ID NO: 69815 - DNA, 446 bp, Zea mays
  Clone ID: MRT4577_163663C.1
gctcggaattcggctcgaggcatttggcagatactatgtgtatgtagactggcccaccaactggccatgggggcggcccagagtggcatctcgaaccactgacaccacaactgaatgcctggactaaggtgtcagaaacaagatcagtggagcccctgttgctcgaggagctaacctgctcctcctttaaccctaagtggtaagaacagcaacttatctctagatgccttgctgttacaacgtttcctccatatccttaggagctggcctctctgtagagagaaccgaacaactgattatttggaatggggtgtacacctcatactgcagtaagggatgaacaatgaatacccatagccaggcccatcggcaccaggttaccatactggcctgtctgtgatgggcatcactgaagggaggacgcacgttcggagacgctgggcaat

SEQ ID NO: 69816 - DNA, 422 bp, Zea mays
  Clone ID: MRT4577_163664C.1
gatttttggttttctaaatggaccttgcagacacctagaagcagcattattttcttaaaattcactcacattttaggctggcgggggtaacgagtttcatggatcctcatttcatgccgaccgatgcatgggatatctgaaaacgcggattaacacatggtctgctactgacacactacgacccttgcctcaaaaacccatatggggtacatccaacacgacgcttactaatatcaaccctctggactaggggaaacatgacgggagcgaacatgataactcggccatgcggtccccaccgttcatgttctcccctttccgtcagaattgactcagcctgcccccctggatccaacgaagcatctcgcgggttgcacacccgtatccgtcgtagccaccggttccctccgtcaccctgtaga

SEQ ID NO: 69817 - DNA, 740 bp, Zea mays
  Clone ID: MRT4577_163665C.1
cgggcgctgctcgccgcgtgtcatggcatctgcgcccgtccagagctcctgcgcgccgcggcttctcttcccccatttcccagctcgccctcctgctcggtcgcgctctgctgctcaccggtgctccagctcgctggccgtgcagctcggccctgctcacactcggtctccagctcgtcgccatggcgcgtctctcccatgacgcttgcccagtccggccgccggtgacatttccgctcgcagcatcttcctcatctacgccgatgtcgtatgaaaattgtcgcgctggcacgtcgatgtcgttgatcatcatcctcatctacgtcaagccccaaaccatgaagatgctcttgtgctggccacgcgccaccagctcgacaaaatgcatcccctgagtatctggtcaaaaacgagattatgtgcaccgctcgtcaggtgtgtgcgatcatagacgtcaagcaaaaaccattgtcgttcttccgactatcgtgtcagatcggtcatggtaagctgatctattattcctgctagctaaaatgttgaatgcgatgattttcttgatttagcatatgtgtgttgaaatcaagattttagatgtgattcatatgaagggtaagggtagacatatctaaattatatgaccgaattaataataaaaattataggactagtgtttgtaaggtctggcagataaatgttgattaaattgctttggatgtatttcgtcgatgcttgaagta

SEQ ID NO: 69818 - DNA, 659 bp, Zea mays
  unsure (1)..(659): unsure at all n locations
  Clone ID: MRT4577_163666C.1
agttcgagcaacacttgttcccaagacnataccatcggctccgctctgcctctcctctccaaccaaaacagagcatccaagaaaccagaggagtggcagagagaggtagaggaagaagaagatggcgctcctcctcttggtgatggtcggtgttgtggtcggcgtggtggtggcgagcagcctgctgctgcggtggaacgaggtcaggtacggcaacggccggaggaaggagggcgggtgcctgccgccggggacaatggggtggccgctcttcggcgagaccaccgagttcctcaagcagggcccgagcttcatgaagcagaggaggctcaggtatgggcggctgttccgcacgcacatcctgggatgcccacggtggtgtgcatggacccggagctcaaccgccggatgctgctacagggcgaggccggcggcctcgtccccggctatccgcagtccatgctcgacatcctcggccgcaacaacatcgccgccgtgcacggcccgctccaccgcctcatgcgtggcgccatgctcggcctcgtccgccctgctatgctccggcaaagcctcctccccaagatcgacgccttcatgcgcgaccaccttcagggatgggcaggcgccgncgtcgacggccaggccaagaccaaggagat

SEQ ID NO: 69819 - DNA, 648 bp, Zea mays
  Clone ID: MRT4577_163667C.1
aaatccacgcggctgctatctcctcccacatcgatcgcgcgggaaacgccgcccgccatgaggacgcgcgtcgaagcaaggatgacgcaggtcgcccagctggcgcgctccctgcacgccccgcacaccgcatgccagccagcatcaacacacccgcggacaaagagaatagagcacggcgaacatcgaagacctcatcagatgaagaaagtcatgcagacccttctgtactctggatgaggacaagaacgtgtgataacaccacgatcgcatccaaaacatgcacgaactcgatggaagagtaagcacccgagaggccatccgacacccctatgacagaggcgtgatacactggatggatgtagtggcgctgactatggtccatcgagctattgatacagtccatgacactaatactttcgaagtcatgaaccagaaacataaccaactcaacagccaaggagaactacatgtatgctgcttctatagcagaatcctattagtctttaggtatgccacagtgctgcctgctgttagtctctgatactaaagaatcagagagctatgcagaatgtgacgcactcggaccagaacggcaacttctacctgcatattctggacagcatggtccaggtacgctgaaagcag

SEQ ID NO: 69820 - DNA, 396 bp, Zea mays
  Clone ID: MRT4577_163668C.1
caatcaccacacgctataacaagactatggtatatgtacatatggacatatcacgcgtgtacaaagagccggttacagcaaaagatacctaaccattaacatctagcaaaacgtaggggagggcgggtgcgagtaggaaggcagtctatctaggccatcaatcacgtcaagatccctgccccggccgcgctgcagcacggcgggggtcctgccgaactccgtcgccggggagctgccgtggctccggcacgggtcccagctcctgtgggccttgctccgtcggtggccaggcggaggctcgcagctctggctcctgccgtaggccgtcctcctgaagctcaggtggtccagcgccgggcgcttgcagtccgacagcgggctcgaggccgtgcggct

SEQ ID NO: 69821 - DNA, 157 bp, Zea mays
  Clone ID: MRT4577_163669C.1
tatcgcgtccgcccacgcgtgcgcgaatacaccgccgttttttgctcgatccggggggaactcgccgctgccgggctagattcggtgggcgaataaggctcggaatacgagatctacaccaagacagcggacaaccgaccatccaaaacgagtatcg

SEQ ID NO: 69822 - DNA, 307 bp, Zea mays
  Clone ID: MRT4577_16366C.1
gcagatcaacaaggaggtgaactcgattctgcgaggggtggtcgggaagaggatgcgggctatggctatgagagaaggcggcgaaagcaccaccggcgccgacgatctcctgggcctgctgctggagtccaacaacacgaggcacgaaggcgagaccggccacggccagcagtccgcccctgggatgacgatcgaagatgtcatcgaggagtgcaagctgttctacttcgcagggatggagacaacgtcggtgctgctgacatgggccatggtcctgctgagcatgcaacgcgagtggcaggaccgt

SEQ ID NO: 69823 - DNA, 431 bp, Zea mays
  Clone ID: MRT4577_163670C.1
acaagcttttttttttttttttattttttatgcacaagcataataaagttttgtttttgatgactttatttaaaagtttttttgttttttatgaaccatggaaggatatataaagtattattgccctaagcagaagcaaaaccggaggagacctggtgctggttctaacatctactagaccgcacatcacatgtctggggcttaactatatacctagatcacctactttggaccttctggaatgattcttcccacacctgatgacgcttgttgtgaagaacatgaatgaagacagccttctgaaaaatagtagcggtgcacaaaaagccatagaatgtctatatataacataattgcacaaattgcagactgttccttgaggcatcaaatccaagagctccttgaaaaagctctgccttcatggtctccac

SEQ ID NO: 69824 - DNA, 550 bp, Zea mays
  Clone ID: MRT4577_163671C.1
ggaaaaaacccggccaaatcctacttggtggggggaaaccctttaaaattttgggaccggacccttaggaaaacccttaaacatccccgcttaaacccaaagagggggggaacctaatgggggaaaaaacgggcgcccaaacccagaaaaaaaaaaaaagggggggaattaagggttggttggtttatcctgggaaaaaaaagggaatttaaaaaaaacccctcttgttgccccccccaaaagcggggtttcccatttttaaccggggggggaaacccggaaaccaaaatggtttttcgttccgggggctaaaaaccctggctaaaaaaaaaaaaaaattggttttgggggggcccaaacaaaaacaaaaaggggggaaaaaaaggggttggggggttaaacccgccacttttgggcccaaaaaagggggggaaggacccaaattttttttagaaaagcacaacgggctacccaaagggttttttaaaaaaagaagcccttttgggggggccctggggtttttttgaaaccccttttcctttccaggggg

SEQ ID NO: 69825 - DNA, 446 bp, Zea mays
  Clone ID: MRT4577_163672C.1
gaaaagggtcgacgaacgcgtcctacgaatgctatctctactcattattgcatatatttctaatccaagcacacctctcatgaatcgcactatatcaatcacgcttccttaaacattatcatcattacccaccccacaattatataatacgcatttcgatttatcactatcgtagtatttcttcaggcttattctattcaagaacacatgtactgcgtttatgttcctaccaaccatctctatattcgtgacataatttgtcgtccactcaactaacctggttcaaacccaacattttatatcgtcgaatgccttttaacttttttccccttcggcccatcgatcccttaaataatagccaattattttatacttagcccaaccaaattaaaaacaaatggtccacccttaacttaaattaattggcaaaaaccaagttctcccca

SEQ ID NO: 69826 - DNA, 539 bp, Zea mays
  Clone ID: MRT4577_163673C.1
caatggctgatgcagtgaaccgcggaggtgaacttctgacaaatctgacaacaggcacaccatgggaggctgttgctaaggaggttggcaccactttgggtactgactcaggcattctacgagcacagatctcaaaagacgttgaaactcttgttgatgtaattgcttcatggacatcttcaaattctggtccaagactacttcgcccatgatcacccagcagtctgcgtacagaaatatgatacgagacgttggcaattaaggagttatgttaccttggccggtggaggaaggatgcatggcactggcaataggagcttttgtggacaaactatcttaacccattggcaaaggcaagatctccttcccagatattttagtctgtaatcaatttggattaaaggtaaacaatataggcttataaggtgaactaagtaagttaggatatttctcccccactaaatgtattaagatcttatattcaagatgactgagtaagagatgctagtaaatggacaatgaaattacgtttttatttc

SEQ ID NO: 69827 - DNA, 633 bp, Zea mays
  Clone ID: MRT4577_163674C.1
cggccagtgcacttgatcttatcggtggcagtactacaagcgagtgacacaagttcttgcaccgatcagatccaacttctgcgcaagatgctggacaagctgtgggacgacgtggtggccgggcctcgcccggagacgggcctcgacaagctccgccgcgccgccgccacccaacccctcgccatcaacacagctgcaggggaggcgattaagcagtcgccgtcgatgccgacgaccccgaccacgccggtgacgccgtcgtcgtcgacgccgccgcgtggcggcagcgtgtggcggagcgttttccaccccgggagcaacctggccaccaaaagcctcggcgccaacctcttcgaccgcccgcagcccaactcccccaccgtctacgactggctttacagcgacgagaccaggaccaggagcaaccaccgctaaataagagccgacggccagagaattgaagacaggaagttctgcgacgccgccatgtttgctgctcttttggttatctaatcctgcatagcgtacgttgctgtctgaggctgcatgtagtttgtcttgagcttcgtactacttatctactagtgcttgtaactttcttttcttgcctcggtctactcgctgcatgctagc

SEQ ID NO: 69828 - DNA, 438 bp, Zea mays
  Clone ID: MRT4577_163675C.1
gtgtgaacagtgcggggtactgttcatctatttatacgcaatcgtaaggctttgtgcattattacattcatgtcctcaataattacatacagggtttacaaatgtcacatggacaataacgccatttgtatttaataacttgagcaacaccttctccttacatcgtctccctatttcgccgtgatgaagcctgcttgatgaagcgtgcttcatcgcacttctcttgtgatatgccgaagcttttctggtgacaaagctcctatagtattcagtaatatgctaaaagcaaatggttagccatctttttgaggaccttcggaagaggaaggcccccaacatcgccctgtaacacctaaggtgttagctctagggtttcgctcaacacactcacaaacctatcatcacatgtgtttttctttgggacataaatcaccacac

SEQ ID NO: 69829 - DNA, 473 bp, Zea mays
  Clone ID: MRT4577_163676C.1
attcggctcgagcaagtgcatatgaggtgaaaagttgttagctgctggtttgttccattttatgttctcatatcctttttaaaactgtcagaattatcttcataaatcattatgtgggcatactttatgttctttaggtacgcaggcgaatgtcaaaattgagacaaacaaatgctcttggtttattatggcaaattaatagcttctgagcatgttatgttacaattatactgtatcaaaagagtgttgtttgctatttgatgaatttgcttctgaaatttgtgcttgcttgaacaataagttgtaccgcaagaagtgattgaaatcgatgatgatgatcctgatggagtcatacttattggtgataaagcacaggtggcaacgaatacgcaaactgctgtatgtaccatggattgctcaaagcatgccaagagtggttgggttcacgacatccgtggtgcaagcacatatgc

SEQ ID NO: 69830 - DNA, 854 bp, Zea mays
  unsure (1)..(854): unsure at all n locations
  Clone ID: MRT4577_163677C.1
tgggtacctcgaggccggccgggacggttaatagtgtggcaggaggagtgggggcgcgggagagatgataaggatggcggcagcgtctcagccgccatcgtcagcccgtgcgcctcttcacggagtcgcggggtagagtcgtggcgtcgattgggaggggcaggaggcggaggcgcgccatctcgtgctgctcgtctccagacgcagatggccctcgccccgccgcgccaccgacctccgcagcgccttccgacgggtcgatacagctctattcccagatcgagagggtaatcacggaggcggcaaagcagtcccgggaaggctggggttcgactggagattggaccgaagtcgagggatcatgggtgttgagaccgaagtccttggagccatcatttgttgtccactttgttggaggaatttttgtcggagccgctccccagatcacataccgcttcttcctcgagtgtctcgcgaacaggggagctttggtgattgctacaccttatgcgagcggctttgaccatttcttcattgcagatgaagttcaatttaagtttgacaggtgtttgagaaacttggatgagcctgtaaatgatctcccnaacgtttggtgttnggacattcattgggatctgttatccacatggttgattggatcaagatatgctgtgcagcgaagtggaaatgtactgatgtcctttaacacaaggnagcaagctctgcgatcccactattttcacctgtaattggtctatggnnnacagagtttggnccctatatttctccaattggcatcgtatccaacaaatccgattttggggcagaagcagctattaagcagcttgagaatc

SEQ ID NO: 69831 - DNA, 1060 bp, Zea mays
  Clone ID: MRT4577_163678C.1
gggggaccttgcgttgcgggtggaaaacagagaggaatctcctgctgcttcgttatcaagaaagaaagcttaggtttggacttcttctccttcacttgtgacctatgaagcaccaatgcttagatttcctgtaattgttcctatggcacagagttttggccctatattctcccaattggcatcgtatccaacaatccgatttggggcagaagcagctattaagcagcttgagaatctaagcccacctgttgttaagcaacttctacctttacttcaacaacttcctccgttgtatatggacctaataaaagggcgggaggacttcattccaaaaccagaagagacacgccgcctgataaaatcctactatggaatttctcggaatctcttaataaagtttaaagatgatcaaattgatgaaacctctacccttgcacaagtactaagttctgaagcagctattagctcattgcttgatatgtcaattcgatcacttcctggggatcatgggttaccattacaacaggttcttcctgatgttccaccagcaatggctgatgcagtgaaccgcggaggtgaacttctgacaaatctgacaacaggcacaccatgggaggctgttgctaaggaggttggcaccactttgggtactgactcaggcattctacgagcacagatctcaaaagacgttgaaactcttgttgatgtaattgcttcatggacatcttcaaattctggtccaagactacttcgcccatgatcacccagctgtctgcgtacagaaatgttagtaacagtgaagagcaacatgatttaatgatgcattgtgagtaacaaaaagttagattgcacttcagtgcggctgtcttagtattttagatccatactatagttcagaaaaaagtgaagatatgtatttatatggtgtatttttgaaccaagatattttgatagaaggaaactttataaggaatagaaaaaaaaaaaaaaaaaaaagaaaaaaaaaaaaaaaaaagcggcctgaaaggagtcttggcaattcaatattggcaattcagcg

SEQ ID NO: 69832 - DNA, 2232 bp, Zea mays
  unsure (1)..(2232): unsure at all n locations
  Clone ID: MRT4577_163679C.1
cgggaacctcgacttgcggctaacagagatctcggctctcgcatcgatgaagaacgtagcaagaggcgagacggggtgggaaacggtcagtacggttaaagttgtggcaggaggagtgggggcgcgggagagatgataaggatggcggcagcgtctcagccgccatcgtcagccttgcggatgcacgggtgcggcggcgcggcttctgcgtcgtccgcgcccgtgcgcctcttcacggagtcgcggggtagagtcgtggcgtcgattgggaggggcaggaggcggaggcgcgccatctcgtgctgctcgtctccagacgcagatggccctcgccccgccgcgccaccgacctccgcagcgccttccgacgggtcgatacagctctattcccagatcgagagggtaatcacggaggcggcaaagcagtcccgggaaggctggggttcgactggagattggaccgaagtcgagggatcatgggtgttgagaccgaagtccttggagccatcatttgttgtccactttgttggaggaatttttgtcggagccgctccccagatcacataccgcttcttcctcgagtgtctcgcgaacaggggagctttggtgattgctacgccttatgcgagcggctttgaccatttcttcattgcagatgaagttcaatttaagtttgacaggtgtttgagaaacttggatgagcctgtaaatgatctcccaacgtttggtgttggacattcattgggatctgttatccacatgttgattggatcaagatatgctgtgcagcgaagtggaaatgtactgatgtcctttaacaacaaggaggcaagctctgcgatcccactattttcacctgtaattgttcctatggcacagagttttggccctatattctcccaattggcatcgtatccaacaatccgatttggggcagaagcagctattaagcagcttgagaatctaagcccacctgttgttaagcaacttctacctttacttcaacaacttcctccgttgtatatggacctaataaaagggcgggaggacttcattccaaaaccagaagagacacgccgcctgataaaatcctactatggaatttctcggaatctcttaataaagtttaaagatgatcaaattgatgaaacctctacccttgcacaagtactaagttctgaagcagctattagctcattgcttgatatgtcaattcgatcacttcctggggatcatgggttaccattacaacaggttcttcctgatgttccaccagcaatggctgatgcagtgaaccgtgcaggtgaacttctgacaaatctgacaacaggcacaccatgggaggctgttgctaaggaggttggcaccactttgggtactgactcaggcattctacgagcacagatctcaaaagacgttgaaactcttgttgatgtaattgcttcatggacatcttcaaattctggtccaagactacttcgcccatgatcacccagcagtctgcgtacagaaatgttagtaacagtgaagagcaacaggatttaatgatgcattatgatacgagacgttggcaattagggagttatgttaccttggccggtggaggaaggatgcatggcactggcaataggagcttttgtggacaaactatcttaacccattggcaaagtggtcttcatggtactatcccgaggattctaagcatgtgtggttgggcgaagtacccaaccccttgcccttaggatcaggcaaggcggaactttggggcaaggttgcccggcttccagacacttggcggtcgggggtctgaggtcggatgaggcagaactccgaggccaagtcgctcacccctcaactctatgttcgggggtcgggcgaggccgaattatgaggcagagttgtttagcccctagacccttggtggtcgggggtcgagtgagacggaaaacgtctatcacttgtcctccgcgtctggtggtcggataggacgaggtctcctcatgaaggccagacgaattcaatcggttgtacatgtcgcctctcattgttcccgcgccacgttatancccgtggtattcgtcccatgacaagtacggaggctgcatgagcataaaatacatgcacttttttccacaactgtnttcgtggtagagttacacgagggaagcaaagggagaaagggtaatttcgacaatttataattctcataagggagaacttttacagtacacc

SEQ ID NO: 69833 - DNA, 139 bp, Zea mays
  Clone ID: MRT4577_16367C.1
tcttcgcctcaccacttcttggtgttcaccccgccgctaacgcctgcggactgcacacgaaaaagattctgccctccccggagacgggctcgggtagtcggcgagcattaaagcatggcgagggggggggactgcatct

SEQ ID NO: 69834 - DNA, 554 bp, Zea mays
  unsure (1)..(554): unsure at all n locations
  Clone ID: MRT4577_163680C.1
ctacgctcccgttgacggcctcctcctccactaccatctcgatgtcatcattgcgttggtggggagacgccacggctgtcccgtgtcatctccttctcgtcgtttaatcagatgtgctatttgcgcgtgctaacagcacatttcagtttcttactctcacaacatcgagtaagacacttaggtatattagaatagtacacttttcgttttaattttttagaacaattactgatgaaacaaacaacactttctatctttactactcctttaagaacatactgtaggcgtccacatctggtgcggttctgcctcccgaggccgcgacgcccccatccctcacaccgcgcatcgtcgtctacttcccgcccatcccactgccgcgtccgccccctcccccaccgaaggaatccccgcggactccgccctggctcccgagaacgcgatccactctcctctctccctcaatccccgcttcctttcatggattgngatcttaagacgccgttctcctgggacctgcccgcctagagcaggcgggacaccttcaccgtacc

SEQ ID NO: 69835 - DNA, 608 bp, Zea mays
  unsure (1)..(608): unsure at all n locations
  Clone ID: MRT4577_163681C.1
cccaggctcccactcttactcccttccgcctacccacgcaaacggggcacgaactaacagccacctctcacgtcccccaccctctggttcatgtcctgctgctccccatgtcgcctccactcgagctcgactacataggcctctcgccgccggcggcagccngccgccgctgaaaacgacgaactgaagggtactgagcgccggctcgggctgccagggtccgggtcgccggaccgccgtgtcgtggctgccaccgcgaccaccctggacctgctcccggccaagggcgccaagcgcgggttttctgacgaggcgcccccgccatcgcctgttgccactgccggaaagggaaagaaggtggcagaagaggagtacgacgagaagaaggtggcagcgaccccgcagccggccgccaagtaggtcgaatgtggaagtggatcttggggttttgccgcctcaaacgaaaaaaggggaaggcttggggctttgcgctgccagcgcgttcatctgccgttcttgggactgcggccactagtggtttgcaaattgtttgtgattgttgcccctttgttggggggtctttgggtgcaagttctctgctatttggg

SEQ ID NO: 69836 - DNA, 1243 bp, Zea mays
  Clone ID: MRT4577_163682C.1
cacccctccaacagatcactcttcgctccggctccgactcgcactctttccccttcccttcccttcccactcccaggctcccactctcaccccttccgcctacccacgcaaacggcacacgaactaacagccacctctcacgtcccccaccctctggttcatgtcctgctgctccccatgtcgcctccactcgagctcgactacataggcctctcgccgccggcggcagccgccgccgctgaaaacgacgaactgaagggtactgagctccgcctcgggctgccagggtccgggtcgccggaccgccgtgtcgtggctgccaccgcgaccaccctggacctgctcccggccaagggcgccaagcgcgggttttctgacgaggcgcccccgccatcgcctgttgccactgccggaaagggaaagaaggtggcagaagaggagtacgacgagaagaaggtggcagcgaccccgcagccggccgccaaagcacaggtggtgggatggccaccagtctgcaactaccgcaagaacacgatgactaccacccagctggagggcagcaaggaggatggtgatgccaagcagggtcaggggttcctgtacgtcaaggtcagcatggatggcgcgccgtacctcaggaagatcgacctcaagacttacaagaactacaaggacctgtcgaccgcgcttgagaagatgttcagtggcttcagtactggcaaggacggctcatctgagtaccgcaaggatggtgaatatgttctgacttacgaggacaaggatggagattggatgcttgtcggcgacgtaccatgggagatgttcgccggctcctgccgcaggctcaggatcatgaaaggctcagatgcgattggactcgctccaagggcagccgataagtccaagaaccgcaactagaacggtggcttcctatccttacacagtccggtacgagggaggagatgcagtgacttgtagggatctgtacgaaaaccgaaaaagtctactaacagctatgacttgtgagaagaattctggcttatggtctgcactagaatggcttggtacatcgtctatggacaaaacacgctattcgattaattgttgttaattaagccttggggggggtacgagtgctattcatgtaaatggtttggtgcatcgtgtgctgctgctgcctgctgctgttactacgattgagctcccctataatactatgatttgaagagagatggcgatgtcc

SEQ ID NO: 69837 - DNA, 2760 bp, Zea mays
  Clone ID: MRT4577_163683C.1
cagccttccacgctttcactctcccttcccgcttccactcccactctcactctccctttccactctcaggctcccactccccccctaccggctaccctacccatcacacacaaacggccaccgggaactcaccactcttcgcttcgactcccactcccactctccctttccactctcaggctcccactccccccctaccggctaccctacccatcacacacaaacagccactcctcacctcccccgtcctccggttcatgtcctgctgctccccatgtcgcccccactcgacctcgactacataggcctctcgccggcggcggctgccgccgctgcccacgacgacctgaagggtaccgagctccgccttggtctgccggggtccggttcgccggaccgccgtgttgtggctgccaccgcaaccaccctggacctgctcccggctaagggcgccaagcgcgggttttctgacgaggcgccgacgccatcgcccggtgcagcttccgggaagggaaagaaggtagcggaagaggaggacgacaagaaggttgcagcgacgccgcagccggtcgcaaaagctcaggtggtgggatggccaccaatccgaagctaccgcaagaacacgatgtctaccacccagctgaagggcagcaaggaggatgctgaggccaagcaggaccaggggttcctgtacgtcaaggtcagcatggatggcttatctgagtaccgcaaggatggtgaatatgttctgacttacgaggacaaggatggagattggatgcttgttggcgatgtaccatgggagatgttcgctgactcttgccgcaggctcaggatcatgaaaggatcagatgcaattggacttgaaaggagacataattcatggtccctgcatctgtggtggtagctctcttggctccaagggcagctgataagtccaagaatcgcaactagaatggttgcttcttacagtccagagcaagagggagatatccagtgactgtagggatctttgtggaagccggaaaacgtctaacagtttcaagaagaattctgccttatggtctgtaccacatgtttttgctgctacgcaagtaaagaactccacgtctgtcaatgttagttttacaacatcgtctacggacaaaaaaaaaaccccccgctatttgattgttgctaagccttcgtacgacgtgtaaatggtttggtacaatgagtgctgcgactacgattgagcacccctctacctagtttgcaaaaaaacagtgtcccatggactgtctgttgtccctctatataaatgtccaatgaagcttgctaatgtgtggtcaaaaaaaaaaaaaaaaaaaaaaaaaaaaaaaaaaaaaaaaaaaaaaaaaaaaaacaactcataacaggtctatttccatttacttaatgatgatggagagatgaaaacagcaacaacaacaacaacaaagcttttcagtcccaagcaagttgggtaggctagagttgaaacccaacatgaggggagtcacggtttagaaacatcaatagctgctttccaagcactctattcaaacacatagtagtgctacatgacttggactatttagttgcatgtgcatcgctacggtttctatatatcatatatggtttctttgtataacataaatcaacacaagttacaggggttagaggcgatgtctctcttcctagagacccatggttcaaatcccagcaagcacacttttttatattttgctgagcgcgtgggggaaatctagcgacgctcgctacgcgcatggggaggccgacgatgcacgacgaaactcccactttaaaggtgtagtgatttgcatgatagaagaaatggtccaggacatggacattcaagaatcaactggttgccaaccagagcaccatggagacttggcatcctaaaccttgaaagccttgacagcccttgtgcagcggatagccatgtccttgacatgctggatactcattatctttgagttgattgggaccatatcttttgaaagtcaagataaaaggcactaagcagggttagcaatggctccgtccccgtgtcccccacccaccctcaactccacagcgttgctgcgcgaggcgagaggtgcatccaaccaaaaatgctaggctttgttgatagccaggtccagctgctgctccctttcttgagtacaggagtggctagccgcaggtgctggagccaaaagttgaagatcgccgccatagccatcagatgacaaggcccaactctcccgctgggattgaattggcaggatagccatttccgtaccccgactccccttagggcatgtacaatatgtgtcttaagttgtgtcttaaagtgtgtctaaggggtgaatgtaaaaaaactcaagacatgtatcttgacgaagacacaatgtcttagctctatgttggagacaggagactagctgataggtcactttaatttattgaatgctctgattggtagaatgaatatggtaagacacatgttttagacatgaccactgtattatgttgtgttttagttgtgtcttatacttatagtaccgtgcagcagtgtctagattgtacatgcccttatatttcccattcctccacaacaattcccgttcccacccacatatcctaatatgcaaacgccaccaaaagctaatttggtggggtactaggagtaacagctaagcaagacctgggcatttaattaaaaatctaataaaataaaaaatccttaaaagg

SEQ ID NO: 69838 - DNA, 476 bp, Zea mays
  Clone ID: MRT4577_163684C.1
tttgggctgatttatgtgcttgcgtggccctagccgtatgagacactaaccgcgaacttagcgccctccccgatatcttgagggttgacataatcgctctcacgaagtggagaagggcgaagtgagaatccgaagcaaacgggtagtactacaagaagtaggctttcgataccgaggaccccacacacgaaaaggttaaaataccgatactgctaagcaaggtaataatactcccggctaaggcggagaaaaaggctggagccctcctagccacaaaagccggagtcttagacaatcgggaggtagcctccggaggtaccaaaagtacgaggccactcggcgaagtttttgcagacatgaagggtcgcgaaaaagtcggcctctcttccttatttaaggaaagaagacccgtagcctcgacactaatcacgacgctaagttagataaatgacgaagccatatacgtcgtcgcggaa

SEQ ID NO: 69839 - DNA, 475 bp, Zea mays
  Clone ID: MRT4577_163685C.1
aatatacggtcataggggggctatacgagccgggcttaatataactaggcagcccatagccgggcagttttgccaatgttgaacggggactcaatggagttatgtagaccgatgtactggtatgacatagctacaaaaactgttcttgactgggataacacgggtcggaaagatactgcactaacagtcatgccgatgaagtaagtcactaagaggtacccatcgtcttggatgtgcttaaggcatgctaggtttctactgggccgcggactaacactggtgatagaaccacctattggttttccttgcgcaaaacctaaagggaccggactcctgtgaactatcatcagctcggcatgatctttctgtgtacaaaaatcatggtgataaaggttgaaaacatgcgactctttcttcatgttaacctactgtgtcacggcctattctctggagctgtaggggcagtattcctcgc

SEQ ID NO: 69840 - DNA, 573 bp, Zea mays
  Clone ID: MRT4577_163686C.1
actttctccgtctacttgcttccgcattgtcgccgctgttaggcgccggaatgcaccagagcagacgtgccgtctatagccgatcgcgcattttacccaacacacacgatgtcatcgatttatgtacattgcgcagtacctccctcagtgcatatattactgatacgcagtgcatttttgcagactgacatgtgctcgctgcggcctatcattactacactacatcggcggagcagctggagctcctctctgcacataaagggcttgatgcgagatgaaggattagaagagctactgttaatatcgtcgaagaaacgctgcgcctgcggcatgatagttgtactcccacacccatggtatcatttgcacttgacccccccattgcctgcctttgcttccttcatattgaagttgctcgattagcactacctagacgtagccatacgacgcttcagaggacatatacactacgagagactatcctgcacatagcatgaggatccctcgtaggtgcaattacttttcatgaggccattaccggacgctactgtcatgtatcactgtatacgtgct

SEQ ID NO: 69841 - DNA, 2293 bp, Zea mays
  Clone ID: MRT4577_163687C.1
atgcccagccctagccgcgcgactccaggaatctccgcggactcaaccatccccgacgactccgctcccctcgccgctcgctgtcgatccagtcgcaatcggcagttgagcggcgcctcctcagtgtccccaatccgcgctccaatattcccgccgctgcgtcaggagacggagtccagaccagagaaaacccctattgctctgccgacgcgtctgcttcctcgctctccgccgacccgactgcttccaccttctccgccatcttccacattcaccgtcgtcaacgggtaccgctccaactgctttatgcaacatattcagatttttatgattgtagatcagcaaggtctgtttttattgaaacatattcagtttttccttatgattgaacagcacgtggaccgtcctccaaataaccccaaacatataacaattcagtcaagccaggagtgtttcagtgttgacattccgtacgcagaacagtcttatccatgtccagaagttggaaatcctccaaatgttgatagtcaaaatttgatcaatgaaacagtacagcttgattctgatgaagatgacttcatgccagctctgaagaagtgtaatgtttctgaaagccatacaagagttttaagaaaagttgtgacaaagaggattaaacatgaagagctaccccgacagaggctcaatgtgaggtgcaaccctcaagatgtcattgcaagcattaacattttgaatgaaagacaacgtgaggctataagacgtaaaggtttctctaacattcttgatatgacagtagatgcgctgtgtagtagatcacaccttcaatggttgatggacaagctggaccccaaggacatgacaattcgtcctggtccagaaaaggaactaaagatcacaaatgacattgttcatcttatccttggggtaccaaatcatggcggtggtaaaccattggggattgatgaagcagttgcagcaagcaacttgagggcagagcttggtctggctaaagacgagttcaatgtgacatttctacaggatcgtttaaggaaaggcgaggatgatgaccttacaatcagatctgcgaagaagtggcacaaccgaatcaccacaaatgtctccacgactatatacggatgctccattgttgtccttttgtattacttagatcacctgcatgcagccgctgcccctcaaaataagattggcacacctcgcattaaattctttgataagaataccataaaagctttgaccaaagttgacaagaggaaggtacaccatggggctgaacctttcggacattgtgaagcaggtggtcatggattcttattaattttgctgaacaaccagccggagtgcaggaccaacatttttgatgcaccgcgccctgccccaacgcctcggcccacttttaacatccaacttccatcgatcaaagagatgatgtcaagtaagatcaacgatctcccacctcgtcatcgatctaaattcacagacattcttgctgcatatgacttggaggttaacaagtcatgcatagccataaaagacagcattgacaaaattattgagaagcaatacgacatagcagacaagtttatagagttgatcgacgaggtactacgtgccgagtctgataatttagaaaacgagacagatgagccacagcatccgaggaattcggctgattcagcaggacacactgttcatgccacccaacccacacccgatatgccatcccaagcttcgcagctcgacacccagctgggtgttactcagtttgaagaaattcatgaaagacaacagcatatccgtagagtgctggagacttgtcccgacgaatcggatgttgttacaggtcaacaggttccatctcaggatgatacactaaaagagacaacaatttctggaactgatccactccttacagagcttgagtgcgttcgttctctttgggatttactctgttccaaggacattgaccaaagcagggttgtcatagattacggtgaatacagtgcaaactgtatcgatatttatgaatctttcgcagagggcaaatgtcttgagaatgtcttcatgcagtgtttcattgagtgtgttcgtgatgattccaaaaatcatcgtcgaactatgacatctaacagattagtacttgatgtcaatgttgggaattgcttgcacaacacattgcctcctttggtaaatctggataaatgcaactcggtgtcggtacctatgcttagtaggggacattggacactgtgtcataacttctttcaatcaacca

SEQ ID NO: 69842 - DNA, 814 bp, Zea mays
  Clone ID: MRT4577_163688C.1
ggcatggatcctgttcacttcctttccttatgttagctcttagtttaatcatcaggggcgacttcttcttattttgtcacatacatttctcggtcaccgagattctcttcaggatgaaactaaagaaagaaagaaagaatactagaacctactaaagcaatttatcagatactccaacataggctggtcagggggcctagttcttgtagatattattgcctacgatctggcccactccaggactacaccatctttattctgatcatctcatcgatctccctccagctttgtgttcctacaaagcaatggtgcgccctttgtggcacaccaagtttgtgctggctgtctacctcctccggtgcttgcaaagaagagctcagcaatttaggtgttgtccacctcacacctttattcatcaacttcttgcccccctcgacatgtcaaaatcccgtctttttgccgctaaggcacttcacacatcaccagcgtcgttgcacttcacacatcacggagacgagtggcgcggctaaaaaaaaatcaaagtaagcagagtagtcaatttcctctgatcattgggcacacactttggcaggtcactgcaacccatcatcggctggtgagttttctccttttgctggtcaccggagaggagcttgaagagccagaggccccatgtgaagcagcagtcgctgctgccgcggcatcgtcttcgctcttgtagctgaggtagcccgcgtccagcacccccacagggctctgcggcacaggcacagggaacgcccggacctggatcgcctcctggcaccgcaacacc

SEQ ID NO: 69843 - DNA, 1654 bp, Zea mays
  Clone ID: MRT4577_163689C.1
gtcatatcagtcactacacgcacgagtgagtacacggtagccaaaccacattatcatggagaactactgcgaaagcatcgactactatcagaagccttcccatgctcccaacaagccaacgaccatggacgaagacaaggacgacaacaatgacacgggcaagggcaaggccgtcctgggcgccggtccttaccaccaccaccaccatgctaccgccgctgaccagcaggaacccgaaagccaggaggagttcttcagcgactccgagtcgggctccgagtccatcgagatcgctgacctcaagaagcgcatgtggaaggaccagctgctgctcatgaagctcgagggccgctcgggccgcgaccgcgaggcccagctcccgctccatctccatccctttgctgacgaccacccggcgacggcgtctgccctgctccagcaggccaaggaccaccaggagtcgcccgagagccggtaccggcgcaaggcgatgctccgggcgcaggacggcgtcatccggcacatgctgaagatgatggaggcgtgcaacgcgcgcgggttcgtgtatggcgtggtgaacgagtccggcgtgcccgtgtccggctcctccgacagcctccgcggctggtggaaggacgaggtggggttcgagcgggcgggcccgctggcgctgtccgtggccgccgccgccggcctggacgaccccgggagcccgatggcggcgtccttcctgcacggcctccacgacatccaggacagcacgctggggtccctgctgtcggcgctcatccagcactgcgagcccccgcagcggagcttcccgctggaccgcggcctggcgccgccgtggtggcccacggggcgggaggcctggtggggcacgcagggcgaggcgcaggcgcaccagggcccgccgccgtaccgcaagccccacgacctcaagaaggcctggaagatctcgctgctcagcgccgtgatcaagcacctcagcccgcgcttcgaccagatgcgcaagctcgtctggcagtccaagcggctgcagcacaagatgagcgccagggacgccgacacctggtccaaggtcatcacccaggaggaggcgctggaccgccacgcgcagcgcgcgctgcagatcacaccgctcgaggaggaagaggacgacgacggtggccccgacaccgacgccggtggcgattctccgatggcggcagcgcacgtcgagaagcgcaagcgcaaggtcggcggccccgggcacacgggcagtagcggcgtcgacgtcggcaaggagttgctgccgcttccggacatagattgcgtgccctacgccgaccgcagctcgatcgaggagctcatgaagctctattaccgctgcctgcaggggaccgatgatggcgagcacgaggcgaaagacgcggtggcagtccgagacggagggcagcataatagcagtatcgccgtcgctgagaccacacagcctccgccggtggcgcacgatagcatgctccaaggtttacagcgcggcgggaccacgctgcccgacgggtcggcggtgcacgacgatgacatgctcagcagtcttctgggaatcgctgatgtcgtggacatgactgacttcccaaacagtccgatttggcagtggggggtttacgactga

SEQ ID NO: 69844 - DNA, 364 bp, Zea mays
  Clone ID: MRT4577_16368C.1
gacccaagcgtccgactctgtataccggccgggctagaagagtttcattatttttgttgttagagaaacactggaacaccttggtggttagagtttcgccctgtcttgctgtatctaccacccatgagagcagctgcctcgcctttgtacaaattcacagaagagctagccagatcaagatgccataccgagggcacatgtatatgtgccgcccatttggataaaccgtgcacatggcgtttgagaaaggagatccatggtcattgaaggtcacgcatatggaacacctgtatgagctccagtcttctgaacagccaagctccatagaggacctcgcggcccccaagaacataaaatttgggca

SEQ ID NO: 69845 - DNA, 362 bp, Zea mays
  Clone ID: MRT4577_163690C.1
ggtctcagcgcagcaaacccctccgggcgggcttttttaccgccgggggttattatcagccccgcgatccgcgcgcagcgtaagggtgcggggtccgagttcaagtcccacacccaccaccgcaagggcccgaccacgataacgatccctcaacttctgaaagcgcaactggtacctcaagggcgtagccaccgacgtcatccacgaccccggccgtggcgcgccgctcgccaaggtcactttccagcacccattcaggtacaagcaccaaacgtagctctttgtcccaaccgagggcatgttcaccggcctggtcgtctactgcggacgccaggccaccctctccatcggcaacgtgctgc

SEQ ID NO: 69846 - DNA, 234 bp, Zea mays
  Clone ID: MRT4577_163691C.1
cgaatttcccgaaccggaacacatttggataaattacaggcggaacctctgcaagatattgcatcacgggaaatgaaaattcttgggtgcaggcattagaaaacaggggacttcaaatggtctccacattaaccatctgtcttcacaagtggctctttaaatggcattggtgctctgatctgcagaaccacttatggcgtagctttctttgtggtccgtacaactccatttggt

SEQ ID NO: 69847 - DNA, 1466 bp, Zea mays
  Clone ID: MRT4577_163692C.1
aactagaggttgagaagcgtctgaggaggcattctgaggacctactcaggaagttgggcatggagttgtctgaaataaagtcagcgtttctcaagtcagtcaaggaccttgagaaggagaagaaaggaaatcgcctcttagaagatctttgtgaccagtttgcaatgggcatcaggaattacgaagaggaactcagagtggtaaagcaaagaaatgtcaagaattatgagctcaaatttgataattcggtgctccatatgtcagaactatggcttgatgaacgaatgcaaatgcaaaatacagatgtcaatggggaattggctcataaaaccacaataacagaaaggctcagcggtgaaatacaggcctttcttctttctaaaaaagcaggtagctctatgaataatgaaaaacatatgaatgataatactagattacgacgtcaatcacttgagtctgtccatttgaatggagccaccagtgctccccagtttgctgaagatgatgacgactctattgctagtgatttgaattgctttgaactgaatatgcacgggcatatgggatcccgcagaagtggcacaggagccatgaatgtgcataaaagaagatcagagcatcctcatgttatatctgctgaaggtttatgcatgtccagtgtgccagtttatttacagaaaggcattgcaaggcccagtagcagcaaattgcagcctgccagtaaaataccagaaatcagctcacaaagcaatgccagaatcactccagcagaagagcagaatggaagcacaggcacccaaattattcaagggtccaacaatgggtcaacgatgaacaacccagatgcacatcatgttgattacctggggcaggaatcctttgatcatttctcccgaacaagtctcttttgtgaaggcactacttcgggggatctgggtaatgtcgggagccccacgcggcaactgaaataccaatccacatctttggaccccgagataacggaatgctcacctgaacagccagtaggtgtgatggagaacaccctgaaggcaaaattacttcaagcaaggctagaggggcgacatgcccgattaaaggcatcaggtggctcctcaactagtaggagaaagtgagagtgctgcagattccggggtttgactgtttgaggcccacacgaagaaatcgaaggtgtaatatagctgacttctatctatggaacttcctttggccgtatcaattggttcagtatctgtgtacatggactttgtgctatctgaatacatgaatcctatttttatatgtgagtcatcttccatgtcaattaggctgttagttagatgccagcactctttaggctaatagctcggactcagaaggattttggttatggcaaaaaaaaaaaaaaacccacgcgtccgcccacgctaggttgccattcactatagacccttgcgacgacccacgcg

SEQ ID NO: 69848 - DNA, 793 bp, Zea mays
  Clone ID: MRT4577_163693C.1
atatatacagtcctatattgcagagcaaaactgcaaaagcatgttcccatatgatatgacagtgtggagatagctagttaaatagcatgcagcatcttggtggtcatgggaagagctggatatacccagtgaggacaccgatagctagaatggcgagaggcgggacgagcacgaacgcgccaacggtcgcgaagaacaccgagtcgttccgcccgctgacctgggtgagcagggcctgcctcttgatgttcctcctctgcgacacggtgagggagttgagcctcttcagaccttccttcagcctcttgcccagtgggagggtgaactcgtcgaccttaccgttggctagcgctgacagctgctcgcggatggtagcacgccgacgcggttctggtggaggcatgccgttctccaggccagccgcagtgtcatcaggtgtggcggacgtcagttgctccaggaggtccagctgtgcacgggccgaagaagctgcaacactgggttcctgtgtagcgccttcctgccgcgcggtcgccctgcagcaaccgagtgacctctgcgcgggggcgacggaggccttgagggggaccctgccgttcttcacccccgccgccgcggcgtccaaggcatggagcctcgtggcggaggaaggcgggaagctgcatgccatggagttgatggatcgacgcgctgatggcgcgagcgcaggttgccacgaaggtaggtaaggatacagagcaacgaccgaagaacgccgaagagagtccccccgggcctcgagaggtacactatg

SEQ ID NO: 69849 - DNA, 209 bp, Zea mays
  Clone ID: MRT4577_163694C.1
catacccgcgcgataaactagttccacagccagtcatctataacaacttccctccctacgtccttagcccttccaccactaactaaccgacagtcactcccgactgacctttgcatcggcatccgcgatgccatcatccgtgtcttccagggcaacttccacgtcagccgcgctcttgccatcgatttatctcttagctccaatgggtt

SEQ ID NO: 69850 - DNA, 996 bp, Zea mays
  Clone ID: MRT4577_163695C.1
ttgacccaacatacaaaatattgctatgcacatatatatatacagtcctatattgcagagcaaaactgcaaaagcatgttcccatatgatatgacagtgtggagatagctagttaaatagcatgcagcatcttggtggtcatgggaagagctggatatacccagtgaggacaccgatagctagaatggcgagaggcgggacgagcacgaacgcgccaacggtcgcgaagaacaccgagtcgttccgcccgctgacctgggtgagcagggcctgcctcttgatgttcctcctctgcgacacggtgagggagttgagcctcttcagaccttccttcagcctcttgcccagtgggagggtgaactcgtcgaccttaccgttggctagcgttgacagctgctcgcggatggtagcacgccgacgcggttctggtggaggcatgccgttctccaggcctgacgatgagcgcttgtcgtgagagttgggttcgatcacagagtatttgtaaccttgtgtgcagtatggatctttaccagccgcagcgtcatcaggtgtggcggacgtcagttgctccaggaggtccagctgtgcacgggccgaagaagctgcaacactgggttcctgtgtagcgccttcctgccgcgcggtcgccctgcagcaaccgagtgacctctgcgcgggggcgacggaggccttgagggggaccctgccgttcttcacccccgccgccgcggcgtccaaggcatggagcctcgtggcggaggaaggcgggaagctgcatgccatggagttgatggatcgacgcgctgatggcgcgagcgcaggttgccacgaaggtaggtaaggatacagagcaacgaccgaagaacgccgaagagagtagcccggccgtatttgggtcctcgtgtgctatatcaaatcaattccccaatttccaccgtcaccggtggcgccgcctgtctccgccacagaaaattgccgtgaccggcgagcggagag

SEQ ID NO: 69851 - DNA, 380 bp, Zea mays
  Clone ID: MRT4577_163696C.1
tgcttggacctttgggctgatttatgtgcttgtttatgtgcttgtttatgtgcttgggttgagcttgaatgggtgcgtgttacgtgtacgtgatgtcgatgagtaatgataattatagagtttaattggaaggaggactggcattagtctatggtggtgttcgtattatatgttggtggtggtgttggttattttttctttgataggtatgtcctccgtgttctccgcgggacgtcatcatggacaatgcatgtttaatttatgttcccggtggtggtttagccgaggtcattcgggttgtgcccatgttgatgttgcgctgtcgttcttgtagtggatggcgttggtaacctaagtcgtttgtcttatcgcgatttcct

SEQ ID NO: 69852 - DNA, 649 bp, Zea mays
  unsure (1)..(649): unsure at all n locations
  Clone ID: MRT4577_163697C.1
ccggttcgactcagcgtccgggcagtagtatgacagtgagtaccgatcgagacatcgatgacgcagggcgccgccgacaggaagctgctgagtagcggcacaatcctcctccggtgcacgttcgtcgggggcgacgacgagcgcggcgacttcacgggcgagcagctcaggtacccctgcaagctgaggcggcacatctgcgccgagtgcgggatgcaccgcggcgagcacggcggcaggcccggcgcgggcgtcagggtcagggacgaggacctgcccccgcgcaagcgggccgtgttcagggcgcggggagagttgcagccgatggtgatgggcctcggcggcggcgaggacgagggcgacggcgagagggaggggcaggcctgggctaccgccgacgccgtcgccaaggggaagcggggggccaggagacggcgcgcggcgtggcgcgagctttgaaaccttgagtatataatgctgggaagccaaaagtcgaattggcgctgccactgtgttttgcacatgggctgtccactgttaatttccactcagaaaactggtcaaaccttgatcaaatttatgttagtagtcgtgctactcatcggggtggaaatttagttcgatgtttactcttttctcnnnnnaaaaa

SEQ ID NO: 69853 - DNA, 376 bp, Zea mays
  Clone ID: MRT4577_163698C.1
gctaactaaatataaataaaaaatctaccactctaaaaaaaaccaatcttacatactcttccttacgacaaagaacctcttttaaaaaggcacctctattcaattcactttccctcgttcttcaacctcttcactactaaaaccctctctttacccaacttaatccccttacaccacatatgacgttggctaaataaaatattccccaagaagcccccaccgattaccccttttaacaacttctcaacctccataaccaataataccccccctgttaccacacattaatcaccacatcccctttccttactcccatcataaccgatacactttctaaccccctaataacccctccttttaatctcttcccttcctt

SEQ ID NO: 69854 - DNA, 277 bp, Zea mays
  Clone ID: MRT4577_163699C.1
tcgtttttttttgagctgatctagaggggttgaaggcatatccaggtgaagttgcaccaagaggtactgaaacacaagcaggccatgaggccttatattatcggcacaaggcacagagtgggctcagatccagtcactgcctgacacacacagacatgatgacaatgaaacggtactggacagagataacaagcttcagactatacatggcacagctaagatcatcagacttcgttgcacgacagccactggacgaatgcttacgggtgacagtatc

SEQ ID NO: 69855 - DNA, 330 bp, Zea mays
  Clone ID: MRT4577_16369C.1
ttggggcgacccacgagtccgtatcctaccgccatgacggccgtatgcgagacctcgacatccacgccgacgccgaagacgatcccagtaggaacacgacttttgtcacggtctctcgcctgctggaatagggcaagaagactgaaaaaacacgcacttcccttcggccaaggggtaaacgaccagcagccaggttttggggaaagaagcccccggaggcaggccaggcagccacccaccggagaggcaggcggcgccgcgagaagacacacccgtggagcgcgcgtgggagggcccgatcggaggggacaccaggacaacgcgcgcgcc

SEQ ID NO: 69856 - DNA, 1060 bp, Zea mays
  unsure (1)..(1060): unsure at all n locations
  Clone ID: MRT4577_1636C.1
gctgtcgcttctgcttaaaggctgcctaacagatctgtttgaaccgtttgcaacttttcttgacgctgatggtatttgagaatggattggtgtcctggcatctgaaccatctctaagctttatttgtggtttcttaacctttgaaccgctcaaactaatagagttatccatgctttggacattgagctgctgccatagcgcatctgattctgaggaatcacttgttgccatgtcaatgtcatcagaatcatcagtattggtagagtaaaatcgagacctttgctcttcatactcatggtcatccttttgtcttgtgttattctctgggtactgcttctccctcatacctgaatgatatctctggtaaaagaagtcaggtaaagctgcattgtcaccctcccagtcaccgactgaattattgttgttcactacaaccttatctatccagtccccaccaattacttctctttcatctcccgtctgaaaatttaccctcaaattgctatctggccatgaaggagaatcatttgctgttaataaatcctggaggtcaaagcttggtttcttttgcctcagtgtaggattggctctagcctctatgtttccaacagcatccaatggttgtctgaagttagtttgggtagacagtagatcacagctaccctgtcgcttaattgaaaaaccaggcgaaggcatctttatgttaaatgcctcagtgtcatgactgatgatttgctccgatcctaaatcttttgcagctaatgctgatttaagttgagcaatctaagcatgaacagagaacatgaatatgttgaatagagaaagggcagtaagaaatatgatagcataacataacagcaaaaataaacctgcgccttaagctctctaacttctccagattctttatttagttgagcagcaccaagttcaacagttgacacacgctcggcaaacttcaaggtgctgatggtttactcctacagcatcacttctgggcttatatgaacaaacatcaaggttttggcctgactnccaagcggacgcgtgcgcggacgctggg

SEQ ID NO: 69857 - DNA, 352 bp, Zea mays
  Clone ID: MRT4577_163701C.1
ggagcggttcggacgagcggaggaggatgacaggatggctaccggacgagcggttgcggtggccatggtggcggcggcggtggcggcggcggcgctgccgctgctcgtgggtggcgcgtacgcagactgctacaactacggtttcaccgactgcttgaccaaggacaggtccttgaaggactactgcagttacgcctgcgacaggacttgcgcgcccgacgcggcgccccggcgccccgtcgccggtctccccataaactgccagctggcctgcgtcagggactcctgcagccgtcgccgtgcagatgctaacgacatgaaggcctgttacgggcagtgctacgaccgttgc

SEQ ID NO: 69858 - DNA, 293 bp, Zea mays
  unsure (1)..(293): unsure at all n locations
  Clone ID: MRT4577_163702C.1
attaattaaggagaaacggatttatttccacagtgtgactggcttctggtattggtaaataccacacatgcaggcccccattgagtgtaagttgcgaaacactacatttgttgtgcattcgcacatggtttttttcctcagtttggcccatggtagtgcaccgccccggaaaaggggagcaaacaaattcttttgttcttgagttccgcacatgaagctatgctcgtgtggatctgataaccaagcctncttatttcccgggccgttgcatatgtacagacatacatcccttc

SEQ ID NO: 69859 - DNA, 308 bp, Zea mays
  Clone ID: MRT4577_163703C.1
accttgttttgactttatgcagctgaagctatacgttgtattatcgaaaggacagatgtgagtcacaaacaatggaatacacctatctgaacaagagcaagtcctgaacaagcgctgctgtgcgccaagttagccacctggagtcaagacatgttggaaacggctaccctattgttagatggggtgatccactgttggatcccgacatctgacatttgataagatatccagaagcaccactagcatagagaatatacatagtccgtcgccttcatggtgatcactgaaagctccgagagcacgaacgg

SEQ ID NO: 69860 - DNA, 881 bp, Zea mays
  Clone ID: MRT4577_163704C.1
ctgcagtcttggtgcggaaccccgggctagctttgcaggcatctgatcctgccaggttccagaaccttatgcagacattggatttccgttatcaggcgcttgctagtggcataggacaacatgccgagcaaagaaaaattgaaattgagagagagaaatctgagaaggcaaatgcacagtgacataataaatcatttctggccgcccttgtttttgccattttgccagtataagccattggtgtctggtcaattccctgtgatttgcaggtcgctggtatgagttttgcagccttagccaacctttaagggtaggacaattttaggctcgcaaaattctatccttgtgaggaagcatcttggataatctgtcacgtcggccatgttcttcgtggcctgttgttgccgtcttggttgcgcaagaaagtttctctcgaggacagttgctccgtcttgttgaatttttttttgggggggcttgtaagagcatttgttatagaaactcacctcaggtggtggggttgcattctccgagttgtcaaagtttattactggttcggagtagattgtatatggtttcggttggtaagacaacggttgtacgagctgcggtatatgtttttttttgtcaacaggacattgtaattgggttttgttctttggtcggcgagagcaagaaaaattggcattgttctgcggagttaccttgtttggtttcattgtccacttgcctgtgttgcaaaattatataatgttatagaaattggatggtgtagcatatatatatatatatacatataatgatacttgcagtgatattataatgttgaaaactgggcattgttcaatagcattaaccaaaaaaaaaaggcccctagggcc

SEQ ID NO: 69861 - DNA, 691 bp, Zea mays
  Clone ID: MRT4577_163705C.1
ccggccgggtcgctctcgtcgtccgtctctgcacctaacgtcaggaatgggcgcaccgcacccagcgcccagagagctggcttgctttcggtcgttgatttgacgacgacgagcaacgcatgcatgatgcgagatgggggcggcgatcggcctcggtcgccggtcggtcggtcaggcacaggttggccgaggcggccggcgcaccatcgtccatcccgctgccgcctgccaacatacgaggtgtgtgtgtctgatcgatctcatctgacatacccacccaaccagcacacacggacggaacaacaaccgagtgtggcgcatatataatgatttatttccatttcccgacggataatatttcttctctacacacaaggcacgttagctgctgggggccggggggcgccgcgagcactgacaaataatcatttggaattaaaaaatcggatatacatatacacgatctttcattcattcctctgcatggaccgtgccattcgatccggatcttgtccgggcgtgcttgtacttgtacgcacacgcactggctgccgctcagctgccggcgccgcacccggccgatcgaaatgccagctgcactgcactgcatgcgatgcgaggaggtgccacaaggccggcggtgatcgcctccgctccgccggttgttgctgaaggcggaaactccggccgg

SEQ ID NO: 69862 - DNA, 356 bp, Zea mays
  Clone ID: MRT4577_163706C.1
tttcacttttacttgtttattttttaattggtgatagggatgcatccataataaatatttggtttttgtgatgctgaaacacagtcccaattacaaggcaacttagaagttaaaactgaaactgaaatataaacagcttaacaccagaaggaagcaaaactatatatgtctttttgcaacagcagttccgaaattgtttttatacactgtaacaacaaaggtaccaacttccttatttcacaaatttaagtttggtttatatattttattgacatggttactcaatgtccacatcattccatctgcatcgtcttcctacaaacagtttttcttctactattcggttatttctcctt

SEQ ID NO: 69863 - DNA, 411 bp, Zea mays
  Clone ID: MRT4577_163707C.1
gggtacctcgagccggccgggagatttttctcacaacagccgggcgatgagaaggagtgttcccccaaaccctagcttccaatctcgatgagccgcccccgcgtcttctatcgaatgcacgccggtgtagccccatgccgggcggatcgtgatgtagctggacttcatacgaggcgcacagtacggccgagatcttcagcgcgctgtgcacggccgacaatggcgtggctaagtggcaggaatccgatccactacaagggctctatatgtcaccgcgtcttgccccagtgcatgtgacaggcagtcgatcttccgcgagataattgcccgctttcgagtgcatccacctggagaatttctttgacgagaaactcgtccgcagaagacgccggtgccccgagagctctccat

SEQ ID NO: 69864 - DNA, 234 bp, Zea mays
  Clone ID: MRT4577_163708C.1
atattagtgcatctatagtggacccaagaggagatggacaatgagttcgaaccaccaacagactctaatactaaactggctcttaccaaaacccctgaaggatgatttctcactgaaaaaaaaaaaaaaaaaaaaaaaaaaaaaaaaaaaaaaaataaaaaggggggggccccccccaggaaagttggccccccggcaactaaattaattccggacccgtgccttcatccaacc

SEQ ID NO: 69865 - DNA, 393 bp, Zea mays
  Clone ID: MRT4577_163709C.1
gaagctcggaattcggctcgaggctttgagccacggtgattatgaccgggagacaccactataagggggggatctgatagtagggactgaggagcgacatggagaataatgaatctggggaacaaggtgaagaagaacggaggaatcgagggaggcacaggcgcgtcacaaaggacaattgccacactcgtatccagcttgtcgccaatcatcgggaaaactaccacagcccgacacaaaggacacagtagaacagaggggtgtaccagattagaccaaacgactggagtgatatcctcaatgaacaccaaattcaggtgcgcatctagggagccttacaaagctggcatgacggtgaccaagacgagaacaccaagggtactcgaaaatatc

SEQ ID NO: 69866 - DNA, 434 bp, Zea mays
  Clone ID: MRT4577_16370C.1
cccacgcgtccgcccacgcgtccgcgcacgcgtccgcccacgcgtccgcccacgcgtcgggtcttcttcagcaaggagcagggccctcgccaaattaggcacagcaccttcaagcacacacaagttccgatgctttcacaaagtccaagcaccaaggataactagggaatggaatccactttggacccgatcatggacttggaaactttctctatgccaccaagcatctaggctatcatcagtctgagcacattagcctagcacccacttgtgttgaaatctttctctataacccaagttatgatgtattgaaaccttttttcttataggtatgagtgaccaagaggtagcagattatatgaaaagtttggcaattcgggtttctggttttgatgtgccaaggccaataaaaaactttgaggattgtgggtttc

SEQ ID NO: 69867 - DNA, 194 bp, Zea mays
  Clone ID: MRT4577_163710C.1
agcccgccccgtggacttgccgcacgacccgcacttcacctggtagcacactggctgatggctcccgctggcttcgcccctctactgaacttccccctcgatcgaatcgaacgaagtatctgaagaaatctgggtcgatgtggacgatgtctccgaggccggcggagctggttaccttttgacctgcaaaaccg

SEQ ID NO: 69868 - DNA, 321 bp, Zea mays
  Clone ID: MRT4577_163711C.1
acgctcatgctgtattcactggtcgccggctatctacatctggagatccattattgagcgtaacaccaaagatacgatcggctcccctgctttctgggacatgggcccctagacgcgatacatacgggggatagagagcgcggcggcgtactgggtgaccttctccaagcgcctgcgcgtactgtgcaagaaggcgtaggaccttgccgtgctgtgcgacgccgacgtctcgctcgtcgagttctccgacaccggcaagctctagcaattcgtgagcctccagtgttgaatgacatcgttgacaggtacaggccacatttc

SEQ ID NO: 69869 - DNA, 677 bp, Zea mays
  Clone ID: MRT4577_163712C.1
cattgggtacctcgaggccggccgggagcaaaatccggcccggcccacactagtagcgtagctgagagcctgagacgatggccgactactaccacggcgtcgagcaggagcacttcaagagggaggagaaggagcataagcacaaggagcgcctcggcgaggtgggcgccctcgcgggcggcgcctttgctctgtacgaggggcaccgtgcgaagaaggacccggcgaacgcgcagaggcacaagatcgaggccggcgtggcaacggcggcggcgctgggcgccggcggctacgcgtaccacgagcaccgcgagcagaaggaggcccactacgagagcaggcagcaggagcacagggtgccgcacgggcacgggcacgggcacggctactcctactactgcgactgaaacgactgatcatcccatcgatcgagatatgcatgcagaactcgatatatatacggcccctagcgccgtacacgtgcgtgcgtgtaagtaaataagagcaaacgtcgtcacgtgtgtgttgctcgatcactactccatcgatctacttattatcgtctgcaaataacgactaagcgcatgcttctgcagcgtgtaacgatccatcactgttactatatctaatgatgcatgcatgcaattaagctgaaaaaaaaaaaaaaaaaagcggcc

SEQ ID NO: 69870 - DNA, 320 bp, Zea mays
  Clone ID: MRT4577_163713C.1
ttcaacgcctgctaccccagaccgtgaggggggggcttttggactatctgcggtgaatctgagagcgacccgtcaccgccacgcttgggcgagagccgagaagagcgccgggccgggagaccggacgattatggatccgtagccgagccgctaatggccgatacgggggacatggagccggtgctgacgcgagccgacagcaaccgggacaggcagaggtcaactgtctgagcgtgactgaggtgctacacacgctggggtgcagctgtgccgaccaggtgcatacggatgaaggccggcagcgacaccgaccgcgacgg

SEQ ID NO: 69871 - DNA, 768 bp, Zea mays
  unsure (1)..(768): unsure at all n locations
  Clone ID: MRT4577_163714C.1
gccggccgggttccgaaagaaaatccggcgcggcccaactctagtagcgtagctgagagcctgagacgatggccgactactaccacggcggcagggccatgtactccaacactgacgagtgctatgacgccggcaggcacggcggcagcgtgagggcgtactcgcgcaccgacgagtactacgacaacgtggacgaccgcatgaggaggcccgcgtacggcgccgacgactgcggctacggcggcaggcagaccgccgtgtacgccgacgagtactcccgcggcggccgctacgaaggctacggcgtcgagcaggagcacttcaagagggaggagaaggagcataagcacaaggagcgcctcggcgaggtgggcgccctcgcgggcggcgcctttgctctgtacgaggggcaccgtgcgaagaaggacccggcgctgggcgccggcggctacgcgtaccacgagcaccgcgagcagaaggaggcccactacgagagcaggcagcaggagcacagggtgccgcacgggcacgggcacggctactcctactactgcgactgaaacgactgatcatcccatcgatcgagatatgcatgcagaactcgatatatatacggcccctagcgccgtacacgtgcgtgcgtgtaagtaaataagagcanacgtcgtcacgtgtgtgttgctcgatcactactccatcgatctacttattatcgtctgcaataacgactaagtgcatgcttctanaaaaaaaaaaaaaaggccccta

SEQ ID NO: 69872 - DNA, 442 bp, Zea mays
  Clone ID: MRT4577_163715C.1
attttcatatatgatagacctgcgaaaagattgcgagccttcagggataacgcgtcatcatactgggagatgatacctttatttcctgaaacatggttatccaagcacaaggaaaaagttccagcagtgattgcgactcgccagctcaaggtgactgcggaatccaagatgggatcgatgcttctacagctgcttgaagttgttccacaccgcccccaccttggccttgcacagcttctttccgctgccggcctccacctcgacagtaaaatgcatggtcctggcatcacgttctgcacatatattatacatgggatgcatcagtggtggctccaacgatatcaactaggtttatgcagagtgacatgtctttcggtcttgctgttgtgctccgtgactgaagcacgcgagctcaatggcctcgaggtcgctctcacaccca

SEQ ID NO: 69873 - DNA, 355 bp, Zea mays
  Clone ID: MRT4577_163716C.1
ccggccggaaaatccggcgcggcccaacactagtagcgtagctgagagcctgagacgatggccgactactaccactgcgactgaaacggctgatcatcccatcgatcgagatatgcatgcagaactcgatatatatacggcccctagcgccgtacacgtgcgtgcgtgtaagtaaataagagcaaacgtcgtcacgtgtgtgttgctcgatcactactccatcgatctacttattatcgtctgcaaataacgactaagtgcatgcttctgcagcgtgtaacgatccatcactgttactatatctaatgatatgcatgcatgcaattaagtcaaaaaaaaaaaaaaaaaagcggcc

SEQ ID NO: 69874 - DNA, 2210 bp, Zea mays
  Clone ID: MRT4577_163717C.1
tcggcgggacggtcactgtacagtcaaaagctccccattcctcttccccttctcacccggcactcgaactctgcggccctgcaaaccctagctttcgctccatggccgacggcgatccggagccggcgccagcgccggcaccggcactggctaacgagaagctccatgtccgggcggcggcctacgtggatgagacgcgcccgccgccaccgctggagccctccgggggtccggacgaggagaagcgcccgcccgaagaggtagaagcggaggtggagatgcacccgccgcgggaaccaaccggggagccgcccgttgatcgcccgggggtggaggtggtggcggacatgaaggcgaacgaagtggagaaggaaaggggggatcgggcaaaggagaagcgggagaaggataaagggaaggggaaggaggagaaagagaaggtggacgaagaggcgaaggggaaagtgactgcggtgatgaaggtggatgggacggagaaggaggtcaagccgacccggcggccagctggggccagcgcggagacgcccatcctagcggtgccggtggtggccgtgccttgcttcatcgcgcctccagggtttgcgggccagtttgcaatgactcatcaagcagctttggcaagtgttacagcacaggcacaaatgcacttgcagtcaccaactccatctgcatgttcggaagtgccatcaagtccattttatatgacaccaagatctctagtgccattgcagcattcaccatcagtaactgaaggaaatatttgtacaccaattgctgacaagtcattttcatctgattcaaaatcacaccatgttgtaaatatggtagctgatggcttcaactggaggaaatatggtcagaagcaggtgaagagtagtgataattccaggagctactatagatgcacaaactctggttgtctcgctaaaaagaaggttgagcatttccctgatggccgcgttgtggaaatcatttacagaggagcccataatcatgaaccaccacagaagaccagatttgcaaaggaaagagtgactcctattagtgttccctctggaggcgaaaccttgaggcttgtgaacacagaaattgtagaatctagcacgcctacctgtgaattggaacggagtgccatctcagaaacttctgagcagcatctcttttgctcaagtgactgcgaaggggatgctggtaacaaatctgaagatgaacatcctagcgcggaagccctgccaaagcgaagaacacttgaggctacagcaccaaatttaacgccggttcgcagaactgttagagagcaaaagattattgtgcaggctggaaagatgagtgatggatacagatggcgtaagtatggacagaaaattgtgaagggaaatccaaaccccaggagttattaccgctgcacgcacggtggatgccctgtccgtaagcatgtggagaaggcgccagatgatgttaacaatattgttgtaacgtatgaaggcaaacacaaccacgacgaacctttcagaagcagcagcataccagtttctgtaatcagtccatcagcgacagccactgagcaacccaacacatcaagtacgtcagatgagagacctccaaccattacccagaaggacgccaacagtgagtctgataaggagacaaccttgaaatttggaggcgagaaggcactcgaatctgcgcaaacgctgctcagcatcaaaactaactccgatgacatgaagaactctgtcctgaaggaaacttctgctgcagttccagtccaaaacaattgagcatgctgagatagggtgattctattgacatctcttaggctgtcatatttattggttgagtgatatgctattatgttaacttgtatgacgtgaggcttggtgttcggtattccgtgtggagcatttgaggaagcattaggtttcaggaagccacgactggttgtttctgcctgtatagattcccattccctagtgtgtacaggtactgtattttatctgaggccagataacatgtgtggggtggttcttgagaacctgtgtgtgctgtattgttctagctcgatctattgcaatagctgatacgagattgtcatttatttatcggtataacacaacaaaaaaaacgtttgcaaaaaaaaaaaaaaaaaaaaaaaaaaaaaaaaagtactctgcgttgttaccactgct

SEQ ID NO: 69875 - DNA, 1330 bp, Zea mays
  Clone ID: MRT4577_163718C.1
gtagcataagcacaaggagcgcctcggcgaggtttgcgttttcgccggcggcgcctttgctctgtacgaggggcaccgtgcgaagaaggacccggcgaacgcgcagaggcacaagatcgaggccggcgtggcaacggcggcggcgctgggcgccggcggctacgcgtaccacgagcaccgcgagcagaaggaggcccactacgagagcaggcagcaggagcacagggtgccgcacgggcacgggcacgcctactcctactactgcgactgaaacgactgatcaccccatcgataaccgagatgcatgcagcagatggacggaacgaatgcatgaactcgatatatataaatatacggcccctggcgtagtgcgggctactcctaagggcgattggggcgctcgcggcccggccgggaaaggaaaatccggcgcggcccaacactagtagcgtagctgagagcctgagacgatggccgactactaccacggcggcagggccatgtactccaacactgacgagtgctatgacgccggcaggcacggcggcagcgtgagggcgtactcgcgcaccgacgagtactacgacaacgtggacgaccgcatgaggaggcccgcgtacggcgccgacgactgcggctacggcggcaggcagaccgccgtgtacgccgacgagtactcccgcggcggccgctacgaaggctacggcgtcgagcaggagcacttcaagagggaggagaaggagcataagcacaaggagcgcctcggcgaggtgggcgccctcgcgggcggcgcctttgctctgtacgaggggcaccgtgcgaagaaggacccggcgaacgcgcagaggcacaagatcgaggccggcgtggcaacggcggcggcgctgggcgccggcggctacgcgtaccacgcggagcaccgcgagcagaaggaggcccactacgagagcaggcagcaggagcacagggtgccgcacgggcacgggcacgggctactcctactactgcgactgaaacgactgatcatcccatcgatcgagatatgcatgcagaactcgatatatatacggcccctagcgccgtacacgtgcgtgcgtgtaagtaaataagagcaaacgtcgtcacgtgtgtgttgctcgatcactactccatcgatctacttattatcgtctgcaaataacgactaagcgcatgcttctgcagcgtgtaacgatccatcactgttactatatctaatgatgcatgcatgcaattaagctataaatgtattcttctatgcgtgttaataatacgtaatctcaaaaaaaaaaaaaaaaaaacggccgcgtgg

SEQ ID NO: 69876 - DNA, 302 bp, Zea mays
  Clone ID: MRT4577_163719C.1
cccacgcgtccgcatggaaaccagctgcgcgcaggagtgcggcaaggcttggccgatgccctctgttgccgccatggcatctcccttccccaagctccagcgcgcacacggcagcagatcgtggtgcccctccctgcaatctcgagtttccccatggcgcctgtcctcgggcatgggcgagctcctctctgccctatgatttttccacggctgtgagctccccctggctgccattttccccaaccgtcgtcctcttgctctccggccatcagcagccagcagctctgctcgcccccttccat

SEQ ID NO: 69877 - DNA, 2518 bp, Zea mays
  unsure (1)..(2518): unsure at all n locations
  Clone ID: MRT4577_16371C.1
gccggccgggcctcgacccgaggcctctccagctctccttctctgacccgacccgaccaatccaatccatcccctctccatctcccatgaccatgaacagcggctcggcaatatactactgctaggttatgctactccattacgaaaaagcgcagagagagcgcagaatggaatcgtcgctcttatcatactccatgactccatcactagactagagagagaaacccttgtacccttgttcctttttatcccccatttctccgagtctccggcccatcgccgaacttcgagtccaaggaagcggagccaccggagaaggggatatttgcctttcccgtcgggggcctagggagcaggagggatgcagcggcggcggggccacacgtgggcaggggtggggaagacggcccaggcggcggcggcgcacgccgcgctcttctgcttcactctcctcctcgcgctcagggtcgacggacgcaccgcatactcctggtggataatattcagtccactatggctctttcatggtattgttgcacgcggaaggttttcaatgcctgccccttctttgcctcatggccgtcattgggcaccatgtcattcgattgttgcggcgcctttactaattgcgttcgagctgcttctttgtatatatcttgaaagcataagagttagaaatcatccatctgttgatctgaagattgtgttccttcccctgttggcctttgaagcaataatccttattgacaattttagaatgtgtagagctttaatgcctggggatgaagaaagcatgagtgatgaagctatttgggagacacttcctcatttttgggtttcaatttcaatggtgtttcttatagctgctacaacattcacccttctcaagctgtctggtgatgttggtgctttgggctggtgggatttgtttataaattatgggattgcggaatgctttgcatttcttgtctgtacaagatggtttaatcccatgattcataagtcccccactcatggggaggctagctcatcatcagcgattagataccgtgattgggaaagtggtcttgtcctcccatcactagaagatcacgaacaagagaagctttgtggtctacctgacattgggggtcatgtaatgaaaatacctcttgtggctttccaagtattgctttgtatgcggttggagggtacaccaccaagcgctcgctacatcccaatatttgctcttttctcgccactatttattctgcaaggtgctggtgttcttttctctctagcaagattagtggagaaggttgttctgctattgcgtaatggaccagttagtcctaattaccttacagcctcatcaaaagttcgtgattgctttgcttttcttcatcatggttcaaggcttcttggttggtggtctattgatgaagggagcaaggaagaacaagcccggttgttttatactgaatctactgggtacaataccttttgtggctatccgccagaagtggttaggaaaatgcctaaaaaggaccttgcagaagaggtttggaggctacaggcagctttgggagaacaatctgaaatcaccaagtgtaccaaacaggaatatgaaaggcttcaaaatgagaaggttctttgtaggatttgttatgagggggagatatgcatggtgctacttccctgccggcacagaactttatgcaaatcttgtgctgagaaatgcaagaagtgtccaatctgccgtgtgccaattgaagagcgcatgcctgtatatgatgtttaaacctcactaactcagcttaacaatacaaatttgtgcatgtgggttctgtcatgctgtgcatttagtctcgatcacaactttaagctgattgaggtttgcacttcagaaagggtctgcaatatatgggggaaatacaagtatatcatgtctaaccaaaagcatggatatgtggttgatgagcattgtcgttttggaccagttatctactgtaagtatgtggtcagtgtatttcccttccctcttgtgattggtagatgagtcagatagtcttgttcgcgtagcagcattttctcagggatatgcagttgttgagaagaaagtgaaacaaaaacagactgtaaataaaaacactgccttgtttgaatctagtccttgtttgagaagaaagtggaacaaaaaaaatgtaaacatctctgttgtattattttgtagtagaaaaatgtctgccgaaatttgtgaccgcaacgnttcgttgtctggtgtcttttcacaatgtgaggggtcgtcttagcaaaattatttaaagattgtggaagcatgtctggagaagaaaggttgcgtctggtctgtgccaaggaatcattgttggtatgttttttcaaaccgtattgcggtgattggaaccaatttaatcatgatactgtggactgctgtctccttttaaagcagagtataaatctaaatattgttcgtcaaactattttaagtttgactaaatttgtataaaagatattgatg

SEQ ID NO: 69878 - DNA, 393 bp, Zea mays
  Clone ID: MRT4577_163720C.1
atggccgattctaaagatctcaacagtgcttctccaaacagcgacacaaggctgactaatttatcggccgcagagcatgaaaacttaaaagatgacatgaagaagatggatgaggagatccaacaacaacaagatcagatgctcaaggtggtgaaaaagtggtacctctcgcacttcaaggtagatcgccaccagaaggtcgtaaaggagagggaaatagacaccgattacatgtcatccgtgctgcaacaactccccacgataggtgatgccaggcgccaaaacaattgcgccaaacacatcggcaacaaatgggtttccctagccatattctggtatgccgatggactcatatccaggacgaccgtcaccaccatcttcgctaaatggtga

SEQ ID NO: 69879 - DNA, 1986 bp, Zea mays
  Clone ID: MRT4577_163721C.1
atggccgattctaaagatctcaacagtgcttctccaaacagcgacacaaggctgactaatttatcggccgcagagcatgaaaacttagaagatgacatgaagaagatggatgaggagatccaacgacaacaagatcagatgctcaaggtggcaaaaaagtggtacctctcgcacttcaaggtagatcgccaccagaaggtcgtaaaggagagggaaatagacgctgattacatgtcatccgtgctgcaacagctccccacgataggtgatgccaggtcagtcgatgatattccatctattaaaatttcttttgataatcggattaaaagtatcacagaggatatagaaaggatggcacatgcattaggaaaaactcacatgcctagttttttatcacataaattaggcgccaaaacaattgcgccaaacacatcggcaacaaatgggtttacccagccatattctggtatgccgatggactcatatccaggacgaccatcaccaccatcttcgctaaatggtgagtcaactctgagcacgaccggaccgtccgtacacaatcacggaccgtccggccctccatcagaccgtccggcaccctacgccggacagtccggagttacacagagcccaccacaagggtcacaggtgttgtctgacgtggccggacagtccgaggatagtaccggaccgtccgatccacccgcggaccgtccgactgtgcaggtcggaccgtccggggcaccagaagtcacctgtgatccgcctagtgcggaaggccgacataaatataatcggccacccaagccccaagaactaaaaaagtcacatgtccctgagcttgtttggcccactaaggccaaaccttctgttcgctcttacccgcactcgaaacaaaaggaaaaggttaagttcacatttaatattactaaatgtgataaaatatttgatgagttgcttaaacatggtaatattaaattgtcacatgtaattcctccggttgaacaattaaaagggcgtgtttattgcaaatggcatggctcctttctccataacaccaatgattgtgccatcttccgtcggcaaatacaatcggctataaacgaaggccagttgaggtttcaaaaagaggtgaaaattgataggccacctgttcctgtcaccacattagagccaatgagcaaaaaggccataattcggccgtgtgcggccgataaaagtaaaaataaaaatatcgtcattggtgatcctcgcacaccaaatatgtcacgcggaatagttactctgaaggctccggacaaaagaaagaccggaggcaccggggggcaagcacgatcggacacccgatcacggtcgcctgtcatgcgtacgccggacgatccgggtactaaggccgaacagtccgagacaggcgcggacagtccggctatgatggccggacggtccgcagatggtcagaagcagcaacctcagaccatcagaccacaacgttccaacacaagtgttaggaaacaaaacactactaagacgtctggacgactcagtagagtcggccctacttttggtcagttgcttgccaaatatatgaagaaggccattccacacaaccggccaataaaacaaacgaagtcaaaagggcgacctgtgcgaaagcaaaagccgactaaacggacccaaagggtagcacaaccaagatcgccttatcatcctcctccagggatagcatgggaagacaccgctcctgcgcccaggtcgcggaccgtccggcccaaggccgcggaccgtccgcgccatcgcagagggcactaccaggcgatccggcgacctgtcgcaggccgccactaccgttcaccttgcggagccgaacccaaggtgccaagtaccgccaagcggttcattatagtgtttggtgaccaaaaaggcaccaacacatgcagaatcagctctggagatcttcttagggaggctttaacattagcacgttaa

SEQ ID NO: 69880 - DNA, 112 bp, Zea mays
  Clone ID: MRT4577_163722C.1
ccaaaaggccgttgggtgctctgaacacacactttgttttaaacacatacctttgtgggcatgctggtggttttacttacattggattggccttccacctttaccattggat

SEQ ID NO: 69881 - DNA, 467 bp, Zea mays
  Clone ID: MRT4577_163723C.1
cggccgctctagcactagggggacgggcgggctgcaggaatacggggcgagcgcaactataattaagcgtacatgaggtctcttaacgcacctcattgccctagctccaaagtgcaccttttcaaataaatatcggataatactttctgacgacacaaactatcttactgggtcatgtccgggatattttctttaatcttcatacacttatctatctcttcacaacaccgtctgggatcacccccccgttcaccaataaatcgttgacacttcccataattacccatttgatcttggcaagacacctattggcaataacaaggaaacgtcaaacgattcttggcgaacgacacttacaacccatcacgtggttcgaacaacacgaatcggcttataacagaaacgcactttttcctgacattggcgtttgagatatccaatgactccgcataaagttgtcttccata

SEQ ID NO: 69882 - DNA, 325 bp, Zea mays
  unsure (1)..(325): unsure at all n locations
  Clone ID: MRT4577_163724C.1
tccggnaacaaaacacaaaaaaaaaactcatcttaaagccaactgggtccaggtgtccacagcttactcgaataactgtctggcgggcatttcttgaatcgacatctgtctgaaaacgtttttttttctttcatcgacttgccgaagacaattatttgcagttttatttattattttcgtttcaccgggccactttctttcatcttgttctcatatattatacccttgagactttgctttcggattcttatttttttctacattcttttttccttttttttcttccttccttcctttttttttgttatcttctcctaactccaat

SEQ ID NO: 69883 - DNA, 348 bp, Zea mays
  Clone ID: MRT4577_163725C.1
gaagagttcgtgactggtgggtcgggttttttaaaaaaaaaagctccaatgttgaacggctacgaccattgatacatgatgttatgcctatccttacacaaacgttaagtccacctacaaattaaaatggccactttagcaaatcttacaagcaaaaggtataaggtagccagctattgcctgggtagcattttttaatggccataaaaaagggttcatttccccatttgcagagtcaagggcgcataatcttcctactttgctgctcagggacaggcaaactcattaaccatacagtccacaggcgcccttgtttattcaaaaagcgaccaaagtgcctggaatccc

SEQ ID NO: 69884 - DNA, 1959 bp, Zea mays
  Clone ID: MRT4577_163726C.1
ccgggaaaaaaaaaaaaaaaaaaattttgttaggtccccacggtgggctttaccaaactcataaaccctctcctcattccgctagggtttctcccaaaatcgccgccgcagccgccgccgccatcagccatggccgctgacacttcgaagcccttcttccccgcggcgccgcactcggctctccgcccctccaggagcgccgcctcgcgcgcgttccctgagagctcctactggcgcgccttccgctcctcggagctcttgtccgacgccggcttccccgtcaccgatctcaccttcgcctcctctgtggaagacagagctgcccctaccctcgccgcttcctggtccacctccgtgcacgtcttctcctccgaccccctcgagaagctccgtaggatctctgtcgcgggcgatctcgccttctccccgtccttccgctgcgacggcgccctcctcgccaccggagacaagaagggtgtcgtccgcgtattccgcgccgacaaggccgccacgggggccctccgcacgctgcgcgcccacgccgccgagacccgcgtggtccggtacccagtcgctggcggcgacaagcttcacctcctcaccgccggcgacgacgcgctcctcgcctactgggacgtgccctcggagactcccgtcttctccatccccgccgcgcaccaggactacattcgcggcggtgcggcctcccctgctgatcacaacattttcgccactggctcttacgaccgcagcgtcaaattgtgggatgcccgcaccagcaataccggcccatctttgtccttctcccacggggaattggtggaaagcgtgctattccttccgtccggcgggctgctggccacggccggagggaacgtggtcaagatttgggacgtcattggtggtggccggctcgtgcactctgtggagagccatgtcaagacagtgatggacctgactcttggcaagatggtcaacactggggagatgcggctgcttagtgcgggcattgatgggtatgtgaagagctttgattttgggaagcttaagatgacacactccttgcggtaccctcagccgctcctttctgtggctgtctcgccctgtgggtctgtggtggtggcagggtctgcgaaagggaagatttatatgagaaataggaagaagaaggctgtggatgaggaagagcaagggatgaaatctgttggtggtgagattgactgggtatctccagagccggagaagtcagtgttgaggccaaattactttaggtacttccgccgtgggcagaatgagaaggcaaaggagggtgactttgtgattgagaagccgaagaaggtgaaatatgcagagcatgataagttactgagaaagttcaggcacaaggatgctctggtttcagcattggtcaagaacaacccgaggagtgttgtggctgttatggaggagctggtttcaagaagaaagctcataagatgcatcgggaatttggataatgaggaacttggtcttcttttggagttccttcaccggaatgcaactttgccaaggtatgctaagttgttgttgtgtttggcaaacaaggttgtggagatgcgcgaggctgatatccgatcagatgagaagctgaaggtgcatatgaggaatcttaagagaatggttgcagaggagattcagatacagcacatgctgcagggcattcaagggatgatttcaccaatgcttgcacttgcaaccagatgaaaaggtgcttttgtttcaaacaaggaatttttgttatatgttagtttgcaggaggcccctgcatgcgatatgtactgctttgaaaaattatgtttgctattggatagtgaagtatgccagatggttgagatactctgttctgtcattctatgctattgtttatctggtttaacatatcattcctaattttgctcgactcgagagtactctagagcg

SEQ ID NO: 69885 - DNA, 352 bp, Zea mays
  Clone ID: MRT4577_163727C.1
ctcaaccgtcgagcgcgctcgcccttttttttttttttttttttttttttttttttgttttgtttttttttttttttttttttttttttttttttttttttgcaacacccaaaaagcaccattttttccttaggattaacttaaaacaaatcctgacgggggtaacgagtttcattgttccacagtccatgctggttgagacagattaaagctaaccgctcgaaggaagggaatttattcgtccaacaacaacaaagtcttagattaaaaagacaacccttggtggcacccaaggggacaaacgaaaataaaccctttggtgcaggtgaaacctcactgaggcgaacaggat

SEQ ID NO: 69886 - DNA, 126 bp, Zea mays
  Clone ID: MRT4577_163728C.1
gctatgcgtacgcagactcgggagaaccagttgccttcagagctctgaagactaataaagggcagatcaaaagattatctaccagagagtgcctggcgaggaactctagcctcctaaaggacatcc

SEQ ID NO: 69887 - DNA, 623 bp, Zea mays
  Clone ID: MRT4577_163729C.1
ctctaggatctgcagcgccggcatacactccttaccctgtaccccaagcaccggagaggaggagcgggctaccatgcaactggggaacaaccagaggatctccaagggaaagaagggcgccaataataagaccgctcatcccttctctaataaggactgctatgacatcacggccccatcggtcttcagtgtgcgcaacattgacaagactctcgtgaccaaaacacaagctaccagaattgcctctgatgcgctgaagcacacactactcgacgtttgactagctgaacttcaaggagacaaagcatcaggcttacatcaaaacctcgatccgtgctgaggatgtgcaaagaaagaatgtgctcactaacttctggagaatgcaattttaccaccgtatcaacgcggatctctagaaaagaaacgacagacattgataggatgccgtgttcatgtctggacatccgacgactacatgctgcaggagttctgcattgagattaccaaaaagcgtccaaaccaagccaagacaacctgatatgctcacgcataccaaagtcggtaaactcaccgcaagatgcccgagattatgtatcaatcaatgctgctatccgtgaccttaa

SEQ ID NO: 69888 - DNA, 925 bp, Zea mays
  Clone ID: MRT4577_16372C.1
ggccggcaggtgttttctactatcgccgatgttcccttccacctcctctggcttctacctcagccgtcccccttcctcttcctcgtagctcttcgcgttcctgtggatctgacattttcctcgtgaatccacggctcagatcgggtggtagatctggttggcctagtcgctgtcggatgcagttgccgagctaggtcgcggctgcgcggcggcggtcggggtcttgcgtcgccagatctggataggaaaacgccgcgcacaagctgagctaaattctgttcgattcgagttcttataggggttcttgtggctgcgtgttttgaatttttttcccactggttctggggtgccgagaaagggaatcgtggctgactcttgttgccgtcgtcgagccagatctggtcatgctgctaccgtggatgtcttattgcttgatctcctttgttttttaatttcttcggttcaagaatagcatcattaccatgagcatacataccagagaaacggagacagattcggaaattttcatttattgctagcttgtagttttggggtcctataatatttttcttggttctcttaattaattgcgctagggaatcaacaaatctgcggctaaaggcatagaggcaaacataaaaaaactgaacgacatgggaacgataaggcagactaggaaccgcttttatggccttgtcgttgattgtgcgaacaaatggttacttgtgaccctacctataaactggtcaaaccgagacggttatcatggatttttagtagtgttactgtattttgttgtttcattcaagttctctgttcagaaaacaatcggaaaaaaaaatcaggaaaaaaaaaagaaaaaaaattaaaaaaaaaaaaaaaaaaaaaaaaaagaaaaaaaaaaaaaaaaaaggcccctagggcc

SEQ ID NO: 69889 - DNA, 3772 bp, Zea mays
  Clone ID: MRT4577_163730C.1
gaagactactacaacccaaattttgcggttgaagatgctcgcggcccaagagaaccatgggatgacttgcattccaagatcgacggtccagaagcatacgatgtcctgaaaaactttgaggagcgctggttaaaggcatcaaagcgcagtgccgctaagaaactgtcaaaattgtcgaggtcgcataatgattcgctgctgtggatcaacaagatacctgatattattgctattgacgacgaaatctattcaaatgacgatgatccagagagatgggacatgcagattttccgatcaattgattcgaattctgtcaagggttttccaaaagatccacgggaggccactagtaagaatcttgtttgtgggaaaatgtactgattgatatgagcgtgcatacaacatatgtgaatgccatccgaggtgctcaacatttcatctatattgagaaccagtacttccttggctcttcatttaactgggattcacatagagatgtagaaaatgacaatgcaaattatgtatgagataatctataaggccatgaaagaagtaggactagatggtacatatgagccacaggattacctgaatttcttctgccttggtaaccgtgaagccgaggacactacttgcacatctagtggaccattctcaaccagtaacccacagaaaaatacaattatgctgcagcttggatatccaatcaggaccaagctcggaataataggagattcatggtgtatgtgcactcgaaaggcatgattgtggatgatgaatatgtgataattggatccgctaacatcaaccagagatccatggaaggaactagagatacagagattgcaatggctgcataccaaccccagcatacattggcaaatatgctttctgctcctcgtggatagattttcgggtacaggaaaatacagtgtacgtgttgaaactgttatcctgccccaggttgggatagacggtggtacattcgtgttggtagaactgtgagaagaaaagatgggaaaactttgctttcttggctgtgatgattatctgctcaaacaagacatgcaaattgcaaaactcttaaaggatagtattagttctatttgttcatatagttctacagctagttgtttcttgctttgttcatggattgcaatactggataagatcatgatggatgttgtgtgtgttttaatcaccatttctaaaatttattctattggtaagacgattctaagatataggtcggagatggattccttgcatatacataaatagataaagaagcaaccggtttataacaaaaatatgtcttctattttgcctgttgcccaattctcttttagtgtagcctacttacaataattaaaagaagagttggtgtctgtttgagtagacaactaagtgcatatataagtacgtgcatgattttgattactaattgtgattttgatgatctttcttttgaagacggtctaacatataagcgcatgatttagatgaacggaattactattgtgccatttctgaagaatcttactgatttctcttcccatgttgttctaagaaggcaagagaaatcagtaagattcttcagaaatggcacaatagtaattccgttcatctaaatcatgcgcttatatgttagaccgtcttcaaaagaaagatcatcaaaatcacaattagtaatcaaaatcatgcacgtacttatatatgcacttagttgtctactcaaacagacaccaactcttcttttaattattgtaagtaggctacactaaaagagaattgggcaacaggcaaaatagaagacatatttttgttataaaccggttgcttctttatctatttatgtatatgcaaggaatccatctccgacctatatcttagaatcgtcttaccaatagaataaattttagaaatggtgattaaaacacacacaacatccatcatgatcttatccagtattgcaatccatgaacaaagcaagaaacaactagctgtagaactatatgaacaaatagaactaatactatcctttaagagttttgcaatttgcatgtcttgtttgagcagataatcatcacagccaagaaagcaaagttttcccatcttttcttctcacagttctaccaacacgaatgtaccaccgtctatcccaacctggggcaggataacagtttcaacacgtacactgtattttcctgtacccgaaaatctatccacgaggagcagaaagcatatttgccaatgtatgctggggttggtatgcagccattgcaatctctgtatctctagttccttccatggatctctggttgatgttagcggatccaattatcacatattcatcatccacaatcatgcctttcgagtgcacatacaccatgaatctcctattattccgagcttggtcctgattggatatccaagctgcagcataattgtatttttctgtgggttactggttgagaatggtccactagatgtgcaagtagtgtcctcggcttcacggttaccaaggcagaagaaattcaggtaatcctgtggctcatatgtaccatctagtcctacttctttcatggccttatagattatctcatacataatttgcattgtcattttctgccaataaagaatctttgcgtaagagtaccagtaggattgccctcaggccacattggaactactatataagctgaaaatctctcattcgaataaatcttgtttgcaattttcagtgctatctcagtgggtatcagattattagcaccaacatctctatgtgaatcccagttaaatgaagagccaaggaagtactggttctcaatatagatgaaatgttgagcacctcggatggcattcacatatgttgtatgcacgctcatatcaatcagtacattttcccacaaacaagattcttactagtggcctcccgtggatcttttggaaaacccttgacagaattcgaatcaattgatcggaaaatctgcatgtcccatctctctggatcatcgtcatttgaatagatttcgtcgtcaatagaaataatatcaggtatcttgttgatccacagcagcgaatcattatgcgacctcgacaattttgacagtttcttagcggcactgcgctttgatgcctttaaccagcgctcctcaaagtttttcaggacatcgtatgcttctggaccgtcgatcttggaatgcaagtcatgccatggctctcttgggccgcgagcatcttcaaccgcaaaatttgggtgtagtagtcttccttgtgaaatgtctgaagagttcgaaatagagtgtgctttggtgtatcatatcggcttccacatagatcatgtcctcccacgaaagcaacgatcttccttctatgattcccagcatcagcatccaagatcattgtcttctggtgatgagtaaagatagtgcctgtttcctgttgcttcacccagctgtgcctcttccctgcagatcgtgggcaaagcagtatctggactgaagagtgcttgaaaaatctccgggtctcctcatcccttgtgcccatgtaaccttccatcttgatgccaaggagtcttcgggacgtgggatcgtcccacacgagcagcagcacctgcacgccctcctgcgacttcctcctgagcaggtcgccgagtgccatgtcatcgtggccgtcgcgcaccaggtggatggtgtggaacatggaccacccgatgatgtagatgagcctccgggcctggcatatggcatcgtagacggacgcgtgg

SEQ ID NO: 69890 - DNA, 296 bp, Zea mays
  unsure (1)..(296): unsure at all n locations
  Clone ID: MRT4577_163731C.1
agaggggaanattaaaacaacagagcccggcaacaccancnncgcacaaaagaccaccagcagcaaccagcggngaacagccagacccacaacacaggacaaacagcgaaaacacaacgggcaacgacaacgacaacccaacgacnccaaacagccaaagagggaccccccaccaccgcccgaggagcacgagcagacgaacgcacccccaacaacaacacaaacccaaacgaacaccccgagcccccaggagaaacccccgcaaggccccaacccacagcgcaacagacgcacgc

SEQ ID NO: 69891 - DNA, 319 bp, Zea mays
  Clone ID: MRT4577_163732C.1
gggggggggaactttaatccactagccactaattatttttcttttaactaacatcccaagggaaaatgaaacccccctggtgcttccccctacttaaaaacccctgtttaaatttggtaacccacctttttccttaaaaaacccggatgtgggacaacccaaaaagaaaaccctgaaaccggggatagcttcttaacaatattttaaaacccttttctgcaaaatggtggtttttaagaacttggtcccgccgggggtgagggccccgccacaaaaaaagaactgggggcccctggtggggcccctaaaacctttccaa

SEQ ID NO: 69892 - DNA, 408 bp, Zea mays
  Clone ID: MRT4577_163733C.1
aagaacgaaaacctttttttttaaaaaaccccaatttgcatagggaaggccctgaattcagcgggctaattcaaagccgcaactcaggaaagaatatgtttgatttttacaaaacacaagcaaaacagaccccgttttcctcggatgaaatcagggtttagcaaaactacgggccattgacaaaaacgatgtcaaaatccaaacaagcaattttgccctaaaaaaaaactaggcatcatccttggggggggtttcccccggcccttggttgaaaagcttcacccccatttaaaaggcattgcccccccaaaacatgtcgggcccccatgtaacctccgcctttataaaccccatttccaaggcccccctaaaaaccccacttaaaaaattggaatactgaagggcttg

SEQ ID NO: 69893 - DNA, 412 bp, Zea mays
  Clone ID: MRT4577_163734C.1
cccacgcgtccgaaagaatatgcttgtcaatgagtgactttcatggggaatcttggaatccaatgtggtctgttgcaaggtatgcacatttaactagcatattacttgaatgtaatgtgtttttggaagccatagtgtacctttagtttttcagctactgtacaatgtacatactcaaattactgctagtcaaatcaatgctctggtaatcagcaaccatttcaacttctgttgccaatatgctatgagatggaataactgaaatgatagtctcgctgttagtacttcagttatgctggtctagtgatccttcactatcgagcagtcaatatgcttcagtttaaattgtttgcatttttttcctttgttggtctgacatgtaaaactttattctgcagcattctcactgggc

SEQ ID NO: 69894 - DNA, 663 bp, Zea mays
  Clone ID: MRT4577_163735C.1
ccggccggggtttcattcataactaacaactttcttgctcattagactttcatattttcccatctttctcatctcaacctaaatccatcaatcctaagcaccaaaaacagaaatcatgggtgtccaagaagtcctcagtcgcaagtccggtgtcatcgtcggtgacgatgtcctccgtctcttcgagtacgctcgcgagcacaagttcgctatccccgccattaacgtcacctcctcttctaccgtcgtcgctgcccttgaggctgcccgcgatgccaaggctcccgtcatccttcagttctctcagggtggtgccgcctactttgctggcaagggtgttagcaacggtgaccaggctgcttccattgccggctctgtcgctgctgcccactacgtccgctctcttgctcccacctacggcatccccgtcgtccttcacaccgatcactgcgccaagaagctcctcccttggctcgatggcatgctcgatgccgacgaggcttacttcaaggagaagggcgagcccctattctcctcccacatgattgatctttccgaggagcccgttgagtggaacattgagaccaccgccaagtacctcaagcgcgctgcccccatgaagcagtggctcgagatggagattggcatcactggtggtgagga

SEQ ID NO: 69895 - DNA, 336 bp, Zea mays
  Clone ID: MRT4577_163736C.1
accacgcatgcggacagtgccaaacgcccattaaccaactgctgcacctaccgccgttaggccgggctagcacgcgcgcgtgctctctctctaccctccctgtgtgcactaaactactaggagtctaggtcggggctacgacaactggtcagagacgaccagcacccaccatgaaaagggttgctcctagcctactacagatagggatgtttacgatcaagctacaatgaaggattctcaggatattcagagcacaacagagttgcagtcatcagcacagggtactaatgaagtgcatagtcagcaaccaaacccgatgaccactgatgctcctgc

SEQ ID NO: 69896 - DNA, 386 bp, Zea mays
  unsure (1)..(386): unsure at all n locations
  Clone ID: MRT4577_163737C.1
gactcctatagggcgattgggttcttcgagccggccggggtgccggccgggctcttgccngatccaagccctaaaccatagggcttgcctggtgcccgggtgggctccccatggcggcaatagaggacgaggagatggagaagaaggtgcagcagtacctgcaccgcgaggggttccgcctcaccgagctcgcgctccacgaggagcgcagtcgcctctccacctccgacgtcgcgcttacccggtctgacaataatccatcgagataccatgagggctacggcagattactaacctgcccccatagctctccctgacccacatcaccggccccgcctctggaaaccaactttttttttttttttccccccccccctccccccccc

SEQ ID NO: 69897 - DNA, 1358 bp, Zea mays
  unsure (1)..(1358): unsure at all n locations
  Clone ID: MRT4577_163738C.1
gcgttctttctaatgtggctggnaaagttttgggcgaggctgatggagttaccaacatatcccaagtaaagagtggcatagaaagtgaaactgaccaagaggttgaagctaagaaggcagcaaataaggtttatagaaaaatcagtgaggaggacctcaatcttgagccactctgtgatgagcttgtagagtactttgctacgagaatgatttcggcggaaacacttcggaggaataaagtcatgcaacgtaactggaataataagatatccattgcttttacctatagacgtgatggagctcttgttggctgcaaatacagggcagtcgataagacattttcacaggaggcaaacacggagaaaattttttatggtctggacgatataaagcgtgcacatgatgttatcattgtggagggtgaaattgataagctgtccatggatgaagctggttatcgtaattgtgtcagtgtgccagatggtgcaccacccaaagtgtttgttaagctttgacctgatgcctttgtatgctctctgtaaagctaggataagaagtatagctatctttggaactgcaaagactatcttgactcggtgaagattttcttcagaattcaatcataacttattttgtgaggcgtgcagatcacttcactgactttgttctggcacatgggaataggcatctaggataatattagcaaccgataatgatcgtccaggtcaggctctggctgaggaacttgctcgtcggcttggtaaagaaagatgttggagagtcaattggccgaagaagaatgatacagatacttgcaaagatgcaaatgaggttctaatgtttttaggtccacaagcattgagaaaggttatagaagatgcagaactgtatcctataagaggccttttttcattcgaacagttcttcccagagattgacaattactttcttggaatacatggtgatgagcttggtattcatactggatggaaatctatggatgatctttacaaggttgttcctggtgaattgactgttgttactggagtaccaaattctggtaaaagcgagtggatagatgctttattgtgcaatataaacaaacaatctgggtggaaatttgttctgtgctcaatggaaaacaaggtaaaggagcatgctaggaaactcttagagaagcacattcagaagccattctttaatgctaggtatggtgggtctgcacagcggatgactcctgatgaatttgaagcaggaaaacaatggttaaataaaactttccatcttatccggtgtgaagatgatagccttccatctattaattgggttcttgaccttgcgaaagctgcagttctaag

SEQ ID NO: 69898 - DNA, 340 bp, Zea mays
  Clone ID: MRT4577_163739C.1
attcggctcgagctggttcaaccacctttcatgtcggccgccgccgtttaattctatatttgggctttgttaaacaaaaaaaggggtggagtgcacacacatgatgaatgtttcggccataagaccaacatagtcatctgatattgttgaacaactggttaataattcttctgaaggaataataagaatgtccaaacgggagaaacacaatttaggcgatccatgctaggatggaactcctgtcgggaacaatagaggacgcgagcaaagagatgactaccattcagcagacaatgtttattaacacacgaaagacaggtatcttaacgacgagcacaat

SEQ ID NO: 69899 - DNA, 1514 bp, Zea mays
  Clone ID: MRT4577_16373C.1
cttttaactgcaccggtgatggacaagaatatgtagttttggccactcgttgttaatctaactgatacctttaaagagttattatttttctcttttgggcaattcaagagttcttgttttcatcaaatataaaggaagcaaacttctgacaccctaaaagttctcagataatgaacaatagaattttcacttcaaatagtttcataatatacaatcgtatcatgatgcataaaggatcatacatcgtttatacatgacaaagaaattattacttcatttgtataaggatattgttggaatgcaattcggtaagggcatggcagagggaatttcattccaaagttccatatctagcctttcatttgcatgaaaaaaacattattttttagatccagagaccagtacatattattgtgtcatactcacacgtgccttgcaatttacaaactgaactttctgagacatgtttttggtttgcaaacccttatagcatggattctgtcatatacttgtgtaattagggaggcaacagattgtcaagattccagacttctcgagtgatctgcaagtaattttaatgtggtttctggtgattttgcaaaaataactgcataaccatcatccatgtgctcagcgctttcagggaaaagctgccaaacaaggcagcctcctccaatcaccccagtcttccaagagcgcaaaaaaatgttgtagactgtatccatgaaagcttcacgaaacttatggccaaactttccatccttaagcgataccccaaactccccgatcagaattggcatcccaagcaagttggctgcatcatcaatatgctgttgcatccaggttttcacaaaatggaggtgactgtcctcttcagagtgagttaaccaattgtcagaataaatatgaacagaagccaaatcaattcccagtgcatgatggttcctgataaaatctgttccaatagttccagaataagcatctgggttcacgtgcagaagttctggagtcgacggaccataaaacccttcaacaccgatctctaaaaggtgcacagggtctatatccttcacataagacgccatctcttctatccatgcctgcaatgtgtcgcctgatggatcggaatggcagcgtggctcattaatcagctcccaggcaagaatcgtagggtcatccatgtaggcgacatttgtgattgtgttttttcttgtcaaaacagccttaacaaaagctttatagtagctcttgattgtggcgtgagagaagaaagcgtcgtcatcggaagtaagatccaggccagcctcctttccccaccttacatactgtgccttacctccgtaatcttcccagttattacacagtgacagtatcagtctcatcctatggtttcttgcctcgctgatcacgaaatctaatgcctggaagacctcctcgtcgtaggagaagggcttgagctgcagcgcgcggtgccccccgtcgttaaggcccaggtgcggcacacgcccggcagg

SEQ ID NO: 69900 - DNA, 2766 bp, Zea mays
  Clone ID: MRT4577_163740C.1
actccacaaaagcctaacccgtcgcgagatgagaggacaccggaaggccatgtgccggcatcttccccgccgcccgatccgggtcgtccgtttgtcgaggggacatggacgactatgcagcccgagctccagaccaacacacgggggccgacacatgacacgggcgcaacagtattgactggctatcgtctcatccctgacgcagtgaccatgatcacctatgacctagccgagctccgtgcctccgtccctccatctcccttttgcattccgcccccagattcccgaatcctccggctcgccccctctccgagactccgactgcctcccctgaagctagctagcctcctagcccctggtctggtcctcccgctgtgcctgtgaggcgctgctctaccaaggaggccgctggctgctccgctgcgctgcagtgaggctgcaaaagctggcggcttcttctcactgggcgtcgccataaacagtggagattcccatccccattttcccaattatggatagccagcggcaaccgggggagcaccgctgaggccgctcgcccgccatcccgcccgccattgctcccgtcgagggtcacagattatcctacatattgtagctccgcaacctgttcagcaaaatgaggccttcagatgacagggcacagctttcaggctttgcacaatcagatgaatcgacacttgatgtggaggggcattgctgccatcagccgtcattcccttgttcgccgtcaatgcaaccgattgtttctgggtgcacacacacagagaacagcgcggcatacttcttatggccaacatcaaacctacagcactgtgcagccgaggggcgtgcaaactactttgccaacctttcaaagggacttctgccaaagattggccgtcggctgcccaagggccagcaagcaaacagcttgcttgacttgatgactataagggctttccatagcaaggtactgcgttgctttggccttggaacggcagtgggcttccgcatcaggaaaggggttctaaccgatatccctgcaattctttgcttcgttgctcgcaaagttcacaagaagtggcttgatccggcccattgccttcctgccattcttgcgggtccaggaggtatttggtgtgatgttgacgttgttgagttttcgtactacggtgctccagctcaaactccaaaagtgcaaatattcacagagcttgtggataagttgtgtggcagtgatgaatgtattggctccggctctcaggttgcaagtcaggacacttttggaactttgggcgccattgtaaaacggagaactggcaacaagctggtaggtttcgtcaccaaccgacatgttgctgttgacttggactacccaaaccagaagatgtatcacccattgccacccaaccttgggcctggtgtttatcttggagctgtcgaaagggcaacatcttttatcacggatgatgtttggtatggaatctatgctggaacaaacccagagacatttgtacgtgctgacggggcattcatcccatttgctcatgacttcgacatctccacagtcacaactacagttaggggtgttggtgatattggggatgttaaggttatagatctgcagtgtccacttaatagattaatagggaggcgagtatgcaaaatcggcagaagttctggccacacgactggaactgtggtggcttatgcccttgagtacaatgacgagaaaggaataagctttttcactgacctccttgttgtcggtgaaaaccgccaaacttttgatctagaaggtgacagtggaagccttattatcctgactggccaggataatgagaagccgcgtcccattgggataatatggggtggcacagcaaaccgtgggaggctaaagcttaggtgtgaccatggccctgaaaattggaccagtggagttgatcttggccgccttctggatcgtcttgaacttgaccttatcataaccaatgaatcactcaaagatgccgtgcagcagcaaaggctcgcgttggtggctgcagctaactctgctgctggggagtcgtcgacagcagcagctcccgccccagaagagaaggtggaggagatcttcgagcctctggggatcaagattgagcagctgcctcggcacgacgtttcggcctctgaagcggaggaggcagctgggatcaatgtggaagagcgccagttcatctcaaactttgtggggcaggtcccctgtgcgtgatgaccagggtgctcccaaggcaaattgcgaacctgaacaatccgtcagaggaagagctcgccatgttgctgcacctaggcgaccagtagcccaagcggcttcgcagacagaatccgacctcgacgggaaacggcgaagcgctcatttcagtgtctctacatcgaagagtcgcaagtagtccgaagaaggtcacctggagttcagcaaactgaacctgcatcagtagcttagaccagcagcttcctggcacaaacattataatgaactatgctgaaacttgattcagcacttacatgatttgggtggtattcccttcagttttgctgtgctcgtgaagactttaatatgtacaatgctgagtccctgtatcaaaacaatgcaggtagtgataaaatcgtattgatcaccttctctttcctaccattaaaggtggagttgtttcaagatcactagatcagcttccggaaaccttgtgtcttcaccttttgaattattcttacaagttttttactggt

SEQ ID NO: 69901 - DNA, 1026 bp, Zea mays
  Clone ID: MRT4577_163741C.1
ggcacagcaaaccgtgggaggctaaagcttaggtgtgaccatggccctcaaaattggaccagtggagttgatcttggccgccttctggatcgtcttgaacttgatcttatcataaccagcgaatcactcaaaggttcggcattttccttgctttcagttatatgtgttttactcgtttttgcatcccttttcagatactggaaaatccactgtgatgtacgcttctgttgctttttgttccacgacagataactgacataatttatcctcgataaagatgccgtgcagcagcaaaggcgcgcgttggtggctgcagctaattctgctgctggggagtcgtcgacagcagcagctcccgtcctagaagagaaagtggaggagatcttcgagcctctggggatcaagattgagcagctgcgtcggcacgacgtttcggcctctgaagcggaggaggctgctgtgatcaatgtggaagagcgccagttcatctcaaactttgtcggcatgtcccctgtgcgcgacgaccaggatgctccgaggcaaatcgcgaacctgaacaatccgtcagaggaagaactcgccatgtcgctgcacctaggcgaccgggaggccaagcggcttcgcactgacacagaatccgagcttgacctggagaagtgacacactcatttcagcgtcttcgcattgagtcataaagtagtccgaagaaggtggtcacctgtggttcagcagactgaacctgcagccgtagctgcagcttcctggcacaagccttatcatgtactatggtgaaacttgattcagcaattgtaggatgttaggtggtatcccctgcagttttgctgtggagacttgatatgtacaatgctgaatcccccctatcagaacaatgcaggtagtgataaagtggtcttgatcagtttttcctgtccaaccattaacggagttgtttcaagatcactagatcagcttccggaaaccttgtgtcttcaccttttgaattattcttagaagttttttactggt

SEQ ID NO: 69902 - DNA, 840 bp, Zea mays
  unsure (1)..(840): unsure at all n locations
  Clone ID: MRT4577_163742C.1
gtaccctcgnaggcnncggccgggcccgggaaaaaaaaaaaaaaaaaatctcccttttgcattccgcccccagattcccgaatcctccggctcgccccctctccgagactccgactgcctcccctgaagctagctagcctcctagcccctggtctggtcctcccgctgtgcctgtgaggcgctgctctaccaaggaggccgctggctgctccgctgcgctgcagtgaggctgcaaaagctggcggcttcttctcactgggcgtcgccataaacagtggagattcccatccccattttcccaattatggatagccagcggcaaccgggggagcaccgctgaggccgctcgcccgccatcccgcccgccattgctcccgtcgagcattctttcaggtttcggggaaattccatgggatgagcattgctcgtcgccgcacagcactccagagtccagacttattagctacaaacaggcggttgatttttggctactccataccaactcccgctggcgttttttttttggggccttttgttcctgcttttctctttcaagaaaggtcacagattatcctacatattgtagctccgcaacctgttcagcaaaatgaggccttcagatgacagggcacagctttcaggctttgcacaatcagatgaatcgacacttgatgtggaggggaattgctgccatcagccgtcattcccttgntcgncgtcnatgcaaccgattttgttctgggtgcacacacacagagaacagcgcggcatacttcttatggcncacatcaaacctacagcactgtgcagnccgagggggcgtgcaactactttgcccaa

SEQ ID NO: 69903 - DNA, 230 bp, Zea mays
  Clone ID: MRT4577_163743C.1
ttcccctttttgtttttttcttaccgaggaaaactcttgctcgacaaactcaccatttatccctagtatccaagagacacatggttccccaaaaaaaaacgataacctcgccgaccacactgacgaacatgcatggcccccaacaagcctgaaataacaccatccgccctgcatgacgatgcaacattaatagtcgacggccaagaacttgcggccgacctcgtcctcag

SEQ ID NO: 69904 - DNA, 246 bp, Zea mays
  Clone ID: MRT4577_163744C.1
gagccagccggtcaaacaacagtcacatctcacacccggcgttctcgcgtgtccttctctccgagacgagacggacgggacgggatgcaccaccgtaccggtgtcatcccacccgctgggtcagagcgggggcccggccacccgaatgatacacatcggaacgccgcacgaggagcaacgcgggcacggagagggccgccagcgagggctcagtgcaagctacaggttcctggatccgataccacc

SEQ ID NO: 69905 - DNA, 242 bp, Zea mays
  Clone ID: MRT4577_163745C.1
tccgggctatctcatgacagtacatcggcttttacgtgctacatacgacgacgacggggcaaggtccactctatacattcgagctgtcctccgccttgccccgtttccacggcctccctggctacaccactcccaggtccacattggcagctctaccttccgtgagggtgggcatgaagaggtcgtcgtcacatgtcatccgctgcgactacatctgcttcaacaccaacctgatcattgtt

SEQ ID NO: 69906 - DNA, 279 bp, Zea mays
  Clone ID: MRT4577_163746C.1
cggacgcgtgggcggactcgtgggcggacgcgtgggcgccgacgcctacctattcggcgggcccatcttcaacgactacagctgcgtcggctaatccctgctgctaaagcgggagaaggccggcatagagcagccggaccgtatggaggtcggagacggacagcagatcgggtgaatccatatgcccgagttcctgcgcgcgctcgccaagcgcctgatgcgcaacagcactgagtacgacaactatcgacggatcatagtactcgaccgcgagccgat

SEQ ID NO: 69907 - DNA, 925 bp, Zea mays
  unsure (1)..(925): unsure at all n locations
  Clone ID: MRT4577_163747C.1
cccttgatgccttgcgacangcttcccacnaggtagtaactttgcaaggttcttaccatacaaaataagttgacctgtaatttactaactgttattatcttcttcagtttcaagcactgcttcagtggtccaggctaatcctcaaatcttgcagccaatgcttcaagaactaggcaaacaaaaccaaaatcgtgcgtttgattcaggaaaatcaagctgagtttgtccgcttggtgaacgaaactccggagggtggtcctggagggtaagcaaaattaaataattatgttaataagtcatgagtacataaatattacattgtgctgtggtgaaccagaaacatattaggtcaactggcagctgctatgccgcaatcggtgacagttaccccagaggaacgagaggccatccagcggcttgagggaatgggcttcaaccgtgagcttgtgctagaagttttctttgcatgcaacaaggacgaagagcttgcagccaactacctccttgatcatggccacgagtttgacgagcagcagcaatagtgggtgatatggtgtggtggatgcaggaaaccgaggcagtagcagaacagcatagtgtcgttctgatgacctccgcctgatgagagatacttggttgtttatgctatgctgctgaccatcttttattttcatgtgttcggaatgctttctaagtacatattaattcaatatctgttacaccgtgtccaaatcgaggcctttgatttggtgggaagaggtagactgctgatttgtttagtttgctccttttctattatgaattgtaaggcgtcttggcttttctagctaaatagttttttaaaaaagcatctaaatgtaacacatnataggtgcgttgtaaaaactattgaatctacaaaagctaaaatgatttacaatatggt

SEQ ID NO: 69908 - DNA, 207 bp, Zea mays
  Clone ID: MRT4577_163748C.1
ccgttcgaccgactcgtactcttcaatcctcgttaaacactcttccactctaaccttaatgctgctcctcttcatctacgcggactgagtcatttccatcttactttagctaccatccatcctcgaacttatgaaaatcaataacccattcattatcctcagctacagctacatactcctgcacctctataccatccctactgacct

SEQ ID NO: 69909 - DNA, 1808 bp, Zea mays
  Clone ID: MRT4577_163749C.1
ctcgaggccggccgggccgggaatcagtcacggtcccacgggacagcgagaatatctaggtcgaccctgagcgccagccgccaggcgcggctggctcttttgtagcctccggattttttttcgcctataattactcttccccgtgcgccctcgcgaggtcgaacccccaaggcgaggcgacgaaaccctcgccagtccccaactcgaacctcagtcaggcagcgtgaggagggagagttcaaggaccgaggcggcgtcgggcgagatgaagcttaacgtcaagaccctcaagggcaccaacttcgagatcgaggcgagccccgatgcgtcggttgctgacgtgaagaggatcattgagaccactcagggtcagagtacctaccgggcggaccagcaaatgcttatataccaagggaaaattctcaaggatgagaccactttggaaagcaacggagttgctgagaacagcttccttgttataatgttgtccaaggctaaggcatcgtcgagtggagcttctaccactactgctgcaaaagctcctgcaactctggcccaacctgctgcccctgtgccccctgctgcatcagttgcaagaacaccaacacaggctcctgttgccacagctgaaacggcacctccaagtgcccaacctcaggctgctccagctgctacggttgctgctactgatgatgctgatgtgtacagtcaggcagcttcaaaccttgtatctggcaacagtctagaacagactatccaacaaattcttgacatgggtggtggtacatgggaacgtgatactgttgttcgtgctctacgtgctgcatacaataaccctgagagagctatagactacctgtattctggaattcctgagaatgtggaggctcagcctgttgcccgagcacctgctgctggccaacaaacaaatcagcaggccgcatcacccgctcagccagcagttgcattgccagtgcagccatcacctgcctctgcagggcctaatgcaaatcctttgaacctttttcctcagggtgttccaagtggtgggtccaacccaggtgttgttccaggtgcaggatctggtgctcttgatgccttgcgacagcttccacagtttcaagcactccttcagttagtccaggctaatcctcaaatcttgcagccaatgcttcaagagctaggtaaacaaaacccacaaattctgcggttgattcaggaaaatcaagctgagtttctccgcttggtgaatgaatctcctgagggtggtcctggagggaacatactaggtcaactggcagctgctgtgccacaaacgctgacagttaccccagaggaacgggaggctatccagcggctcgagggaatggggttcaaccgtgagcttgtgctagaagttttctttgcatgcaacaaggacgaagagcttacagccaactacctcctggatcatggccatgagtttgacgagcagcagcaatagacgtggggtggatggaggaaaccgaggcagttgcagaacagcgagtgtcgttcttatgccctctgcctgacgagagatactcggtcgtctatgctatgctgctgactatcttttatttccatatatatttgttcggaatgctttctaagtacatattaattcaatatcaagcgttacaccgtgtatgaaagcctgtcaaatcgtggcctttggtttggagggaaggattcgattgctcacttgttttctttgctctttttcctggcgtattgttgcattgtatcaatattatgagttttagggcgttttggattttctctcgtgc

SEQ ID NO: 69910 - DNA, 277 bp, Zea mays
  Clone ID: MRT4577_16374C.1
gtgttgtctagttaccgccgtcgaagctcgaatcgctcagtcggctcctagcagctgatccatatctcgatcatgtcagtggcttagcctaccgccgtagacgaagctgctacatacggccggagaagaagacgtctctggtggctcatatcacagtcacaccgatgtgcatgtcccttttacttcttggccgatctggttcccttctatgattgtccttaattaatcctgggggataaagggaaattggttttttgcaattggttcctggaaggta

SEQ ID NO: 69911 - DNA, 248 bp, Zea mays
  Clone ID: MRT4577_163750C.1
tttatttgttttttcatgggtatttgcaacgtttttttattcacaacaataaaatattattttctgcaagagggaccaaaagaattaaataaaactaccctccaaggcgacgtacgctagttacataggacatgccaagtcatttcagtacaacaagttggaacaaagaaaagcttttcaaaccatttcaaacagaatatgccgctttttgacaaagtcctatagggccctgaaactcggattgtact

SEQ ID NO: 69912 - DNA, 1918 bp, Zea mays
  Clone ID: MRT4577_163751C.1
ggccgcttttttttttttttttttcttttttttttttttttttttttttttttttttttgagcaatcgaatccttccctccaaaccaaaggccacgatttgacaggctttcatacacggtgtaacgcttgatattgaattaatatgtacttagaaagcattccgaacaaatatatatggaaataaaagatagtcagcagcatagcataagaacgacactcgctgttctgcaactgcctcggtttcctccatccaccccacgtctattgctgctgctcgtcaaactcatggccatgatccagaaggtagttggctgtaagctcttcgtccttgttgcatgcaaagaaaacttctagcacaagctcacggttgaaccccattccctcgagccgctggatagcctcccgttcctctggggtaactgtcagcgtttgtggcacagcagctgccagttgacctagtatgttccctccaggaccaccctcaggagattcattcaccaagcggagaaactcagcttgattttcctgaatcaaccgcagaatttgtgggttttgtttacctagctcttgaagcattggctgcaagatttgaggattagcctggactaactgaaggagtgcttgaaactgtggaagctgtcgcaaggcatcaagggcaccagatccagcacctggaataacgcctgggttggacccaccacttggaacaccctgaggaaaaaggttcaaaggatttgcattaggccctgcagaggcaggtgatggctgcactggcaatgcaactgctggctgagcgggtgatgcggcctgctgatttgtttgttggccagcagcaggtgctcgggcaacaggctgagcctccacattctcaggaattccagaatacaggtagtctatagctctctcagggttattgtatgcagcacgtagagcacgaacaactgtatcacgttcccatgtaccaccacccatgtcaagaatttgttggatagtctgttctagactgttgccagatacaaggtttgaagctgcctgactgtacacatcagcatcatcagtagcagcaaccgtagcagctggagcagcctgaggttgggcacttggaggtgccgtttcagctgtggcaacaggagcctgtgttggtgttcttgcaactgatgcagcagggggcacaggggcagcaggttgggccagagttgcaggagcttttgcagcagtagtggtagaagctccactcgacgatgccttagccttggacaacattataacaaggaagctgttctcagcaactccgttgctttccaaagtggtctcatccttgagaattttcccttggtatataagcatttgctggtccgcccggtaggtactctgaccctgagtggtctcaatgatcctcttcacgtcagcaaccgacgcatcggggctcgcctcgatctcgaagttggtgcccttgagggtcttgacgttaagcttcatctcgcccgacgccgcctcggtcctcgaactctccctccctcacgccgcctgactgaggttcgagttggggactggcgagggtttcgtcgcctcgccttgggggttcgacctcgcgagggcgcacggggaagagtaactataggcgaaaaaaaatccggaggctacaaaagagaaatcagcgcctggcggctggctctcagggtcgacctagatattctcgctgtcccgtgggaccgtgcctgattgatcctggcgtcagtgaaaggggcgggtgattggatcggaaggcgtggagagtggtggcgaggttgtgggtggatctagctgcactgtcacgcacacgcgggtgttttgaggcggttgcgctgtgcgctggccgctggctgaggggatagattaaacggaagcgtgcccggttcccggccggctcgagtaccc

SEQ ID NO: 69913 - DNA, 405 bp, Zea mays
  unsure (1)..(405): unsure at all n locations
  Clone ID: MRT4577_163752C.1
cccgtaattcgtcctgctnccccgcagatcgcaccatccgcgcgcatttccgtccnattcgacccggttacttggcttctttgattggggaggggagatgggggagggggtgaaggagatgctggctccgccgatccagctggccgacgaggtcgccaagcagtgtgctgccgcgcggagcttccgtgccgagtgcgcagaacttaaggcccgcgcggacaagctggcggcgctgctgcggcaggcggcgcgggcgcgggaactctacgaccgccccgccgcccgcatcttggccggcgccacccaggcactgtccagagcctccaccctcggcgcgcggngcgctcgggggccaccctcgcctgcgcaacctcttcacgctcagccccgcccgccgattccccc

SEQ ID NO: 69914 - DNA, 2284 bp, Zea mays
  Clone ID: MRT4577_163753C.1
cgtgccgtgctcgatgacgacgagacgcctggcgctgacgcctacgccgccatggtcgccagccgactcagggagcgcgacctgacgcgcgcggaggcgctcttcggcgcggcgcccgcggctgcccgggggctgtatctggataccgccatgctcgacgggtacgccaaggccggccgcgtcgatcgcgcgcgcgagctgttcgacgcgatgccggtgaagaacgtcgtcacttggacctctatggtttccgggtacttccgcgccggccgcgttcaggaggcgcgggagctgtttgacgtcatgcctgaacggaatgactattcgtggacgacggtggtgcaggggtacgcgcgcaatgggatgctcagggaggcgagggagatgtttgatcggatgcctcagaggaatgtggtcgcttggacggccatggttaaggcctacgttgactgtgggcagattcagcaggcgtgggaattgtttgatatgatgcctgagaggaactcgtattcctggaatgccatgatttctggttttctcagcattgggaaagtggctgaagcagttcagttgtttgagaggatgccacacagacacaagaatgtggtttcttggactacaatggtcgctggcttggcaaataatggacttgcttgcagggcaagagagttctttgatcggatgccagcgaaggacactgcggcatggaatgccattatcaccgtttatgccaacaatggccagctgaatgaggcgcagagattatttgattcaatgcttgcaaaagacctggtgacctggagtaccatcattgaggcatattcgaagaatgagcgtaagcatgaagccttaaacatgtttctacttatgcgccattcagcagtgtctcctaacattagaacattaattagtatcctggttatatctgagagcacagtcgaagttaagcaaattcacgggttggtcattgcacttggattcctgtcagaaacttccttaggaaatgctctgctcacaatgtattcaagaagtggagatctgatgtctgcctggtttgccttcaaaaggttggaacagaaggatgccataacatggacgtcgatagtgcaagcttttgcagaccatggctgtggttaccatgccttactggggtttgctcagatgctgagacatgggtataaaccaagttcgactaccttcactgctgtgctgtctgcttgtaggcatgtggggttggttgggaaaggtcgcaagatgtttaaatccatctaccatgtttatggattggaaccaaccattgagcactattcttgtcttgtggaccttctaggtcgagcagggtatgtaagggaagccaaggaacttgtcgatggtatgcagcagggtatgcgcgatgaggccattcttgcgacgctcctgggagcctgtgtggtgcataatgaggtagaggtagcaagagaagtgggtgaggatcttgtcagatttgacccctctggtaccggaggctacaggctcctggccaatgtatttgcatcgcatggaatgtgggatgaaacagcaaatgtgtggaaggtcatgaggggcagtaaggcaaagaggactcctggttttagtcagattgaggtgaacatgaggaatcatgtgttctactcaagggatcaagagcatccacaatgtgctgaaatatatgagatgctgattgacacaattgctcctcagatgaagggttcatcatgcgtgggactctgggaactgaccctcttgtccgatccacgcgaatcgactgcctggtgaccttggttgcctcattgcctgggcttgcttgtcaagtgtaaaagagatgcgaccaatgctgcagcatccatttaccaacaatagtgatgataacgatgctggacctgtgggtcatgttcggtgctcattgttgatattgtggaagaaaccagcagaacttctttttggatatcgaagggctcagcaagaaactcaattcttcaattattatttccccttgcagaattgcaataatgttgagcatcttgtttgtagagagcagcgagcagtgtgccttgtcagcacctatagcttgaaaaattatggtaatcctgctaggacataatgattaatgaagctcccgggccttgaaaggaaactgtttatccaaggtttgtcttgtcagatgaagtgagcattgttctctccttggcctaccacaactggatgcagatacagcgagatattgaagggggtgtggtagcaacaagtttaggagcacgagccggcc

SEQ ID NO: 69915 - DNA, 368 bp, Zea mays
  Clone ID: MRT4577_163754C.1
aaggtaagtgtgtgtttgcaagactaatggtcaaacaccgtataaccataaagttagaatactatattaatatattaaataaattaatccaatagacatagattaacccaattaacacaggataaataaatatctaattataaaagtatgaaacatggtataatcaatgttgttactgcgtagtaaatattcatacgagactaacacaactggaacggttcaatttagaattaaaatggggaagttacgaatttccaaagtttctatgtatttgatataggattaattaggaaatcaattttattgttggtttcatgacaaaacagaagtattatgtggataaaaataatattatagaattatagaaa

SEQ ID NO: 69916 - DNA, 2349 bp, Zea mays
  unsure (1)..(2349): unsure at all n locations
  Clone ID: MRT4577_163755C.1
aacttcgcttccccgtgcgctctcgtcgtcttcgcgaggtcgaaatccccaaggcgaggcgttgaaacccttaaccctcttccacctcgaagcggcgcgaggagggagagtgtgagtggactcaggaggcggcgggcgaaatgaagcttaacgtcaagaccctcaagggcaccaacttcgagatcgaggcgagccccgatgcgtcgtgttgctgaggtgaagaggattcatcgctggtccgcctttaacttcgcttccccgtgcgctctcgtcgtcttcgcgaggtcgaaatccccaaggcgaggcgttgaaacccttaaccctctccacctcgaagcggcgcgaggagggagagtgtgagtggactcaggaggcggcgggcgaaatgaagcttaacgtcaagaccctcaagggcaccaacttcgagatcgaggcgagccccgatgcgtcggttgctgaggtgaagaggatcatcgaaactactcagggtcagagtacctacccagcagaccagcaaatgctcatataccaagggaaaattctgaaggatgagaccactttggaaagcaacggagttgctgagaacagcttccttgttataatgctgtccaaggctaaggcatcgtcaagtggagcttccaccgctactgctgcaaaagctcctgcaactccggcccaacctgctgcccctgccacatcagttgcaagaacacctacacaagctcctgttgccacagctgaaacggcacctccaagtgcacagactcaggctgctccagctgctacggctgctgcatctgatgatgctgatgtgtacagtcaggcagcttcaaaccttgtatctggcaacaacctagaacagactattcaacaaattcttgacatgggtggtggtacttgggagcgtgatacagttgttcgtgctctacgtgctgcatacaataaccctgagagagctatagactacctgtattctggaattcctgagaatgtggaggctccgcctgttgcccgagcacctgctgctggccaacaaacaaatcagcaggccgcatcaccagctcagccagcagttgcattgccagtgcagccatcacctgcctctgcagggcctaatgcaaatcctttgaacctttttcctcagggtgttccaagtggtgggtccaacccaggtgttgttccaggtgcaggatctggtgcccttgatgccttgcgacagcttccacagtttcaagcactccttcagttagtccaggctaatcctcaaatcttgcagccaatgcttcaagagctaggtaaacaaaacccacaaattctgcggttgattcaggaaaatcaagctgagtttctccgcttggtgaatgaatctcctgagggtggtcctggagggaacatactaggtcaactggcagctgctgtgccacaatcgctgacagttaccccagaggaacgggaggctatccagcggctcgagggaatgggcttcaaccgtgagcttgtgctagaagttttctttgcatgcaacaaggacgaagagcttgcagccaactacctccttgatcatggccatgagtttgacgagcagcagcaatagtgggtgatatggtgtggtggatgcaggaaaccgaggcagtagcagaacagcatagtgtcgttctgatgacctccgcctgatgagagatacttggttgtttatgctatgctgctgaccatcttttattttcatgtgttcggaatgctttctaagtacatattaattcaatatctgttacaccgtgtcaaatcgaggcctttgatttggtgggaagaggtagattgctgatttgtttagtttgctccttttctattatgaattgtaaggcgtcttggcttttctagctaaatagttttttaaaaaagcatctaaatgtaacacatataggtgcgttgtaaaaactattgaatctacaaaagctaaaatgatttacaatatggtaaaacatctacaatttggatttgagggagtattattgttattgttattgttgttactttgaaatatattcattcctatcttttggtagaaataaagaacaagcttgctcatttccgtgttcttttctcatgtttgtgcaactgatcgagggattatgtcattaggtaaatgatcttacattaactgactaatagcctaccattctatatgcctgcacttgggcatatggacccgcgcgaggggccggcgcgggaacgcccgacgagaagcaagccgcggcggangctattgngggaatgtttggtctggacttggacgggaggaacatcactgttgattaagctcagcctcaccgccctggccgagaccgcact

SEQ ID NO: 69917 - DNA, 791 bp, Zea mays
  unsure (1)..(791): unsure at all n locations
  Clone ID: MRT4577_163756C.1
cggccgggnagctanngcctagctctttcgcctgcctnngctccactcgaaacaatcaacaacagcacatccatgggtttctgggagaagtgcgaccgcgagtgcacctggaacaagatctgctgctgggtctgggcaatgggcatctgcgggggtgtccttgcagtcctcgtcgtcgccttcgccgttctgttcccaccaatggttatcgccgaggacgccgtgctgcagcggttcgacctcatcatggcgggtactagtacgcagccggcggaaaactggagcatatcctacaacgccacggttacgctggccctgctcaacctcaacatctaccggggcatcagctacgggcccctggaagcctccttcttcttcaacggctcccgctttcacaggtccatcgcgatggcggcggggttctaccataagccaaggaagatggtcagattgcccctcacggtcggaggcgtagacagccttgccgcgtccggcgcgctggagttcgaggcggagaacaagacggggggattcggactggagctcaggctcgaaacagtgatgcggtacaaggggctcaacagggtgtgcgcagtcgtagtaatctgccccctcaagctgcagctcgtccacccgggagtcccaagaaatgcaacagacaactgcagcgaaaacggggaccataatttctgcccaacccgatgctataaccctgtagaaaaaggcgggagtggttgtacgagagttaatatcccctatcttatttaccattatcagggtttcttttgccc

SEQ ID NO: 69918 - DNA, 1198 bp, Zea mays
  Clone ID: MRT4577_163758C.1
ttgggtacctcgaggccggccgggatctccctgcttatcaatccttcaagcgcaagctgcctcctcctcgtcgtccggtcgtgagaagggatggcgggccgtggcaaggctatcggcgctggcgccgcgaagaaggcaacgtcgaggagctccaaggccggactccagttccccgtcggcaggattgccaggttcctcaaggcgggcaagtacgcggagcgcgtcggcgccggcgcccccgtgtacctcgccgccgtcctcgagtacctcgcggctgaggtttgtgccccgcttcgttttctttcccctctccttgttgcgattcgcttcgggtccgcgtcgctgcggtctcggatctggttgttttgccgtggaggattgttcctggatctgaaatgagtcgcggcattgtacttcataaaaagtctcaatacatttcccgattccaattgcttcgattgcacatctatgcatcctgtaatttaccaactaatttgaacagacttggcactgaattattcgcattgtaatttctaggtgaaccggacaattttctggaataatatatctctgaatcctgcaattaagcagttggtagtaatgttaagcatgaaccattgtagaaaatcggagccaaatgcgtccttactcttactatttctagcattttctcccgtcatttctcaatggcaatatatccagtgttccaatggttacaacagtttctgactatgttcatttatccacggtgcaacaacaggttctcgaacttgccgggaacgccgcgagggacaacaagaagacccgcattgtgccgcgccacatccagcttgctgtgcgcaacgacgaggagctgaccaaactgttgggtggtgccaccatcgcgagcggaggtgttatgcctaacatccatcagcatctgctccccaagaaggctgcctcctccaaggccagtgtcgacgacgacgacaactgagactgcttcctgcagaaatgatccgaccaccgccttgttttgtaggaataggatgatgttgtcttcgatcggggaggagtcgggtatgctgggaaggagaattagattagtatctgtttttttgaatgggatgtgaaaaaaaaaaaaaatctcaggattttatgctcgttgagaaagaaatggaaggacttcgtgatgcaaaaaaaaaaaaaaaaaagcggc

SEQ ID NO: 69919 - DNA, 1097 bp, Zea mays
  unsure (1)..(1097): unsure at all n locations
  Clone ID: MRT4577_16375C.1
acgcggacgcgtgggttctgatcgcacggncgcccttattaccctgaaataattgcattatttgaagcatcacgagagtgtgtatggcttcgtaaaatggtaaaccatatactcacaacatgtggtattggttcaattgaatcactgaccattaataaacatattttttctaaactgttttatccccaggaacttcaggaaaatgcagataaaaacatcttacagacaaagtcttgtgataatcttgctgatttattcacaaaatctctaccatattctacgtttcagaaatatgttgaggggattggaatgagaagacttaaaggattgcaaggatcagggggagtaattctccgtgatatttaacctgttttgggccataatattacactcttttctttgtatgagttttgtcttgttgagttttctcatccaaagtttttaacgaggtaatatcaactaagctatatgcttcatcatttattttcccccacggtgtttttaggaatggtgattacagacatacttttttttggaagccagtgtgagttttactcataatccaaaagaatggtatactccttattttttccacaggggttttaaggagaataatatctttgaagaacaactgaaggatgatcaaatgaagttagaattaaccaagggtgagtgttagaaaataaacatatgatcaattctccaagtggtggcagttatctcaccaaaaggacttgtcacttgcttgcacccctccctgtgtatatatatataattacccttcaataataattcattctctcaatctcgtttaaattacactacaacacatttaaacaaaatataggtagatccctcgtaatctacgggaatcttttccttatgcttgggccttggatacaaagcgttgagagtcgcttaataaagcactttgtggttgtagtttggatgactgcatttcgaagtttggtgacctccaatatctcacaaataactagaaggtggttagacttcgtttctaaacctacaaaggcactcctgagaccaaacgctagtgacatagatgtgctctgctccaactgttagaagtattaagt

SEQ ID NO: 69920 - DNA, 282 bp, Zea mays
  unsure (1)..(282): unsure at all n locations
  Clone ID: MRT4577_163760C.1
aataaaannaaaataaaaggggcgngtatgtaaaaatactgatataatatgattcaaatccatttaatgacattacatagtttattatcccttcttttctaatggttacattcttattaacatttgcatgtacacctactcaccatacaataaaaattccctcagtaacatttattttttattattgtgacacaataatagtaaagctaatgtaaaaaaattttaacatacttgtctctaccaaaaccaattaccatgtttcgaaagcatttgttatgttat

SEQ ID NO: 69921 - DNA, 733 bp, Zea mays
  Clone ID: MRT4577_163761C.1
ccggccgggagactacgagcaaggccgggttgggcgcgcaagcgcttgagaggagcgtatgaacttcctggagagggacatcccaggatcgtccgatatcttaggccgctggaaagcgacattggcgttgttgtcgagaggctcgagcctggacctattgagtggcactcgcttccagcactgactgtacctctcctgcaagacctgtcagaaaatggccgcttgatgctgagcctgtactatcggtgggcattgcaggtgctctcagcgttgcaattcgcccactcgcgatccgtgttcatccgaaacttttgcacggagctcgtgtggctaaggtcggatttctcgctcgcaatcacggggttccttgccgcatcagcaccgcagattgaagaggaaaacaaacaggatggcattgctagcgcaagggaacgcctgcaggattctgcgtatccgaacccgatgacgctggaagagtttgatcgtagggttagggaggaggggtatgcgccatggccgtttagcgatggcgagtggattatagatggtagcgtgagcgatgctatttacgaaggagacgaggagcatgggagcgtgaaagaagacttgtactattgggctatatttgtcaaatacctcgtcaacaacgtctttgcagatgcgtccgcgttgcaagacgggattcccgacgaaattgaaagagtaagcctaggcaccattatcgcgaatgctg

SEQ ID NO: 69922 - DNA, 477 bp, Zea mays
  unsure (1)..(477): unsure at all n locations
  Clone ID: MRT4577_163762C.1
tgcccttctcgtgggagacggtctctacaacttcgtcaaagtcatagctatcactgtcaagaacatacgcgagagatcacgtcgcaagaacctgaacagagtggcggacgcggacacgatggcgctggtgccggccgtcgcttcggggctcatctgcggcgacgggatctggacgttcccgtcgtcgctgctcgcgctggccaaggtcaagccgcccatctgcatgaagttcacggcagggagctagagggcgcgctgacgatgcgtacagaacagagggcatcgttcgtcgtttgtggggtggaatccgtgtagtagaattacataccaatcangccctgttctaatgtccatatgagcttaatgtacggtgtatatatgtaaaacggaaatctgaaggatgacaggatgaattgcctgttgtctagtagcacgcatattattattattatagcagagcactaatanaactctttt

SEQ ID NO: 69923 - DNA, 760 bp, Zea mays
  Clone ID: MRT4577_163764C.1
gctccaactctctcgccgcgtcactctctctctcccgctggacttcgctccttggccgtctcgacgaagccaggtctggccatcaccttcctggccgcgcgcgttcttcttctactcggagcaccgtcgactgtctcggttctgcatcaccgggacaccttcctctgcttcctccctcgccggccgaactccttcgcccgctgccatagtgccctgcccctgcgatggccgtgcgtatccttctgttccacatcgctgcgccatccttcacctcgcccggttgtgctttgttgcgccgtcgggtgctcctggtcctgcgccgtcaacctgccatgcgagctagctccacctcgcctgctcgtgtttctctctgtcgtgcgctattgctgcgtcgggcatccatggccgcaggcgataacctgctcggcctaattgtcgcctcttctgccctcgccgccctaaaccatcatccatctcgcgcatggcacaaagctgctctgctaccgcgccttccgtaattaacggtcgtcgttctcctcatctagtgctcgcgtggccttgcccggaccgcgctgctgactgtcgaccccgccgttgcttcaaagcgctcggacaccgacgtcgtcactcggcaacgtgtttgctcgtcaccacgttatcttcagcaacatggctctgctggactctgtgcactcgtcgacacccggttgtccatctccgccacgtcgtggcccccgctctttggcctcgtcgtcaccct

SEQ ID NO: 69924 - DNA, 471 bp, Zea mays
  Clone ID: MRT4577_163765C.1
tacggctggagaagacgacagaaggggacccttttgctttctttatccaataataataaccccggttttccctctccatacccttttgcttttctttatccaataataagaacttcccacgagtggctttaactggtctggtctggtctggtcggacacacaaaaatattagtatggagaaggtgagttttgtgaagaatggagagcttagattgcctccggggtttcgtttccacccgactgatgaggagccggttttgcagtacttgaagcgcaaggtcttctcctgccctctgccagcctctatcattcctgaggttgatgtttgcaagtctgatccttgggatttgccaagtgatttggagcaagagagatacttctttagcaccaaagaggccaaatatcccaacggaaatcgctctaacagagccacaaattcgggttattggaaggcaactggcttggacaaac

SEQ ID NO: 69925 - DNA, 624 bp, Zea mays
  Clone ID: MRT4577_163766C.1
ccccctcgagttttttttttttttttttttttttttgtttttttttttttttttttttttttttttttttttttttttttttttttgggaaaaaataaattcaaaaaaaaggggtggtggccaaatggtgaaaaaaccttaaaaccaaaaaggggttcacctacttttaacaaacctttgtaatttccaagaaaaggaccccctcctgggggggggaaagggttttctttgttaaaaagaaaagcctcaacggaagtggcccttccttcacaaatttctgggccaacctgtggtggcataccctttagaaattttttttgggggcccagcccctccccgaaaaaagaaagaaccgggacctcgggggggggttatttttgaaaggattcctcctaaagcaaccatggtttttttagccattcgggttcggttggtccccatgcccccttttttttgaaggaaccttgttagaaaacaatttgcgggtttaacaaaaatgggaagggaaaatcaaccacctttcctgggggggggccataacctaccagaaataattttgggccgttaacaaaggaagggggaaatcacaagttttacccagcctacccaggttacaattccttt

SEQ ID NO: 69926 - DNA, 634 bp, Zea mays
  Clone ID: MRT4577_163767C.1
acgcggccttagcgtggaacacagtcgaaggacaaagactaaaaaaaaaaaaaaaaaaaaaaaaatttaaaaattttaaaaaaaaaaatatttttttaaaaaaaaaaaaaaaaaaaaaaaaaagtttgtcccttggccgcgcccccccttggggctttttggggggggggccctccccctgggggcggttcgggcctccttttggggggcccatttggccctttggggggtggttttccctttccctggcccggtttttcccccgtctggcctgggaaacccttggcggtcccccccttgcgcccttttgtgctctgccccttttgggcgggggcttccttgcgctgtggtcttttcgggttcgcgtttcctccgttggccccctttgttgggcgtttggccccccccttttccggcctttcctcccgccggtgttgggggtttccccctggggccccgtcccctttgccggcgcctcgcgcgcccgctgccgtttctctcttcctttttttgcccggcttggcgctttgccccgctctctcttttttcggggcctttctggggcttttttttgggtttccggttccttctcctgttctctgcttttttgccgcgtgccggttgggcgttgtat

SEQ ID NO: 69927 - DNA, 199 bp, Zea mays
  Clone ID: MRT4577_163768C.1
ctatgtatcaactaaacccaaacaagcatcctggtctagcggccagaacatgttgttattgactcatacaaaacaccagaccactgcttctatggcgatttaaaccacaatgcttctttccttatgatcaagaacacccacatccaaaccttaggccgactacctcctcactggccaacacgcgacacccgaacctaaa

SEQ ID NO: 69928 - DNA, 602 bp, Zea mays
  Clone ID: MRT4577_163769C.1
ccgcccgaataaagtttataacttaaaaagggggcttttgctccacggcggctcgagcaaaaatgtccaaaaaaaagcagctcgagtaaagaaaatttgcccctttctcaacaaatggagctgctgccttggccctaattcacaacccgtttgatgtctcggcaaaacgggggggacctcattaggggagaggataaaaaaaagggaatcaggtgggggggggaagtatccccgggtaaaaaaatggactccagccctcatttttgggtcttctccaccttggccttgatcttttgctcaaggaccgccttctccgggtcgaggctgaacatccggttgaaagcatgcttgttctcaagcgtctaatcaggggggcggttgttactaccgtcccacctaaggtgctgcagcggcccggggaggaccttgttcacaaggccggggcttacctcctcgagggctctcctcattttctgggggaaaacgtcatccccgatcttttgtaggcacttttcgagctctgaggctcggatcctgtcggaatatgacctcagcttctggagggggggaacggtctccagggagtcccgccttgcctaaaa

SEQ ID NO: 69929 - DNA, 162 bp, Zea mays
  Clone ID: MRT4577_16376C.1
aagacaacagaccgaacactgggctcctgtttggcatagcgccaaaacaaaaagctagacaagcgatgcagataagaaacagaactgcattcagaggactgaacctagtctatgaagatgcacatgctttctaacacagccaggtggactggcagaaaacat

SEQ ID NO: 69930 - DNA, 773 bp, Zea mays
  Clone ID: MRT4577_163770C.1
gccggccgggctgcgatcgcttagtggcaaccgcaagcatttacaacgagatccattatccaatatatagcatactatgccccaataccacattttacctccgtatgctccttgctctttctacatgcgtcgatactacaagaattttccctcaatggtcacaagctcctatactttatcttcttcgcccataccttccatgaattatatattacagatgtgaaaacccgtgtcttcgaccatataagatttcacaagcaatcgcctacagcaacatacctttatcaaccttgctgcctactcaatcaccaagcctatccttgcagtcgaccttgtgactgaccatcactctgcatgcagtatgtagcaactcaagtaacctgcgatcaaccaagtagtgccgaccaacctttctccctactctcaaaaccaacgatatcttccattctcagctctgtatacactgaaccctggtgattatcagtaagaacaactattagcagtttagccagctagctactgtctactctcaccaacgactgcttctctacattgaaccaagtggccacactgaacaccgtctgtatctatttgcagcattgaatactactgacatttattgagctacatgcaccaaagcgtgctaccttcttgacatcatagcaggtgctgtctttcaaatagcatatggcggataaccccgcaaccctcttacttgtactgacgattgtgccctccgtacaacttgctgtgactttcccagcagcctccta

SEQ ID NO: 69931 - DNA, 164 bp, Zea mays
  Clone ID: MRT4577_163771C.1
tgtttttttttttttagtggagcaccatcacacgagtgggactgcaacagcagagcgatccttgtgaactcggtccctgtcaggaaagggcagctcacactgaataggctgagcaacaccagatatgtggttgagtgcacaagagactgtcttagctgagctta

SEQ ID NO: 69932 - DNA, 459 bp, Zea mays
  unsure (1)..(459): unsure at all n locations
  Clone ID: MRT4577_163772C.1
actccatcgtgggcagcgcttttttctcctccactcacgaactcactcactcactccccttgcccccatccatccgctagccactagctccagcaggctcgccgccgacactccactagtgctctgctctctccgctccactcacaaactcccctggctcccccccccccaatcggcgatggatctgctgctgcggcggcggctgctggccgttttttttttggnggnggngctggccgngtgcgccttcacggggggggaggggttngacctcccccagatcctggggaagcacgacgagttctcgnagttntggaagctgctnaaagagacgaaactggncggngtnatgaaccgggaccggacaatcaccgggctggccgtggncaacggngacatgggacacctngccgggggacactactgggtggggaccatggggcacatgctggagagtgg

SEQ ID NO: 69933 - DNA, 179 bp, Zea mays
  Clone ID: MRT4577_163773C.1
cgttgttattatttaatatagctgcatgttgaatgaaactgcgggagatcacttatttagccgcgtaacaaatgaaacaccactgcagtatttacatttagcgggagacttttccatccccttatggcaccagcaggtagcccacatttttcccagggctcaggcccaccgggggtaaa

SEQ ID NO: 69934 - DNA, 380 bp, Zea mays
  Clone ID: MRT4577_163774C.1
accacgcgtccgccgaggactttcttgaggttgacatggaccaactgatggaagtcgggaagagctaccgcgtacatgtgatgcctaccttgtgctccatcaggaacggacggacgctcgagagctattgataccgtcgacaaggacgagcttcaggacgccgataggaagtacgccgccactggcactacgacggctcctggctcagcgtgcgactaactcaggagatgtgatgtgtagcaaatagcgcgcgcacaccagtcgtgaataaataaatagatccattaataaactaatcagatgaagggcaacgtacgacgacctattagtggtacgcgcggtagtagctagcagagtatgctccgacactgtgacgatct

SEQ ID NO: 69935 - DNA, 277 bp, Zea mays
  Clone ID: MRT4577_163775C.1
cccactcgttcgcccactcgttcgaaaaaaaaaaaaaaaaaaaaaaaaaaaaaaaaaaaaaaggaaaaaaaaaaaaaaaaaaaaaaatataaaaaaaaaaaaataaaaaaaaataaaataatatatagagactccttaattcatccaaatttccataccttttacatcgtaagccactggtataacactggggttcccaattttaatcagtctggccgcatattcaaaattataccatctggtataactctcaaagtttcccaattcatatcgcttt

SEQ ID NO: 69936 - DNA, 1956 bp, Zea mays
  Clone ID: MRT4577_163776C.1
atggatgatgacgacgacaacggtcggtacccgagaaccatcaacgaggagctcgttgagttagggcagcttcccgatgacgtcgacgacatgggagatgttgctgctgccttgttcggtgtcgatagcactcataatcccgggccggtaagtgatgctgctggctctaatgaacttgattcattgacttcttctagcactggtaaacgtcaatctgatgtttgggatgacttcactgaagtcacagaaaaccgtaatggtaagaaggtgcgcattgcagggatagctgacacagatgcttgggatgattacattcagcatgctcacaaccctagatatgttagagtatctaggtttacaactgctagagacttggttaagttatacaatgacaaattaaagaacttaaaagatgttgtttttcctactgtgtcttctatttgcttgacttctgatatatggtctggtaatgccaaggaagactacattactgttgttgctcattttgttaatgctgattgggagttaaagaagtgtgtgataggctttaaattgatccaagtgtctcataatggtgttaacattgttgaacgcattgcttgtgtgattcaatactttggcatgattgataaagtgttctatgttaccttagataatgcttcttctaattcaactgccatgctcacattgtcacctatgcttgctggttatttgggtgctgatgttgatccaacagatactagtaacaaaacttatagtgtgcttcatcagcgttgtgcctgtcacattattaacttgatagtgaaatgtggcttgaaaaggtttaaggattatttagatgtgtttaggactgctattaatttcttaaactcttctatccagagaattggttcatttagtaattactgcaaagcaaaaggttgtagacctagaaaatttggtttagacatggatgttagatggaattcaacttatcttatgctaaaacatctcttgccatataagtctgtgttttctgtgttcattaatacacactatggctatcctctactgaatgaacaacattggtatgtagctgaaaaggttttggagttccttgagctgttttatgaatcaactgttgtcttgtctggtgtttattatcccaccagtcctttggtaatccatcacatacttgaatttgctagccacctgcatgaacatgaacatgatactaatctaagtgatgttgttgttccaatgaaagctaagttcatgaagtactggaagtatataccaatgttatattcctttgcatttgttctagaccctagagctaaaatgaggggtttgtataatgttcttaaactgcttactcaatctaacaattataattacagtacttattttgctgatgttaagactgagttgtataagctatatgccaagtatgaaactaagtttggtgctgctaggccatctagaaccacacatcaatcaggtatgacaggtaagagaaaacaggcttggggtaaaatttttggaggaacaggtgcttctagatcctcaactgcatcaggttcttcatgtagtagtggacctggtgtgggtatttgtgagctaactgtttaccttgacagtgacaatgtggctgcctatgaggataattttgatatcttaaattggtggcatgagcataaactaacctatccaattctttcaattatggctagagacattatgtctgttcctgcctcaactacttcttcggagtctacttttagtttgtctggcaggattcttgaggatcgacgatggcgctggaactcagagacagtggagatgttggtgtgcatcaaagattgggagctaggccaacagcgggcacaacatgttgtggtggacaatgaattagaggagtccttcaaggacctctggctggatgaaggtgctggtgctactgacactttggcttga

SEQ ID NO: 69937 - DNA, 277 bp, Zea mays
  unsure (1)..(277): unsure at all n locations
  Clone ID: MRT4577_163777C.1
acgtattttgccacagtgtattctatattgcaatgatttttttagcatttctggatnntaatatatattgtaaaatttagactgatgatactaacagttgatgaaatgacatataatttatatatgaaagcttacgctatattgtatgaattatttgcatctttcagtggccagttttccatatgtatatattatggtctcaatgtttttcttacgcctcattttaatttataatgaaggtaaaattaaaatgtattttaccacgtttcttttcatt

SEQ ID NO: 69938 - DNA, 861 bp, Zea mays
  Clone ID: MRT4577_163778C.1
atgacgtcgacgacatgggagatgctattgttgcctttattcggtgttagtagcagtcatactgccatcgacctagaggggacacctgccaagccagttagtgatgctgctggctctaatgtatttgattctttgacttcttcaagcactggtaagcgtcgatttgctgtttgggatgacttcactaaagtcacagaaaattgtaatgggatagctgacacagatgcttgggatgattacattcagcgtgctcacaaccctagatatgttagagtatataggtttacaactgttagagacttgactgagttgtataagctatatgccaactatgaacctaagtttggtcctgctaggccatccaaaaccacatatcaatcagatatgataggtaagagaaaacatgcatggggtaaagtttttggaggaacatgtgcttctagatccttaactgcatcaggttcttcaggtagtagtggacctggtgcaggtctttgtgagctaattgtttaccttgaccgtgacaatgtggctgcctatgaggatgattttgatatttcaaattggtggcatgagcataaactaacctatccaattctttcaattatggatagagatattatgtctgttcctgcctcaactacttctttggagtctacttttagtttgtctggcaggattcttgaggatcggcgatggtgcttgaacgcagggacaatggagatattagtgtgcatcaaagattgggagctaggccaacaacgggcacaacatgctgtggtggacaatgagttagaagagtccttcaaggagatatggctggataaagaaggattagaaggtgttgctgctgcttcctga

SEQ ID NO: 69939 - DNA, 2193 bp, Zea mays
  Clone ID: MRT4577_163779C.1
atggatgacgacgacgacaacggtcggtaccctagaaccatcaacgaggagctcgttgagctagggcagcttcccgatgacgtcgatgacatgggagatgctgctgctgctttgttcggtgttgatagcactcctaatcccgggccggtaagtgatgctgctggctctaatgaacttgattcattgacttcttctagcactggtaaacgtcgatctgctgtttgggatgacttcactgaagtcacagaaaaccgtaatggtaagaaggtgcgcattgcaggtatttgcaaattttgcaaagctaggttgagtgctaattctaatgctggcactggacatttgcttaggcaccagaaatcatgtaaaaagaagtctgatcatgctgctatggttcaaactagacttgctttgaaccctgatgggtcttttagaaactgggaatatgatcctcaagtggctagaactgagctttgtcgtttgattgctagacttgatcttcctttagggatagctgacacagatgcttgggatgattacattcagcatgctcacaaccctagatatgttagagtatctaggtttacaactgctagagacttggttaagttatacaatgacaaattaaagaacttaaaagatgttgtttttcctattgtgtcttctatttgcttgacttctgatatatggtctggtaatgccaaggaagactacattactgttgttgctcattttgttaatgctgattgggagttaaagaagtgtgtgataggctttaaattgatccaagtgtctcataatggtgttaacattgctgaacgcattgcttgtgtgattcaatactttggcatgattgataaagtcccacgcgtccggttctctgttaccttagataatgctttttctaattcaactgccatgctcacattgtcacctatgcttgctggttatttgggtgctgatgttgatccaacagataccagtaacaaaacttatagtgtgcttcatcagcgttgtgcatgtcacattattaacttgatagtgaagtgtgggttgaaaaggcttaaggattatttagatgtgtttaggactgctattaatttcttaaactcttctaaccagagaattggttcatttagtaattactgcaaagcaaaaggttgtagacctagaaaatttggtttagacatggatgttagatggaattcaacttatcttatgctaaaacatctcttgccatataagtctgtgttttctgtgttcattaatacacactatggctatcctctactgaatgaacaacattggtatgtagctgaaaaggttttggagttccttgagctgttttatgaatcaactgttgtcttgtctggtgtttattatcccaccagtcctttggtaatccatcacatacttgaatttgctagccacctgcatgaacatgaacatgatactaatctaagtgatgttgttgttccaatgaaagctaagttcatgaagtactggaagtctataccaatgttatattcctttgcatttgttctagaccctagagctaaaatgaggggtttgtataatgttcttgaactgctttctcaatctaacaattataattacagtacttattttgctgatgttaagactgagttgtataagctatatgccaagtatgaaactaagtttggtgctgctaggccatctagaaccacacatcaatcaggtatgacaggtaagagaaaacaggcttggggtaaaatttttggaggaacaggttcttccagatcctcaactgcatcaggttcttcaggtagtagtggacctggtgtgggtatttgtgagctaactgtttaccttgacagtgacaatgtggctgcctatgaggatgattttgatatcttaaattggtggcatgagcataaactaacatatccaattctttcaattatggctagagacattatgtctgttcctgcctcaactacttcttcggagtctacttttagtttgtctggcaggattcttgaggatcgacgacggcgcttgaactcagagacagtggagatgttggtgtgcatcaaagattgggagctaggccaacagcgggcacaacatgctgtggtggataatgaattagaggagtccttcaaggatctctggctggatgaagctgctggtgctactgacactttggcttga

SEQ ID NO: 69940 - DNA, 271 bp, Zea mays
  Clone ID: MRT4577_16377C.1
gacaaacgtagatttcgatgaggaccattttgtgatttcagaagatggatcatatacaggggaggagattcatacattacgaggataccatgggaggcatgagccagtggtgccatatgttgaggcaattattgaggatgatgctgatgctgatgctgaaggggatgccagttcatcagggtctactatggacactgaaagtgcattagatgttcatgaagatgcaatcgagttcgaatcagccgacggccatgaatgctatcttgagaat

SEQ ID NO: 69941 - DNA, 426 bp, Zea mays
  Clone ID: MRT4577_163780C.1
ccccccccccgatgggtacctcgagccggccgggtaaaaatttgacaaagttgtccgctccgatacagctggccctctggtaccagcaaaccgggatggtattcatgggtatctagagcaattctgcggctctcctacaagaatgtgtgcggctggccgcttcgtgggcgaggccatgatgatcgacgtgcgtcactcctgcccgagaataactgcgcacgcgtcgcggcacttgtccgacacggtgcacggataccgcttcagctgctgcctcccctgtgctcacctgggcgactacctggtaagcaagccacccatggccacaggggtggcgtgccaccgcatgccggtcgggcccgtggccaccgtcgcgctaataaccctgccgctcatgacaccggatcccaagcagagcgttctgtctgc

SEQ ID NO: 69942 - DNA, 431 bp, Zea mays
  Clone ID: MRT4577_163781C.1
ggttggggttttttttttttttttttttttttttttaaaaaaaacctcccccccctcttttttactgttaacaaaaaaaaaacaaggggggaaaagtaaaaccccccccaaatgaaaccaccccctaaacccccctaatttttttcaaaaaccccgttgcaatgcgggggaaataaccacttttacaacatcggggggtggaaacccccccatttttttttacccaccccccttacccctttgcgggggccacccccgggaaaacacgggataagggcaaccccccggcccgatgctgggttaaaaaaaaactttttttgttctctgcacccttggtgccatcctccccctaataaaaactagcgccccccccctcggaggcctttttgagccccccccggttctcacgggccttaaaaaaaatacctttt

SEQ ID NO: 69943 - DNA, 287 bp, Zea mays
  unsure (1)..(287): unsure at all n locations
  Clone ID: MRT4577_163782C.1
acgcgtccgcaggctcgtccgcccgctcgtccggtcggttgctttcttgggttctggcttggtggcgttctgtcgttctccggctctctgtcgcttcgcgccgctggcttttctgccctgcgcggtggccggttgtgtgcgtcttcggttcctctgcgtgctcgttgggtttctctcgcggcgcggtcctcggttgggtgtccctggcctgtctctcgtgggtctngtcccgtctctcgttccctgttggtgggtgcttgctcctgcgcttgctgggttctgcttcg

SEQ ID NO: 69944 - DNA, 281 bp, Zea mays
  Clone ID: MRT4577_163783C.1
ggagcacgccgcacgagccctttccgcagccgccaaaatggtgaacgttcctaagaccaagaagacctactgctagatcaaggagtgcaagaagcgcactactcgacaaggttactcagtacaagaacggtatcgatagcctgtctgcccatggaaagcgccgttatgaccgcaagcagtcaggttatggtggccagaccaagcctgacttccacaagaaggccaagaccaccatgaaaatcgtattgaagctgcagtgccagagctgcaagcactactca

SEQ ID NO: 69945 - DNA, 234 bp, Zea mays
  Clone ID: MRT4577_163784C.1
aagctcggaattcggctcgagcgattggattatactagggctggtgtgtattctgtggatgctccgtgtttctggggggatggaagttcaaccctgggattattgtatttaaaaaaaaataaaaaaaaaaaaatactttccttgattttaaatctctatattgaaacaactaaatgtatcaaccattttttggttgggaacccttttattactcttttgtcaacataatatctt

SEQ ID NO: 69946 - DNA, 265 bp, Zea mays
  Clone ID: MRT4577_163785C.1
aagagcatgacgtcgcatgcacgcgtacgtaagctcggaattcggctcgagcttttttctcactcaagttgaaagcgttgcaacatgagcttgcgtgctcaagagccagccttaaagcaaaagcgtctgaactggaggatgtgaagaagacgatgcagcggcgcaacgcacctgtgcaaaggacgcagcatccgggacctgacagagctgtgcagaccagggatggagatgtagtcgatgcggagcccgcttcggacgcatcgtc

SEQ ID NO: 69947 - DNA, 436 bp, Zea mays
  unsure (1)..(436): unsure at all n locations
  Clone ID: MRT4577_163786C.1
tctgttatttgtgatgggcatgcctataatgcaagaaacgtgattatcgaactatgactcatgagccgatgtaaaagatggcacaaccaatgatgggaagctactgaaacgctgttgcagatagctaaaacaaggagtttgaatggccctgttaatgcaagggggaaacttgtcggagttaggcacagcgaccaggtagaacgaaacaacttatgctgcgacaagaatgcatgtaaggctcacatcatatacctggctgaaaggtgcaacctgttataccggaagatcggataagatgggggtgctgacagttggttgaatggaagaaattgctgggggtaggcagcagctagctgactgaatggtagttgttgntgcanataagcagcagagtttaatgcagcccagtggntgantggaagaaactgctggtgct

SEQ ID NO: 69948 - DNA, 428 bp, Zea mays
  unsure (1)..(428): unsure at all n locations
  Clone ID: MRT4577_163787C.1
cctgtattttccaacctgttagctgtccaaagccgtcgcgaccagccacatgaagaacttggcctttggaggagcccgggttttccaaattatgtggtacggttcaaaaatcgtcgacccaaggaaaaaaaccctcatagactgcctttgttgaatacttcccattggcggcgagacgaaagaagtgagtgtcattcacttcgcgtctaagctgaaccgaggtgacaatatcccatagagcaaggtattcagaaataaccccaacagcaagagctccttgtatgtctgaaatccaagtctgattagtgagcgcacccgtggcagtcctctcattanccctccttttaggaacattttggagtaatcttggggcaatgtccacgaccctgtgtcccatcaaccaacggtcagaccaaaaaagagtagag

SEQ ID NO: 69949 - DNA, 344 bp, Zea mays
  Clone ID: MRT4577_163788C.1
tccgcgggtcgccccacgccatctgagacatgcatgatcattgtgacggttgcgcgcatactgcaccatgttccagacggtctatcagccagacttggtagaagccaattatagagaaagcggcttgccttgcgtacgctctactatccagaagcagctcttgcctcgctcacttaccgaattatagcctgatgtctcatgagagcaggtgccgatctaagctcatacgctgtgatggcctgaactctcgagaccggatactgatgccctgaggctaacaatgatagttgttcgtacgggtggaacagtccacttaacagggcgccggcgactaccctataggc

SEQ ID NO: 69950 - DNA, 531 bp, Zea mays
  Clone ID: MRT4577_163789C.1
acaactgtaaaggtatacattttactgaatagagggagaaaggacaatatccatccatccatcactcatccgactagtgcaaaacgtcttatgtcgcttgtcacataaatccatcctacgaactcaataatctcatactacataaaaaatggtaagagagggcatacagacacggggagtgtgtgatgaattggttgtactttacaatattccaagagcaaagcattagcaataactaggcaacacatatggtcgagccctatgctagtgagagaaagatccaattgcccgggcgcccggcgcgtgctgattctttttttttttggcttctacctaggtgtggaactggatgcccatgactcctgacagcagtcgtcgacccaccgatccgcggctgcggctgctgctgctactgccgcaacggcaacaactgcgctgtactattaaaagcagcaggagcgcttcaccattctgcggtagaagctgcggtggcacccacatgccgctcagtggatcacgggggaagagccc

SEQ ID NO: 69951 - DNA, 747 bp, Zea mays
  Clone ID: MRT4577_16378C.1
actccctccgtgcctcccgagcccacgccgctcgcgcacatcctccctctcctcaccccccgagatcggaatcggcgccccccgtccgcctccgccgccgccatgtcgccgtctctgctcggggggctcaccaagtcgctggccatgaccgtgctctccgaggtcggcgacaagaccttcttcgccgccgcgattctggccatgcgccatccccggaagctcgtcctcgctggctgtctatcggcattaacagtgatgacggctttatctgcttctctaggctgggttgcaccaaacctgatatcacgtaaatggactcaccatatcaccactctgctgttctttgtgttcggcatctggtcattgtgggaaggcttcaaagaagaaggagagtcagaagatttggctgaattggaagcaaagctggtttgcaaatttcattcttaccttacgtcctattgaactgtaggtcaagtagcttatagccaacttctgccaaattttcaggatgcggactttaagactaacaaaggggaatcgaaaaataaatcaaaggtcagtggctcagcgcatgtgtgacctgcccatttagatcatatttttcttatatcggaatgttggcaaatttttgtggccttctccattttcacactcaaaatgtagatgtcattagataaaatgcaaaacaccttttccctttcagcagtcagaagaatgatttctggtctccagatattttcatttatc

SEQ ID NO: 69952 - DNA, 257 bp, Zea mays
  Clone ID: MRT4577_163790C.1
cagtgcttcgctcgccatccccctccgcctcggcaccggcgtcttcgacctcgggtactcgccatctcttgtttctccatcagagatacgatcagcccagtatgcacagcgagttgtcgtacgtttcatcgtgatagaggattccactgtatgaccgtttgcacgctctgagtagtatgacgtatggtgcgtaagagtatgctcattgcaatgaccgaaaaccgatgtttggtcatgaagctacgaccattctggat

SEQ ID NO: 69953 - DNA, 810 bp, Zea mays
  unsure (1)..(810): unsure at all n locations
  Clone ID: MRT4577_163791C.1
gcgctcaggcgccgggttcgaccgcagtctggaagcgtttacatgacgcgtccacccatcctgacctatcgccaagccaagagctacagttcccaagcgccgaggaaaagccggcccgaattccgtaaacacccaatccctagtaaagatttaccgtccagggtccagcggctgacagatcggttccggctggttgctggcagatcgtttcatcgcttgtcacgacgctggcagcggagccttcaaatcctgtgtgtgcatgtgcagctgctctgctcctgcgcgcaagtcgcaacggtggtggctgcagctgcggcgtgctccttcgctggaaagtggggcagtatcttttcgcatctcctcgactccgcctctctcggatctcgccgaaggacgagcagaggcccctgatcgcccgcttcttctacaactatattctgtcgccagcgcacaagcggcagggggcacggggtagattcggagcggctcttggcttgcagtccagacgcccttcacccctgatctggaccggagggagcggctccttccgtcagttgttcttgctttgcctgggcctcttccgcctgcttcgtgttcttcacaggagccggtgacctcggacgatatcttggaggacaagatgtcgggggctgttcttgtcgccatcgtcgcctccatcggcaatctgttgcaggggtgggacaatgccaccatcgcaggtaaatctcgccagatcggttctactaggcatgctcaggatgtttctcagtctcgntgggtcagttttctcgttccgtcggatcaatcctt

SEQ ID NO: 69954 - DNA, 437 bp, Zea mays
  Clone ID: MRT4577_163792C.1
aagccgaccaacccttccgcccttttcttcctttccgacgccgggggggggaattccgaatcgagggcgagacgggcttgatcgaaaagtcgactatggacggagagaacgaaccctacgttatctccgacctcaacgcctccctccccgcagccgctgcagcccttagcgccgaggaccgcgccggcctcgtcaatgctcttaaggataagctgcaaagcctggcgggccagcatgccgatgtgctaaagacgctttcgcccaatgttaggaagcgtgttgagtttttgagagggatccagagccaacacgattaaattgatggcaagttttttgaagaacgggtagcacttgaggctaagtaccataaagctttatgaaacctttatacacaaagagggtattgaaattggtaaagggagaaaatggaggtagat

SEQ ID NO: 69955 - DNA, 480 bp, Zea mays
  Clone ID: MRT4577_163793C.1
ccggttggccacatacaaaaaccaaaaactttattattgatttacaaaaaaaaataaaacgggacaccggcaccagcgggggtgggttaaaacacggggggtggtggaaacaggcaaaggaaggtggacaaaaggcagcaattggtgaaagggggagagggttggggggatagccccaaactaacgggaaaaaggcaggaactgttgctaaggcaagaaggaagccccacttgctgcagctagctcgctaaatggcaggcggatttgctgaagcaaaaaagccccggggttcactgcgggcaattgggtaaaaagaagaagggggggcagctgagagtaggcgggaactagctggctgtgtgggcatagaagatgctgcaaataaacaacacggttcagtgtaaacagaaaaatgaatggaagaaaaagaagctgctgagagtgcggagaaaggtttgccagagctacttgcccgatcac

SEQ ID NO: 69956 - DNA, 585 bp, Zea mays
  Clone ID: MRT4577_163794C.1
tggcttgtcatagttccctgggggccttcacaaattgcttaactatatagtgaagaaatacaacaacccagtaatttatgttactgagaatggcatggatgatgaagacgacagtccgcgacgattgaccaggtcctaaacgacacgaagagagtcggctacttcaaagggaaccgctctagccggttgcacgcgatcaaggacggggctgatgtccgtgggtacttcgcgtggtcattcctggacaacttcgagtgggctatgggctacaccaagaggttcggcatagtctacgtcgattacaaggacgggctctccaggcaccccaaggcatcggccctctggttctcgcgcctcctcaagggcgaggctgccgaaaacagctatagctagagctggcatagactgagagaacagtccgcggcaagtacagaacattacatacacacatttctcctgtctgttgttgtgttgtgtcttacggtgagtgcacccgtgtatatgtaatctcaggatgtgctagtctgtcgttgatccgacgctggctgagacgtgttctccaagaacaagaacaacggccagaac

SEQ ID NO: 69957 - DNA, 547 bp, Zea mays
  unsure (1)..(547): unsure at all n locations
  Clone ID: MRT4577_163795C.1
tagttctagaatcgcgaagcgggcgcggccttgtttttgtttttttatattttttttttttgggtttttttttttnttttttttttttgtttttttgttttttttgttttttttttgttttttttttttgtttttttgttttttttttnttttctaaccaaaaagcgtttaaaaaacaacatgttttggggggaagacgggggccaacgggggtcccacgggaaccccttttaaaaaaattcgacacgaggggaaaaagcaaacccccggggggggggccatatgggttatgggaaaaaaaaaaaaccccccgggggggaacaaggcccttttggagaccacacccaaaaaaaaagcccccccccaaaaaataaaaaaaaaaaagccgcccccccatccagggttggttttttaaggaccccgggggtgttaaaaaacaaaaaaatttgaggggccccttttaaaaaaaccccgcccggacaaaaaaaattaaaacgtttttcctttgaaaaccccggaacaaaaaaaccttccaaaattttggggc

SEQ ID NO: 69958 - DNA, 439 bp, Zea mays
  Clone ID: MRT4577_163796C.1
cgctagatttgctgcgtgtggctctgcgatatcgcgcggcacgcgcagagttgcggacgtcgtgtgccacatgaagtcccccggcctgttgaaagggttgatgggggacgaccagctccgggaggcatctggggggctgcgacgtagctattatacctcgcatgagcgcataggaagccacttatgaccagcgcacgacctatactacatgaacgcctgcatatgcttaaggcgctgtgctctgacgttgacaaacacgtgccccaacagcgtgttgtatatatgatcattcaccctaccatactcttctgtgcggtaatgtgtggagaggcatgtgaagaggctagtgcttatgatgagaagaagctggtgggagcgactactgttgatgatcttccggctaaaaattattatgcttgaaaggctggcgtgccaaata

SEQ ID NO: 69959 - DNA, 116 bp, Zea mays
  Clone ID: MRT4577_163797C.1
ctctttcttaggagtgagccacgatgagcaacaccggtcttatttgagcgataggggagctctacaacgcgctaatgatggtgccaatcaaagaatgggacattaggaaggacaat

SEQ ID NO: 69960 - DNA, 144 bp, Zea mays
  Clone ID: MRT4577_163798C.1
tcggccggtaatccccttcctaatcaccattcatccatccatccggtaggatttcccagccatgtcggcgactgcggggaagtttcccggggaggcgccgcccaggacagtgaagggcaccaacgtctttcttagggcaaccgt

SEQ ID NO: 69961 - DNA, 709 bp, Zea mays
  Clone ID: MRT4577_163799C.1
cacagatatagaaataaaagttaccacagagtacatgcaagcatcgcagtttcatctcaattctcaacatcgaatcacaaccgatgatggtgaaattcagcaatcggcaatgcatccagcgcgtacgcgtctactcccgtgcgagtttggcggcgtccgacaagaactggccaaacgcagcgcgcgatgagccgccgcccctccgggccatggtcgcggcattcctatgcgcggccacccgcgtcctgagctggttgccttcctcggactcctccaacaccaaccttaccttggcctccacctcctcagcactgaccagcccctgctgccatccaaccatttccacgccgaccatggcttcctccaccatgaacagcttgttcattttctgctccgcgtacatcggccagcaaagcatcggcacgccagccgtgataccttccagcaccgagttccacccacagtgcgtcacgaacgcgcctgtcgccctatggttgagcacttccacctgcggcgcccagtgcttgacgaccaggccgcggtctcttgtggcctcgaggaacccgtccggcagaagggcgtcgaggtcggtgtccgcacgggggtcgaacagcctctcggtgtcaccgcgcagcggggctcgcaccacccacaggaaacggtggccggatctctgcaggccgacggcaacctccctgagctgctcttc

SEQ ID NO: 69962 - DNA, 261 bp, Zea mays
  Clone ID: MRT4577_16379C.1
ttcattttgatttcaagcacacccaaaccaaaggggagggtgaatatcgacctgatcggccataagccaatgatgcctcctttaatcttaatggccttatttatctgacagagatgacattggcgctaaaatatccagcgtatagcaattaaatcgcacacgttataaaaacattaatgcagcaaatgccctaacacgattaagagcatcatgaactgccaggactggcaacagaggaaagagcctccattgctggcaaca

SEQ ID NO: 69963 - DNA, 430 bp, Zea mays
  Clone ID: MRT4577_1637C.1
gagaacatgctcagctggaagaaaccgaaacagaggacagagtataacggtggccaagttgcagactgtgtttggacagaagcacataacacccaggctaacctgaaaacacacacattctgatccatgatagtggccgcatgaagggagcctaaacagaacgcttaaagatgcaactggctgagcatctactgggacttacaagaaacttcagctataggcaagctaaggtaacacagttcctaattaaaagaccaaggaaaccaatctcaatggggcatttccttcttaaggcacattaaccatcttgatatgactgtaacatggagcaaaataccatcacctgaaccaaacactgccataaacatcatgcactacagccaatgcaacgatgcatacacgaccaaatgcatgatcagtggagatgtat

SEQ ID NO: 69964 - DNA, 318 bp, Zea mays
  Clone ID: MRT4577_163800C.1
tacacacgtacgtgaaccctacgacgcacggggaatagtgaagcaggtcgggcgctgtcaccccgtcctgctgcgagacgagcagaagtctgaacagagccgaacgagcaaccgatctaccgaccgagcttccatgaaggggttgatcatggcggaaagcgaggtgcgtgataactggggagacttaactgcggccggaaatgtttaccaacacgagggccaactatggggccaactttcacaacaagatccatgacatctgcgcggtgtagaactccagcatggccaccacgtactactaccggttgctggcggaca

SEQ ID NO: 69965 - DNA, 207 bp, Zea mays
  Clone ID: MRT4577_163801C.1
tcgggcgcatggacatgatcatcaacgacgtcaccctgacagcgcccgtggacagcatccaacacggatggcatccacatgggcgactcatgcgggatcaccatgatcaacaccatcattagcatcagccactacagcctcttcatcggccccacgaccatccacgagaacatcaccgacagtgacctacttgcctagccacggcat

SEQ ID NO: 69966 - DNA, 817 bp, Zea mays
  Clone ID: MRT4577_163802C.1
ttgggtcgggcggggccggccgggaagactcaccgacgcgtacgtagcacagtccattattgccgtctcccttttgcgtgagcaaagaaagagagcgagaagcagtcgccatgtctggcatcatccacaagatcgaggagaagctccacatggggggcgaccacaagaataaggaggaggagcaccacaagaaggccgaggagcaccacaagaaggaggagggggagcaccacaagaaggacggcggggagcacaaggaaggcatcgtggagaagatcaaggacaagatcaccggcgagcacggcgacaagtccggcgaccacaaggagaagaaggacaagaagaagaaggataagaagaagcacggcgagggccacgaccacgacggcggccacagtagcagcagcagcgacagcgactgagatctggtgtcgcagcacaggtgcaacacaagtatgcttgctggatggaggattcataccagctgatgctgatgtagtgtttcactggtgtcatgcatgcatgtatcgtgctattataatcaaaaagaaaaaagaaataacagtcagggatggtttgtttgccaaaaaaaaaaaaaaaaaaaatacctaatatatctgttgcacagcaacactcatgccaccgacataaagggtgacgatctgcttttctttcttccttctctccacctcttcccccctccccaaattcgcgtcgaacgaattcgttaaataatctcagaaaacacacgattgacctggatcgaagggataaaaacgagaacgttcagatcctgtgatcaggtctcggggctaat

SEQ ID NO: 69967 - DNA, 1123 bp, Zea mays
  unsure (1)..(1123): unsure at all n locations
  Clone ID: MRT4577_163803C.1
cattgggtacctcgaggccggccgggccgggaagaaagaccaccgacgcgtagcacagtccattattgccgtctcccttttgcgtgagcaaagaaagagagcgagaagagcagtcgccatgtctggcatcatccacaagatcgaggagaagctccacatggggggcgaccacaagaaggaggatgagcaccacaagaaggccgaggagcaccacaagaaggaggagggggagcaccacaagaaggacggcggggagcataaggaaggcatcgtggagaagatcaaggacaagatcaccggcgagcacggcgacaagtccggcgaccacaaggaaaagaaggacaagaaaaagaagaaggagaagaagaagcacggcgagggccacgaccacgaccacgacggcggccacagtagcagcagcagcgacagcgactgagatctggtgtcgcagcacaggtgcaacacaagtatgcttgctggatggaggattcataccagctgatgctgatgtagtgtttcactggtgtcatgcatgcatgtatcgtgctattataatcaaaaaaaaaaaaaaagggcggccgcccttttttttttttttttttgtaggacgaacaagtgaatctaccatataggaaaaggaggcaggccaccacaacaagggtagggtagggcaccaccaccaccacatgccatgcttctcttcagaagccatcccggcacggcggcactaatgactaatcggaagaagaagaagaaactaccacaaacaaaggtgaagccagcagcacgcacatcactacctagctagagagcccaccagttactggcagctggagctcctcccgggcccgccgtagtagaagtaggtgccccagtcggcgttgctgccgctctgcacgtcgtagcagctggactgctccgtgaaggtgcccaggccgcccctgggcgccccgaggttgttgctgctgtccaccacctgcacccccttgaagtagctcgccctgccgaacccttcctcggggaagtgcccgctgcccatctgcgtcgacgtgtgcacgccgtccgcctgcgagnnnnnnnnnnnnnnnnnnnnnnnnnnnnncgacgcgctgtccgccaggta

SEQ ID NO: 69968 - DNA, 404 bp, Zea mays
  Clone ID: MRT4577_163804C.1
agaaaaaacgacgtcagtgcgtcaggtgttcggcgccgtatttgcttgtgacttgataagtacgttttctttctggggggagtcctagtcctgagtgactttaagttccaacaaaatctcggtagaatcattatgcattgctcttctgacaataacatccccaacctagacaaaaagatgatgaaacctaacgcccgattgcatactaatgcataattatggtacttatgtcacgaggtggaactcacaatataatctagcacagagaagccaccaagataactcaacttgtacgctaatgtcataaaaatgcgaaaaataaccatttatccatcagtgtcaccatgctcgatttgctcacaccatattacatctaaccactgcgcaactacacagtgtaaagc

SEQ ID NO: 69969 - DNA, 1666 bp, Zea mays
  Clone ID: MRT4577_163805C.1
atacgctttttttttttttttttttaagcaaaagaacgcaccctgtattgagagataaaaagcaagaacaagagcttcacatgaatttggacgtctacagactacatccatgacccaactgccagatgtccctccacatccatcctggaatctatccaactgccaaatttccctccacaaccatcctggaatctatcagatatcagatagaatttagaaaaatcaagagtttgcttgctcttgctcccagggcgtctggatgagagttcttccatccaggataagatgaatacagcctaacacagtttgcaatatgatcagaacagctccggatcaggtgatacactgataccccgttcaatccttgccgaagtcagcactgtagtgcgcactggactcgagcttcttggcatcattcagcttgcgcacagccttcatgaagtcctcgtgaatgacatagtcacgctccgctcggatagcagccatgccggcttctgtgcacaagttgcgcatatcggctccattgaagccctcagctagtttgactacagcttcatagtcaatctccccatgctttgcgatgccagctgcatgaatcttgaggacctccatcctcccttgttcattcggcagtgggatctcgatcttcctgtccaaccgaccaggtcgaaggagtgcaggatccaaaacatcaggccggttggttgccatgatcattttcaccttcccaagctcatcgaatccatctaactgatttagaagctccatcaatgtcctctgaatctcacgatctgcacttgtgccctcactaaatcttcggccaccaatggcatcaatttcatccatgaaaatgatgcatggctgatgctcacgtgcatagttaaacatttcacgaattaagcgtgcactttcaccaatgtatttatcaatgatagcacttgacaccaccttcaaaaaattagcatcaatgttgctagcaatggctctagctaggagcgtcttcccagttccaggtggaccgtagagcagcacgcccttcggcggtttaatcccgacacggagaaacaattctgggttcataagaggtaattcaatggattctctgagttcccttatttgatctgacaacccacctacagctgagtaacttacattgccaggatcttcatgtagcatgttgtaaaccacagggtcgacctcacgtggcagaatgcgcataatggtaagtgttgtcatgtcaagaacaactcgtgtaccagcaatcaacttttctttgtcaactttacttcggcaggcaacaacataacgtggtccgctgctagccttgacaataaatcgttccttgtccaaaggtcgaagcacttcaccgataatttgaccaacactttgcagtgattttagatcctcttcagttttttccaagtttttctttgcattttttagattctccctcccagttttgacccgcgcctcgagctcccggcaggtgaggagcttcttgcggtactcggcgatcgcagcacggcggcgggcttcttccccgccctcggccatcctcttcctcaaccttcctcggcggcggcggcggcgcgaggctttcttttttttttttcggaggtggaccctgtttttccaaaatcccggcccagaacgagggcttcaattc

SEQ ID NO: 69970 - DNA, 1384 bp, Zea mays
  Clone ID: MRT4577_163806C.1
actcctaagggcgattgggatcctcgaggccggccgggaagaccaccgacgcgtagcacagtccattattgccgtctcccttttgcgtgagcaaagaaagagagcgagaagagcagtcgccatgtctggcatcatccacaagatcgaggagaagctccacatggggggcgaccacaagaataaggaggaggagcaccacaagaaggccgaggagcaccacaagaaggaggagggggagcaccacaagaaggacggcggggagcacaaggaaggcatcgtggagaagatcaaggacaagatcaccggcgagcacggcgacaagtccggcgaccacaaggaaaagaaggacaagaaaaagaagaagcacggcgagggccacgaccacgacggcggccacagtagcagcagcagcgacagcgactgagatctggtgtcgcagatgtcgatgctggcttataatgcagcacaggtgcaacacatgtatgcttgctggatggaggattcataccagctgatgctgatgtagtgtttcactggtgtcatgcatgtatcgtgctattataatcaaaaaaaaaaaaaaaaaagcggccctacgatacgctgtttcttttctttcttccttctctccacctcttcccccctccccaaattcgcgtcgaacgaattcgttaaataatctcagaaaacacacgattgactggatcgaagggattaaaacgagaacgttcagatcctgtgatcaggtctcggggctaatcgtgtgatacttcggcgtgctttggcttgtgattcagtgatatagggtttcggatctggagaattagttctcccgacttccgagtcagaccatgaatgagcagatgatgcgacctacggcgccgctgccgttccaccagatgtgggcggcggtgccggcgatggagcctccggtggccgcgttcaagccggcgcggcaggcgtggaagcgggcggcgcggacgccctggaagcgcaaggcgcagccgccggcgccgccggcgtcggtcggcggcaggtggggcggcgcggcggccccgcgcaacacgacgtcgttcctcatccgtgcgaagcgggcggggggcgtggcgtcgctggtgtcgccgtgccccgtgacgccggcggtgcttccgacccccgtgctgtcgccggcgcgggaggtgctggtggagatggccaaggaggcgtggggcgtggacgggtacgggtccatgaagggcctcatccgcctgcgcgccgacgccggggacgccggcggcgacgactcgggctccggcgagagcgaggtggaggagcacgtcgaggtggagcgccgcctggaccacgacctcagccgcttcgagatggtccacctcccggccgcggccgc

SEQ ID NO: 69971 - DNA, 405 bp, Zea mays
  Clone ID: MRT4577_163807C.1
tctttaggtttaagatcgcctcccgttgggaggggggcttgagggcggcccgccgcgttgcgtcggccggcgggcctaagccatgggcccggcccctgggggcccaaccccctaaccgtgggccgggccggccggcagccaaaggccccggtggctggctggatttctgccttgggggggggggggcttaacccggaccacggaagttttggcccactggtttttaaaccaaccccaagaaccattggctgaattaaccggttcctttcgtcctagggggaatacctattgcggggcggcattaagtagggaaaaacttaacctgtccaacaacggtttaacccaggttacacgttcctctattggggggggacaaacaccactcttggaatattgctctacaca

SEQ ID NO: 69972 - DNA, 2272 bp, Zea mays
  Clone ID: MRT4577_163808C.1
aagacacaccgacgcgtacgtagcacagtccattattgccgtctcccttttgcgtgagcaaagaaagagagcgagaagcagtcgccatgtctggcatcatccacaagatcaaggacaagatcaccggcgagcacggcgacaagtccggcgaccacaaggagaagaaggacaagaagaagaaggataagaagaagcacggcgagggccacgaccacgacggcggccacagtagcagcagcagcgacagcgactgagatctggtgtcgcagcacaggtgcagcacaagtatgcttgctggatggaggattcataccagctgatgctgatgtagtgtttcactggtgtcatgcatgcatgtatcgtgctattataaccaaaaagaaaaaagaaataacaagacacaccgacgcgtacgtagcacagtccattattgccgtctcccttttgcgtgagcaaagaaagagagcgagaagcagtcgccatgtctggcatcatccacaagatcgaggagaagctccacatggggggcgaccacaagaataaggaggaggagcaccacaagaaggccgaggagcaccacaagaaggaggagggggagcaccacaagaaggacggcggggagcacaaggaaggcatcgtggagaagatcaaggacaagatcaccggcgagcacggcgacaagtccggcgaccacaaggagaagaaggacaagaagaagaaggataagaagaagcacggcgagggccacgaccacgacggcggccacagtagcagcagcagcgacagcgactgagatctggtgtcgcagcacaggtgcaacacatgtatgcttgctggatggaggattcataccagctgatgctgatgtagtgtttcactggtgtcatgcatgcatgtatcgtgctattataatcaaaaagaaaaaagaaataacagtcagggatggtttgtttgccatgtgatcttgtacactcctacttaaattatggctgctgcacggtgctgctagcttgtactaataaagtgttgatctgcatgcttgcgtctaaaaatgcgacacgcattcatgaacaaaatatagcgatcagccttttgcgtttgcaaagaaagagagcgagaagagcagtcgccatgtctggcatcatccacaagatcgaggagaagctccacatggggggcgaccacaagaaggaggatgagcaccacaagaaggccgaggagcaccacaagaaggaggagggggagcaccacaagaaggacggcggggagcataaggaaggcatcgtggagaagatcaaggacaagatcaccggcgagcacggcgacaagtccggcgaccacaaggaaaagaaggacaagaaaaagaagaaggagaagaagaagcacggcgagggccacgaccacgacggcggccacagtagcagcagcagcgacagcgactgagatctggtgtcgcaggtgcaacacaagtatgcttgctggatggaggattcataccagctgatgctgatgtagtgtttcactggtgtcatgcatgcatgtatcgtgctattataatcaaaaagaaaaaagaaataacagtcagggatggtttgtttgccatgtgatcttgtacactcctacttaaattatggctgctgcacggtgctgctagcttgtactaataaagtgttgatctgcatgcttgcgtcttaaaaaaaaaaaaaaaaaaaaaaaaaaaaaaaaaattacgccccaacggttttctttgtggtttcatctccataagatttggctggttttttacgttggtttgccggacctaacacaaccctcctcctttaccgggcttgggaccggctatgttgaaacgactcaaggaagtcttccaatcaacataggcggagttcttacttttaactctgaacaatcttactttcgtatgattaatttttaactctgaacaatcttactttttgaatgtttcttttcatatcttcactagctggcgaaattagcaggcaacaaggttgttgccacatgtggaggtgaaagtaaagctgaacttctggcttccttaggagttgatcgtgttatcaattacagaaatgaacgagtcaaagatgttctgaagaaagagtttccaagaggtgtagatatcatatatgaatctgtaggtggggaaatgtttgacttgtgcttgaatgcacttgcagtccatgggcatctcattgtaattggtatgattctccagtatcaaggagaggatggctggaagccaaagaactacact

SEQ ID NO: 69973 - DNA, 528 bp, Zea mays
  Clone ID: MRT4577_163809C.1
gggtacctcgaggccggccgggccggaatcccaagaatatcaccaatcatctatccgtatcaggtttgatacagtcgacggctatataagaagagaactccgacttcttctcttcacacactcatgttgatgatgagccttggagccgccgaatacaacacgaacaccgcgacgcttcgatgccgaagatgcaccctggcgatacgcgccgccgactcacctgcagaactgcaccgacagtgatacgaggcatgatatgtgtgcggtggacgactatcttctcttcactcaaccgctgcttcaacagcctaacctggcgatgcatgtactggaacgagtacaaacatgtggatggcaacgccgccgtagcctcgaaggccagctccgacgacgagaggaccaacgtccgtgcagaggatggtatcctgtgcaacatgactctcattcacattgaaagacctcttcaagacagttcttacagtgcacaacttgtctacctctatcaagtctagcgacaatatactccca

SEQ ID NO: 69974 - DNA, 610 bp, Zea mays
  Clone ID: MRT4577_16380C.1
ggaatgaagctgcacatctccaatcttgactccggtgtcacgcaccaagatgtccaccgaactcttctcagaagttcggtgcagctccatgcgtctattcaatcgaactatagacaagcgatgcggacgatccaaggcttactgcgccaagttgttttctgctatgaaagcggatgctatttgatgctatcaatagatacaatggtgctctacttgattcgaatccaatgaatataaagatcatttcaaacaatgtcgaaccacctcccttctcaccatgaatacacatttgtacttggagcaactatatcgatctcaagatcatcctattcttgttccagagaaatgtacagtgaatatcacctctactctgcattcggatgggaccctgacactgactactatactcacgctgacagaagaaatctcgcaggcaattctgaaaacgcaatgccatttcaaactttacaccatctcataaaactcatcatccaccctgaaccctacagcgagagatgtatgcatcttctcggccgccctctcttaggatgctcagggacagacccttccactgggcgctatctcttgagcttgatcagaaggctctttc

SEQ ID NO: 69975 - DNA, 594 bp, Zea mays
  Clone ID: MRT4577_163810C.1
ggatttttcttttgctagttgttatgcacacgttttgcactccttacatttttttccagtgccagagcacggttttggttttgcaataccattcctccagagaatatatgtactaataggttcttgattttacccctcgatacactcacccatttaagttgaagtggggggcaaaatagctttcactcctgggataatccttgctttatgacatttttccccttttgaatacctttggatttgagaaacactaacatttcgtttgttcttttgcatgattgccttttatgcttattgtcacataattgttcttccattaatgatggtaaaaatattttttttttttgcatagcaagtatagaactatagattacttgtcctttgaaatctctttgtcatgtgcttcctttttatttctgaggtgacaactaagttatttgcttggactaacatgtgcttctactataaacagcaaagtagatgggctggctgcttttcaggcttatcatgtttcggatcgcaaaagggcgggaaaagaattgttcctgcagcacgcacttttgatgggaatggatcaaatactcgtgggaaatg

SEQ ID NO: 69976 - DNA, 514 bp, Zea mays
  Clone ID: MRT4577_163811C.1
aaacattggaatacatctcaaaaagacacaatatcaaacaaggaagaatgagatcagagtataacatgaactaatttcatttaggagttgattattctttaagtgttgtccataattacataacctcattctattcattttactaaaagttagaccagagatgaattcatgtaatacatattattaatctcacaagactaaatatactttaacctctagggttttccttttatttattttattagataaataaatccacacatatactagttcatagttaaccataaaattagaatgtgaagatagtaaacggaactaatttatttaaacagagaacattcctatgaacattttgcaatttgaatcattaaatttggagttcatatgcaaaatatatgaaataaacaagtttggggaatttaaaatatgaaaataggtctaattctggaattatttaaaagcctaaggtttagccctgcaaaaaaactggggggctggggggcgaaaacccggg

SEQ ID NO: 69977 - DNA, 235 bp, Zea mays
  Clone ID: MRT4577_163812C.1
cgggccttcttttattctttttttttgttttgtagcggaaagccacaaacaccctccaagaaacttcagtggcgaactataacacataagcactttatgagagggcaccaacaatgacgagtggctgatacacaactgcctggctttgtcaaagagaggtggaggaaaggcacaagttgatgaagtactactatggtgacaaggttacgcataaacatattgttgaaaagcaaca

SEQ ID NO: 69978 - DNA, 311 bp, Zea mays
  Clone ID: MRT4577_163813C.1
ttgtttccttttaataaggtttgattttttttttgggggaaactacacacaaaaccaaataaggaacccctcttacactacataaaagacaggccaatactcctggcaacaaaatccttaaaaaaaggaaaaatcaagaggtgaaaccctccatagatgtaaaacactagttgctgaaagccacctcaccttatatacttttggactccgacaacgagggccaccagctctccaatttattggcgggctcctatgataccacatttgtgcaacaacatctgcctgcctaagaaaggtgtattcagatacta

SEQ ID NO: 69979 - DNA, 1698 bp, Zea mays
  Clone ID: MRT4577_163814C.1
tcagcggtggaaagagctactgagttttgtttctttgaagccaaagacaccagggatcttcccagaaactgacaagtccctgatgtgctctttcttttgatctacggatttacctcccgtgtcgaggtcgagatgcccatttattcccatgggtgtcttgatgggtttgccattcttcattccaaactttttaagtatatcttgaatgtacttcatttggctcatgaaggtgccctcttggagttgcttgatttggaatccaaggaaatacttcaactcccccatcattgacatctcgaatttctgtatcataatccatgctgttggggcttgcttgagcccataaagcgcatttgagagcttataaacatggttaggatactcactatcttcaaagtcaataggttgctcaacatagacctcttccttgatagggccattgaggaaggcactcttcacgtccattagatataactcattcctcgtgaagttgttgagctcctcttgcatagccaccacccaatctggatcccttagtgcatcctttatccccgttgtgaatgtcaccaagtatggagttgacggggtgatctctttgaattgcttggtggactcttgggtgtggtggtctttgatcccgaatttcttgatcatcttccttgtcttgctcatcttcgtctccccttgatcaatgtcctcctcttgaggtggctcatcgtattgttcttcatcctcttcttcttgagccttgtcttcatcttgagttggtggagatgcttgtatggaagatgatagttgatcttgtgcttgtatgggctcttcgaattcttttgggcacacatccccgatggacatgttccttagcgcgacgcatagagcctcttcatcatctagttcatcaagatcaacttgctctacgtgagagccattagtctcatcaaatacaatgtcacaagaaacttcaactaatccagtggacttgttgaagactctatatgcccttgtgtttgagtcataaccaagtaaaaagccatctactgctttaggaacaaattttgaatttctacctcttttaataagaataaagcatttgctcccaaaaactctaaaataagaaacagttgggagtgtcctccccgccgcgggatgtacctgccccatcatgagcacgggtccggggtggcatctgaggtgatccactctggcctccaaatccccgatggggtcgttacttccactacttcttgcttcatgcctggaggccagccgatgtcgaggcacaccctgagatccagttgatttgcgctgggtagtttttgtgcgcgccatatcatggaggtaaaacatcctcccaccaacacgttcaatagtttgcctcctcctttggtaccaccttcgagcagaaacaacaaaactctgctgtttcatcaccgaaagattgggcacctcagctatatcaagtggtatcagatttccaggttgatcggtgagtttatcgagtgtttttctcctacagtcttccttaaaccgggcataacttttcgctcggttgttcaaaaaatctgaaatttttacaggagcttgttgacaccattttgagcttgtctcatctgaaattctacggcctgtgattcctactagtgcctttttggcctcgctagtacaatatttacggtactgccattctgctagttccat

SEQ ID NO: 69980 - DNA, 373 bp, Zea mays
  Clone ID: MRT4577_163815C.1
ggaaagccgcggcctgcaatcctatctggtcgaatcgaacgaaggcttctttttattcgacgagaaccttcgtcacggccgtctggtcggcaagacggcggagcggaccctcgccaatcttcaaacctccccgcccgtttttgacggcctcgagaccatggctgctgcagattcctccaagcctgcgcagtcgcctgctgcgacgtctaccgagatggacatgagctaaaatccacaaactcatcatgtgtacttttatggttgctttggcgttactggaactggatgttttgggtggcaggttgatgtacactctgccaaggggcatggcttgagcagttcggcgttgagaactcggggactactggaagga

SEQ ID NO: 69981 - DNA, 251 bp, Zea mays
  Clone ID: MRT4577_163816C.1
ttggacaacgtgggtcttaggtgaaggaataaatagcccctgctctgggccatgaattgcaaaaacaagcacacatatttagctgaggaaagatctataccacattgaagtcactacgactgactgaaacaccatactgaggatctgagtgaacaagtgacattacctgagaaataaggaacgctcttgcatttataatgatacaatgagaatcagttttaatgatggaacgcaaaaaaggacaaataggc

SEQ ID NO: 69982 - DNA, 987 bp, Zea mays
  Clone ID: MRT4577_163817C.1
atggctcaagaggatagggatcaagatcaagacgatgagccgcctcaagacgaggacattgatcaagggggagatgaagatgagcaagacaaggaagatgatcaagaaattcaagaccaaagaccgccacacccaagagtccaccaagcgattcaaagagatcaccccgtcaactccatacttggtgacatccacaagagggtaaccactcaatctcgagttgctcatttttgtgaacactactcttttgtgtattctattgagccgtacaggatagaggatgcactaagagatccgaactgggtagtgccaatgcaagaggagctcaacaacttcacgaggaatgagttgtatcaaatggacgtgaagagtccttttttcaatggccctatcaaggaagaggtatatgttgagcaacctcccggctttgaagatagtgagtatcctaactatgtttacaagctctcaaaggcgctatatgggctcaagcaagctccaagagcatggtatgaatgcctgagagactttcttatcactaatggcttcaaagttggaaatgattcagcccatttccctttcagtaaagccgattttactctcttcactaaaacaattactaaagacttgtttatatgccaaatttatgttgatgatattatatttgggtctactaacaagtcaacttgtgaagaatttagtaggataatgatacaaaaattcgagatgtcgatgatgggggagttgaagtatttccttggatttcaaatcaagcaactccaagagggcaccttcatcagccaaaccaagtacattcaagacatacttaagaagtttggaatgaagaatgctaaacccatcaagacacccatgggaacaaatgggcatctcgacctcgacacgggaggctatggtacccccaagggatctacctttgatctaattggacatcacaaggacgatcgtatttataggtccgtccgcgggtag

SEQ ID NO: 69983 - DNA, 403 bp, Zea mays
  Clone ID: MRT4577_163818C.1
attcggttcgagctcacttttcgaccccctttgtgtcaactcccggggggcgctctcgaaaaagaggagctcttgtggatgtccctcggggtccccaacatggggaggaaacgcaatgctcaccgttcttagaaaggtgactgatccatctgcggctaaccggtcatcggtgtgtcttcgcaggtgaaaggctgggacctgaaaagcactatgggaaaggcgctccggcggtcctaaatgctccaattaggcttaaactgtccaggagacacgagtgcttggacacttgccattgtccctaccacccattttttttgagcaactatggattaactagccaaaaacttggtcttgtactggatgctttgttcttgatacccaacctatgagcctgccaccttat

SEQ ID NO: 69984 - DNA, 286 bp, Zea mays
  Clone ID: MRT4577_163819C.1
cctcccacgcgtccttccactcgtccgtaaaaaaattcctcattttcttctacacggggatagggtgaaagacagggcgccggcagcgactatatcttggctctgcaagggcggcaaatgtctgggcatgggcggagcaaagcgccaccgttaggtgctccttgacaacatccagggcatcaccaagcccgcgatccgtaggctggctcggaggggcggcgtgaaacgcatttcggggcttatctacgaggagacccgcggcgtcctcaaagatctttctcgagaa

SEQ ID NO: 69985 - DNA, 211 bp, Zea mays
  Clone ID: MRT4577_16381C.1
cgccaaatcgggtctaacacgtgtgctacctgtattatcttcaaaaccaaggtgtgcgcactgcttgacatcctttctttaggcaacatgtaagatcccattataaattctatgacatgaggaccatactgactgatgcacgaatcatacatgccataactcgtcgacattcgcatgtcaaagtaacatgaactaatcggactgagctcta

SEQ ID NO: 69986 - DNA, 584 bp, Zea mays
  Clone ID: MRT4577_163820C.1
gaccacagacaactcacgcctggtgataaactcatcagctacccatgcacaatgacagcaccaagcaatatacatatgcgacatccggatggacggcaggcatcgagcccgtgtccgacgtggtgattgacgatcatccattggatgggatgaaacagatagtctgggttgtctgtctcgtggactctctttttgagttttttccatgcgacccgaaaaagctggaagaaaggctacggaaggtccggtcatgtctggtcaggcgacgcagttgaggcccacgcaccccatccacatgctcctcacgtgcttcctctgaaaaagaaacaaacaagaaaagtacagaaagctttaaagtcaacttgctgggtctggaaactggatgactagctaatatatatacacagtagatacatcatcagctcgaatagaaggacaaaatatttagttttctgatatttgttgtagctaaccaaacgtagaaatggcaaactattatctcagtacactttgctggaagtgtgcactagccagattaattcaaagtggcatactgtttctggatcaacgtgcaatctgcattc

SEQ ID NO: 69987 - DNA, 216 bp, Zea mays
  Clone ID: MRT4577_163821C.1
tttacgcgtgccgggtgatgattgtcttgtgtgtgctgtactgggtcgtggtacggacgccacgaagtagggatgtaccaaatttatctcattcaaggtgctttggactcagtctgcgcttatggttggtccgatttttgacgctcgtccgagcgacgtggaactcagttagcactcgctcccgaggtccattgcgatgctagagatccgggagga

SEQ ID NO: 69988 - DNA, 394 bp, Zea mays
  Clone ID: MRT4577_163822C.1
gtaaggggaccaaccttgtgatggggggcttactttttttaaaggggaaacatccttttggaaaaataaatggaaacatgtgccctttgcaaaaaaaaaaagggatatgaacatttttgggggtacaaaagaaacaaaccggcgaacaaaaacaaaatgtggggcctttattttttaaaaaataccccctcttgatgaccctgaaggggtccatgacttttttgggggccttcttttagtggatgaacacctgctcgggcgtttgaaggcggagcttgtaaaaccctttgtttttcaccccgaactgtgacaggtatggggggtcccacttgaaggtttggaaccttttgtggggcataaccgccaactagatgttgctcgcataagatttttt

SEQ ID NO: 69989 - DNA, 292 bp, Zea mays
  Clone ID: MRT4577_163823C.1
aggcaggcaacacaagtgtattgttagatatcaaaagaaaccagatatgtcatcgggattttgcatacaaagccatgtgctttacacagcattaactacatggtacgatcggctgttcactatgcgcaagataaggggcattcaggttgattcaaccggttaaaaggcaaaacgttacagttgaactacggacagacaagattgatctgcaaggcttatgaccagctgagtagatgtactgccagctataagaacatgcgtgactacatgtcgatgtaaaggaaggatggct

SEQ ID NO: 69990 - DNA, 612 bp, Zea mays
  unsure (1)..(612): unsure at all n locations
  Clone ID: MRT4577_163824C.1
cggacgcgtgggttttttttgaaacctcaactccaaagctccattacaaaatggcttggaaattggaattctactagtactccgcttctagcttttagaaataccagaagattacaaaaacaaaagaggatctctactgctttttcctagtagaatacgtacatctgacaaagacgacacccgggcccaaacggcagcgagaaacctcattcaattcatcagctggtgcggtggaaagagagaaaaaaacagccgtgaaacgccttcctcctcctgcgcgccttttcgctacgcccggtctacggtgggccgaccggcacggccgctgcggcggagccgtggtccggccccggtttaggggagtgctggtacgtcatgtcagccgttgggagaaacggcgtttcctcactgctgcggttgcgggacctcgccgccgccgccaacgccggcgaggagccaccggtccatgggcacgcactgcgccttgtgcgcgcgcttccagtccagtgcctggcacgcgcgggagcagtagttggccgcgccgcacacggagcaccgncggaactcgtggcgccgngtctcgcgccgnccgcaccgtacgtgggagcacag

SEQ ID NO: 69991 - DNA, 409 bp, Zea mays
  unsure (1)..(409): unsure at all n locations
  Clone ID: MRT4577_163825C.1
caaattaccacggccaaagggttaacatttagctcttacagctttcttgtttggcaaagggggaattccccggaaggcccccntttnttggttaaaagggcccgggctaacagggctcaccggttcccccaatacccgcancgcccccaaacaaaactggtcggggtgaaaactgggttttgtttacgcaggcccgggaccccttcattttttctgggccgcagcctggggccccttggccccggtggggcccttcttttccaccctcttgtttcccccaacagcacccgtttgcctaatgtcccggccagcaaacctcccaagggggggatccccctgaaattgtccccccccccctgggcctgggggggtttcattttccccttccccccttcaccgttcttcggga

SEQ ID NO: 69992 - DNA, 231 bp, Zea mays
  Clone ID: MRT4577_163826C.1
atcaagaggaggaagaggaggaagcataacgcacaggaagctgcatatacaggagagtgggatgtgcctatggaccagatctagctacatggacaacattgggagcctcctatctcaagagcaaactgaagaatgcagagctaagggacgcacaggccttgtgacagatggtggtggaaagactgcctctgaggtatactggcatgaatggaccagaggatttactcagta

SEQ ID NO: 69993 - DNA, 485 bp, Zea mays
  Clone ID: MRT4577_163827C.1
cgggggaatccctaaacaaacaagggggccccccgggagaaaaaacatttatttttcccccctaaatccccactctccaccccagggcaaataccccccaaaaggaaccaaaaaaaaaaataaaactgggttcaggccaaaccatttttttaaagttctaaaaaaagggaaccaaacccggttttaaagggacatcaaacccgtttttttaccggccaaacaaatttccccaaaaacgggtttccggccctttaacccccgaaacaaaacccggctagccccccttttgggggccttggaaacaaaaaaaatttggccccttttcggaccggcctccccccacctaatttttggccccgaaaaaccccaaaagcggtttaatttccccatcccccaaacggggaacagggacaaacccaatccccccaggaacaaggtttattaaaccaggctgccccctttaaaaccagttcattacaacaagg

SEQ ID NO: 69994 - DNA, 618 bp, Zea mays
  Clone ID: MRT4577_163828C.1
ctcctcagcgtctcattttcaccctcccgcccgccgccgccgccgctcccgccgctagaccagctcgccagcagcaatggcccggatcaaggtgcacgagctgagggggaagaacaaggcggatctgcagggccagctcaaggacctcaaggcggagctctccctcctccgcgtcgccaaggtcaccggcggcgcccccaacaagctctccaagatcaaggtggtgcgcacctcgattgcgagggtgctcacggtgatctcgcagaagcagaagtcggcgctgagggaggcgtacaagaacaagcgtctcccgctcgacctccgccccaagaagacccgcgccatccgcaggcgtctcaccaagcaccagctctctttgaagacggagagggagaagaagcgtgagaagtacttccccatcaggaagtatgctatcaaggcctaggttaggagtgaatgatttgccggccgagttttgcccagaagttgcatgaattttatgttctgtgtggacaccgctgctatctaagtacaatgtattcgatatcctgcatgaaattcgaacttttgcttattgacactattatctatagctgcttgtttgtgctgcagtgtgat

SEQ ID NO: 69995 - DNA, 275 bp, Zea mays
  Clone ID: MRT4577_163829C.1
caggcagggcacgtggcacacacgggaacgaggggcaataatatatacggagccaaaactaattgattgcaaaaaaacatttgtccgaaaaaggtcatgtgcacaatggtgcacgcacattgaagcacaccggctacagctcaagggttggacacggatgtacgagtggttgaaaaccgagttacacctcctacaggttgagtttccacgcgctactgtacaaaagcacaggtttgcggggacgttaaaatgcaccttcagttcaagcaactccc

SEQ ID NO: 69996 - DNA, 443 bp, Zea mays
  Clone ID: MRT4577_16382C.1
gcccaacaaagggggttaaaatttgaaatacttaaatcggccgctttggggcggttaccccaacgaaaaacctattccaacataaacaaatgtttttttaaaaactggccggggtagacctaccatggaccccccccgataagatgggacaaacagtcttgcggggaagacataaatacacatctttgggaacaaccccctccctactgccccctacttgcaaagtggtttgggctgtttttaccctatgtcccccgatccgaaattcctatgggggaccccggggcggcgatggaatcattgaacccccaagcctctggtaccccaccaacagttttcgaaacttggcttgccaagggatcctatgggccggaagggaacctatagaaccgctgtactttccctgcagatattggggaaatagggaaacgccgggcacattc

SEQ ID NO: 69997 - DNA, 499 bp, Zea mays
  Clone ID: MRT4577_163830C.1
gaaaaaaaagggttttctttaaaaaataaaatttaaactaagactggttttggttttttggccaaccccctttttgggggttttatacaaaaaaaaatttttttttcttaggaccggggaaatgtccgggggggggaggggttgcttttttaacggaaaaaatggctaaaaacccaaaaaaaaaaggccttttggggctttaattggggggggggaaaaaaaaatttaaggtttaaagggctaataataatccataacgggggttccacccccaatatttttttaaggagggggtatttggaattcccaaggaaaacccctttccaaccactgaagggggcaaaaccgtttaacgaaaaagggggggccctcctgtcaactagggaggcggggggaaaatccaggtaataaggggcggggaaacgggggaaccctttctttggaacaatggaggttttcttgtcaagtttcgccccacctctaaggggggccgtttttt

SEQ ID NO: 69998 - DNA, 304 bp, Zea mays
  Clone ID: MRT4577_163831C.1
agggggaagggtgttttttagaaaccaattggtttaaaaatccatataccttttatttgaagtattcatcctaacctttttcaaagttatttacataaattgcatgaaccaacaaaatctaaatacacccagaggtgaaccaacttattaggttcatataaaaaactctttggaaacaagctttattacaagaagcacctatggagacgtggttctaactttttgaaactgctcaacaaatattttaagggatcactaaaatctccaagttttagagcagttttccaatcatcaaaattctttt

SEQ ID NO: 69999 - DNA, 219 bp, Zea mays
  Clone ID: MRT4577_163832C.1
gacgaacatagatcatataaagcgggataccttattgacactacaacaacaatggagacggggacattttgcctcgctatgcgctgtgctctttctacaagtgtggctaacgcgacaattttacctctatgctcacacactcctatatatgttctttttacaccatacctttcatgaagtatagagttagaatgtgaaaaaccacctctttaaccatat

SEQ ID NO: 70000 - DNA, 456 bp, Zea mays
  Clone ID: MRT4577_163833C.1
gccggcctgggacctcaggtatcattcgctatcagcaacgaacaacatgctctcgatctcatccgcacaccgacgaagaagatatcaatgtcggcaccataccagggagacgtgatcgcgtgacacaccaaatgtgaatatgccgcccacatgtaccaaagaccactacaccggacagctggtgttcattgacttcactgccgcctgatgaggtccatgtcgcggcatcgccccactgttcgtcgaacacgtcaagaagaattctctggtccccgttcctgcatggtgaacgtcggaacaaccgaaagaggtcaccacgccctacgaagacgcatcaatgccgaccttccacttcggcatgatcttttttatggtcgcgcccatcatgactgcctaaaaggaccaccaccaggaacagatcgatattcatgctgcgcatgcgacggcaactgcgtc

SEQ ID NO: 70001 - DNA, 287 bp, Zea mays
  Clone ID: MRT4577_163834C.1
ccaactcgtctgtgacactattgactatgctggcaactgcaggattcacgcatcgggctgcaggctaggactacggtcttgctgcactcatgactggtgtgcattcaagcaagatccggactacatgatcgaaggggttgaccgttctgaactaccgacacctgaagtatacgccaagcgtacgactagaccgctatagattgttatagcttacgatatgaggaagattgaagtagcgtgctaaatcatgatgaaatagagcatgaagtcactgccacacccgaaac

SEQ ID NO: 70002 - DNA, 312 bp, Zea mays
  Clone ID: MRT4577_163835C.1
aaaaaaaaaaaaaaaaagaaaaaacaaaaaaaaaccgattgagtacctcataggcgggcggggaaggtatttcaaaaaatctaggattccaagcaagttatccccttcgtccgacaaccaatctatcagatctatctccggctattgaaggcacctgcgaagatgccgcaacggtactcgaagaacaacatcgacctcaccttcttcacgaaacgaggagaagcgtaacatcgattaaggaactccatgctagctgctgtaaaacgcctacctcaccccttacacgcctgatatctctgcctcaacgcgctc

SEQ ID NO: 70003 - DNA, 920 bp, Zea mays
  unsure (1)..(920): unsure at all n locations
  Clone ID: MRT4577_163836C.1
cgggcgacgctaagctcgccgagctcgcgcttgttgaccccaagcgtgccaagaggattttggcaaaccgccagtcagctgctaggtcgaaagaaagaaagatgcgctacattgcggagcttgaaaggaaagtacagactctccaattagaagcaactacactatcagctcagctggccatgttgcagcgagatacgactggtatgacaagtgagaatagtgatctgaagatacgtgtgcagacaatggagcagcaggttcagctgcaggacgctctgaacgacaggctaagagacgagattcagcagctgaaggttgcaacaggacaggtaaacgccagcattggaaaaacaggaaactctggtatgtcatcatttggaggtaatccacaaagttaccagcgtagccatatacagtctcttctggctgctcagcacctgcagcggctccggatccactcccaacatcagcaacagcagacgcattttcagcagcagcagcagccgcagccgcagctgctgctgcaggaggcgcatccatttccggtggacctaaagatgagaggattttctctgtcatcacatgctcagaacgcaggtgcatcagacagccatgctgccaagagcgaaccctgagatttagcatgtattcatgtgggttgttagaaataataatgtcgctctgttagcgtggtgtctaggtgaacttcaatttgtttgaggtgcttagattttgtgcagcctggagctcccatttggttgtaagcttcagtgctgactgaccggtcatttaccttgcctaatgcttgtacctgggtcctggccatgactttgtgcctggaggatggagccgttcgcgcatctgtgcaagagcagaatgaaattgttctttgggtcctttggaatagtccaaccctngag

SEQ ID NO: 70004 - DNA, 309 bp, Zea mays
  Clone ID: MRT4577_163837C.1
ttccttacgggtcggggcgagacgcgggtgccaatgcctgctctattaggcgcgcatgaatggataacagattcactgccctgcactatcacgaacccagccaaggacggcttgcggaatcaggggaaagagacctgtgagctggactctagccactttgtgaatgactggaggtgtaggatagtgggagccttcggcgcagtgaatccctacttttaacgttatttactattccggggtgggtagcggggcaccgcccctccttttgtgtcaggcccgttctctcgggtcgttccgtgcgttgacatt

SEQ ID NO: 70005 - DNA, 804 bp, Zea mays
  Clone ID: MRT4577_163838C.1
agttctccctccgtcgacctcgagacccctcctcactctctccgtaggcagagcggagcagcgagcccgaagcaatggatagataccaaagggtggagaagcctcggaatgagacacccattcgtgagaacgagatcaggatcactgcgctcgggaggatgaggaactatatcggctacgggatgtcgttgcttgaggaaaatgggcatgatgagatcactatcaaagccatgggacgagccataaataagacggtcatggttgctgaattgatcaagagaagggttgctggtctccatcagaatacgtctattgaatctgttggcatcactgacacatgggagcctctggaagaaggccttgtcccgctagagacaactcgtcatgtatcaatgattaccctaacattgtccaaggaaccattggatacgtcatctccagggtaccagccacccataccagctgaagaggtgaaacctgcttttgattatgaacacgaaggatcctttccctctgctcgtggtagaggtcgtggtggacctggtggcggccgaaggggcaggggcagagctattagcaatggaccccctccttatgactggggtgaagaatgggaggaggatggagactattactacaatggtagaggcagagggagaggccggctaagaggaaggggaagagcccgtggctactatggaggtgggtcgacgtggtggctatggctatgattacggttatggtggcaggggcggctactatgaagagcagggtggatactttgatggggaacagatgagtatc

SEQ ID NO: 70006 - DNA, 202 bp, Zea mays
  Clone ID: MRT4577_163839C.1
cttaagatctgtagtctggttgatggatgaccccagcttgacagtgttgtacatgcgcatgaagtcaccgaacctgatggtgcggtagcacggtggcttgtccccggcgaggaactccgtctacggcctcgacgtcgcctacaggggagagtggataaaggtcgagcggacgcgtgggcggacgcgtgggcggacgcgtggg

SEQ ID NO: 70007 - DNA, 227 bp, Zea mays
  Clone ID: MRT4577_16383C.1
ccaacgcgtccgcgaaggtcctctgagacggcgcagccgccggcccgtccgcctcccgctccgaatgccgacaccaatgacaagagtatgcaagtggcaatggcggaacagactgaccaacacactgtccgtcataagctcgatgggcagttgcacatgtgcgcgagcatctctgaacgtgtacgaggccgaaatatatgatcatctgtctcgtcatatgccaggag

SEQ ID NO: 70008 - DNA, 248 bp, Zea mays
  Clone ID: MRT4577_163840C.1
cccacgcgtccgcccacgcgtccgatttgaatgcccatgattataatgtctttatgtatgacgggcgcaacttgatatatatctagggatgggatgtactgtggcatgtacttgattacgaaagtgttcacatgagactaatatacatatatgcatgaagagagatggtataaatcttatgctcgggcgcttctgcttaaacataaacatgggtctacaaaacctcagaagaaatggggggtgggact

SEQ ID NO: 70009 - DNA, 479 bp, Zea mays
  unsure (1)..(479): unsure at all n locations
  Clone ID: MRT4577_163841C.1
cccaaaagccgcgggcaccggaaccaggccccgcccgcagaccagacgcacggccaagcccgcggcgcccacggacggcgcgcacaggcgcaccgacacgccgaagagcaaccgcacaaacagcgggaccaacaaggccgacaacctggggtgcgacanacgcgaaagcccgcacgcgccaccactccagagacaacgaccccagcaagggcggggccaccgcacacggattcgacgaggggcaagcagcaacccacaggccaggaacggaggggaaaagggggngacaggcgacagcagaagcagcacggcaggcagacacgaccacacgacgaagcaaaagcgaaagacaacgaagacgagcagaagcaaagaggcgaccagcgcaaccggacggacaacaaggacagggggcaaaggcacaggcaaagaggcgcaggcaacagcaacgganggcggccaaaagaagacagccgagc

SEQ ID NO: 70010 - DNA, 506 bp, Zea mays
  Clone ID: MRT4577_163842C.1
gaacaattgaaatgaaaagaaaaaatattgttccaaaaaaaaaaaaaaaaaaaaaaaaaaaaaaaaaaaaaaaaaaaaaaaaaaaaaaaaaaaaaaaaaaaaaaaaaaaaataaaacaccttacccaaaccgcaatttttaaaaaacaaaatacaaaaaaaataaaaatacttttgtccctctccccagcctgcctttaaaaaacccaaattctccctatattcaaccccattacagttccactgaacccttcttttacaaaggcccaaattgcccaaaacttaaggttttcaaaattaatccccctggagttaaaaccccttttcccaaaaaaacccttgcctatccccccttaaaccatttgcctaaccacccctttttaaacctgagtgttaaaaggaaaaacccctcccccgggcccttttccaaaaattggccgggttttattgccaatggaccccccccttttcccccctccaaaccccccggtctttgggttttccccc

SEQ ID NO: 70011 - DNA, 565 bp, Zea mays
  Clone ID: MRT4577_163843C.1
cgttgctgtcggctcagagcacacagcattcgttcttctccgtcagttcgctccactaccttcttggagctgaagctctgcacccttctcctctccccacaattggatcacgccctatctgtccgtccatccggcctcaagattccacggcgctgcgcaaggttaggctgtccctgctctttttctcaccttctgttgtcaccttccacaaatctgttatggccgtcgtcggtccagtccacccatggtggaaagtgatagcaaacccgcccccagagaatgtggcgccatttctcctcttgccgctacgtacgtacgtaacatccaagattcattagattttgcatgcgctactagtacactactaggtacagtacttcgacatcatctgatggaagcatgagcaagaacttgatgcaaagcgttgctcttctttctcctgctaatcaaattcttcccttctcatactagcgtgccacacgcaatgaatgccatgcaggaccttccatccactgccatgccgtcaaaccagaacgagagcggcggcggcggcggcgctggaccg

SEQ ID NO: 70012 - DNA, 700 bp, Zea mays
  Clone ID: MRT4577_163844C.1
cccctttcctcttgagccaccgctgatggcctccaccccgccggcgcccgccgtggcgccgtcgctggtggacaccctctttcagcgctccctaaatgacctcgtcaagtccctccgagccgacccgtcggccgccggcgaggcccccgccgttacccgcgcgctctccgagatccaccgcgagatccgcgcccccgacgccgccaccaagtccgtcgcggtgcagaagctcacgtacctctcctccctccacttcgcccccgtctcctcccacccgctcgccttccccgccatcgagcttctggcctcgccgcacctcccccacaagcgcctggcctacctcgccgcatctctctcgctccacccggcctcgctctccctgctcccgctcgccacgcaccagctccacaaggacctctccccctccgctggcgcccaccagcacgtctctgcgctcgcgctccagctcctcggctcacccgccgcggctgccgctcccgacctcccggttcacctcgtgcacgacctcgtgccacacctcacccgcggcagcccccgcgctattgccgccgccgcgcgcgtcatagctgcctctccgtccgcggccgtgccggtccttttcaagccgctcgcagcctgtcttgcctctcccgatcctcgggcgtacacggctggtgtggcagtctttttgtgacctatc

SEQ ID NO: 70013 - DNA, 397 bp, Zea mays
  Clone ID: MRT4577_163845C.1
cttcgttcggggcattcaaataaactaaacagaacccaagtgccacaaacaactgcgaagggaatctcccgccgaagcggtgcacacacacacacacgacaaccacgaggctggcaacaggaacgaactctctagacaaccaaagcttactcatcataccaccctcaaacagcgtcacaaggcaaacgaaactgtccagaatccgaaccgcaaacaaccttgaactagaagcgtgctgaactagaagacccggcgtaaaggcggtctgatggaaaaccaacaccgtcttccggcagagggggtggacaataaaccacccaccagtccaacaggaacaacaacccgacacaagggccgcccccgccgttggggccccccccccccccaaaatccaacc

SEQ ID NO: 70014 - DNA, 367 bp, Zea mays
  Clone ID: MRT4577_163846C.1
gagcactgctgctatagcgccatagcgggagctctcttcccatcatatctctcgtctcgtcgcttccactccacttgccctgccaccataccaaccacgtccagcttgaaccctcgacctcgagcgaggccggtaccgtggtggagccacgctgtgtcaaccagtgatctgaaaaccgaggtgcctttcctcggtgttactatggagttcatcggcagcggcaaggacgtcgtcaagaagatccagctggtggcggccggcgggctgagcaccgagctgccgtcgtcgtcgtcgtcgagaggagaaggggacgcgctgccggcgctcctggtcaaggctccgtcccagaccgtcgccggcttcgact

SEQ ID NO: 70015 - DNA, 150 bp, Zea mays
  Clone ID: MRT4577_163847C.1
gcgcttatctccaaacaggactggcatggattgtttaagatggatcagatggaaaaggaactaggtgaggggtgcacattcaatggttgggttgaacggcctatcaccttattcaccaacgtataaatacgagtttaactcacaaaaata

SEQ ID NO: 70016 - DNA, 1466 bp, Zea mays
  Clone ID: MRT4577_163848C.1
aaaaggtgccctattgtctggcccggggcaggaaggaagaaacccggccgccgaaggagatgaccgaacccctctccaatggcgccgtctaccagtcggtgcctgagtcctacgtgctcccggagcaccagaggcctaggagctcgccgccgtcttccgcggcggcgatacctgtagttgacctcggcggcgatgatcccgacaggacggcggaacagatcgtcgccgcggggaaagagttcggtttctttcaggtgatcaaccacggcgtggcggaggacgtgatggcctccatgatgagcgccgcggaggagttcttcaggctcccgacggacgagaagatggcgcactactccaccgacagcacgaagctgccgcggttccacacgagcgtcgggaaggagcaggagaaggtgctgtactggagagattgcctgaagatcggctgctacccgttcgaagagttcaggcaccggtggcccgagaagccggccgggctcggcgccgcgctggaggcgtacacggcagcggtgaggagcgtggcgctgcgcgtgctgcggctggccgcgtcggggctggggctcgaggacgaggcgcacttcgagggcggggagctgaccgcggggcccggtggtgatgaacgtgaaccactacgtggcgtgcccggatccgagcctgacgctgggcatcgcgccgcactgcgaccccaacgtggtcaccgtcctcatgggacaacggcgtccgcggcctgcaggcgcggcggcggcgcggcgaaggcgaaggcgaaggcgaaggcggagggtgggtcgacgtggaccccccgcccggcgcgctcgtcgtcaacttcgggcaccagatggaagcggtcaccaacgggcgcgtgcgcgccggcgagcaccgcgcggtgaccagcgcccgcgccgcgcgcacgtcgctcgccgcgttcgtcatgcccgccatgggctacgtcgtgtcgccggcgcccggggtggtggcggagggagaggcgctcctgttccggtcctacacgtaccaggagttcgtcagcgtgtacaccgcggcaaccggcgacagggacgccgtcctggcgcggtttcggaacaacaatggctgactgacgctcgtcgccggccgccttctctttacctcaagaaggaactccttgctgattgtttttgtcaaaaaagaaaaacagcaagaattgcatattccgtgtcaactgtaatttgtcgttatcttgggtgcggtgcaacgtttttccaacgacgacgtattcctctcggttttactttttagccatgttttcaaacaatttgatcatgcccttaactacatggactatgattgttgattaagagcatgttagatagacaagatttttatagtccttaaggacccgttcggtaacatggaacggaggccggaattgttcttaccagatgttctctaatttgtataattttgtc

SEQ ID NO: 70017 - DNA, 371 bp, Zea mays
  Clone ID: MRT4577_163849C.1
ctggggttttttttttttacttttgttgtcttttgttttggtattttttttgtttgagccaacacaacaaattcaggtgcaaactgacccttttccatatcacatattagggggaaaaaaaattccttttaaaagaattctgagcttactttttccgcaaaggggcagtgcacctttttaaaaaagaaaaggtaggcccaaaggaatttgcttggtggggctctttacaaagggaaggggaagttagatttttccctaccaacaaagggggaacttttttggaaaattagactaaaaaaaagggggaagaggttgtactgccccctttcatctaaatatatgccacagcaaaattttctccctctggacca

SEQ ID NO: 70018 - DNA, 288 bp, Zea mays
  Clone ID: MRT4577_16384C.1
caacaggcaaaacggggttgttggatttcccgagtttttgatttaccagccccctttaaagtgggttgacttaatagggcactaaacagtcccctaagttgagttccagctaagtcaaacacccaaaaaaaatcccccaaacggttcacatatttccccgcctaaacccgagggctaatttttcctggcccccatcatggtttttgtcttcaccttccaatttttcttggtgtgggggggcgaaataatttttttaatctccttaaaattcatctccaaccttattgt

SEQ ID NO: 70019 - DNA, 711 bp, Zea mays
  Clone ID: MRT4577_163850C.1
attcgacgccggactctactgtactccgtctcttccggctcccgctccgtctcgagcttacagccggttccttcctctgccaccatggcgaacatgcgcgccatggaagttggctgcaagtatcaacaccctcctcatgaaccacaggtgggttgacatcgcatacaagaagatccacttgatcaatgagtggaaaaaaccttttgctgaatcatctcgcgccaagggtatcctttctggacaagattgatattgaggccaagcaatctaattctctcatccgtaagtgtggccgtgttcagttggtctagaatggaaagaacattgctgcctttgtgccgaatgatggttgcctatactacatcgaggagaatgatgacgtgttgattgctggatttggacgtaaggttcatgctgtgcgagagattcctgccgccatgctcaaggatgataaggtgtctgatggtcgctgcttgcactcttcgatgaagaatagagagaattcgatgtcttaaatcacttttcggtaagctagaatgatgtaaactgcccaatgctctattgacgaatatacctttccgctagcaactcagctgttaactcataatggagcaagtctgtttccattttgaataattaagattgcatctccatgggcactgttgcttgctttgtcttttttccagccgggttacctgagtttaagattgt

SEQ ID NO: 70020 - DNA, 271 bp, Zea mays
  unsure (1)..(271): unsure at all n locations
  Clone ID: MRT4577_163851C.1
gaaaaatgctgcatgattttattcaatagcctaataggcacatatacagagagtcaggagaagaatgaagactttagaagatgcacataaacaaagaacttcatgtacaagaagctaattgcatccataaaatttatgaagggcatctaaactcttatagcttttttttgttaatttggcattctttctaaancgacgtgaatcttctatgaaagatttctctcaacataggaccaattttggttttacttctaatagcacttcggccagc

SEQ ID NO: 70021 - DNA, 342 bp, Zea mays
  Clone ID: MRT4577_163852C.1
ctcacactttaggagtctagcaaggtttgagagatatatagaaccatgagataagagagttactgatagagttaccagataccacttagaggctgctgaatgagcactgtatacttagaacatggatcagatgaataaggttgattgcccaaatccgaccgatcatgctgcactttgatcctgtcgctctacagcagaacgttcccaatgactgggaccaggcggtcctgaatctgaccatgaatgtcaacaaaatcgtatctgaaatggaccactatataatttcaacattccttgccaaataccaggatcaagaagtacatccctcaacactaaaagcct

SEQ ID NO: 70022 - DNA, 456 bp, Zea mays
  Clone ID: MRT4577_163853C.1
cccacgcgtccgagtcgaccaacttttcgacctatttttctagttttctaggttctgataccggagtgacacattgtgtcaaatgtgaaaatcgctgatacattttactcaagatccaaccatagggacactcggtccggccaccatgtcataaaaccttgccacataccctccaaatttgtcaccagaggaggggaccaccgccacaaagttagcaagagcctttaaatattattcttatctctcatgtttggtatctatgtctataccactatataattgactagtttaaactttgcaaaaccaatccaaccaaatcacccccacacccgtaagtttcgctaaatccaccaaacagttgcacctagacttaacatatcatggtttagatcactatataaacccgtcttttttacccacatccaatggacaatattatttgaatcattcatcata

SEQ ID NO: 70023 - DNA, 136 bp, Zea mays
  Clone ID: MRT4577_163854C.1
ggcacgagcgggggggagggcacgactgcaacttgcgttattgggctcttactgctacatgatcagcgcgatgacacacaggtcaggcccgatcgatatctggacgctggagagggagcggatgctccgggccgcc

SEQ ID NO: 70024 - DNA, 461 bp, Zea mays
  Clone ID: MRT4577_163855C.1
aacggaaaataagaccttgtcattttttagcacaaggaccgagtacaaacagtgaaacacacacacgcacacacaagaaacaagagtaagaaaaaggctatattacacacagcaacaagggatctgctcaacgaccatgttgagcacttgaaaacgttaccgtagctccaccagagcttaccgatgtagtattcgaagaggatacatgatatgttgcgacaggcattttggtcggaagatgaggcactggggcttcaagattcaagacttggattgcttgttttattgaaggcctcgggtttacatcaggatgagcacaccataatcctacaatcatgagacattctgcttgtttctcatcgaaaccaccgatcctgagtttctcgtcgatagctggaataacttctccttttccataaaggtcccacattttctctaaagggttggtacaggctctactc

SEQ ID NO: 70025 - DNA, 267 bp, Zea mays
  Clone ID: MRT4577_163856C.1
gagagaccaggctgcagcacgatcttgcattgacattgaggacaaaaatttgccgcgcctttatgggactcatgcatcatgatatcatcaatgatataccgactcaccttcaaagaatgcaatacgttgcatttgcctcgtttcttgagccagtttgctacctactctggaatgtcataacacttactacagcttggatcaaggtggaaagtgttaatatctggctatcggcaataatttacttcatatctgacgacactggtgcat

SEQ ID NO: 70026 - DNA, 379 bp, Zea mays
  Clone ID: MRT4577_163857C.1
atctaaacctacaaaccatcgcatctctatcagcaacaacagtttctgccaggacgtagcctcctagcctttgtgaaccctgccgcctacttgcaacagcagctacttgcattcaacccacttgctctggcgaacgtagctgcataccagcaacaacaacgtctgcaacattttatgccagcgctcattcaactagccatggtgaaccttgtcgcctacctactacatcaacaattgcttttatctaacccgttcgctttgggcaatgcacttacttacctacaacaacagtttgctgcatcatattcgttccatctcttacttaactagcttttgcaaaccctactgcctactttcaacatatgctttctttcaacca

SEQ ID NO: 70027 - DNA, 131 bp, Zea mays
  unsure (1)..(131): unsure at all n locations
  Clone ID: MRT4577_163858C.1
gaggcgaaggcgctttctactgcgctggtcagntcctgtggctttgtccgtcatgggtcgtggatcaatcttnnnacctgggtcggnnggntgacggngtgggaagnaggngtggaggaggggtaaggaag

SEQ ID NO: 70028 - DNA, 2972 bp, Zea mays
  Clone ID: MRT4577_163859C.1
gaggaaaagggccgtggtcgttgatgatgatgatgatgatgaaacggaggatcaggacagggtcgtgaatggtggtgggtcgctcagcttgataatagggggtagtgctgctggtgctggagcgatggagaacggcgatgtaaatgaggatgagagaaatggaaagaagatcagggtgcaaggaggcggctcaagtgggccggcatgccaggttgagggctgcggagcagatctgactgcagcaaaggattatcaccgtcggcacaaggtctgcgagatgcatgctaaggccaccaccgccgtggtcggaaacactgtccagaggttctgccagcaatgcagtagatttcaccttcttcaagaatttgatgaacggaagcgaagttgccggcgacgcttagcaggccacaataaacggaggaggaaaacccgccctgatactgcaagttgtgggactgcttcaattgaggacaaaatcagcaattatctactgttgagccttattggaatctgtgctaatttgaactctgataatgttcagcattcaaatggccaggagttgctatccactcttttgaagaacctagggtctgttgccaaatcactggagccaaaagaactatgtaaactcctggaggcataccaaagcctgcaaaatggatcaaatgctggaacctctggaacagctaatgccacagaagaggctgcagggccatctaactctaagttgcctttcgtgaatggtagtcattgtggacatgcatcatcatctgttgtgccagtacagtcgaaggctaccatagtggtaactccagagcccgcatcatgcaagcttaaggattttgatctgaatgacacttgtaatgatatggaaggctttgaggatcgacaagaaggttcacctacacctgcctttaagacagctgactctcctaattgtgcatcatggatgcaacaagattctactcaaagtccaccgcagactagtggcaactcagattcaacatcaacacaatcattgtcaagctcaaatggagacgctcagtgccgaactgataagattgtcttcaagctttttgacaaagttcccagtgatttacccccagttttgcggtcacagattcttggttggttgtcaagtagccctactgatatagagagccatattagacctgggtgtattattctaacaatatatctacggttagttgagtctgcatggcaagagctttctgagaatatgagcctgcacctggataagcttttgagtagctccactgacaacttttgggcatctggcttggtatttgtgatggttcggcgtcgcttagcttttatgctcaatggtcaaattatgttggacagacccctggcacccagttctcatcattactgcaagattttatgtgtcaaacctgttgctgcaccttattctgcaacaataaatttcagagtcgaaggatctaatctactcagtacttcctcaaggctaatttgttcatttgaaggacgttgtatattccaggaagacacagactctgtagcagaaaatgatgagtatgaggatagggccatcgaatgcctcagtttttgttgttccgttcctggtccaagaggaagaggatttatagaggttgaagatagtggttttagcaatggcttcttccccttcataattgctgagaaagacatatgctttgaggtttctgagctggagagcatatttgagtcctccagtatcgaacatgcagatgctaacgataatgccagggaacaagctctggagtttctaaatgagctgggttggcttcttcacagagcgaacagaatgtctaaagagaatgtaactgatacatctgtagctacctttagcatgtggagattcaggaatcttggtgtatttgccatggagcgggagtggtgtgctgtgatcaaaatgctattagatttcttatttattggccttgtcgatgtgggatcccgatctccagaagaggtggtgctttcagaaaatttgttgcatgctgctgtacggaggaagtctgttaacatggttagatttctgctgagatacagaccaaacaaaaactccaagggaactgcacagacatacttatttagacctgatgctctgggcccttcaatgattacccccctccatatagcagctgccactagtgatgcagaggatgtgttggatgtgctgaccgatgatcctggactgattggaattagtgcttggagcaatgcacgggacggaacaggttttaccccagaagactatgctcggcagagaggcaatgatgcttacctgaatctggtccaaaagaagattgataagcatcttggcaaaggccgtgttgtcctcggtgttccgagcagtatatgctctgtaataactgatggtgttaagcctggcgatgttagcctcgagatctgcatgccaatgtctgcatcagtgccaggttgcctcctctgcagccgtcaggcacgggtgtatccgaattctacatcgaggaccttcctttacaggccagcaatgttgactgtgatgggagttgctgtggtctgtgtctgcgtgggcatactcctccacacctttcccagggtttatgccgcgcccacattcagatgggagttgctggagcgtggacccatgtaagttttaggatgagccttagctgttgtttgtaacttgtaagttgagagttttagcgttgtggctaagatcaaaggaacatgattaccgtgtgaagaagttcatctgtgtttaacgcaagatgctgttgcggctgtaagctttatatacatcgtcgatttcaactatatttacagcctatcatgctcccattccattcatccattttgttgtagaattcattccttgcggagaatttgtgaaccctcagaataaaaaacaggttcttgtatggaaaatcgtttagacataatatttcttggaatgatgctgg

SEQ ID NO: 70029 - DNA, 467 bp, Zea mays
  Clone ID: MRT4577_16385C.1
cttagtttccacatttaataatctctacgtggttctcttgttattgcattattgcttctaaaatggttctgcttcaaggagttcaacacggggcactttgctggtttataattgaggaaaattagtctgctctgatataaaatttgagaatccagtcttggttttttgtgttttgtctcaggttgaacgatgactgacaattagactgccacaatttctgtcttctgttttcctagaacactcttctattcactgttgatcacagtataaatacataacctgttggccggctaagtcactcaggtagcaaaagtacatgaggctatctaccaattctaccaactaactgggccaaaccaccaaactacccatagagccaaaacctacaatttctgctagggttctacatacagtcagaggtgaaaacaaaggagcaggccctgtttcctgtacttctatgacaaaga

SEQ ID NO: 70030 - DNA, 1049 bp, Zea mays
  unsure (1)..(1049): unsure at all n locations
  Clone ID: MRT4577_163860C.1
gcacgagtgaaactgacacatctctagctccctttaacatgtggagattcagaaatctcggtgtatttgccatggagcgggagtggtgtgccgtgatcaaaatgctgttagatttcttatttattggccttgttgatgtgggatctcggtctgcagaagagatggtgctttcagaaaatctgttgcatgctgctgtacggaggaagtctgttaacatggttagatttctgctgagatacaaaccaaataaaaactcgaagggaactgcacaggcatacttatttagacctgatgctctgggcccttcaaagattacccccctccatatagcagctgccactagtgatgcagaggatgtgttggacgcgcttacccatgatcctggactgattggaattagtgcttggagcaatgcacgggacgaaacaggttttaccccagaagactatgctcggcagagaggcaatggcgcttacctgaatctggtccaaaagaagattgataagcatcttggcgaaggccacgttgtcctcggtgttccgagcagtatatgccctgtaataaccgatggcgttaagcctggcgatgttagcctcgagatatgcagggcaatgtctgcatcagtgccaggttgcctcctctgcagccgtcaggcacggatgcatccaagttctacggcaaggaccttcctttataggccagcaatgttaactgtgatgggagtcgctgtggtttgtgtctgcgtgggcatactcctccacacctttcccagggtttatgccgcgcccacattcagatgggagctgctggagcgtggacccatgtaaattttaggatgaaataaacctagcagttttgtaacttgagagctctagcgcaaaggaacataattaccgtgtgaagaagttcctttgcatttgcagcaagatccggttgctgttgtaagcttatatatcgtcaatatcaactatatttacagcctaacatgcttcgattccattcaacctctttattgcaccatttgtttcttccttgcggttaaanngagg

SEQ ID NO: 70031 - DNA, 328 bp, Zea mays
  Clone ID: MRT4577_163861C.1
tttttttttttttttttctttgaataatgcaccggcaggtcgcgtctcattttttgaagctaaaaaattcatactgctgctgggacgtcacattgctctgccttcctttctgctgatggaggctggtagtggtagtggtacaaaggctacaggctacagagcacgagtaaaataccggtaccgaccgccacactactcctccgttgcaacaaatgctggctgtgattgaccgatggcgaccaaacggagaaaccaatcacattgccggatgcgattgtgcagggagaggaaccaagcggcgcgggtggccgctccacgagcttctgct

SEQ ID NO: 70032 - DNA, 302 bp, Zea mays
  Clone ID: MRT4577_163862C.1
gcggggttaactgtgatgggagtcgctgtggtttgtgtctgcgtgggcatactcctccacacctttcccagggtttatgccgctcccacattcagatgggagctgctggagcgtggacccatgtaaattttaggatgaaataaacctagcagttttgtaacttgagagctctagagtggttactaagatgtaagatcaaaggaacataattaccgtgtgaagaagttcctttgcatttgcagcaagatccggttgctgttgtaagcttatatatcgtcaatatcaactatatttacagcctt

SEQ ID NO: 70033 - DNA, 403 bp, Zea mays
  Clone ID: MRT4577_163863C.1
ccccgagcaagcgtttcatcaatcgctacctcaagagcaaccattttacctttttctccacatgcaactaattaaggggggagatggtggatggcaacttataatccaaccaacgatccaggaaactgctaatgagcctgccaaaatggaaaccattagtcaacaagttttgaagcaaggtccacaacatggtcgacgcaaagtccgatacaaatgtcagtactcatattgacgcgcaactggatataaacctgaacaaacgctaagactcacccgactaatatggtgagatctatgaagggacccccgaatgcgccctaaaagaagcataagttgatgcactgagggatccactgaaggagcagaagaggggctacttcaatgaccatttcaaggaccatgc

SEQ ID NO: 70034 - DNA, 1016 bp, Zea mays
  Clone ID: MRT4577_163864C.1
caaacttgcactgtacacacactcactagtagcagcatcgatcgccggccggccgtttccgagcaacatggggaaacgcttcctccaccagctgctagccgtcgccctggcactcttcgtctcgccggcgagatcggacgactggcttccggccaccgccacgttctacggcggcgctgacggctccgacacgatgggtggcgcgtgcgggtatggcgacctgtacgagcagggttacggcgtgaacaatgcggcgctgagcacggcgctcttcaacgacggcgcttcgtgcgggcagtgctacgtcatcaggtgcgacagcagcaagaccggatggtgcaagcccggcagcagcaacttcgtcgtcgtctccgccaccaacttctgcccgcccaactgggagctccccaacggcgggtggtgcggcccgcctcgcccccacttcgacatgtcccagcccgcctgggagaacatcggcatctacagcgctggcatcatccccgtactctaccagcgcgtcaagtgctggcgtagcggcggcgtgcgcttcaccatcgccggcttcgaccacttctacatggtgctcgtcaccaacgtcgccggcagcggctccatccagagtatggccgtgaagggcgccaacacggactggatccccatgtacaggaactggggcgccaactggcactgcctcgccggtgggctcgttggccagggcctcagcttcgcgctcgtctccaccggtgggcagaacatcgtcttccaggacgttgtgccggcgtggtggcagttcggccaaactttcaccacctaccagaacttcgactactaaacttcatgcatgcctttcttccttccacgacaatatatatatctaaagcccaatagatccttcttcattcattcttcttcagaaagagatattacacccgccgtgttgtcttcatttcatttcagttgtagtgtggaaattattttgttattgttatcatattcaaccgcaaactgatgattgt

SEQ ID NO: 70035 - DNA, 1526 bp, Zea mays
  Clone ID: MRT4577_163865C.1
gatgggttcctcgagatttcggcgtctcctcctcctcccctgtcccgtgagtcgtctcagccgccgccggctctcggagccctacccttctttcgtcggagccctacccttcttctcgtcggagcccatggaccggcaaccccaggactacgcggctgcggccatggcgtacgcacaggggcagcagccaccgccgccgcagtacggcgggtaccacccacaggcgccgccgcctcagtacccgccccacccttacggcgcgccgctcccgcagtaccggcccgcgccctatgcgcgccccatgccgcctgcctactcgcacctgctgccgcaccagcagccgcctcccccgtacgcagcgcacccgccgccgccgcacgccttgtccacgccctccccgccgccgccgcaccacccttacatgcacccgccaccgttcgagtccgccccgcctcctccggccgctccacccgccgatccggagctccagaagcgcatcgacaagctcgtcgagtacatcgcgaagaacgggccggatttcgaggccatgatccgcgacaagcagcacgacaacccggactacgccttcgtcttcggcggggaaggtcacgcctactacaggtacatgctctggctcttgccgcgcccgccggtgcccgcgccctacccgccggcctcgatgcatatgatgccgcctatgggccctatgatgaggggaccgccgattcaccagccggggtacccgccattctatgaccagcaccagcagtttgctgctgctcacggccatggggactatgaagctgcggcgcaaccattcaagggactgtccggaccgctccctgcagatgttgctgctgagctccaagatgtgcttatcaatcttaatggcactaaggaatcaataaagggagcgaagtcatggtttatgcaaagattgccgttcgcgccggctctggctgaagctcttaaggagagagtatttgtgttggaggattcggagcggcagctgcacataattttcctggtgaacgatattctttttgaaagcttacagagacgaactagtattcgggaccttgacaatgaggctattgctttcaaatccgtactgggtcccatgcttgcaagggtttacaataattcacagagtaaagatgacaaccagacccgtgttgagaagatcctgcagttttggggttcaaaggaagtttacgaccaggaaacaattgctaattttgaaagagagatgaaaggtggcttgccttattcgctggtgccacgacatgtttcaccagaccctacgaccttttcaggatcagcgccagtgccctcaaaatggtcctcggaacctccagagaaggataagccgatccatcctgtcgctggtgcaagccaatctgtccccaccgcacagtttccatcaaaccaacttacagccggtgtctatcctcctgtaggccaaaatgcatttgcaggatctttgccagtgcaaccgtcgtcaacagttcccgctgtggctcctc

SEQ ID NO: 70036 - DNA, 753 bp, Zea mays
  Clone ID: MRT4577_163866C.1
aatttcctcccttctcctctaccgccgccgcatccgccaagacatcaactgcgaagccaactctgattgccgcctgcaccatcttcgacttgtagttgcgggtggagggccaatggcaacgcctttgaaaggagtcgaaggaaccagagtggcaagaaatccagaaaatatttaccttcccccgatggcgcgtacagcacaagaaggcgacgagcaaggaggaacaagttcaacgcgttcactgtctggttcgacgagaaagcgtccgaagcattacctttaccttgtctttgatgactggtcgtacggatatagcatccgcaggataaacttgtttcccgactctcgccgccgtaagcagactgctttctcagcacgagcagatgtgcagtgcctgcctccggctctcttccgcttggaggcagcgcatggatcgctggagtactttgcgtcagcctttggcaccaggatcttggcgatgcataccagggatcccggaggcaagagattgttggccgggaccttcgttcccatgttggacgtctcctcgctgagcatgaccttttgccctggccaggaatatccgattaatcccatttatctctccgccggcaataagctattctgcctgagcgaagcctccttcgagatgctccaatgggagcctctctgcccgccgccgctgggtcgacgtcgcaaaaaggagtggtcgtggcaacggctcgaggatccgccattcagaaaatatatggt

SEQ ID NO: 70037 - DNA, 269 bp, Zea mays
  unsure (1)..(269): unsure at all n locations
  Clone ID: MRT4577_163867C.1
aaccaaaggccgcccctaacccaacagcgctactcggaaacacaaaaaaacaccttgtatacaaaaaattttaaattaccaggctcattcaaaaataaagnggttaaagcctaccaaaccatgttttgaaaatagcaacacaagcacctaaaaaggccaccaaaaaaaagaaaataacgccaagtcccctccaaactgggaggccataccaaccatttttatcaaacaaacacaaaggccccttgaccccaactaatgaaaccactgca

SEQ ID NO: 70038 - DNA, 380 bp, Zea mays
  Clone ID: MRT4577_163868C.1
gtataactgatcgttgaggagagcagtgatcaaagtctcaactctgaggcagatgatgtccttgccaggagtcgtcgcactcgcaatgtgatctttggcaactattgtaagtcgcatcagaacattgcgctcaattcagttcatggtgatggaattgcgccgtttcatccatctgggtaccataatatgatggggtcacatcatcgcccgaatcaatgaattaactggagcagctaggactttaatattttgcatcgtgtggaagtcataattcttatggtacttatgtgtataatttattgacaggtttcacctttccaaataccgtaattaaattaggcactccaccaactatgacgacatgggacacgttcactacc

SEQ ID NO: 70039 - DNA, 727 bp, Zea mays
  unsure (1)..(727): unsure at all n locations
  Clone ID: MRT4577_163869C.1
ccggccgggatctcatgcattgtggcctccagagagccccaagaagctgaagatctttctctgtacatacacacattcttgtatagatcccaccagcagttccttcctgtgctgttcgtcgcaagaaccccattgttcaaccggtgtctgtccaaatggatcccattagcatggagcaggtcagggccatgaacaagtacagaaagagcaggagacagccgcatcttcctactctctacatggctgtcacctttgtcctctgcctgctgctcactagccctgcctggttcccccgcatgtgctccgccctcggcttcttcttcctcaccactgtccctgacttggtcaccgccttcctgctcagccccaagtgcctcttcgtcgtcggcaacctcatcgtcgccttcctcgtcggggagtctaggctggcgccgaggaggggcgacgacgacgacgaccggccttcattggtgaacgggatacacgaggagcacatgaagaagaacgcggcgttgaccgcagcaacggcggcggcggcggctcaggccgaccacagcgccttcgttggagctgttgggaagcgagtggaggtgaaggaagaagaggaggaactgcacaagagagtggaggacttcatcgcaagggtcaagaagcaaaggaagctggagctcaagagtttcttcgatgtcgatcgatgaaggctatngatctggcagtggtgcaatta

SEQ ID NO: 70040 - DNA, 423 bp, Zea mays
  Clone ID: MRT4577_16386C.1
gagcttttagtctgcggccgcggcccgtcgcgcccggctggtcgtaggactcgaggtacagcctggtggagttgacgaggtaggagtgcaccgtggggagatcgaacagcgggacgtgcgactccgacaggaggacgaagcgcgcgttgcagtggtcgtccagcagcgcgtgcgccagaagccggcgctccgcctccaccatgctgatctcgccccatttcacctccttgctggggatcctccggcggtagaaggcggaggtctcgggcgggtcggagccgttgaacgccgggtcggagtgcacgtagacgttgtagaggccgcggtggccgcggaagaactcatcccacagcggcgccatgggcaggttccagcgcgtgaggaacaagaacgccacccttgggaccatgcagccggcaggca

SEQ ID NO: 70041 - DNA, 200 bp, Zea mays
  Clone ID: MRT4577_163870C.1
tcagcgagaagagcgcccgatagcacacacagcctctccacgccagatccctcatttttactgctttgatatcacacatttcgcgactgcaaatggctcacggagcgctgctcaattgatgcgagttatctaactaattacgaacctgacgtcttaactttcatgtatgcgcctctttgacgtgcggaattactaccgcc

SEQ ID NO: 70042 - DNA, 678 bp, Zea mays
  unsure (1)..(678): unsure at all n locations
  Clone ID: MRT4577_163871C.1
tttctccgaggccggccggggaaatccccaccgccgcccaaatgttgtcctcggaggacgacgagaaggccgccgccgcggcgcagaagcttgcgggcttcctcctcaacttttacgccgaagatattcaccgcatcctcctcgacgacgatccctccaagctccatttcccgctcgttatttcattcgccgagcttacggacttcgaccccaagttcgccggctacctctatttaaatcccgataagtacctgccctacctcaaagacgccgcacaaatggcccaggacaaggtgttgaagaacttaggggatttgaaaaccacggagacgaagaagtccgttcatgtgcgtatcgatgtctctggatcgccgctagaaccccctgaggtgtccccaagtattggtaaggtgagggtgaaacacatgaagaaattgattgctctaaagggaactgtgattagatcaggtggtgtgaagatgattgagttcgagaggtgttacatgtgcaggaagtgcaaacatagcttcaaggtctatcctgagctggaggctggggatcgtantaatcttcctccatcgtgcccatccaaggattcgagaagctgtacaagtgtttctttccagtttgtagaaggtagcaccatttgccatgattaccaagaaatcaaatttcaga

SEQ ID NO: 70043 - DNA, 185 bp, Zea mays
  Clone ID: MRT4577_163872C.1
gcagcgagaggtaagagataaaggaaaggaaaggacaaaggagcggcggccttgtctatggcgtcgacggcggggtacctgagtcgcggcggtgcggcgcagacaggagccggtgttcagcctgctgctagccgcaggcggcccaaggacacgctcaactgggccgtccaccgccacctcttcta

SEQ ID NO: 70044 - DNA, 105 bp, Zea mays
  Clone ID: MRT4577_163873C.1
gtcgtgcagatgatatttcatctcaatgcacggtaacacatcttgtggaagcagattacgtttgagctaattgtggacgaataaagattaatggactctaaccat

SEQ ID NO: 70045 - DNA, 326 bp, Zea mays
  Clone ID: MRT4577_163874C.1
gtctactattagccgcactcttactactaatgcagtatatagccaactggccccatgaccgatgcatacataagtgtgcacatgccaaaaacactaccctgctgagccatgcaagctgtaaccatacaccgctccaatgcatttacacaatctacgcgcggaataaaggagtgcccccctagcgtaatctaacaatatgcgggctagtgcatgacactactctgtatcactagatctcgctttggtacggaatagttgcatcccttgcccgaaactgtgcctcactgtggatagtcgccctctgctctggctgggagctcacaaat

SEQ ID NO: 70046 - DNA, 334 bp, Zea mays
  Clone ID: MRT4577_163875C.1
accacgcgtacgacaatccgagaacttacccgagataaagcctaacgacgccgctggggggataaataactttgctgaacctgcaactacttgcaccaactgaactttttgttggagagtgcgaaatacatggtgatccaaggctaaccttgagctatcatccgaagaatgaagggcactgcatgcatcactatcaaaaaaacctgtatgtccttgattatcggaatatatgatgagccaatgactccacaacaatgcaatatgctgttggagacgctccacgattaactgatccaacaaggcatttgacgttgtcataatgctatttacgaca

SEQ ID NO: 70047 - DNA, 367 bp, Zea mays
  unsure (1)..(367): unsure at all n locations
  Clone ID: MRT4577_163876C.1
gaagcagagcaagccaataattgatgcattccttcagtcggagaaaggatatgaaatcttatgcatagtagattcagagtacagacctaagacatgatcagaaattcataatgcagcggccttttttttggcccttctgttgaggcattcacccccacttcctcgctcaagcaggctgtcaaatgtaggaacactacccacacagtggttggctgcctaacgcaaacaccactcgagagtcaagaagaccttcatgcatctcccgctgcctcttttattgggggatcggcgcagccagcgnaattattattagggaaccagcgcgtagtttctttgggtgagtcaggaatggaggagcttccaaagc

SEQ ID NO: 70048 - DNA, 380 bp, Zea mays
  Clone ID: MRT4577_163877C.1
ggttattcctttgacttttaaacttatcgcagggagaaattacagttggccctccattgggggccgaaccgaagtcacaccccggccagccacgggaaatttaaaaaaggcgcgaggcgagatctctaattgcccctccccggcccccggcttcaaatagcccgccccggcgacaccctaaaacgcttaactggaaattgggggaattgacccccaccttttggggaaagaaaaaccccttggggccggcgcggggcaggaacctgggggggaagaacacgaagaggttgggggaaaattttataaggggggggggggggatccccgggaggaggaaaaaaaaaaggttgggggaaaaaaaaaaaaagttgggggggaaa

SEQ ID NO: 70049 - DNA, 323 bp, Zea mays
  Clone ID: MRT4577_163878C.1
gttatcttaaaaatttttggggggttttttttcctataatgcgcggatcaacacttgtcgtatacatgtatcatccgagcaaaacaatgcgcaaatgatacccacacaccgttaccctaacaccacgagaacgaggctacccgaacccaaccagagctgaaaaccgagggcggcatcccgaaacacatgagaggcaaaaggttggggagacccatgggcgaaacaccctaggaaaagaggacgcagaactctcaaaaagagacggatgagtcgccattccccaacttgcccgagggggcgctgtttaatacccaccaggcgaa

SEQ ID NO: 70050 - DNA, 865 bp, Zea mays
  unsure (1)..(865): unsure at all n locations
  Clone ID: MRT4577_163879C.1
ttgggtacctcgaggccggccgggatccatcatgggctccaaatctccagaagaacatcagcaaggccacaatgggtcgtccggagacgccgcaattgctgtggttaacccgcctaaatcagccgtcgcgagcggcttgcttcaaggcatgctcgaagggcagggagaagacgatgaagacgacgacgatgagaagaatagagctgacgtgaagacaacggatggcgccaagaaaaagaggaagcgcaacaacaagaaaaacaacaagaaggggccagctacacaacagtcattcccgcctagggtccctctatcagatctattcgatggccgtccttacccggaaggtcagattgtcgactatgccccgaaggatgacaacctccaacgtaccacgaccgaagagcttcggcatgaagctgccatgagtaacatggacggagactttctcaaggactaccgcaaggctgctgagatacaccgtcaagtcaggcactatgcacaaaagctggccaagccaggtgtgtccatgacttaccttgccgaagagattgacgaaagtgtccgtgcactgactggtcaccatggtcttgagcctggcgatagtctcaaagctgggctggcatttccgacgggactttgcctgaaccatataggagcccactggacgccaaattcaggcgccaaagaagtcttccttcagcatgatgatgtcttgaaggttgacttcggagtccatgtcaatggcagaattgtcgatagtgcattcactgtagctgctaaccagtctacaacacctgctagcagctggtaaagcgngcaccacaccgnngctgaggaagcaggcatcgatgcccgaatcgac

SEQ ID NO: 70051 - DNA, 377 bp, Zea mays
  Clone ID: MRT4577_16387C.1
aactcttgacagtggaagcatttttaaacctgagccaaacagcccaaataccttggtttagtagtaccctagtaccgatactttgttcatggataaacgcttaaaaatacacaaggagaaaatagagagacaaaagcaagcagctaaggatttggtattttggtcactctcaagtctcagtgttgaacttcacgagcaacacagtcgatctgaacactccgaaagcttttggtcttgttgcatgaaaagaacagtcagtatttcacttgagagttgagattgtatcctgcgcttgagacttgagagtatcttgtttgcccccagaacaacaccttgcgttgcattgtttccctgccttcttaggagagtcacgggca

SEQ ID NO: 70052 - DNA, 1388 bp, Zea mays
  Clone ID: MRT4577_163880C.1
gcccccgtctgccctccgcccaactcgccccggccgtttcccacagccgctcgccccagcctcctctgcccagagacttttctttgcggccgaaatggatgactcggagaacaacgcaccctcgacgccggggtcccccgggttcagcaccgaccggctgccacccaacaccaccaccagccgcggcgccaccgacccgccgtcttactccgacgacgatggcgaagctgaggtcgatcctcacgtgctacccgatgacgaggaccccgccgctgtaggggctcccgacgaggacgaggagggggaggacctcttcaacgacaactacctcgatgattaccgaaggatggatgagcatgatcaatatgagtcagttggtttagatgattcactcgaggatgagaaggaatcttgatgaaatcatggctgatcgaagggccgcggaagcggagcttgatgcaagggaagtgaggactggtgcaacagctgataggaagctgccacgaatgctccacgatcaggatacagatgatgatacgaatttcaggcgtcctaaaaggcacagggctagttttagacaaccaagtggaccaagaacaccaagaagtgatgatgatggtgatggtgccactcctagttcacctggaagatctcatcgtggaatgtcatctggtggtgatgtgcctatgactgatcagactgatgatgacccatatgaggatgaatttgatgaagaagatgagatgaacatgtaccgtgtccaaggtacattgagagagtgggtcacaagagatgaagtccgtcgctttattgcaaagaaatttaaagaatttcttctgacatatgttcatccgaagaacgatcaaggagagtttgagtatgttcggcttattaatgagatggttttagctaacaagtgtagcctggaaatagactacaagcagtttatttatatacatccaaacattgccatctggttggctgatgcgcctcaatcggtgcttgaagttatggaagaagttgccaaaaatgttgtttttgatcttcacaagaattataggaacatccaccaaaagatctatgttcgaatatcgaaccttcctgtctatgatcaaatacgcaatatcaggcaaatccatctgaacacaatgattcgaattggtggtgttgttacccgacgatctggtgtattccctcagctgcagcaggtgaagtatgactgtaacaaatgtggaactatcctgggccctttcttccaaaactcctacactgaggtgaaagttggatcatgccctgaatgtcaatccaaagggccattcacagacaatgtcgagcagactatatataggaactaccagaaactcactcttcaggaaagcccaggaatt

SEQ ID NO: 70053 - DNA, 364 bp, Zea mays
  Clone ID: MRT4577_163881C.1
ctctaacgcgtcaccttgctccgaaacctattgtggcccctccaccgggaaagatgttctgccggtagctatatactacctccaaggctttacctgctcggcaggaacaaaatggttctcccattcatcttaaccggagctacacctacgaagatctatccaagaaactaccctagctgcagccgcgcatctgctggtaaagaccgtaaggagtggatatcactcaactagctgtaacgacgtataggcaagctcgcgtaccaggacagccaacttgccgcgccattttcacaaatacgacctggcattaagcacctgccgaaacaaggcaaaccacgtcggtctataaacatacaatcactgc

SEQ ID NO: 70054 - DNA, 740 bp, Zea mays
  Clone ID: MRT4577_163882C.1
aaggagaatggtggtacagttacagctggaaatgcttctagtataagtgatggagctgctgcattagttttagtgagtgggcagaaggctcaagagcttggccttcaagtccttgcaaggatcaaaaggttatgctgatgcagctcaagctccggagctttttacaaccactccagcacttgcaataccaaaggctatcgcaaatgctggattagagtcatcccgtgttgatttctatgagattaatgaagccttttcggctgttgcgcttgcaaatcaaaaacttcttggaattccttcagaaaagattaatgttcatggaggagctgtatctttaggacatcctctcgggtgcagtggtgctcgcattttggttacccttattggtgttctcagggcgaagagtggcaagatcggagttgctggtgtctgcaacggtggaggcggagcatcagctcttgttctggagctcgcataagaaatctagaccttgtagttcgcaaaagttccctgaggtgatcttgtagtcttattttccgttgtagtagtcccatagaacatttcttaatttaatttggcaataaagcgagtcgtgcttctgttggttgcatagtagagtatcatgtaataagagcaatggggatgtttcatagacacagcttagatatttttgaggatgctacagaaatattttatatatttgtcatgtgtctcgtacatttatctaggtcacatcacct

SEQ ID NO: 70055 - DNA, 297 bp, Zea mays
  Clone ID: MRT4577_163883C.1
acgactcgtaggggaatatagacagagccctgtccaataccatcttggacagaccagctcagtatcagacttccagcttcgtgacatcattcctcatcgcaacgtgatatctccgtcggtcggtaaaggagctcttaatatcgatgctgtgtacagtactacagtcgacaccgatgtgactggacacattaggaccctgaactcgatcatccccatgttatcgattgcacagttgatttgagtacgatgccacatgtgcatgataacctagatgatcacatgacgacacatccacat

SEQ ID NO: 70056 - DNA, 168 bp, Zea mays
  unsure (1)..(168): unsure at all n locations
  Clone ID: MRT4577_163884C.1
atttgtttcggggcactctgntttttgaagttgtaaccgccagttgtggcggtgctcagggccgtcttcggtgcatacttgggtctttcttctttccttccccctggtagcttggtgggcaactgttgaagcttcttttccctgcttgcttttgatgcttcactgttt

SEQ ID NO: 70057 - DNA, 452 bp, Zea mays
  unsure (1)..(452): unsure at all n locations
  Clone ID: MRT4577_163885C.1
cccacgcgaccgcccagctcgcctacatgccaggacgaggaccagagccacctagatctgcagcatcaccacccacgtggagctgctcgactgccttctctacgccgacggaaccatcacgaacaggcacgaccttcacactggcaacgttcgctccaagnggtgccacgcgaaccgccctagcgtcagagaaccggcacgtcagagctacggagcgagcgcacgatatctactaccacgacaccgatcgagatcgcgacacgaagggggtgaggaagacggcgcacacaccagagtgcagactgtctggacatggcagcgacgagcaaagatccagcgaccgcgtttcgagcaccgtcacagcaaccacagggccattcctactccaagcccaacctagggaggctctgcacactgacccaagagcagaactgaagggcatgctgaggcta

SEQ ID NO: 70058 - DNA, 748 bp, Zea mays
  Clone ID: MRT4577_163886C.1
atccgcaaagtagggtaaaagttgaaaatctcaaattttaaaacaaaatggcataactcagggtttcccttcccagtatcaaatgcttagttaataaatgtcaacaaacctcagagaaattataaacaagagaagtctgaagcatgctcaatcattcaaataagctgctacatcttccccttccctctgaccttggcgtcttgtgatgacggtggactgaagcgcgaagatgatgatgactgtcgtacagcggtgctgtcggctgcgtctaaataagatctcctgctgatgccgggtgatgcaggatgtgaaacctctggaattgtagcttcttgagtgggtaatacaggatgtttccctttccccacctttgaccgaaccttcctcctccttgacccttactgcctaatcgtgaagaagggtgacataagcggcaggtacacctaacttgagcttcatgtagctcttcactgatgtcctcaacaccttcactcctgagcaagcaataaataatgtcaggaaccaaatccggattgtatgcaggtatcatcagctcaataccatcatcgttattgtatttttccttccagggctgaacagacttgtcgaatcgattcgatggaccatgcacgaattcatctctcatcagtctgaaggtgcttcttttggattttccataattttccatactattctgagcatatcttattacatccttgaacacaggaatctcacagagatccatata

SEQ ID NO: 70059 - DNA, 922 bp, Zea mays
  Clone ID: MRT4577_163887C.1
ggactcgcaccacccccacccccacccgccttccttcctccgcgacttgcctgcccgccctcagtcagccggccatggcgctcctcaccgatctcctcaacctcgacctcaccgactccacggagaagatcatcgccgagtacatatggatcggcggatctggcatggatctcaggagcaaggccaggaccctccccggcccggtcaccgatcccagcaagctgcccaagtggaactacgacggctccagcaccggccaggcccccggcgaggacagcgaggtcatcctgtacccacaggccatcttcaaggacccgttcaggaagggcaacaacatccttgtcatgtgcgattgctacaccccagctggagtgccaatccccactaacaagagatacaacgctgctaagatctttagcaaccctgatgttgccaaggaggagccatggtacggtattgagcaggagtacaccctcctacagaaggacatcaactggcctctcggctggcctgttggtggcttccctggtcctcagggtccttactactgtagtatcggtgctgacaagtcgttcgggcgtgacatagttgactcccactacaaggcctgcctctttgccggcgtcaacatcagtggcatcaacggcgaggtcatgcccggacagtgggagttccaagttggcccgactgttggcatttctgctggtgaccaagtgtgggttgctcgctaccttcttgagaggatcaccgagatcgccggagttgtcgtcacatttgaccccaagcccatcccaggcgactgggaacggtgctggtgctcacacaaactacagtaccgagtcgatgaggaaggacggcgggttcaaggtcatcgtggaccgcgtcgagaagctcaagctgaaacaaaaggagcacatctccg

SEQ ID NO: 70060 - DNA, 500 bp, Zea mays
  Clone ID: MRT4577_163888C.1
tttttttttttttttatttttcatttttttttttctttttaattttattttttttcattttcatatcaatgttacttatgattacagtgtaaacatgaatgcaactttcaaccccccggggaaaaaaaaaaaaaacccggggaacaaaattaaaaaaaccgggtttaaaaaaaaaaaagcggaaaaaaattcccaaaaaaaaaaaaaagggggactttaaggccgggaaaaagggccccaatttaaaggaaaaaattcaaaacccctttctttggggaaaaaaggcctccaaacccacaaaaaggtagggcaaccccacaatttacaaaaacggcggggggtttaaaaaaagagttgtagaaaaaaaaagccgagaggcgggaaaaaaaaaaaaaaaattttcctccatgtttcccccaataaaaaaaaaacgcatctttacccaaaggggaaaaaaaaatatggcccccaaaaaaaagggcacaaaacttttgcctggc

SEQ ID NO: 70061 - DNA, 288 bp, Zea mays
  Clone ID: MRT4577_163889C.1
cgcagatgaagtgttaggttaatcagcgtcgcttgaccgtcagggataaggactattacagggattacctttggggcatttattgtctcagtacatgaggggacaacaactagagcaagttatgctagaggacacttgttgactactctgagtaagaggaggagcttggattcagacgactagctgcgttggactctgatgcttatttgtagcaacaactaccattaacgcaggtagctgttgactacctcctacagtatgttgcattgatccaacttcgagcattgc

SEQ ID NO: 70062 - DNA, 356 bp, Zea mays
  Clone ID: MRT4577_16388C.1
ttttcttctattttttttaaaatttctccactctcttgtgtaccagtttttattttttattctaataacaaccacttcttttattccattaattataagcatgcacaaaaaaaattacctactgtccgtgcatgcaccttccacctaatataattattgccatatcataccttattatcaaagaaaaaaccatcaacgtgactacccttccattctctacagtttacatctccgcataggacaaaataaacactctccacttgccacaccatataacaaacttaccctccttgactttttccattatttttcttcactaacttcttcttaaaaaacaacttgttctaattgggcct

SEQ ID NO: 70063 - DNA, 974 bp, Zea mays
  Clone ID: MRT4577_163890C.1
ttcatacactgtgactttaatgagttcaatatcatgattgacgatgatgaaaaaattacagtgattgactttccgcagatggtgtctgtttctcaccgtaatgcccaaatgttttttgaccgagacattgaatgcatctacaagttctttaacaaaaggttcaatctgaggtcagtgaaaaatgaagaacaagctggatctgaaaatgatgatgaagggaacagcagaccttcctttttgtccgtggaaaagggtgctggttccttggacaaggaactagctgccagtggatttaccaggaaagagaaagtggatatggataagtacatcgaggaagttgttgaagggcatgattccagctcagatgatgataatgatgaggacagttccgatgagcctgattgtgatcttaccccaagtgattcagacgcgcctggaactttttctgaagagcatggaacaagttgtagcggcgagaacagattggaaattcctccctcggatggcaatggagtggttatggcaccgctcgaatctgggatcaagacgttttccatggaagatgatgataacgatgatggctcgtcagaggatgctgatgaagaagaagatgctgagctcacgaaacaattgaacaagcaaaggagaaaagcaatcgcagctgcccatgggcggagaagaccaacgtcatccaggaacgcctacaaggacaagggtaagggcaccatgaactccaagatgcagaggcaggcgtgcaactggtgatggttgagtgcctcttgcggcagtaaatagattaggcgcagggttttgtgtggttgtataaccgtgggaccctttactagaatcaactccggctttatatttttactaggtgagtaatcgtgcgtcgcaacgagaacacataatattacgagaacttatatataaaatgtcgcaacgaaaacatataatattatgagaacttatctacc

SEQ ID NO: 70064 - DNA, 302 bp, Zea mays
  Clone ID: MRT4577_163891C.1
cggaagcgtgggcggacgcgtgggcggacgcgtgggggagtggctacgtatcatgcggatcttgagtggaactccgaattttccctgaggcactaagatatgccaattgcttcacattagtggtgtaatggcatgcaatcacaattttacctattgacattgatacagatttgtgtcatttttggaaatataacatatgaatacatgttgaaataagatcaatttcatataacagcactgatgagtaatattctaagttatttagtaataaatagctcatgcttctacttccccgagataat

SEQ ID NO: 70065 - DNA, 175 bp, Zea mays
  Clone ID: MRT4577_163892C.1
gagaaataaacgggaattatatttgaataaatatcttaatacctatttatatgatacaattggttagtttgggtttaagatgacatcgaatgatcatagtaccagattacactggtgttccaaaaaaaaatgatgtcctattaaatatgaaaaccatacattgtcggcatgggtt

SEQ ID NO: 70066 - DNA, 186 bp, Zea mays
  Clone ID: MRT4577_163893C.1
atggagcaggtgctacgcggcagcgggtgcgacaagaggagggggtctggtgttgtcggtgatgatggcggcggtgggtgcgctgcaaagggggcgtggggcggtggtagtgtgcatggaggcgggcacgcgtgcgaggggcacgggggcagtgctttgattctcacggtcggtccttttgactga

SEQ ID NO: 70067 - DNA, 253 bp, Zea mays
  Clone ID: MRT4577_163894C.1
gtacgctcggaattcggctcgaggttgccagaaggccacattggtgtcgaaagcaggggaagagaccacggggtggaacctatcaaggatcactctgccagcaccaaaacccagcttggaaggcctgtgaggcacgcacaggctcttccattcatcatgaacacgcccagtccgtccagatacagccatgtgtatgaccttattgagcataatcgccgtcgtgaccagagcgattgctcttgcaaaaagagct

SEQ ID NO: 70068 - DNA, 652 bp, Zea mays
  Clone ID: MRT4577_163895C.1
gttcgagagcatgctaatcccgtgctggtcgaatcggctcatacaaagaaagctgaaacacttgaccggttctgcaaaccgatcatgacaaaaccaaagccggctccaaagccacagactccgccaccacaacctgaaacccaagcatctgagcctcaaacaccagagcaacaacaaagccggtctggcggaactggtgagccggggaatgagggaggtgtgcagcaggcctccggtgagcaaatggacatggacaatcctaaatctgctgatgctgccgcataagtttggttgccatctctatcttatgatcgatcaaaattttctgttattgtgtctggtaggtggatgagttaaggcgacactagcattctcacaagcgatttcgttttaggcagttggattgaggtatatgcatcttgtccggcgttgttttaaaaaaaagttagccaaaatatagcaagttttacataaacgttacatgatcgaaatgcaccatcggctataatcggatgtcgtggatgattcggtcaattataatttgcacttagatttcttgagttaggctgcgtcacagctcagttcatacatgtttctttgaagactacatgttctcgacagaaaagggaaagcaattggtttttgtgcggat

SEQ ID NO: 70069 - DNA, 674 bp, Zea mays
  Clone ID: MRT4577_163896C.1
ctaaaggttccaacgctcaaggaacatcggctcatgctagtggttctaaaggcagtgtagctaatgatcccaagtttctagagttccttgaagctatgcagccccgttctaaagccaagatgtgggcaaatgatacagctgctactcttgacactgctgcaaaagatagtgtagtagccgctaaagaatctaagggacctctaaaaaatgttctgacctctgagaacgattcatcttctgaagacacttctgatgagaaagtggcaaatgacttgtcctccgagaatgcttcggagcagctaaagacagagaataaacaagacaagaatatgactgatgcagatttcttcaagagtaaagtcaagaaaaattggtcagattctgaatctgatgacgaaggttctgctcaccagtcacataccaccactgatgatgaagactcgtcagatgaatcacaagattcagataaccagttggcacatactaagggcgatcctgacaagagaaacattgtggacaaggacacttctgtggagaatactgacttgcaagagctggaaaatcttgacacaaagagagtggaagatcttgatggcagacctagaggaactgaaattcatgaagaatcaagaaagggccgatgaaaacggggcctcaaatactgatgaaaagaa

SEQ ID NO: 70070 - DNA, 535 bp, Zea mays
  Clone ID: MRT4577_163897C.1
aacccgattcccaatgtgaggacggatattttaccgattctagctctccccacagatgagatcatagtccaccactcgccgaggatagagaaggaacaatttccccaaaccctaggcttcgagatctcagatggcgcaacccccgctgtcttcttcgacatgaccgtcgcgcgatggcccacccaggcggatatggatgtgagctgaacgccaacgaggtgcccaagggcgcggagatcttccgcgcggtgtgcacggatgtgaagggcatgggcaagtacgtaaagacgctccactacatagggctctaccttccaccgcgtcatcccccaattcatgtgacagggctgtgttttcttcggcgcccacggcaccggcggcaagtgcatctacgctgagaagttccccgacgagaagtgcgaaacaaagcacaccgtgcccgaggtgctctccatgtgcaacgccggacccaacaataacgggtctcaattcctcatgtgcatcggggcagaacccctgcctggaagggaagcac

SEQ ID NO: 70071 - DNA, 420 bp, Zea mays
  Clone ID: MRT4577_163898C.1
cgcaacaaacgcacctagccatgacgatcaactccaacagcagcggcagccatgtcatccaggtcacggtcatctccaaagcgcacaggatacatgaagtgtccatggatccgtccttcggcaagggctcccgggatcaccccgccgtctcgttgacgcaccgcaccccttacgcgtcgttcggcgacaagcacagcaacggttgccagctgacccactgggtgaacaagctgtgcacaacggcgcatggcttcatacagcatgtgaccttgcggccgaatctgtcacgtactgtgaacgggaagctgagccttagcgctctgatcctgcaggccggcagtgtggatctcgtgttccgccatgccttctccgccgccgacaaaggcgatcggctgctcaatgcgctgcagtgctacatct

SEQ ID NO: 70072 - DNA, 345 bp, Zea mays
  Clone ID: MRT4577_163899C.1
cccacggaggcgttaaccttattctgggaaaattccttccaaatacacttgggacaaacaactctactactttgtccaacatgaaaaacgagataagatgtttttacaggtgtctgccagctgggatatgtaacaccaaaagagggggggcgccccaaaattaggtttgtaaagggaaagacccacctttgttttcttcaacttctttggggccaggtgcaaacgagtcattagttgatactggggctgccgcaggttccctggggccctgggccaaattctcctcccttcttgcaatctttctctcacgggaagccttgttcttggctcgtttggcctcaaact

SEQ ID NO: 70073 - DNA, 416 bp, Zea mays
  Clone ID: MRT4577_16389C.1
aggcgtcggggtttcttcaaccgctcgccagggcctggccaccgcgctgggcatgcgcaagctaccgcgcgcacccgctggccgccatgaaacgtcgggccaccgcgcagggcgagccgtgcctggccacgctgcgttgccgggggtatgggcgggagctcgagtacgaccgcgttgaggctgccgaggggctgctgtgcatgggtgtcagacaaggcgaggggagtggaggaaccccaagttcccggttgcatgcagatcgcaaattatgcgcaggagagaaaataggaagtgggaagttctttcctctatttttctcaaccgcacaagatgcaccagcgcaaggaaaatttgcatgcgttcatgcgcgaagtggggcttcgcaggggcgggcgcctcgccatgctctggtgatg

SEQ ID NO: 70074 - DNA, 654 bp, Zea mays
  unsure (1)..(654): unsure at all n locations
  Clone ID: MRT4577_1638C.1
ccggccgggatattcaagtgtcgctttattaattcttcactctccctctgtgttctcgtttctcttgtattattgctcgctcacccacgctcatttcaccgtttcagaacgcgtattgtttcaatctaattatctacacccttatttttcgtctctattgtccgttcttgcataataaacccatttaattgaacccttgtacgtgcaccctgccaaatctacccgaaaccgatggtgtcaaaggacgttttaccgaagaaaccattcaaactaatcttgaacaaccttctagaatatccatccccatattttggcaatcgccatgtctgatcacagcagcatcaaccagattggcgaagctggtcttcaccatctaccctttcgcacaaaagaaggtcgacacagtganntgcaccgcagttttctaaatttcctattcttaacagacgacatggcaagaagttaccagaaagccttcactttaatcccggcacgttccggcttcgttcgcctacagagtcttctttgagcagtatttcttcagccaatatcccggactcagcgactacgcattctctttctaccttggctagtcctacgagtactacgtatgctggntctatcaatgaacagtttgctgctacgacgcttgat

SEQ ID NO: 70075 - DNA, 521 bp, Zea mays
  Clone ID: MRT4577_163900C.1
agatcaaggactcacagcacttttacaaagctcagatgagttacatagttacgatggcagccacacgaggcttgtgatctgttcataatgttttatgctatgttcttctttgcatttcccatttcagggaaaatggaaggggaagttttgtacagcttgaaatgttcataaccctcctggtatctccttcaaaataacatggaatcacaactgcttcttagccagctttctgttctgctctagataagggtaagctctctgatactgtaatatagcccaaacaaggtgcctgaaagagaactcgggccacagaggatctggattctgcaggtgactaaacgttgtctgccacaggaggaaattgctcagtcgagtctcgcctgaagttcggatgacgatatcaggatctgggcagccagcgctatacatgtggcgatccaaatccgccactgaaatctctgaatgcacaccgttatttgcagcgtgaccattacactcgccagcatgttcactctgcaaca

SEQ ID NO: 70076 - DNA, 375 bp, Zea mays
  Clone ID: MRT4577_163901C.1
ctgttcaacagatggctctcctaaaaacacttgcaaaatctgttgagtaaggtagttattaaacagtttgttgttgcgtgatggagttggagcctagaagatcctgccattaatttcgtatgcttccgtgccccatgcttgaggttgaggatgtgctatattgttgtcatatctcactatctttacttctccacaaagcaagctgtacgcgatgcaccagtctttttcaggcacgtcagaagtcataattggcttcaagtcaacatctgaacattcattcacagctcgtgttcaaaagaacaatcgatgctttggcctgatagacttttcctcacgagtcaaaagaagaagaaaaagagagagagagagagaggg

SEQ ID NO: 70077 - DNA, 151 bp, Zea mays
  Clone ID: MRT4577_163902C.1
acgccgattcgtcgacaactcggtttgattcctataaaacgatccgattgttttttagtagtgtgtcaattgtcgtgtgtgggtctctataaaactaaacagtggcacccgggaatagttatgctgtttgccattccacctgcaacttgcg

SEQ ID NO: 70078 - DNA, 614 bp, Zea mays
  Clone ID: MRT4577_163903C.1
atatctcctcgcattttccttgggaccgattgcctatccccctcccaaccaaagaccgatggcgcccaaggccgagatgaagcccgtggcgaagaatccggtggaggaggagcccgcggccgagaagaccaccgccggtaagaagcccctgcggacaagctgatccccattatcaagtccgccggcatggacggctacgagggcaaccgtggcaagaagaagggcaagaagagcgtggagacgtacaaaatctacatcgttgaaggtcgctacaagcaggtgcacccggacatctgcatctcctccaatgccatgtccatcataaactcattgatcaacgacatcttcgagaagctgtccggagaagccggcaagctggcgcgctacaacaagaagcccaccatcacctcccgcgagatccagacctacgtgcgcctcgtgctccccggagagctcgccaagcacgccgtctctgagggcaccaaggccgacaccaagttcacctcctgctaggcttgcacgctcgacctttgtaggactttcttgagtagatgttcgccttgtgtcgtagttatgatgtgctagtttgtctgacgacgctgctctgcttctgt

SEQ ID NO: 70079 - DNA, 1047 bp, Zea mays
  Clone ID: MRT4577_163904C.1
atggcggtggcaggcgggtggaagcagcagtcaaatcgtctgcaggctcacgtcccctcctgggacagcgagagagccctctcccacgacgtgaagatgacgcgctcatgttccattcctcgaacggctcgcgcaacggctgccccgcgaaccactcgtcccgtcgcattaactccgcggcagggcaggcgacacctttggcaggcgaagcgggcgacgcttcacctccgccatgatgaccgcgtcaaaaaaggtgtgccacgtcgttcaattttgtatccttttcctcttcccctttctctctcttgctacagggaccgggaaaggggatactccgaaagggatccttctctgcgaagaaagtgggccccgagccctcctactgatcaggggttcgaaggctggcccctcggaagggttcgacagccaccccagagcactcgggctctgcgcccactactgatcagaggttcgaaggctggcccctcggaagggttcgacagccgcctcagagcactcgggctccgcgcccactactggtcagaggttcgaaggctggcccctcggaagggttcgacagccgcctcaggccactcgggctccgcgcccactactgatcaggggttcgaaggctggccccctgaagggttcgacagccgcctcaaaacacgcagagcgagggatgactctagaccgccagcgcggctgtcttcaccgtcgacgaccggtcttcgccgtgattcacgccaccgccgtgtgattcacgtcgccgatgacccgataaggccgccagccgataagctcaccgtcgaccgccgcctctcggccgtgtgccgcgtggctcaactcttccaccgtgtcgccgtgacccgctactgctgtcaaatcggcgccgaacgtgaagaagagatagaagtcaccgaagacaggacaccaccaccttcggattcgcaagcaggcaactgcttctacttcgatatctgtggatctgaacccgaatcacctgtaaacgaaggcaagccccggtgcatttgccaccttccttga

SEQ ID NO: 70080 - DNA, 666 bp, Zea mays
  unsure (1)..(666): unsure at all n locations
  Clone ID: MRT4577_163905C.1
gccggccgggcttggaaaagtgatcgcgtcagatccgatcaggacgacgccatggccgccaaccaggaggagcaggagcaggagcagcgccgccgccttatcgccgccgcgacccgcttccctctcccaagcggctgcaggttctcctatggcacggcgggcttccgcgccgacggcgccaccatggcgcctgccgtctgccgcgccggcatcctcgccgcgctccgctccgtcaagctcgcaggcgccgccgtcgggatcgtcatcaccgcctcccacaaccccatcggcgacaacggcgtcaagatcgccgaccccgacggcggcatgatggcccagcactgggagcccttcgccgacgcgctcgccaacgcccccgaccctgacgccctcctccagatggtgcttcagtttgccaaggacgagggcattccattgggaggggaagacacagcgcaagtgctgcttggcagagataccagacctacaggagcttacctcctcgacgctgcactgcagggaataaatgctatagttggcgcacgcgcagtcgatatgggaattttgaccacccctcaactgcattggatggtccggagcaaagacaaaggtgtcatggcttccgagncatattattttaggcagcttattggatcgttcaggcgt

SEQ ID NO: 70081 - DNA, 475 bp, Zea mays
  Clone ID: MRT4577_163906C.1
aattcggcacgagggagagagagcatagccaaccttaaaggggggaagaaagaaaggggccggggcggggggggccttcctgttgttttggaagttaatggaacttcaaccaacggcattggccgcccgttggccggccgaagccgggccgaagggttccttcgcaacaaccccaaggggaacaatcttgcgggcaaccctgtcttacccggggaaaacaggcaaaaacattccttgtttaattctggttggttcttgaagtttaagggatggcctttgctacgcaaaattaactctggtggttggagtgaaggcctttccggaaagcccaacctttaactggcatgccccggccgacaacaacaaccttgcttttgggaagctttggttaagggaaggaaggtttaagggcttccttggaggcttaacgaaaatccgaataattaacgccgggcaaggaaaccgaccaaagggg

SEQ ID NO: 70082 - DNA, 576 bp, Zea mays
  Clone ID: MRT4577_163907C.1
ggaaaaaaaaaaaaaaaaaaaaaaaaaggaaaaaaaaaaaaaaaaaaaaaaaaaaaaaaaaaaaaaaaaaccttcggcccgatctggatgccacacctttgggcagccaacacgcttaaccatggccgtcgggtggggcctcgcctggcctaaaagttgggcctggtcgtcgttgagcagggagccagcgttaagctggttgggcccggactcgacctggccaccataaccgcttcgccgggagaagccttggcccaccgggtggggccattgcctggtccgtggttgccatgactgcaatccatttccgagtttgggggaatcgacggtaaagcttaagggaccaaaagatcgaacttttcgagttttacaaaggggaaaaccctgagcatttgttgggggaaggttgcccacattgcacccactgttcaggaaaagacaaacccggggaaggagacttccaggagttccaagactacgacgagttttagggggggggggggggaaccccccagccagttgcctatgaaggccttatttttactgcgttgggtttaccccttggatttactgggg

SEQ ID NO: 70083 - DNA, 236 bp, Zea mays
  Clone ID: MRT4577_163908C.1
ccgggagaccaatgggcgctcgccgacgtccgctaggttgccggccgtgaccctgctcttaaatggggcccagatgtgcgtggccggggacaggttgctgtacaaggtcctcggagagtgacggagagtcgacagcgtgtggtgcctgacgttcgggaacgcggacatggagaccctgactgtgtacgtgatctggcaccaccaccaggatgaacctgtgggttgagtaccacctg

SEQ ID NO: 70084 - DNA, 361 bp, Zea mays
  Clone ID: MRT4577_163909C.1
agttggtaaatataaaaatgcaaggcattattgtgtgacggatacccctgctccggcggaaacccatcggttcgaaacgctcggtcgcctttgggtgtcaaggcctatcaacagaaccccactacgcctactggcattttgcgaatcgccatcgctgtccgaaggagccccgccttatcccacgaatcctctaacaactagactcggcggaacaagaacttctaaaacagggtgacaatggcgggaggctaactgaaaaggtccgtctgcagaagagaacttggcgtagtcctgaacgctcgggggggcaaagacgcccttcacaaaaaagctcccgtcggtcaaaaaaaacgtttcagaa

SEQ ID NO: 70085 - DNA, 400 bp, Zea mays
  Clone ID: MRT4577_16390C.1
gggggggcgggggggtgccttgaatgactttctgggctggggttagaaccctaacatgtgcccagcatggcacggggttcaacattgatcaccccttgtccaacatgacagccctattgctaaaaatgcctcacaaggtccctaaaaaaacaaaatgggcgggggcatcggggcttgaacgagaaaaaaaaccaaattttttttacaagcgcaacacagggcttggattgattgcccacagggtcagaaaccacttgtttgtggccccacgcgtgatcaaaccgaatttgggtttgccttggctcacccggggaaaaaaatttttcgccttgttctaccaaaattccatggggcttagggggtgtccctttttttttgccaccccgtatccaataccaat

SEQ ID NO: 70086 - DNA, 337 bp, Zea mays
  Clone ID: MRT4577_163910C.1
aggagaagggcttttttttggatggggaggactagtctaatacacacacgacacacggctaacacgaacatggttccgcgggttactacgtccaccgctcacctaccaacagggtgggcatgaacgatgatgcttcaataacacaggcctgacaagaattttttaccagcagacacacgaacgcaccaggtactgggttacaaatttaaaaggtctttatttatctaccatgtttcgatgcctttcaggttggcttgacccggtgatcgacaccgataggcttatccgtagcaataaatcggtccacatgcacacacacacgcgctcccaccattgt

SEQ ID NO: 70087 - DNA, 839 bp, Zea mays
  unsure (1)..(839): unsure at all n locations
  Clone ID: MRT4577_163911C.1
gccgggnatcaagtcctgtagtatagagacccgacacggctcgaactgtcgcgtcgccgcgtcggtctagagaacgcgaagcgcctcgccgacgccgaccgccgctccccaccaacagttcaacaccaagccggtccacccttgcaactgcgccatgccttccccctccaactcccactcttcgtcctccaactccagcgaccgcgacgatgacggcggcggtggtggaaacggccgctcgtgggccgcggctgagcgcgtcgcctcgtatctccggaaccataagtcggtccacgccgtttgcgagaagctcggcgtcgacaccaaggcattcaccccgatccccgccggcgaccgacgcgcgtgctcgcccccacccgctggatccgtctgcttgtacgcgaacgcgctggaggccgggatgcgcgtcccgctcgaccccttcttctgcgagctgctctcgcacttcggtgtcgccccgagccagctcgcgcccaattgctggcgcatcatggcggccttcctcgcgctctcccgctccgccggcgtgcacccgccatcggtccccgttttcctgcacttcttcgcgctgcgcgtgctgaaggttaagggcctctactgtttcgccccgaaggacaccgctggtgtgctcttcacggggctgccggataaaatcaagggatggaaggagggcttcttcttcctcaagtcgtcggcgccgtggccgtgccccgtgctctggggcgatccgaccaagaaatccacagctgatccaatgctcaccaaagaggagaagaagcgcggtggcgaagctgctgcgtgcgcgcggcgtcatgcca

SEQ ID NO: 70088 - DNA, 288 bp, Zea mays
  Clone ID: MRT4577_163912C.1
aaaaaaaaaaaaactgataaaataacagatttaaattaaaccaataaaaataccacaaatggtaagggctaacatgatgacaccattgatgattcctatcatgatgtcaccaatggtattgccgagcatgatttctcatatgatgatgccacaattgtcactgctacttcttctttcagattattcttcaacagcagttactattcattttcaacccaattgccatgattatttcacccatgtttttacagaaaccctttgtttgtgcttcattcttgatataaatat

SEQ ID NO: 70089 - DNA, 221 bp, Zea mays
  Clone ID: MRT4577_163913C.1
cttattgcaaaatctgaaaaaaaaaaaataaaaataataactaaaaaaaaaaataaaaaaaaaggaaaatggtcgcccgctctttgggacccacgctttctaacgcttgctttctacgatgttgcttttgtatggtgttacctatattcattatactggccagatctttacaacctcttgacgagaaaaactctgtctttatcccaacttaatctccttgc

SEQ ID NO: 70090 - DNA, 1043 bp, Zea mays
  Clone ID: MRT4577_163914C.1
attcctgagggcgattgaaggcctgttagaatgcgtcctccttcgcctgggcgggggccgtcaacggtctccatcaacaaacaaacaaacgacgcgcaattccctagttctctcgtgaccgccttccctcctctcctgcgtcccaactgggcaattccccaaacctaactaacctttgccaccgcgggagccaccatgggtggccagatgccggacgccgacgggaaggcccgctcggcggactcctcgtcctcttacgggtacccgccgtcggcgccgccgcagcaccagtacggcacctttggtcccccatccggagcctccggggagtttccgcagccggcggtcgggttcccccagccggcggcgccgcctgggatgcagcactacccgcagcctcctccggcgtcgtatgccgtctacccacccccgcagcaaccctactcggccgccgcgccgtactacgcccaaggctaccagatcgctcaaggttatattcctgttgttgaaggaaggcctgttagaatccgtcctcttccatgttgtggccttggcatggggtggtttctgtttataattgggttcttctttgctgccattccatggtatcttggagcttttgtgctgatttgtgtccgagtacgtgattacagggagaaaccaggatatgttgcttgcactattgctgcctcgcttgctgcaattgctgtgctgcttggcgccacaaaaggagcggaggtgtggtgagcattatgccttcaattaccagcagtccggttaatgtaaatgtccgttgctcggctactttgttacctgtgttgtacatgtgttgtgcgtacaaaggatagggtgtaacgaaaatgatgtatgctcctatttgtagttggacatatacatttgacaaacggagtagcatgaatgcacaccctcattaatcatttgatgtaaaatttactggaatgccaccatgttatggtagtctggtcgacaatatatccatgagtaccgttgagaccttttaaaaaaaaaaaaaaaaaaaaaaa

SEQ ID NO: 70091 - DNA, 564 bp, Zea mays
  Clone ID: MRT4577_163915C.1
atggcacatgaatgggacgaggtgactaaaatcaccaagcgcgaaacgatcaagggagagctcgatcgatttgtcctcaacaaaggagaggagccacaagcaatgtacaaccagctcaaaataatggtcaaccaagtgcgcaacctcgggagcaccaagtgggatgaccatgaaatggtcaatgttattcttagatctcttgtttttcgtaatcccactaaagtgcaattaatccatggagatcctagatataaacagatgtctcccgaggaagttattattagcaagtttgtgagctttgaacttatgatcaaagactccaaacacattgtcaacttggagcaaggtgccacttccacacccgaggtgcaacccgttgcattcaaggcaacagaagaaaagaaggaagagtctacaccaagtagactcccaatcgacgcctccaagctcgacaatgaggagagggctcttatcatcaagagctttcgacaaatcatcaagcaaaggaaggggaaggactacaaaccccgttccaagagggtgtgctataggtgcagtgcataa

SEQ ID NO: 70092 - DNA, 178 bp, Zea mays
  Clone ID: MRT4577_163916C.1
gcttagttgccatgtacacagtgttcgatcggctcgtgctatcgtggtagtctggaagcgtctcttttatgtttcttcatcgtgttcgatccagttctacccgtccagtccaatccgagctcctccgcttcagccaaagggacgatggacttagagagatgtcctctatggccgggcc

SEQ ID NO: 70093 - DNA, 365 bp, Zea mays
  Clone ID: MRT4577_163917C.1
acggcaaactgtactacgtgcatttctctgattatcatctcgtacttaaggctcatcagctgcgtctctatgctaatctcagctaccatctcatttaactcattctattcaagcacaacctataccaagctcaactacacatttcaataatcccattgagtacatcatctcatatcttaagcgcatatatcggccgctcaaagacttgtaagaaaagcaaccctgcaccaaagaatcgatattcaagcttcagcataagaagctccactgttcaatctaacgcttatacaactgttttttgtttacaactagaccaaaaccatgcttcatttcatcccaattacatccatgttactttttaatcc

SEQ ID NO: 70094 - DNA, 231 bp, Zea mays
  Clone ID: MRT4577_163918C.1
cccacgcgtccgccgccgccaacatggtgggcgaaggcgggtacggcgtcgtgttcaggggcgtgctccgcgacggcaccgcgtcccatcaaaaacctccacaacaacaggggtcaggccgagaaagattttcgaatggaggttcagacgatcgggcgcgtccggcacaagaacctggtgagtttgctcggctactgcagcgagggagcttgcaggatgcttgtttacgag

SEQ ID NO: 70095 - DNA, 305 bp, Zea mays
  unsure (1)..(305): unsure at all n locations
  Clone ID: MRT4577_163919C.1
atcatgcttcctctttacctactatgacatagcaactatatgtgttagaggataaacgacgggcatatactaantctataccaaaacttacctcttaaaccgaggcaaattccaaaattataattccttaaacactccactcatattgcatgagtatacatatcataaaatcctattcttataatccttatcaacacttgtgccacacctttaccgaatgcactcacggcgtatatcagatctttataacctgcgtttgacactattacattctttcctaattccatcaatactaatcttttata

SEQ ID NO: 70096 - DNA, 423 bp, Zea mays
  Clone ID: MRT4577_16391C.1
ctcgaaattcggctcgaggtggaatgtatggttggattgatttaacagaatctttcagagacttcaaagatctgctatccaggttacgcaattggtgaaagatcaaattgggagttttagtgtatgttagattgagttagtgtacgtttttttacttttttgttttttgttttgctccgtcttctgaagactgttatctatttctcttgtaatatattgaagagaggcaagtctttggccacttcctttccaaaaaatgaaaaaaagcaagggactgttatgagaaacatgaggcactgcattggcgtactggtcataaaaatgattgtctacaggtactaaaatttctttgtttaaaacgggttctacctgctctaagactaggtcttcgctggtttctaaaaggaatcgttgttcctaaac

SEQ ID NO: 70097 - DNA, 462 bp, Zea mays
  Clone ID: MRT4577_163920C.1
cggcggggaacttccaaaaatgggctcttctgccgacctctccgtgccgccagcaactcctcctgcggcagcctcacctcctgctgcgcattcgcccgctcacggactcccactgtatacttatgacgccagtcttgggtgccccaatccgtccggacgcgtcccccttcaccacacaaggtagctgtgctgaaacaaactgcctgccttagactgtatcccgccgcgatggccaccagacatctctcgagccccgcggcacctgacacgctgtgtcccgcatcccaggcagccccaggggagtgacccacagcgccgcccacggagcattcggccccgtgcgccgcacgggtcgtatgtccgcgaccaccatgatctggaggaagtgctaccgccgcgccaaactccacctctgccccggagccaccgcctcgacgctagcggcccccctcgtcccggcct

SEQ ID NO: 70098 - DNA, 943 bp, Zea mays
  Clone ID: MRT4577_163921C.1
actcctatgggcgattgggttcccacgcgtccgcccacgcgtccgcagcagcccatcggggacccccaggccgggcgggcttcccctccctgcctcctcgtctcctcggtctcccctccctgtcttccagagacacagagcagggcgctcttcggtcggaggagaagcgcgaccacgaccatgggctttatctcgttcgtcggccgggttctcttcgcctccctcttcctcctctcggcctaccaagagttcattgaatttggaaatgacggtggacctgcagcgaagaccttgaagccaaagttcaatttgttcgtcaagctagtgtccaagaatactggactggggctgccgcatatggatataaaaactgtcattgcagctaccatgtttcttaaaggctttggtggtcttctgttcatagtcagcagctcatttggagcattcctcctgctcatttacttggcgtttataacccctattgtgtatgacttctacaaccatgaaatggagtcaacactgtttgtcgatctttttttcaagttcatacagaacttggcgtttatgggtgccctgcttttcttccttgggatgaagaactcaattccaaaacgtcgctccaagggaaggacaacaaaaaccaagacaaactgatgtcagtggttgtaggaggggaagcaattgggctcattatgtttgcatactatacaggaatagatgtcccacttttgttcttggtgcgccaattgaattgtgaattgggacttacagaacttagcatgtaggatatttaagttatcttccgcaattttattttcttatgttgcgatgtgttcttatgtcacattccattttgctacaagaactgctttgacagtaaaaaaatatattaagtcgcatagtctattttctgtgcaaaaaaaaaaaaaaaaaatttgcggcc

SEQ ID NO: 70099 - DNA, 306 bp, Zea mays
  Clone ID: MRT4577_163922C.1
gtctagctgttggctttggcctgaactggaaccagtctcagatgaccacgggtttaaccttcttatcccagagacacccaattctagagctttatggagccgtacttccccctgaatcctagctctaggacatagatcatgactctcagcccttttacccaggatggagctggggcctgtatagccatattattgttctaagtaagttctagccccaccctcccgccttcttgttgtgatacctattacggatgagttctggaaaagacccagctatgattcataaaaacacttctggatgaaaaa

SEQ ID NO: 70100 - DNA, 629 bp, Zea mays
  Clone ID: MRT4577_163923C.1
aattcggcacgaggctacccccaattgctccttctgatctctcattcaccgcagtgcaggagagaaggaagggggactcgaaagactatggttctggttttcaggaatctatttagacgcctattagccaacaaggagacgcgcttcctcttggtctgcctcgacgccgcacgagaaaccaccatcctctacaagctcaagctgggggagtatcgtctcaccatcctcaccatggactacactgctgaaactgacgactacaaaaccatcacattcgctgtctggcatgtctgcggtcactacaagatcagacctctttggaggcattactcacagaacacccagtatcgtatctttgtggcgaacagcattgaccgggaccgtgttgctggagccagagatgagctccacaggatgctgaacgaggatgagctactttatgctgtgctgcttgtttttgccaacaagcaatatcttcgcaatgccatgaatgctgcttagagtactgacaagctaggattacactccctgcgctagcgacactggtacatccagagcacttgtgccacaactggcgatggtctgaatgaaggcctgaactgactgtccagcaacattgagagcaacgc

SEQ ID NO: 70101 - DNA, 707 bp, Zea mays
  Clone ID: MRT4577_163924C.1
cctcgaggccggccgggattcttttctggtcctgtcttccgctccgctgcggcgctgactctggtgcggtgcgcgatgagcctttcccttgctgctggtaatccctaaacaacaaacactgagtgaacacaaccacccaatctgcatcgaagcaaagcttttctactatccaaatcgactcccttttctgttgcttccgatggacggtgctgcagctgcaggaggaagtagggaaccggcggccaacggttccaaacctgaggagcagcagtttgatcccagccgaatgatcgggatagttaaaaggaaggcctcaattaaagacttggccacggcataccatgctgaatgtatagcatcctgtaaagaactcctgcagcttcagagaaagtgggaggaggagcagcaagttgaagccaaaatgcctgaagaaccaagatcgttggtgttcaagacctcgaagcataggaagaagtagatttaggagactagtttttacttcctttcaaaagaacactttttggctctgtcaactgctgtgattgttagcttgaaagtaaactaaacgccgggaaacattgccttaaggtgggtttatactgtaaaacttcatttgccttttaccgtttgctcttttaattaatattttcatatttttttttacaaaaaaaaaaaaaaaaaaaaaaaaaactcgagggggggcccgg

SEQ ID NO: 70102 - DNA, 990 bp, Zea mays
  Clone ID: MRT4577_163925C.1
cccacgtctcaagctgcccctttctcaccgccgcggccgccacgcgcagcagcaaccgagcaggagcgcagccagcaagctcaggcccgagccctactgcaaccgcccctgctaccgcactgaacaccatggccgacccggcggagcaccgtccagcggaggaggacgaggaagccgcggcggccggcgaggatgaggacaccggcgctcaggtcgcgcccatcgtgaagctggaggaggtcgccgttaccaccggagaggaggacgaggacgtacttgtcgacatgaaggcgaagctctaccggttcgacaaggaggcgaaccagtggaaagaacgtggcacaggcactgtgaagctgcttaagcacaaggagaccgccaaggtccgcctcgtcatgcgtcaggcgaagacgcttaagatctgtgctaaccatcttgtggtggcgacgactaagatgtttgctatccgttttggatctgtcgagaattgcaagaagttcaaggacattgttgaagagatagctgaagagcaaggaaagaccgaggtgaaagaaaacgaggaagtctccattgccgccgcagatttggtacagaagttaacagtgacagaggctagcaaggagggagatgcagaggaagaggaggctcctgcatctgaccataagaaggatgctaaagggtaaagattgaaggcaaacaaggccaaatgattatgattccattcatttcgttgtcaaggttcatcttccccacaaattttcattacaaagtttcattgcattttctcctgagatgatttgtgtgtgtgtgtgtgtgtgtgtgtgtgtgtgttgggtgaaatctgagttgtcagtcatctacatgtctttcttggttgttagacttattctcagtcgcctgtttatctgggatggctaggtacatcatgtttgtacaattatttggggttgattttggaatggctctaaagctcgagatgagatagatggt

SEQ ID NO: 70103 - DNA, 657 bp, Zea mays
  Clone ID: MRT4577_163926C.1
gatagagcaaagagttgtgactcagctagcaagctcgtttctctgttcccgaacgggaaaacagtatgtaaggctgctgccagtgcatcggtgcttagatgaggtgctaagcacattaaatagcttagcaactatactccccaatgcataggtgcttagcttatagtagctaagcttgctgcatttaatgattttgcaactaaagcttttcatgtattggtgggcttcctttctttaaatgttttgtctagttcacgcgcttaacattgtttcttcctggggtcaccacatccatctctctcgtcttaaataacttgccacgtcagattttttgcctacgtggaaggcttagcacctgtacaaggtgaagcattgggaggggcctaagctatattgtggacaggatcgatccatgcggtagcctattagtacctttttgggaaaggaccttataatgtatctaaatcgatcaaatgaacctgcccgaacttagttcgtgtctcccccttttccatcttttgtactactgctccagccaaatctgcaggcttgttcctggattagatatatatgaattcctcccttgttttgaagtgatgcattggtgtatgtgagagtaatacctgcagattacgaattggacaatgccaagcttct

SEQ ID NO: 70104 - DNA, 410 bp, Zea mays
  Clone ID: MRT4577_163927C.1
agctcgaattcggctcgagcatactagctatcaagacatttatttttcggtccattcactgaggactggggccggggacataaattcaactcctttccagagctcataataataacttggttagaatgattaggttctgctttgacaatggcgaaaacatattagtttaccactccatacctaatggaacactaaccaaggctttctctggtctgaatggaatacattttaactgctgcaggcggctgaatatacctttgaattcttcttaaggccttacatacctgcatgatcataccaatactcctataattcacagagctgtgtagaccactaactttcttcttaatgacaatacgacctgaaaggtttcagactctcacttgtccgttctgctaacaaacacagaa

SEQ ID NO: 70105 - DNA, 1254 bp, Zea mays
  Clone ID: MRT4577_163928C.1
ccggcaggtcccggaccggaccggaaggcccgtttcgacacccacgtcttagctgcccctttctcaccgccgcggccgccacgcgcagcagcaaccgagcaggagcgcagccagcaagctcaggcccgagccctactgcaaccgccgctgctaccgcactgaacaccatggccgacccggcggagcaccgtccagcggaggaggacgaggaagccgcggcggccggcgaggatgaggacaccggcgctcaggtcgcgcccatcgtgaagctggaggaggtcgccgttaccaccggagaggaggacgaggacgtacttgtcgacatgaaggcgaagctctaccggttcgacaaggaggcgaaccagtggaaagaacgtggcacaggcactgtgaagctgcttaagcacaaggagaccgccaaggtccgcctcgtcatgcgtcaggcgaagacgcttaagatctgtgctaaccatctagtggtggcgacgactaagatgcaggagcacgcagggagcgacaagtcgtgcgtgtggcacgcgctggacttcgccgacggtgagctcaaggaggagatgtttgctatccgttttggatctgtcgagaattgcaagaagttcaaggacactgttgaagagatagctgaagagcaaggaaagaccgaggtgaaagaaaacgaggaagtctccattgccgccgcagatttggtacagaagttaacagtgacagaggctagcaaggagggagatgcagaggaagaggaggctcctgcatctgaccataagaaggatgctaaagggtaaagattgaaggcaaacaaggccaaatgattatgattccattcatttcgttgtcaaggttcatcttccccacaaattttcattacaaagtttcattgcattttctcctgagatgatttgtgtgtgtgtgtgtgtgtgtgtgtgtgtgtgttgggtgaaatctgagttgtcagtcatctacatgtctttcttggttgttagacttattctcagtcgcctgtttatctgggatggctaggtacatcatgtttgtacaattatttggggttgattttggaatggctctaaagctcgagatgagatagatggtatcatggtagttattagtgatgatttcttttcgcttcttgttcgttcgttctgaaataatatgggatgctttgttatacttgttgatccattattagcttgatgcatcgttgattcgttatcaaaaaaaaaaagccccacgcgtccg

SEQ ID NO: 70106 - DNA, 162 bp, Zea mays
  Clone ID: MRT4577_163929C.1
ctagggttgaattcatagatcgttaggatcgcgtacagttcaggagcagggggcactagatccttaaaactgggtctgacacgactgcagcgaggatggtatgcctgttgcttttggccttttgttgggctctgacctatcccctggccggagcgtgatgtg

SEQ ID NO: 70107 - DNA, 259 bp, Zea mays
  unsure (1)..(259): unsure at all n locations
  Clone ID: MRT4577_16392C.1
acgccatttccgcgnnccaggcanngccgtaccgccgtcagggaacccggaggcgcggnagggggggcaccgggnnaggccanngcaaggtgtnncgnngnngtggcgaaacctgatgaaaacgcccgnncggggtgggcccgtgagcttgcngccttgcacagaatttgagaagaacttcaagccaacggnnnggtttggtttgggtcgttttgccttttgtgaagggttggggatttnnggagaaaaacagtacttt

SEQ ID NO: 70108 - DNA, 1850 bp, Zea mays
  unsure (1)..(1850): unsure at all n locations
  Clone ID: MRT4577_163930C.1
ggaccctcgggttcggccgggatattttaccactctggcgccagatcattgtggttactgtgtcttctcagtgcaccatgaatgattaactttaatttcgcacttctgcttaggtaccatatatctattggttagcctaggcatggctttcatgtttattggaccatagttgtagtttagatagggtttgctatttttacgccctcagtcccaaaataaataaacttctagagttgtcttaactcaaacattttttaagtttgaccaactttgtagaaaaaaggacatcaacatttatgacatcaaacaggtatgtatattatgaaattatgtttcatagtgtttctaacaataccagtttggtgtcataaacagtggtgttcttttcgatgaattcatcaagacctaaaactaaaaatgtttgacttgggacaattttataagttgatttattttggagggaggcagtatttatattttcagcaagtggctataaagtgttcattaatacttttggtgagaaatttttatgngggttaggttgggtttacatctgctattttctgagatataattgttgtcgaatgatgatagcatggcttatatatttttgtgattctatttcagcacgagggtgaacgtggtgagcctccgcccagaatgcaaccctactagtgctagctttcggccgcgaaaaacgtccccacccccacgtctcaactttatgccgccccttcctcaccggcggccgcgacgcgcagcagcaacccggtagcaggagcgcagccagcaagctcagccccccagccctactgccaccgcgccgaacgccatggccgagccggcggagcaccgtccagctgaggaggaggaggccgcggcggccggcgaggatgaggacaccggcgcccaggtcgcgcccatcgtgaagctggaggaggtcgccgttaccaccggagaggaggacgaggacgcgctcctggacatgaaggcgaagctctaccggttcgacaaggaggggaaccagtggaaagagcgcggcacaggcactgtgaagctgctcaagcacaaagacaccgccaaggtccgcctcgtcatgcgtcaggcgaagacgcttaagatctgcgccaaccatctcgtggtggcgacgactaagatgcaggagcacgcggggagcgacaagtcgtgcgtgtggcacgcgctggacttcgccgacggcgagctcaaagaggagatgtttgctatccgttttggatctgtcgagaattgcaagaagttcaaggacactgttgaagagatagctgaacagcaaggaaagagcgaggagaaagaaaatgatgaagtctccactgccgcttctgatttggcacagaagttaacagtggcagagcccagcaaggaggaaaatgcagagaaagaggaggctcctgcatccgatgataagaaggatgataaagagtgaaggttgaaggcaaacaagggtcaaatggatgccattccattcatttcgtttccaaggttcagcttccccgcaaattttcattgtgttttctccgagatgaatgtttgtgttcggtgaaatcagagtcgtcagtcatctacatagcttttcttggttgatagactgttattttaagtcgcatgtttatctgggatggctggggtcagcatgtttgtacaattatttggagttgcttttggaatggacgcggtttgatgagttgcctacagcatgagatgtcttttcgctccacttttctggttcattcgttctcaataatatgggatgctatcttgtgtaaaaaaaaaaaaaaaaaaaaaaaaaaaagggcagccgccaccgcggtgga

SEQ ID NO: 70109 - DNA, 673 bp, Zea mays
  unsure (1)..(673): unsure at all n locations
  Clone ID: MRT4577_163931C.1
ctccaagttgcttcgtcttctatcgttttcgtccccgtttccgtccttacggcatcatccgctctggttgtttgatgaaattcgtcgctttcttcgtcgagtttgctttcctttttttcccaggttgcgtgcttgcggcagatctgccttctgccgcttcggagatttatttttggcttcaactgtcaccatccactctgtgtttcctctccgagctcccatggcttcgccatcaacaatgcttgattctttttttcccaatttttttacgacttcatcccctccctttcgtctacgaccgacgtcttccaccttggagtttgttgcttcggctatatccagcttatccggttcagcaacagtcttcggagtcatccccctcaaaatttcgtttttttccttttttttccttttgtttggtcggctttgtgattttactgtcagccttttctgtcgctcagatccatatcctccccctttccgttcgatctttgttcttgttgcctcctctgatcctgcgtgtgcaataatgtaagatgtggaagaggcttgccactgccaaatcttgtttgtggtgtaggcagctntgtctgtaaaatggaaaactgaaagtccactcatttctttcgacagtgcttgaacattntgcttccctccctccctattctatagg

SEQ ID NO: 70110 - DNA, 627 bp, Zea mays
  Clone ID: MRT4577_163932C.1
agttgtcctgcccctgagggggagcttaggaccccacgcgtacgtggcgggggccgcgcgccggtcccccaacccccgttgggcgtttcggagaccctgcccacgccccccctcgtcttggatggtgaacgggccaactcgatctcacgcctcctccggcacgcccggacgcgagctccacctagtcgcttctagccctcgacctaacgactcttcgcgacaggcttaacaactctgtagatagtgttggtcagacgcaggaacttgtttgttcctaggagggtgcataggtgctgctatttaccttattgttcgaagtagagaccacctccgtctgagtccgggctctgagggtgaaggaagtggaagagacctcgtaggaagccgataacattaaggaggccgtcttcctgctctcgaagattttcgggagttgtaaccaaacgtttaaggtcttcgtattcttcgaggtagcaactgtcatagaggtcacctttttcgcaatgtagttgacattctactccacaaccgagtatcattacgagtgaaaggaggatactaagggtgccgacgagaagaacatgattcttgctagtgaggtctaactcgcttcttgtggtgagccgg

SEQ ID NO: 70111 - DNA, 207 bp, Zea mays
  Clone ID: MRT4577_163933C.1
gattattgatgttcctctatgttttttttcatatatgccgcgcgcgcggaccatgaatcacttaggacctatttgacattcacatctacaaccaacacgtgcacctgatctaccggacatctaatatcgacgatgagagattgaaccacaccattgaccgacagagagagacctggcaatgcgactcttacactccaccagacggcc

SEQ ID NO: 70112 - DNA, 422 bp, Zea mays
  Clone ID: MRT4577_163934C.1
aattaattaataggttatttcttgcatgagcaggaccaccttcatacggtgcttgcctgcgttcaactccagctaaagaaaattacagtcaatgcggttcccgtcccctcacttgtggggccagcgaaccaccaaccagtcctcgaccaccggtcccggcgcagcctttatgccgataaggccgggttgaaataggcccggctgtcccaagcgccggaaagctacctatacgcgaactccgccaaggggatgccgagccaggttatccacgacccctggtcagaggacgcgtacccgccgggtatgccgcaccacgcgccgctctgagagttgtacttgcctcctcctgcgcagcagcaagccctgatgttgatgctaaacccgtggctggggaggctcttcaccatgtacgacacggggct

SEQ ID NO: 70113 - DNA, 964 bp, Zea mays
  unsure (1)..(964): unsure at all n locations
  Clone ID: MRT4577_163935C.1
gccggccgggcctgcgaccgcaccaccaccaccaactcctcttcccaaacccgtccggtcccttcccttcatccggctcctccgccattttttccctgtcgcggtaagcgatagggttcggcttcggcgtccgacctctaaatccgccctcggatccagtggtgctgttgcttctccgcctcttcttcgtttcgatttttccggcgttctgggagcaagcttcggcttcatcgacggcgttcttggtcttttgcggctcgacatgtctccgttccagggatacagaggcgatgcggttctctccggcgtccggtcgcggaagcgcgtgttcgcgacggtggccgcggagcccgtgacggcggcgcccaagaggcagaagcgcggggatgagatgcccctggacgcgctgccggacgagtgcctcttcgaggtcctgcgccgcgtgcagggcacccgcgcgcgctgcgcgtcggcctgcgtctcccaccgctggctcgcgctcctcgccggcatccgcgcctctgaggccgtgctggccccggccgcccccgccgtgccggacctcaaccaggagtacctcagcgaggacgacgaggccgatctgatggacctggacggcgatgcccgcgagaggaccctcgagggcatggaggccacggacgcgcgcctcacggcggcggccgtcgccggccgtctggctgccgtctccgtccgcgggagccaccccgcgcgtggcgtcaccgacgccggcatctgcgccctcgcccgcggctgcccagagctccgctcccttaccctgtgggatgtcccgcaggtgacggancgccggctcgccgaggtcgcggncgagtgccactcgctggagcggcttgacatctctggctgccctatgatcacggacaaggggcctcgcgtggttgctcagggttgcccggactgaagtcgtcaccatcgaggatgctcc

SEQ ID NO: 70114 - DNA, 879 bp, Zea mays
  unsure (1)..(879): unsure at all n locations
  Clone ID: MRT4577_163936C.1
actcttgactgcagcattctancacccagctccttttcgaagccaacaaaataccaccacgagtaccagcagcaggcaaaaaaaatgtacttatcaaaatcactccctagcagagagaagaccataaaaactggaaatggtttccttcttcgtttcctgtaaacagactgtccggtcgagtactactaaccataacacgggctgcatctcttctagactttctattaagcctccgtacattccaaataagaatttttgaaggatccattgaaacaaaaagaacagccacagacaacccaataaacaaaaacaggaaggctagaatcattcgagataagctggtactagtccactagtccagcgatcacctgaatgtcagccacccccagagcagcatcagggaccatccaaccaaagagagcagccagcgcctgatgcgagaatcagaaagggtcttgctaaacaagcacccatactcatctaaagccgcattactaagagcctcccgttctggagcaatattcagacttctaatgagctcagcttgtatttgcttgactgctgtattagcctttgaaccagccttgtttagtgactgctccgtcgaggaatgaagtctggtggtgggggctgcttagtcttctgtttctgaatggctggtggtgggaggatgcagtcaatctctctggtaacctctgccacaaaagcatggactagagaagttgtggccaccagagctaactcatcagcagattggtgtggctcagaagtcggagcatggatgggataagtcgtgggcaccagagctaacacttcagaccgctgctgccccacctgatgctcacagaacccttctggcgcttggcatgacgtctcttc

SEQ ID NO: 70115 - DNA, 1201 bp, Zea mays
  Clone ID: MRT4577_163937C.1
ggccggccgggaaaaaaaaaaaaaaaaaaaaaaaaaaaaaaaaaaaaaaaaaaaaaaaaaaaaaaaaaaaaaaaaaaaaaaaaaaaaaaaaaaaaaaaaaaaacttttccccttcgggcaagcaaagctaaacaatacccgtcttgccttcaaatcgaactcctcccccgatcgatcccaatcgaacccaccaagccgataccctaaccctcgcccttctcgatgtcggccgccaccaccggcccagccccttcagtagccactccgatggcgccccctccgtcctacccggcctcctccacggcctcttcctccatctccgcgtccgccgaggaggaggaggacctctatggccgcctcaaatcgctccaacgccacatggagttcgtcgaaatccaggaggagtacgttaaagacgagcagaagaacctgaagcgcgaactccttcgtgcgcaggaggaggtcaagcggatccagtccgtaccgctcgtcatcggccagtttatggagatggtcgacggcaacaacggcatcgtgggttctactacgggcagcaactactatgtgcggatcctcagcaccatcaacgcattcttatggagctactcaatcagatggatgggtttgatcaaacagtgaatgtgaaggttataatggcaactaatcgggcagacactctagatcctgctctgttgcgtcctggtagacttgacaggaaaattgagttccctttgccagaccggcgtcagaagaggcttgtttttcaagtttgcactgccaaaatgaacctgagcgatgaggttgatttggaagattatgtttccagaccggataagatcagtgctgctgatattgctgctatctgccaagaggctggcatgcatgctgtccgcaaaaaccgatatgtcatcctccccaaggactttgaaaagggctaccgaaccaacgtgaagaagcccgagacagactttgatttctacaaatgagtcaacccagagtgttgaactcgtttctttctgcaaatgagtcaacccagagtgttgaactcgtttcttgtttatcaattgattatcttttaccatcagctgagtttatggatagttgccattacaaatattcaagttcctcaatgatgatgtgtgttctgtaaaaaaaaaaaaaaaaaaaaaaaaaaaaaaaaagggctagttctagatcgcga

SEQ ID NO: 70116 - DNA, 717 bp, Zea mays
  Clone ID: MRT4577_163938C.1
ctcgaggccggccgggatgttttcaaacacaagccgttgtttgataattttacatatccaactgtgctcactcacctccttcgcatttgaccacctccatttctgccactgaaagccaaaatcagagcgacaaatactatagtcaagaccaccgctcgtgtacttctatacgccactttagactcctctgttttataggcttctgcacaaaatgtctgaccactgcaactatttcctacacatcaaaagccgtccacgcagcaacagataatgctgctctcgacaacgtagtcaataacaacgcatacctgaacggccctcacgatgctccatagataatcgccacagacaataaactccctccagacatcgaccgagtctctgcacaagggaactgctgcaccaaacaatgaccgctcgcgacaactgcgcaaacatgaagacctatagcattgctgctccatctcgcatatgctggagagctctgagtagatgaatagacgatttccccacaatgtctctctggtactcggttacaaatggttataccacaaacaccattctgctgtactattagaatgccacagacacttcagatcacaaaatgctgttgactatgccgcctgtgctcaatggcatcctgcgcggcatacaagatcgaacatgctaagttgccgaccaagaaaaattgagcgactcctaatgactgcttgatat

SEQ ID NO: 70117 - DNA, 262 bp, Zea mays
  Clone ID: MRT4577_163939C.1
attcggctcgagggcagattgctatcgagcggttttcaacatcgcgggcaggctggtcagcgcctccaggcgtgtctatgtctagagggaagtgtatgacgctcggctgctggctgtcttgtgcaccacccacctcgccctttgtggcctaactgagaactatgggggcttcaggaatccatcataagcttgtgctccggtgtgcactgcacagaccatctctcacaacattgcccatgtgctgacatgtgtaaagcacaag

SEQ ID NO: 70118 - DNA, 1086 bp, Zea mays
  unsure (1)..(1086): unsure at all n locations
  Clone ID: MRT4577_16393C.1
cgttacgatagatagatggatctgtttgtgagatattattacaataaagaaacttcatatatatcaagttggcctggcccctagctgaaatggggccgactccatctgactggtacacgtcgatattatccaaaggaggcatctttgcaacttctaaaaaaacaaacaaacaaaaaacttcgaacctagaactagaacgagcatctatgcatggacgatgccgtgtcgacgagccggcccgtgggttgcgttacattgacgtcaagcgtcagtgcgtgtcatgcatgtcggcgtgcccccatcgacatcgacctctccgcccagccgtggccctacgtgagcacatgggtcaccataaccttccctcgtcgtcgtccagctcgatccatgcatcgatgctcccaaggagacccagacaagacagaacagatgatgaccgcgagaacgtccaagcatcatcagccagacagccacccggatcggacgtatatctatcttggggcgccgccgccggcaacacgaacatcgacgtacggcgacacgaacaacggaaagagggcaatatatctacgccaccacgccgcctccagccagcctcccttctcgtttgctttccttctgctagctcgccgatccgattctacactcttccatcgagctagtgccatccatgatccatggcacacggcgccacggttccgctgggcaaatcgatgcggcgcgcgctgcggaccgccatcggcatacccaagaagaataagccgccgacgccgccgctgttgccaaacggcagcggcagggacccgggcgtgtccatggagctgagcagctcgtcgtcggtggcggcgaggaaggaggcggtggtgcgggtggtgatgcgcggcggngtggtggaagtgtacccgggcgtggtgctggcgtgcaccgtcatccggaaccacccgccggggctgtgcctggcgcacccggacgtgttccgcaacccgcacggcgccgtcgtccgcccgctcgagccgctcttccccggccagaagttcctgctgctccccgagaccaccgtggtccggctcaagcagaggatcccgg

SEQ ID NO: 70119 - DNA, 1864 bp, Zea mays
  Clone ID: MRT4577_163940C.1
acctgacctcgaggccggccgggccgggattggcacgtatgaatgctcagccacatgcgtatgtatacatcacggccacggtcgcgcgcccggcttctgcaagcaaacctaaccaagcctctgcggctctccttcgaatccaactcctccccgatccccaaaatcgaacccaagtcgaaaccctaacctcggccttctcgatgtcggccgccacaaccgccccaacccctgcggtggccaccccgatggcgccgcctccgtcgtacccggcctcctccacgatctccgcctccgtggccgcgtcggtcgaggaagaggacgacctctatggccgcctcaagtcgctccagcgccacatggagttcgtcgagatccaggaggagtacgttaaagacgaacagaagaacctcaagcgcgaactcctccgtgcgcaggaggaggtcaagcggatccagtccgtaccgctcgtcatcggccagtttatggagatggtcgacggcaacaacggcatcgtgggttctactacgggcagcaactactatgtgcggatcctcagcaccatcaaccgcgagctgctcaagccgtcagcatctgtcgcgttgcatcgtcactccaacgctttagtcgacgtgctgccgcccgaggccgactccagcatctccttgctgggatcgtcggagaagcccaacgtcacctacaacgatattggaggatgcgacatccaaaagcaagaaatacgggaggcggttgagttacccttgactcatcatgagttgtacaagcagattggtattgatcctccaagaggggtgcttctgtatggtcctccgggtactggcaagaccatgcttgccaaagcagtcgcacatcataccactgctgcttttatcagggtcgtcggttcagagtttgttcaaaagtacttgggtgagggccctagaatggtgcgtgacgtgttccgtttggccaaggagaatgccccagcaatcattttcattgatgaggttgatgctatagccactgctcgttttgatgctcagactggtgctgaccgagaagttcagcgtattcttatggagctactcaatcagatggatgggtttgatcaaacagtcaatgtgaaggttataatggcaactaatcgggcagacactctagatcctgctttgttgcgtcctggtagacttgacaggaaaattgagttccctctgccagaccggcgtcagaagaggcttgtttttcaagtttgcactgccaaaatgaacctgagcgatgaggttgatttggaagattatgtttccagaccggataagatcagtgctgctgatattgctgctatctgccaagaggctggcatgcatgctgtccgcaaaaaccgatatgtcatcctccccaaggactttgaaaagggctaccgaaccaacgtgaagaagcccgagacagactttgatttctacaaatgagtcaacccagagtgttgaactcgtttctttctgcaaatgagtcaacccagagtgttgaactcgtttcttgtttatcaattgattatcttttaccatcagctgagtttatggatagttgccattacaaatattcaagttcctcaatgatgatgtgtgttctgtaatgattttttggattgtttgcctgtcgttcatggtgatctgcttcatcagatttaaggggtgtttggtttatagagactaatttttagttcatctattttattatattttagtttctaaattactaaatatggaaactaaaactctattttagtttatgtattgtatttacgccctatttgatttctttagtcacctgactaagatttctgtttggaaaaaaaaaaaaaaaaaagcgg

SEQ ID NO: 70120 - DNA, 322 bp, Zea mays
  Clone ID: MRT4577_163941C.1
ctgttgctgtcttgctgaatccaccctgtacgctgcccattgcatagcatgttaggagttgattggggttctggtatcctgatcctgcactctctgcacgtgcaatgcttagcattgcttccgcagtcgtcacacagaatggcaacagttcctgtaaagtctgaacctgcacatcttcttttttgtatgtatattgcccggggaggtgggaggtctgtaccctggctggtcgaatttcagtatgtgctttgctgatatgtactgtatgctagaagatgctttttatcttagataaaacgggaataaaaggcggattgggccc

SEQ ID NO: 70121 - DNA, 710 bp, Zea mays
  Clone ID: MRT4577_163942C.1
ccttcacattgactgttataatggcaactaatcgggcagacactctagatcctgctttgttgcgtcctggtagacttgacaggaaaattgagttccctctgccagaccggcgtcagaagaggcttgtttttcaagtttgcactgccaaaatgaacctcatcgctcaggttcattttggcagtgcaaacttgaacctgagcgatgaggttgatttggaagattatgtttccagaccggataagatcagtgctgctgatattgctgctatctgccaagaggctggcatgcatgctgtccgcaaaaaccgatatgtcatcctccccaaggactttgaaaagggctaccgaaccaacgtgaagaagcccgagacagactttgatttctacaaatgagtcaacccagagtgttgaactcgtttctttctgcaaatgagtcaacccagagtgttgaactcgtttcttgtttatcaattgattatcttttaccatcagctgagtttatggatagttgccattacaaatattcaagttcctcaatgatgatgtgtgttctgtaatgattttttggattgtttgcctgtcgttcatggtgatctgcttcatcagatttaaggggtgtttggtttatagagactaatttttagttcatctattttattatattttagtttctaaaaaaaaaaaaagaaaaaaaaaaaaaaaaaagcggcc

SEQ ID NO: 70122 - DNA, 1765 bp, Zea mays
  Clone ID: MRT4577_163943C.1
atgggaaatgtatttactcttatgcttttccccttcgtgcaagcaaagctaaacaatacccgtcttgccttcaaatcgaactcctcccccgatcgatggccggcgaacccaccaagccgataccctaaccctcgcccttctcgatgtcggccgccaccaccggcccagccccttcagtagccactccgatggcgccccctccgtcctacccggcctcctccacggcctcttcctccatctccgcgtccgccgaggaggaggaggacctctatggccgcctcaaatcgctccaacgccacatggagttcgtcgaaatccaggaggagtacgttaaagacgagcagaagaacctgaagcgcgaactccttcgtgcgcaggaggaggttaagcggatccagtctgtaccgctcgtcattggccagtttatggagatggtcgacggcaacaacggcatcgtgggctctaccactggcagcaactactacgtgcggatcctcagcaccatcaaccgcgagttgctcaagccgtcagcgtccgtcgcgttgcatcgtcactccaacgctctagtcgacgtgctgccgccggaggccgactccagcatctccttgctgggatcgtcggagaagcccaacgtcacttacaacgatatttggaggatgtgacatccaaaaaaaaaaaaaacaggtttgcgttgaattacccttgactcatcatgagttgtacaagcagattggtattgatcctccaagaggggtgcttctgtatggtcctccgggtactggcaagaccatgcttgccaaagcagtcgcacatcataccaccgctgcttttatcagagtcgttggttcggagtttgtacagaagtacttgggcgagggccctagaatggtgcgtgatgtgttccgtttggctaaggagaatgctccagcaatcattttcattgatgaggttgatgctatagccactgctcgctttgatgctcagactggtgctgaccgagaagttcaacgcattcttatggagctactcaatcagatggatgggtttgatcaaacagtgaatgtgaaggttataatggcaactaatcgggcagacactctagatcctgctctgttgcgtcctggtagacttgacaggaaaattgagttccctttgccagaccggcgtcagaagaggcttgttttccaagtctgcactgccaaaatgaacctgagtgacgaggttgatttggaagactatgtttccagaccggataagatcagtgctgctgatattgctgctatctgtcaagaagctggcatgcatgctgtccgcaaaaaccgatatgtcatcctccccaaggactttgagaagggctaccgaaccaacgtgaaaaagcctgagacggacttcgatttctacaaatgaggcaacctgagtgttgagctcgtttcttgtttatcaattgaatatgttttagcataaagatgagtttcaggatagttgccaatatcaaatgtcgaagttgatggctgtaatgcttgagtcaatctttttacttgaaggtacagcggtgttatggaagttatgattatgtagggtggattaaccttttaccgacacggtggggcttggatttggcattaagccaatcttaccaatcaatcaccagatgtgatgtctcattggtgatactaatacctgcagatctggtctgtctcaaccaaattatgccgaagacaatagaaaaactacgtttgcgacaaaaaaaaaaaaaaaaaagcgg

SEQ ID NO: 70123 - DNA, 597 bp, Zea mays
  Clone ID: MRT4577_163944C.1
ggctgacagccccattaattaactagccacacggttcatttttcggtatcaaggggcaaggttctgttatgtgcgagatctgaatcagctactgatttcctccactgcgcgaattaacttttactgatacatcattgtgaatttagttaggttgaatggactagccaatgattggcaacaacaacatattaatcttgaactacgctggatgtactttttattgcatttgaacatatctactgatgcagaacctagattttgttactgcatcatgattgtagatattctacagtaataccttatctctttttgttttgaaactctccgtgcttttggtttcattcgctagtcttgtgcttactgtgtatcataaggaaaaatgttaccggtctggtagtactgatgatacatataactcttctcaaccttgatacagcagatttggttagcatcaccattttaaaggcgacacctggtcgtctaggcggcggtccaacgcctagacgtctaagcggtagtccaacgccttgtctcgccgtaccgcttttaaaaaccctggttagcataacctctctaatatatgaccccatctgagaa

SEQ ID NO: 70124 - DNA, 159 bp, Zea mays
  Clone ID: MRT4577_163945C.1
tttggttttttttacaaaccttggggattttaaccttacaaaactttttatggttatctttcatgcacatatgcacctctttaccagatcacggcaactttaaagaataaagatgaaatgcagaaaccgatacacaaagaacgggcttaaaatagaacc

SEQ ID NO: 70125 - DNA, 310 bp, Zea mays
  Clone ID: MRT4577_163946C.1
gtcctttctctctcccgagtccactccaagtggtgtctcctagtgcttcggcggctcacaaaggcgccgccgcgccgcgctctactcgtcctcgccgctctcctcctctccctctcccttggggccgccttcttccattccgacgagctcctcctcaacgatgactaagagttcgagggcgtcttctcccgcccctccgtcccctccccgccggctgtccctgttgtcttcttctccctccgcatatcagctgacgcgccgttggccgggtcaggcgagtccaacgcatttcatttcacgctctagcaca

SEQ ID NO: 70126 - DNA, 343 bp, Zea mays
  unsure (1)..(343): unsure at all n locations
  Clone ID: MRT4577_163947C.1
cgggcggccgtcgaccttttttttttttttatttagtataaataggtattatgatcttcaaacaccaaaacaaccagaggggatatgcaatgattgggccggggaacaaccaaaatagcacaaaacatagtacagtgcantaatgaagcatgtaacaattcattaactatcgtgaccattgatacattacttgtatcaataaggttacaaacaaaaatatcacaggttgatgattatgacaaatgggtcttcgctgaaacgtaataccttacgccttgagctagccaaagaacctctgcttctcatcaggagtctggaagcgaccgagcccaaatttggacga

SEQ ID NO: 70127 - DNA, 208 bp, Zea mays
  unsure (1)..(208): unsure at all n locations
  Clone ID: MRT4577_163948C.1
gcctaacccattggtcaactgggtttctactgtnnnnnnnttatactaccatacagccaggggtctatgatgaaccctgccttgtcatggcaacaacccatcgttggaggtgccatcttttatattacatatgagatgttttcgactatggtgccctcataccggcatgtgtttcctagaaataatcaatatattgaatcgacattta

SEQ ID NO: 70128 - DNA, 250 bp, Zea mays
  Clone ID: MRT4577_163949C.1
aaaacataagatgttcatagggcttaatagatcgttttggaaatgcggcaacacttatttgctcaagtaaatattggttgttatacagacaacccgcaaaggatattacgcaccataccacatgcatggaaatgaatggaagggggggcaaaaaaaagggcactgggcgaataacacgaatgaagacaaaaggccaccaaggcaggggagggacagcggagatgcaagctggaacccggaggcccggcga

SEQ ID NO: 70129 - DNA, 686 bp, Zea mays
  Clone ID: MRT4577_16394C.1
ctcgaggccggccggggatcttctctaccgcggtcatcagccacactcgctccttcgtgtattcctcctcattcacgtccccagtcacgacgccgtacgcgtagactcgacagctcacgccgtattgccctcttgatgctcgacatcgccaagtccagcgctcgcctctctagctcgactcatcggacctgccctttctcagcttgctgtctcccagccgtgtgccatgcctctgctcgacatcgaccagcgtcgctagccatcgcgcccacctgctggtcgccgagtttgccgacgctcgtcagtgtcgcatccaacctcgcagagctcgacaccaccaagatcacgttactggtggatcaatcgcttggtgaaacaatttcctgaaggctggtcatcaccctgaagacttgtgaaattttatttccttagtcttcggctcttctctgcaacaaaggtcttagttttgtgctgctgatggtggtgttaagtgtcggtgggctcggccttcttataagtctaagtaactcttctatacttcttattgaggatggtctcttgagctagcatatatttcaaacttatacttttgtaatcactccgatgaatataatgtaaaatttttgtaacttgtaaaaatttggtaataagattttcgctgcaaaaaaaaaaaaaaaaaagcggcc

SEQ ID NO: 70130 - DNA, 1398 bp, Zea mays
  Clone ID: MRT4577_163950C.1
tcgaggccggccgggcaagtatttcaataatgaagttctgtccaactaaggtacaaatggaactactcaaaagttatacgggcaaaaaggagaacctagggaactgtgaacagttcttcatggagatgatgaaagtaccaagggtggaatcaaaactgagaattttgtcatttaagataaagtttgttacacaggttgcggacctaaaaagtaatttgaataccatcaatttggttgctgaagaggttaggagctctgtgaaacttaagcgagtgatgcagacaattctttctttgggaaacgcattaaaccaaggaactgcaaggggtgcagctgttggatttagattggatagtcttcttaagctcagtgatatacgagcacgtaataataggatgactctcatgcattatctatgcaaggttctttcggacaagcttcctgaagtgcttgacttcagcagggatcttgcaaatttagaacctgcatcaaagatacaactgaaggagttagcagaagaaatgcaagcgataactaaaggactggaaaaagtggagcaggaactggcaacagctgaaaaggatccttcagagacagagatattttacaggaaactgaatttattccttgctgatgcccaagctgaaggaaggtcgttagcttcgctttacagcagtgcggggaaaagtgccgattctctagcacattattttggtgaagatcccgtgcggtgtcctttcgagcaagttgtctcaacgttgctaagcttcacgaagatgttcgagcgggcccatgcggagaatgttaagcagatggagctggagaagaaaagagcacaagcggaagcagagaaagagaaggccaaactaactgcccacaagaagagggagtcgctggagcttggaatttcaggccggtgacacaccatatattgcatctgtggatagcactcacttcactaattctgtgccgcctgatcacctagaccagcggcagaaaattttgtagcgctccttcagcgtgtatcacaaggaagctagggagaagtaatgatgtgtagtcctaatataacagttcactcgatgtacatagcagtttcagatctgttgctgctgtaaagaaaggttccacagctagctcacgaagggagctgcagtctctttggtttgctcagttgttgttgttgttgttgttgttgttgtcaggaagttagggagaagtaatgttgtgttagtcctaatgtaacagttcacttaattagcgagaagtaatactgtacatagcagtttcaggtcttgctgttgtaaagaaaggttatgcaaactcgtttagctcgatttgtctttgggaattcacctgttactgtcaaaaaaaaaaaaaaaaaaggcccctagggcc

SEQ ID NO: 70131 - DNA, 133 bp, Zea mays
  Clone ID: MRT4577_163951C.1
tgaatagattctgatgcactacatatggtacaacatgggattaccggtacataacacaggtttttacacgtggtagcggtaagaaaacaagtgcctagagatgcgcagggatgaaaaaaaagaatcagggggt

SEQ ID NO: 70132 - DNA, 217 bp, Zea mays
  Clone ID: MRT4577_163952C.1
aggcaaaaacttccggaaatagcaattgggaacaaacttggggccaaaactaacagcaatgagaggtgagttcagggggataccccttcaaggccgaactaactattcagtgttcagtgacattccataacaaccacaagaaagcaaaatgggcttgcaaagaaaaattcaattattttcaagaaaacattggccctagcagtcacaaataaacatt

SEQ ID NO: 70133 - DNA, 738 bp, Zea mays
  Clone ID: MRT4577_163953C.1
actcatcatcgagaatttccagttacggattggtattctaggggcttaggagtcgatcgtaggcaccacagaatctaacaagaatggcaacgataacgcccccaacagggttaaccacgccaacgacgaagtcgtatcacttaagctttcgctcgccacacgacgggaagccttggcgcaaccttgaagcacagcatgactgcagcagcgacgacttcatctccgcagctcgcccgaaacgcgcggcggagcagcacggcgtgtggccggcgcgtagcggagcagcacggagcggcagcccggcgctccggccagcgcgcggcggagcagcacggcacggcggcccggccagccagaggcagagctggccggcgcgcgacggcgcccggcggcgaccgccccagcgcggcggaacgggcctgcgcgggcgcgcccggagaacgccggcgggggacggcgcttccgcaaggcggcgcctggagaggccggcaggggaggagccggtgggggtggcgccaggcgaagcagcgcccgaagaaggccggcgggggtgggggtctccggggccggcgcgcggcgaggcagatctggggccggcggccggcggagctgcacggcggccccgggatcaccggatccggcgacccaaggcggccacgagctcagcgccggctatagacggacggacagagcacgagttcgggtggatcccaaggaggaaagcgaggtgcatacact

SEQ ID NO: 70134 - DNA, 286 bp, Zea mays
  unsure (1)..(286): unsure at all n locations
  Clone ID: MRT4577_163954C.1
aagagccgaaangangcgcaaccaagagacgccagcaaagcnaaccagacanccgccggggaacccgagaagaccacagcgaaggggcaaccaacagggccnggcgcgccaaacgcngggagcgcgcacaacgacacananaacnncacncgnggnaangagaacccgacagnggacaagaaagacancaccnggaagaggganagggagcanaaaccnnggaaagaagacnanccgagcaacnnccagaanggngcacnnaaagggggagcaacaccnaacccaa

SEQ ID NO: 70135 - DNA, 404 bp, Zea mays
  Clone ID: MRT4577_163955C.1
tgctcacctggaagctgcctactcgtggcggtgttattaatatcacctccaagtgccggttactggcccgaggagctgtcagaaatcctaacatcctgctggatggaagaccctatccacagaccaaacttgacacagattatacagatgctcctacactacctatccaccctttggtctaaagagaccttggaggtccctctgcgacgttcagcttggagaacacaatcctgccaccagagtctgccgggacaagctagttgctggcttctcggggcgacctcggcaacacgcccaagggcatgaaggaagacaagccgaggggctccttctactgcaccagctagagctattagcacgagaccccgcaacgggggaacactccgatcagcttgcaaatactg

SEQ ID NO: 70136 - DNA, 615 bp, Zea mays
  Clone ID: MRT4577_163956C.1
ccccaagaacaacggtaaccatttaattttgtcacccgctgatccacaaaagactattcgacaccaggtacaaaagagttccagatctaccacacgacctcaagagaggaaaagataagggagttgccctttaacaacacaagtcctaaaggaattgctttgcggaaatcagagctggaaacggtgctgcctccaaggtagtgacgccattgtccactcctgcagccactagcctaaggtgaacggatcagccggagccgacgatgatgttgttgatagggatgaagatgagcttgacaaagaagccgacgaatcccatgacgacgaagccgatcgcagtacgcgcggcgaccttggtgaactccttgcggtccggcttgtggcagcgcttgacgaggcggatgctgtccttggcgaactcccggagcgggtcgactaccgagtcaactgcgtccatggcggcgcggggagggagagatctcgaggggtgctcttcgcttgcttggactggagacgaagacgacgacgctgtggtggctttgcctttgcgcgtgctttgccttcacgaggcggagggctgtacgcctggatgtcccggccggcctcgaggtaccc

SEQ ID NO: 70137 - DNA, 272 bp, Zea mays
  Clone ID: MRT4577_163957C.1
ggggaacaaacggaaaacccaggcgggattatataaatattcccggttccctaaaggggtggatagggttttccccaacccccaagcaaaaagagggccctcctagcagagggggcccttgggggataaacaatataaccaggcttcacttggggcccaagaccatatttatattttatttttaaagggggggggggggttttaaagaaggggagggggaaacagggggcaggcatttaagtgttgggcgacaggggacccctggagggggc

SEQ ID NO: 70138 - DNA, 859 bp, Zea mays
  Clone ID: MRT4577_163958C.1
cgaaaattacatattcagactgctacgctgtacacacaacgtcaaaaggtaaattatgaacggtgccgcaccacaaacgcacaaagcaatccccaagacaacggtaaccatttaattttgtcacccgctgattcacaaaagactattcggcaccaggtacaaaagagttccaggtctaccacacgacctcaagagaggaaaagataagggagttgccctttaacaacacaagtcctaaaggaattgctttgcggaaatcagagctgaaaacggtgctgcctccaaggtagtgacgccattgtccactcctgcagccactagcctgaggtgaacggatcagccggagccgacgatgatgttgttgatagggatgaagatgagcttgacaaagaagccgacgaatcccatgacgacgaagccgatcgcagtccgcgcggcgaccttggtgaactccttgcggtccggcttgtggcagcgcttgacgaggcggatgctgtccttggcgaactcccggagcgggtcgactaccgagtcaactgcgtccatggcggcgcggggagggagagatctcgaggggtgctcttcgcttgcttggactggagacgaagatgacgacgctgtggtggctttgcgcgtgctttgccttcacgaggcggagggctgtacgcctggatgcgtgacgcccaggcagacgtgccctccgccagaaggctcgggcgcaacttgcgttcaaaaactcgatggttcgcgggattctgcaattcacaccaggtatcgcattttgctacgttcttcatcgatgcgagagccgagatatccgttccgagagtcgtgcccggccgagcctcggagggtaccc

SEQ ID NO: 70139 - DNA, 172 bp, Zea mays
  Clone ID: MRT4577_163959C.1
aaacaaaatctttaacttgggggtgggtgttttttttccataaaattagggcccacccccaaacattcaaacggacaaacagggggtggggaaagacaactcccctgatcggatattagctacataataaagtaacgagtcatgaacaaagtgcaccgaaatcattaatacc

SEQ ID NO: 70140 - DNA, 593 bp, Zea mays
  Clone ID: MRT4577_16395C.1
aaaaaataatcccaccctctatataaaagcaaaacatatatcctccgagtagggggaggcctctttatatagagggagtactatttcaggtttacaaaaatcccagtcccaaatcaatcgcataaaaacagttaaattcaactcgtagcagcaaaaatcctgggggccaggtccgtgatctttcacaagccgacagggcctcatcgccgggggttgggaccagtcttttttttaagaacggtttgccccagtatgggaggatgtcctgaagcagcatgtcttcgcccgcgcactcctaccccccccgcgatgatggccgagctagaggctctccagctccttcatcttgccctcgaactcgtccgcctcggcgagctggttggcgtccagccagctgatggccgcgtcgatggcgtcctcgatcttcttcttgtcatcggccggcagcttggacgcaatcttctcgtccttgatcgggttgcgcatgttgtagggagtatctctccagcgagttcttggcctccaccttcttcttgggctcctcatcctgagacttgggcttctgagggggcctggaccatcttcccgatctc

SEQ ID NO: 70141 - DNA, 206 bp, Zea mays
  Clone ID: MRT4577_163960C.1
catcacaatgtaagctaggttgtttgcttccctcccctgaccttctctacagctgttgagacctgtgttgtccgtgccatctcaagtgtcttcaagcaagcatgcggttgtgttgtttacaattttaacttgtacagtcgcgctacaccttcttcgtgcgtttaaacgtggtgttcttcttcatttgcccattgtcggtcatcgcg

SEQ ID NO: 70142 - DNA, 741 bp, Zea mays
  Clone ID: MRT4577_163961C.1
cattgggtacctcgaggccggccgagaattatgaaggtgaaatgatattgtcactgagaaggagctataacttctccttctgcttgaagcataataaacgacagcgcgtgatacacgcttggataaactggatggagcgcacaacctccaactgacctacaaggcctagctgcagcgcgcctgacgacgaacctataatgtactgcaccctgactattttggacgaggctacactcgtgaactggccacacatttcttctgggatgtggattatcgcctaaagtgctatcccatgctcgtatactccaaatctttgtacgacttccctcagaatgcaccaagaattgtccactgcatatacaagctcccattcttttactatgaccgtgaatacatctctgcaccacgcatataggtaatctagctaacacctactattgcgtatacaaatagtgtcatcgactatccatcctggcccaagaaagaaataccaaggcagcgtgcacttgtgactgctcgagttgccgcattagagctgctcaatcgcccaaacacgcgggccagcaatctgcgcgcgaaagaactctctgtcactatgagagacatgcgtataccaaaagatgtagccagcgttgctgacctccacggcatgtgcggtgctgtgaagaaacttcagtctgcgatcacagcgtaccgttccctgagagacacagaaaataccctgctacacagagtcatgat

SEQ ID NO: 70143 - DNA, 174 bp, Zea mays
  Clone ID: MRT4577_163962C.1
caaaaaaatttttttctctctcagatccttacatatatttggaaaaatatttgaatccaattttttttttgggttctttttctaaatgcaaggggcatgtttcggccttttattgggctatttctcgtgtttataggcgggtgtgaacacgcacacatcatgcaaatgatgcaa

SEQ ID NO: 70144 - DNA, 527 bp, Zea mays
  Clone ID: MRT4577_163963C.1
gagccaatggggagcggggtagatagctccaccgtctagacgatcacccttggacgcactgaatgcgaaagcgcaggatccctttgcgcaggtctatagaccttatactggagtatcgggcaggacaggacatcatgccgaggcactctgctgatgcgctaaaaacacttatttggacaaggcaccacagtgtgatctgctaagagccattgcttgcatgaaacgatcatccacatccgctctataattcggtatcctggaaaagcaatagctttattggtcacactgaagcatatgctccaaaaaaaaaaaacatcaggtgcctgcgacatgtaaggaaaatgattgctggcgaggatatatgacttgcttaccagtgaaatacaacccctaagctaaagatgcatatctgattggtgcactcgattgaggcctatgggagctgatcctcctacacaagcattatgacatcttagtctcctggatggctgagaatatcttgagtgtggcaaacctgaatcccaccc

SEQ ID NO: 70145 - DNA, 360 bp, Zea mays
  Clone ID: MRT4577_163964C.1
taggaggtctttaactactcatacatttcatttgcttgacatctgtactgattctcccgctcgtttcaattctgttgtttatatcacatatggaatcaaacttaaatattagctattacaagaaatcttgactcattaacttttatcgagttctgtactcataatttctatactctcacaattatgatcacgttacaaggactcttcgataacacaatcacccaattcatgtattactcctcatgcaataacctgctgttactggatcgtttctaactgcaataacaatcaaacttattcccatgattcaccaaagtgaaaagtatcacaagataatagcaatctgtactaataatcctt

SEQ ID NO: 70146 - DNA, 264 bp, Zea mays
  Clone ID: MRT4577_163965C.1
acatggcatacgagcgcagccacaaaggcgagggagcggttgaactcaaggggggttggggaaccagcaacgcaagcaacggaagcaacgccgccagcaaccctgcctacgccagaaacatggacggacaggtgcacaaccacactgagggcaccagctacatacaggagcgcaccgcccccactgtgcagaagcacggcaccgacgcctggaaggccaccatacagaacaaggcctggacgcgcgtataccacgagctcggcg

SEQ ID NO: 70147 - DNA, 678 bp, Zea mays
  Clone ID: MRT4577_163966C.1
ggggtacacggcccccactctcgagtttttttttttttttttttttttttttttttttttttttttttttttttttttttttttttttactttcaacccccttttttttttaaacggcaaaaaatcttctgcaggaaaaactggggggaaaaaagcgcccaaatctcacggggctataaaacattaaactctctacattgctcagggggctataaaacccttaacaaaaatatctcaccccaggggggaggagggggacggcaggtttataacagggctcttcaccttggccatcatggaaaggcgggtggttacccccggggacccaaggccactgtttttcagcccctggaaggggaaatgatcagccccccaacccggggcaaagttgatctgcccagtcccagcccccattgcatcactgaccaggattgccttggtgatgcctcttgaaaaaaggcccccctggaggccgaaattacgggcattgcaaggggggaggccttcctcaacggggttaatcctaatcccaggcaaaacaggcccaaaaggctccccccatgcgaccctcatggtagggcggacatgatccaccagcaacggccaaaaaagggggccttctctcctggacccctggcaaaaaggggctcctttctcctttgcatccatcaccaaacc

SEQ ID NO: 70148 - DNA, 1059 bp, Zea mays
  Clone ID: MRT4577_163967C.1
cagctcatcacatccatctcattctactactgcctcagagaccaagctgctgcaaccggagaaggagatctattctacaaagtgaagtacttagcttgggacatggaaaccgtcgtgggagacctcatggcgaccgagctgaggcttggcctgccgggcaccgtggacgactgcagccagcaccagcagcagacccagctgaaggtggccgcgccgccgtccaaccctactaggggcaagaagcgccccgccgccgaggaggaggaggcaaacaagcgcgacgcggaggcagcacccccggcggccaagtgagtagctaatagatctgagcaccgaaacgttcagagtgaaccgaacgtgtgtctctcgtacgtacgttacgtggcgcccgtggtcggatggccaccggtgaggtcgtaccggaagctcgacctgaggatgtacaaggggtaccgggagctccgggaggccctggaggccatgttcgtctcctccggcagcgccaacaacaacaacaacctgtcggagttcgccgtcacctaccaggacaaggacggcgacctcatgctcgtcggagacgtgccgttcgagatgttcgctagcacctgcaggaagctgaggatcatgaagagatctgaagccacaggcctgggatcggcgagacaatgaagaaggtctgacgacgaccgagggcccgacaacgttcatgtcgatctcttctttttttttctttttgccccattattttattttgttcttcttgtccgagagaccccaagccaaaaggatgagcttggtgggtggcgcatcaatctacaaagcgcatgcatatacgcggatgtgtgtgcggctttggttctgtaagacgacgactagtagctaggtcttttttagcagcagcacagaagctaaggagatgcatgctgatgacgagcggttgtttcggcttagctctccgtatgctgtgcttgtacaaaccaaacaatacagttatcttcaccgtcgttgatcccttaaaaaaaaaaaaaaaaaaaaaaaaaaaaaaaaaaaaaaaaaaaa

SEQ ID NO: 70149 - DNA, 351 bp, Zea mays
  Clone ID: MRT4577_163968C.1
gtccctcgggccggccggaaaaaaaatacccttacatttgatccgccgcgcgcagcccgatcgacgagcgagcctcattccactccgatctagctagctagctagtttaggaaagagaaatctgaccacaggatgcggtggcggctgcagccggcgccggcgccggcgctgctcctcctcctggccaccatcccccacggaccctgggcagcagccattcagttgggggggggggcagggttcagtgatcaaaggatgggacgagggagttatgaccatgcaagtgggtgaagttgctcgtatccagtgcacgcctgattatgcttatggagccggcgggctcccagtctg

SEQ ID NO: 70150 - DNA, 1207 bp, Zea mays
  Clone ID: MRT4577_163969C.1
aactcggcccgagcaccagctcatcacatccatctcattctactactgcctcagagaccaagctgctgcaaccggagaaggagatctattctacaaagtgaagtacttagcttgggacatggaaaccgtcgtgggagacctcatggcgaccgagctgaggcttggcctgccgggcaccgtggacgactgcagccagcaccagcagcagacccagctgaaggtggccgcgccgccgtccaaccctactaggggcaagaagcgccccgccgccgaggaggaggaggcaaacaagcgcgacgcggaggcagcacccccggcggccaactacttgtcaccaactcttgcagggcgcccgtggtcggatggccaccggtgaggtcgtaccggaagagctgcttccagcaggcaaagcagcaggccgtcagcagcagcagcaaggcggccgacaaagaggatgctgcggcgccggcgcccagctgcacggcgtccgcagccgcctcaaacgccaccgccagcgccggggccggctcattcgtcaaggtgagcatggacggcgccccgtacctgcggaagctcgacctgaggatgtacaaggggtaccgggagctccgggaggccctggaggccatgttcgtctcctccggcagcgccaacaacaacaacaacctgtcggagttcgccgtcacctaccaggacaaggacggcgacctcatgctcgtcggagacgtgccgttcgagatgttcgctagcacctgcaggaagctgaggatcatgaagagatctgaagccacaggcctgggatcggcgagacaatgaagaaggtctgacgacgaccgagggcccgacaacgttcatgtcgatctcttctttttttttctttttgccccattattttattttgttcttcttgtccgagagaccccaagccaaaaggatgagcttggtgggtggcgcatcaatctacaaagcgcatgcatatacgcggatgtgtgtgcggctttggttctgtaagacgacgactagtagctaggtcttttttagcagcagcacagaagctaaggagatgcatgctgatgacgagcggttgtttcggcttagctctccgtatgctgtgtttgtacaaaccaaacaatacagttatcttcaccgtcgttgatcccttactaattgcttgtggagatcgaggcgatggtcctcttgagctttc

SEQ ID NO: 70151 - DNA, 403 bp, Zea mays
  Clone ID: MRT4577_16396C.1
accggtccgggacccgcccgggggggcccacgaaggggccaatgccggcccacaggggggcgtccctaggggaccccaacccgggcccaacccgggccaaaccagggccctaggggaacccggggggaaatgggaatccccccaaatccccaccgcaaacaaaccgggaaaaaaaaggggaaacccgggggggcccaaagagggagcaaacgcacaggaattgcggggcgctcaccggccggtaaaccggggggaaacccggcgggccaggtgcgttaaagaatcggccaaagcccgggaaaaggcgggtagcgaattgggcgcccttccccctcccccctcacggactgggggggcccggggggtcgcggggggccagcggtaaaagcccacttaaaggggg

SEQ ID NO: 70152 - DNA, 2231 bp, Zea mays
  Clone ID: MRT4577_163970C.1
gtttggatcctcacttacgggctcccatgcgagtggagttggagtcatggaaagcattcctgatgcaggatctaaagctggttgtcagtgatgaggaattttgtgttttgctagagaaattgttttcaaaacattgtgtatgttgtatatattctaatatgcttttaacagtgcctgacgagcatgtggtatgcacggtgccaccatgtcccgcggcagtgccgcctccgtatacctcggcgtcgacgttggtactggcagcgctcgtgcaggactcttcgatgaaaacggcaaattgctggggtcagcaagcagccctatacagatatggaaagagaaagactgtatcgagcaatcatcaaccgatatctggcatgcggtctgtgctgcggtgaaatctgcgtgctcactggcaaatgttgctcctgaggacgttgctggccttggctttgccgccacttgctcccttgttgctgtcgatgctgatggttcccctgtttcggtttctttgagtggtgatacaaggaggaatatcattgtgtggatggaccatagagctgtgaatcaggcagagcgaatcaatgctaccaattcgccagtactgcaatactgcggtgggggtgtttccccagaaatgcaggctccaaagctcctatggatgaaggaaaatcttctagattcgtggtctatggtatgtaggtggatggacctaagtgactggttagcatatagagcaacaggtgacgacactcgcagcttatgcacaactgtctgcaaatggacatatcttggacatgcacacatgaaacagtggaaggaatctgattcacgtgatatggaggcatgcggatgggacaatgttttttgggaagaaatagggttggcagacctcctcgaaggaaattgtgcaaaaataggacgcagtgtcgcttttcctggtcatgctcttggttctggtttgacgcctactgctgcaaaggagttaggcttacttcctggtactcccgtcggaacctcacttattgatgctcatgctggtggagttggagtcatggaaagcattcctgatgcaggatctaaagctggtgtctgatgaacatgcaatatgtcaccgtatggtattggtatgtgggacatcaacctgccacatggctgtttcaaaggacagattgtttatacctggtgtctgggggccgttttggtctgcgatgatccctgagttttggctcacagagggtggccaaagtgcaactggggctctgctcgattacattattgaaaaccatgttgcttctcctcttctttctaaccatgctgcttctcaaagtatatccatatttgagctactgaacaagatgttgctttctatgtcacaagagcagaatagtccgtttctttctgcattaactcaagacacccatgtgcttccggattttcatggaaatcggtctcctgttcctgatccaaaatccaaaggagtgatttatggcttgacacttgatacaagtgagaagcatttagctcttctatacctagcaacaattcagggtattgcttatggtactcgtcatattgtggagcattgtaatgctcatggccacaagatagacacacttcttgcttgtgggggacttgcaaagaattctctgtatatccaagagcatgcagatattacaggatgtcctataatacttcctagagagagcgagtcagtgcttttgggtgccgctgttcttggcgctgttgctggcaaaaagttcccgggtgttcgtgatgcaatgaaggctcttaatgcagcggggaaggtcgtaaatccgtcttcagaccctaaggtgaagaaataccacgatgcgaaatatcagatattcagatccctgtatgagcaacaactctctcatcgcgcaaccatggcacaggcattgcagtagggctctatggccactttggctcttcactcttggttattgatacccttggtttcattgccatgttttattggcttatttacatgtaatcaatatcgccttgagtgatttgatagaatagaaaccatgataagatgcatgtatacacaaaagaaaactggtaagatgatctttctcacagggacgtgaaatccccaaagcctgtgcaatgttaataaaagaaaaggaggttctttagggctcaaaaaaaaaaaatagaagtttcggtatcattataaatgcatctcatggttaccacgcatatgg

SEQ ID NO: 70153 - DNA, 539 bp, Zea mays
  Clone ID: MRT4577_163971C.1
ctgtcttccgtctctcccgagtgacctcaaagtcattgagcgccacatccgactccgagggccaccggtggccggttgcccgttgacgccgcggcacgcgattccgatcctgcctgtggctgccacggtgccaccatgtcccgcggcagtgccgcctccgtattcctcggcgtcgacgttggtactggcagcgctcgtgcaggactcttcgatgaaaacggcaaattgctggggtcagcaagcagccctatacagatatggaaagagaaagactgtatcgagcaatcatcaaccgatatctggcatgcggtctgtgctgcggtgaaatctgcgtgctcactggcaaatgttgctcctgaggacgttgctggccttggctttgccgccacttgctcccttgttgctgtcgatgctgatggttcccctgtttcggtttctttgagtggtgatacaaggaggaatatcattgtgcggatggaccatagagctgtgaatcacgcacagcgaatcaatgctaccaattcgccagtactgcaata

SEQ ID NO: 70154 - DNA, 703 bp, Zea mays
  unsure (1)..(703): unsure at all n locations
  Clone ID: MRT4577_163972C.1
ttgggtacctcgaggccggcgccgggatctgaccgactctcaaagttcacagctccaatcctggtgcaagcgcacagtagcggagcaagatgcggggaggagaccggccatcggcgtcgctccagctcctctcgctgggcctcgtgctcctctacttcttcacctcaggcagcaccgttggtctcgtggagggacagaagacgtggtgcatcgccaagccgtcggcgtcgaacgagagcctggcgcagaacctggactacgcgtgctcccaggtgagctgcgccgtgatccagaagggcgggccgtgctactacccggacagccccgtgtcccgcgccgccgtcgccatgaacctctactacgcctacagcggcaggcacccctggaactgctacttcaacaactccgcgctcgtcgtgcagtccgacccaagctatggctcctgcacgtactactgaggaggagtggagagacgaggagaggagagagatccattcgtgcctggcggctggctctactgcatccgtatgcagactgccaatttaccaaacgcacattgttgtgttgtgtacccgtgctgcagctgacatttcgcagcgaactcgtggatactccgtttcgcattcatgtgcttcgaaaaaaaaaaaaaaaaaagcggccgctgcacaaatccccccttanaaaaaaaaaaaaaaaagcggcc

SEQ ID NO: 70155 - DNA, 211 bp, Zea mays
  Clone ID: MRT4577_163973C.1
aacactcatacttccacgcgttcgaccactctacctgtcatcagatacttctcagcatgtgcggtctgctttggctaaagtaataatgggagtggctccagtgttctggaaccgaagcaacattcgagcttcttcatcctattttcctttcccatttgaaggtagaatttcccaacgtgcgcctaatcatcatcagcctgcttgaacaagt

SEQ ID NO: 70156 - DNA, 293 bp, Zea mays
  Clone ID: MRT4577_163974C.1
aaaaaaaaaacacggccaaacaaataaaaaaaaagcccttttttccaaaaaggaagaaagggcaaaagtcccattaccagggaaatgtacattacttaaggaaacaacagttggtttcaaaatatggggggagggcaagcaaaaaccccaattaaaatccgttcccaaaattggcaccaacccaacccgaaaaaaaattattcactggatgcaaaaccccaagcacatgcacaagcccaaattttaaaaaaccaaagggggggcaaacttaagtgcccaatgcccaaaatagc

SEQ ID NO: 70157 - DNA, 1374 bp, Zea mays
  Clone ID: MRT4577_163975C.1
attgttttcaaaacattgtgtatgttgtatatattctaatatgtttttaacagtgtctgatgaacatgcaatatgtcaccgtatggtattggtatgtgggacatcaacctgccacatggctgtttcaaaggacagattgtttatacctggtgtctgggggccgttttggtctgcgatgatccctgagttttggctcacagaaggtggccaaagtgcaactggcgctctgctcgattacattattgaaaaccatgttgcttctcctcttctttctaaccatgctgcttctcaaagtatatccatatttgagctactgaacaagatgttgctttctatgtcacaagagcagaatagtccgtttctttctgcattaactcaagacacccatgtgcttccggattttcatggaaatcgatttgcaggatgatgcttttcttctcctgccatcataattagacggtcaacaaaccatacaacagctgaagcagaaagccctcatatatttctatgaggctatacatcacaatcacaccagaatgtggcatagcatactctttatgtatgatgtctcatgacatctaactgaaaattgcagaggaataatctttaagtagcacactagttccaatatgtttgacttgagtgcaaactattataggtctcctgttcctgatccaaaatccaaaggagtgatttatggcttgacacttgatacaagtgagaagcatttagctcttctatacctagcaacaattcagggtattgcttatggtactcgtcatattgtggagcattgtaatgctcatggccacaagatagacacacttcttgcttgtgggggacttgcaaagaattctctgtatatccaagagcatgcagatattacaggatgtcctataatgcttcctagagagagcgagtcagtgcttttgggtgccgctgttcttggcgctgttgctggcaagaagttcccgggtgttcgtgatgcaatgaaggctcttaatgcagcggggaaggtcgtaaatccgtcttcagaccctaaggtgaagaaataccacgatgcgaaatatcagatattcagatccctgtatgagcaacaactctctcatcgcgcaaccatggcacaggcattgcagtagggctctatggccactttggctcttcactcttggttattgatacccttggtttcatcgccatgttttattggcttatttacatgtaatcaatatcgccttgagtgatttgatagaatagaaaccatgataagatgcatgtatacacaaaagaaaactggtaagatgatctttctcacagggacgtgaaatccccaaagcctgtgcaatgttaataaaagaaaaggaggttcattag

SEQ ID NO: 70158 - DNA, 542 bp, Zea mays
  Clone ID: MRT4577_163976C.1
gatctgaccgactctcacaaagttcacagctccaatcctggtgcaagcgcacagtagcggagcaagatgcggggaggagaccggccatcggcgtcgctccagctcctctcgctgggcctcgtgctcctctacttcttcacctcagaagacgtggtgcatcgccaagccgtcggcgtcgaacgagatcctggcgcagaacctggactacgcgtgctcccaggtgagctgcgccgtgatccagaagggcgggccgtgctactacccggacagccccgtgtcccgcgccgccgtcgccatgaacctctactacgcctacagcggcaggcacccctggaactgctacttcaacaactccgcgctcgtcgtgcagtccgacccaagctatggctcctgcacgtactactgaggaggagtggagagacgaagagagagatccattcgtgcctggcggctggctccactgcatccgtatgcagagtcttggttttctagtctagactgccaattaccaaatgcacattggtgtgttgtgtacccgtgat

SEQ ID NO: 70159 - DNA, 882 bp, Zea mays
  Clone ID: MRT4577_163977C.1
cattgggtacctcgaggccggccgggctgtctgctgtctctcccgagtgacctcaaagtcagcgagcgccacatccgactccgagggccaccggtggccggttgcccgttgacgccgcggcacgcgattccgatcctgtatttcttccgtcgtaaccacgtcggcacctcacctcggccgcgaactccgatcgcttccctgctctgcttggccgtcgctgccgtcccaccagcctgtggctgccacggtgccaccatgtcccgcggcagtgccgcctccgtattcctcggcgtcgacgttggtactggcagcgctcgtgcaggactcttcgatgaaaacggcaaattgctggggtcagcaagcagccctatacagatatggaaagagaaagactgtatcgagcaatcatcaaccgatatctggcatgcggtctgtgctgcggtgaaatctgcgtgctcactggcaaatgttgctcctgaggacgttgctggccttggctttgccgccacttgctcccttgttgctgtcgatgctgatggttcccctgtttcggtttctttgagtggtgatacaaggaggaatatcattgtgtggatggaccatagagctgtgaatcaggcagagcgaatcaatgctaccaattcgccagtactgcaatactgcggtgggggtgtttccccagaaatgcaggctccaaagctcctatggatgaaggaaaatcttctagattcgtggtctatggtatgtaggtggatggacctaagtgactggttagcatatagagcaacaggtgacgacactcgcaccttatgcacaactgttctgcaaatggacatatcttggacatgcacccctgcaaatcctggaaaggaattctgattt

SEQ ID NO: 70160 - DNA, 809 bp, Zea mays
  Clone ID: MRT4577_163978C.1
cattgggtacctcgaggccggccggggaatctccacctccctactagtagttacttagtactcttcggtgcagtccgcatccccacatctgaccgactctcacaaagttcacagctccaatcctggtgcaagcgcacagtagcggagcaagatgcggggaggagaccggccatcggcgtcgctccagctcctctcgctgggcctcgtgctcctctacttcttcacctcaggcagcaccgttggtctcgtggagggacagaagacgtggtgcatcgccaagccgtcggcgtcgaacgagatcctggcgcagaacctggactacgcgtgctcccaggtgagctgcgccgtgatccagaagggcgggccgtgctactacccggacagccccgtgtcccgcgccgccgtcgccatgaacctctactacgcctacagcggcaggcacccctggaactgctacttcaacaactccgcgctcgtcgtgcagtccgacccaagctatggctcctgcacgtactactgaggaggagtggagagacgaagagagagatccattcgtgcctggcggctggctccactgcatccgtatgcagagtcttggttttctagtctagactgccaatttaccaaatgcacattgttgtgttgtgtacccgtgatgtagctgacatttggagatctcgcagcgaactcgtggatactccgtttcgcattcatgtgctttcaagttcattgcagcggcgctgcacaaatttcccccctttttttctcgccacttgcgttcaaacgttgggaatcgatggatctgatct

SEQ ID NO: 70161 - DNA, 329 bp, Zea mays
  Clone ID: MRT4577_163979C.1
agagccgggcattgttggcgtcgtcgtgtaggcggctttgtaaagagtcaagagcatgatttgacctaatacccgggaaatggaggcgcatggcggtgcggcagctgggcgaccccaccctggccactggcggggaagcctgcccggactacgcgggctgtgcggatcacgcagtgtcggagatgtgatcacctacggctgagccagtgcgagtcgcgcagaccagcctcaagtgcgccacgcatctacaggctcatggacaagtaccaagagcggcccccgcttgctggcgtgcctgaatccggctactctggggtggggaacgcaga

SEQ ID NO: 70162 - DNA, 571 bp, Zea mays
  Clone ID: MRT4577_16397C.1
ttttttttttttttttgtccttctaatttctttcgaatttaacttggatcgaacacacctgtatcctgtcgttctaccctgtatgttgtaacacacggctcgtaggacgtacgttttgatcagctgcacatacatatacacattataatcacacacatgcacacacaccgggtctaggcataacgattactcttcctcgccagacaagcccaagctcaccggcgtgccagtctccggtatccagtccgcgccgtgcaagaagtgccccaccgtgaactgcagcgccctgtccttgcccatcacgtggaacccctgcatctccttccgcccggtgacgttggcgccgtcgccgccgttcctgaactctccgaagaaggccgtgcccaggttgtccttgccctcccagggcatgtacccctggcggtgcacgaatccgtcaatgacggactccatcaccaccgtcctcgcgaactccttccacggccggcccaggtacgtattgaccggcgcggacccggacttgttgctgttgctgctgctggcgagctgctcgtcggcgacgatctggctc

SEQ ID NO: 70163 - DNA, 784 bp, Zea mays
  Clone ID: MRT4577_163980C.1
cctcgaggccggccgggacatctgaccgactctcaaagttcacagctccaatcctggtgcaagcgcacagtagcggagcaagatgcggggaggagaccggccatcggcgtcgctccagctcctctcgctgggcctcgtgctcctctacttcttcacctcaggcagcaccgttggtctcgtggagggacaggtacggcctttggctcttgacgctctatctatctataagacgtggtgcatcgcgaagccgtcggcgtcgaacgagatcctggcgcagaacctggactacgcgtgctcccaggtgagctgcgccgtgatccagaagggcgggccgtgctactacccggacagccccgtgtcccgcgccgccgtcgccatgaacctctactacgcctacagcggcaggcacccctggaactgctacttcaacaactccgcgctcgtcgtgcagtccgacccaagctatggctcctgcacatactactgaggaggagtgtgaggaggagtggagagacgaggagaggagagagatccattcgtgcctggcggtggcggctccactgcatctgtatgcagagtcttggttttctagtctcgactgccaatttaccaaatgcacattgttgtgttgtgttgtgttgtgtagccgtgctgcagctgacatttcgcagcgaactcgtggatactccgtttcgcattcatgtgctttgaagtacattgcagcggcgctgcacaaatttccccccaaaaaaaaaaaaaaaaaggcccctagggcccggattct

SEQ ID NO: 70164 - DNA, 1055 bp, Zea mays
  Clone ID: MRT4577_163981C.1
cgggataatctgattgactggttagggaagaacaaacttgttggggaggctgagggattgtacaaggagatggaagagcgaggtgtaaaccctgatgagtacacctatgtcttgctcattgaatcttgctttaaggttgatagggtggaagatgcagttgcttacttcaacaagatgtttgatgctggcctgaggccgaatgcgaatgcatttaacaaagttatagatggcttggtgaaggttgataggctcagcgaggcacagggtttttttgatatgatgcctgagaaggaggtcaaaccaaacattgctagctatgagttgctattgaaggcatatattgatgctgcaaggttggatgatgcgattaaggtcgccaaatgtatcctgttagatgagagtgtcgtctttagtgatgaaacgaaagcacttctggaggaggcactagacaaagagggtagaaatgggcaaatgacaaagttatatgaagatgttgagatggagaaagcagaggcggctgcacgtgcagctgaagagaaggctagagcagaggcccttgctaaagaagaagaggagaggaagaaggccgaggcaaaggctaaggaagaagctgctgccagggctagccgagcggctattgaggcagtgctgggtcgcaagagggaagcagaaaaacaggaaccagttgatggactgaacgttgaggatgcagaggttgtggaatccaagagtgacaccagcgatgtttctggagaacagaatgaaggcgatgagcacaaaaagcaagagccggctgaagcatcatcgtgttcttagcttcgttatctttataagttccttactagttactatcatgagtgatctttagatccatttcagtagtataatgtgcttgggagaggctatctgagaaggttggctcaatgcttttatatgaacttacatggtttcaagtcgtgctgattgtttgctacattgaatcattggtgcaatcttgtgtaccacatctagcatttcttagataagagataaatataagttattaaatttctttt

SEQ ID NO: 70165 - DNA, 443 bp, Zea mays
  Clone ID: MRT4577_163982C.1
gggtcctcttctaaaaaagggacccgaaggggacccccggcgggtaaataaaccccaaaacaaaaagggaaaaaaaaaaaaaaaaaaccggaaccaaaaacaggaaaaacccccccccaaaaataaacccgggaaaaaaacccgggcaaaaaaacggaacgaaaccaaaaaccccccccgggggacggggcaacccaaaaaaaaactagaaccaaaaaggcctggggggctttgggcgaaaaaaaccaaagcccccggcggtaaacccccaaaacggccccgggtttttttccaagccggggggcacgggttccctgaaaaaccccaactggggcccgaacaccgggcggacccctttgacgaagggccaaaaaacccccccggggcaaggggggggggggagggaacccacctaacgggaaaaaaacccggccccgccccgc

SEQ ID NO: 70166 - DNA, 267 bp, Zea mays
  Clone ID: MRT4577_163983C.1
gctttgtttggatatggagtgaacacaattatgtaccatatttaacttggcaaactttctattgcctgtcccatgtgcatcttatttaaaatttcccccatggaaatcactctcctgttgactatttccagagctctaggtgtttaggcagcgtgtggtgtctgagaggccatagcgccatcatgggctgatttttattaccaggtcccccagaagcaggtgagaggctctgcttcctgctgccgctctgcagcctggacctgtgga

SEQ ID NO: 70167 - DNA, 592 bp, Zea mays
  Clone ID: MRT4577_163984C.1
ccggccgggcacccccatccactccctcacggacgacctcctgctccagatcttcctccgcctcccttccctcgcgacgctcgtccgcgccgccccgcctgccgggcttggagccgcgcggtggtctcctccccggccttccgccgccgcttccgggagctccaccggacgcccctcctcggcttcttcttcgagtgccctagccccatccaagacccggccatcccgctcttcccctcattcgtccccgtgcgccgccgagaaggggacctgtccatcgccgtccgcggcggcgacttcttcctcacatgcctccaggagcaccccatcaagtcccagtcctgggacattctcgactgccgtggcgggtacgtcctcctctgtaatgatggtcaggcaggtgcgcaagcaatggcggtggtgaatcccttggcgcgacagtgccggttagtagactatcgccatgtggacgccttggaaggtcgccgtgggactttctttgatctcaacggctacttgctctgctccgaggaggaccccgcatcgtttcgggtggtcttattgccacgacgagtccagggtgcgggctact

SEQ ID NO: 70168 - DNA, 239 bp, Zea mays
  Clone ID: MRT4577_163985C.1
aaaaaccaaatctttaccgccaggcgtttatttcagggccgtgccagactttaaaaggggggaatccagtggggaattgtaatcaaaaatccattttttgtaaagcattgaacagatttttaaactggcctgacttttttggggggaggatcttccaaacttgacgcaaagcaatagggttgccaatgcaaccaaaagtgcggggatccgtggaaaacccctgtggggatcctgtttga

SEQ ID NO: 70169 - DNA, 552 bp, Zea mays
  Clone ID: MRT4577_163986C.1
tcctacgcgtccgaaaatatgccttcatttgtttgataagaaactcacttcccatgttatcataattattagaagaaattctttctgctaagttgtagtactaatatcctgatagtgtgtatccccattaaacatggaagattctttttttttactttcctgtttcgcattcagaaatttgttctttgtaggtacaattggactggatttggtaaaaccacttagattaacgggataagggatttttttaattaggcataaattgaggtttttttagttaggcataaattggattcaaatcttgggtccgccaccgatggttcgtaaagataaacataggagcttaatgttttattttgttcacaggtcaaagcaattggaagcctctctttttggtaggaatctatagataaatgcactattgaaattgatgcttagtcacacctgtagtctgctcctcaggttttgctggtctcacgcttcttatcataggtgacgagagcaaagtcaagaaggaaatacttggccccttgccccctcctcgcaaggttg

SEQ ID NO: 70170 - DNA, 271 bp, Zea mays
  Clone ID: MRT4577_163987C.1
cgaaaagggaaaactatctacctcatggggtaaacaacatttatcactgttctgaacaacatgtctgaggggacagattaaattggggatatgttacagcgagctttctgaccaacatcctcacgattcatcttaaactacaaatttacacttctgccgtggggttcctcgaccatgtaagcgactacctcatgtatgcagtgagcccagtacgtggttcttcacctccacaccagcctcgaactacttcaccaggaagtggtcccatgtg

SEQ ID NO: 70171 - DNA, 548 bp, Zea mays
  Clone ID: MRT4577_163988C.1
cgatcaaaatatatggtgattaaacaaagtgttgttgctacagcctgcccgtccgatgagaggatatctacagttgtcatagaagaaaacaaaaacacagtgcctgtgttcatctcttccctcttcaagtctggcataagtatgtttattatcatctcttcccgctcgtcgattggtttttgggccttgcacgacaacacctctatcgctggggctctcaagtctcaacctgtactgcacgaggagcttaatatatactgtatgtgcagaatttcccatcatctgtcgagcttgacgcgtctcactgccccaggctgaagagatctctgcacattggacaagaagattagcatcctccgctgtccaaaccagaagattagcattacggacattttttcaaataagatgactggtcaaatttatctatatctatgtttatatctatatctatatctactaggtatgtactcgtgcgttgttacggagtcaacatgttatattaagatatattgagatatagaaggactaactgtcgttctatgctcttg

SEQ ID NO: 70172 - DNA, 176 bp, Zea mays
  Clone ID: MRT4577_163989C.1
acaaaatacacagtttcattgttctgaatcctgtggtttctttcagcccacttttatcgccttaacctagttaatgtatattttgaattgtgtgtatgacctcagaactgaaattgataatgaagttgcaagttttgatagcccgtgaagtgcataagtatctaattttacctgaa

SEQ ID NO: 70173 - DNA, 594 bp, Zea mays
  Clone ID: MRT4577_16398C.1
cggggcaagtccggcctgcaaaagaaggcctccgagctctttctgctctgtggctcgcccgtcgccatcgtcatcttctcccccggcaaaaaggtgttcgcgctgggcactccctcagtcgaccacgtcctccgccgctatgctccgatccccggcgaagaagaggaggatgggctccttccggtgcttcaggacacagacgatgtgagcgctatcaccgaccgcgtggaggtggagggcattgtgcggcgaacggaggagaccaaggcgcgttcggtgatggagaaggcacggatggacgccatcgggaagacggtgaggcagaccgcggcaaaggccggaaggaagttctggtgggaggcggactccggcaagctcggggaggctgagctaccagaattcgccaaggtgctccgtcggctcagggtcaacctgcaacgccatttggactcgctgtcggcgtctactaggcagctgcagtaggagtggctgtgcaaaactgggtcattcgatttggttagggcttggatgtttaggcacttaggatagtgtcattgactacaaaaaaaatcaaaatgttagtgtgattagtct

SEQ ID NO: 70174 - DNA, 312 bp, Zea mays
  Clone ID: MRT4577_163990C.1
aattcgccgaggacctcagtggggaaggcacaggtgctagaccaaaatgaagtaggagatctccatgcaactcccgcgaatatccggaagatgccaaggatgggtaatcataagaagcctcataagatccactctagatccaggcacgaagggcacatgacgcctagccaaaggactccactcacgacacggtaagcgcacggctaccagggaggctaggctacccaccaaggtctgtgtggatgaagaggatgcttgtgctggggctccttatccacataatcgttaggccgacatcaacgacaagctcat

SEQ ID NO: 70175 - DNA, 439 bp, Zea mays
  Clone ID: MRT4577_163991C.1
ctttagcaatggaagaagaagcagtctttcttttaatctccgccagcttcctacccgcttgactgtttcctgcgctgcaaaacctgagacagtggacaaggtgtgtgcagttgtcagaaagcaactctcacttaaagaggctgacgaaattactgctgccaccaaatttgctgcacttggtgctgattcccttgatacggtggagattgtgatgggactagaggaagagttcgggattgaaatggcggaggagaaagcacagtcaatcgccacagttgagcaagcagctgcgctcattgaggagctcttgtttgaaaaggccaagtagaatatctttattacattagcaaaaacgaaaaaaatcaaaacccaaaccactatcttattgtttcgttagctagagagcaattgtgtctgtgaaagaatttatgttattttg

SEQ ID NO: 70176 - DNA, 240 bp, Zea mays
  Clone ID: MRT4577_163992C.1
aaggaacctgaagatcaaattggagaagtacctggagtttgcaccaaaaaggttaagaacaggtgcatccagaagtggaggaagactctgatgaagatgagtttggagagatctaggccatcgtctcccagtcaactagggattgtggaggatcgtcgtcgccatatggtgtaatatcttttagttattttgtacagaatttctattaagtaataaagatatgacattgatttctgtacc

SEQ ID NO: 70177 - DNA, 547 bp, Zea mays
  Clone ID: MRT4577_163993C.1
cctcgaagccggccgggagaatgtttcatggatagccacggtaaccgctaccactcaatcagtaccgccaagccggcatgacgttctcaacgcagcagcgggactgtctcctacatcacggcggagccctcctctttcgctacccgtcgatccttcacctgctgaagcttcgaatgcctttcgcatccattgtccgtcttctaggaggccttggtgacgcgaccggcaagttccaagtactgcatgactctgccgtcggggtggatgatgcgccaccgagctgggcacaagttcaatgatcaggcagtattgaaccctcaccccatcggtgcgggagcgctccgagaacaaagacctgcatcatgagatcacgctgaaggcgaggcgtgatgttcgcgcgcaaggttcgtaatcctgtctatcggaatgctcacaaaccctggcattcatctgggcgcagggcaagatctagaacatgaagatgaccgacgatccgatcgccaaagaaattacatagagacagtgagagtggctcgtccccagtcac

SEQ ID NO: 70178 - DNA, 1354 bp, Zea mays
  unsure (1)..(1354): unsure at all n locations
  Clone ID: MRT4577_163994C.1
cacctgcccccctccccgcgccagtgttcgaccggntgtccgagcgggacctcgcgtcctggaacgccatggtactcgcgctcgccaaccacggccgcgtccaggactcgctcgtccggttcgatcggatgacgagggtggagggcctggtgccaaatgccatcacgttcgtcgcggtgctcagtgcctgcaaccacggtggactggtcgacgaagggaggaggtactttgctgccatggtcagtgagcacgggatcaggccgaggatcgagcactacgggtgcatggtggacatccttgcacgggcggggttcatcgaggaggccctcgatgttgtggccgggatgaactgccgtcctgattccatcatctggaggagcctccttgacgcgtgctgcaagaggaatgctgggctggagctcagtgaggctatggccaagctggcgcttgatgtccctgacgacgctgtgagtggcgtctacgtccttctctcgagggtttacgcgtccgcgcagcggtggaacgatgtgggcatgatccggcaattgatgagccaagagggtttcaagaaggagccagggttcagctccattgaaatggatggatcagtgcaccagtttgtcgcgggtgacacttcgcatcctcagtcggaagagatatacgtgaagctggatgagatccaacagaggctcacatctgctggatacaagccggacttgtcggaggcacctatggtcgccgacattgaccgcaccaaaggcgccaccctgcgtttgcacagcgaacggctagccatatcatttggcctactcaatgcaacacctggggcacccattcggatcctgaagaaccttagagtgtgcaaagactgccacaccatcagcaagctcatatcgaagctatacaatgttgaaatcattgtgagggatcggattcggtttcatcacttcaaggatggatcatgttcttgtaaagattactggtgatccttgaacttgagccatgatgacctgcaatttggagagatcctgctcatgttctattagaagcgcctctgctggcatccaagagggagcttaatgcattttaagtgctgatggttacagcgaccttcaactttaagccgggagaaaagtggctggtggttgtttagcaagttgtgaattatagatggttgtccaccatgtgactgattatagaagctcatttgagcgttttttttcttgatctaacacagtaactcatacacaatgtattcatgtggaataattctttacctacattgcaatttgaattcttggcaatccaagaatcgccatcacctgtaccagggattcaagatttttccaacaac

SEQ ID NO: 70179 - DNA, 797 bp, Zea mays
  unsure (1)..(797): unsure at all n locations
  Clone ID: MRT4577_163995C.1
tcccatcttgcagttgcgtcccctctcgctcgcggccatggcgaaacctcgcggggcgccgaagctcctctacccccgccaccggcggctcctacggtcaccgatctcgcgctgcgcttgcctgttcctcgccttcgctgcgctcctcctcgtctcctccctgcaccaggtcgttcgggtcgacctactacgcccggacccgccccaccagttcaaggcaagtcagacagctacatgactgttagaagtaatggaggactcaaccaaatgcgcactggaatctgtgatatggttgcagttgcccgtttggtgaatgcaacacttgttatccctcagttagataagcgatccttctggcaagataccagtacatttaaagacatatttgatgagcctcattttattaaggctttggaaggagatgtccacattgtgagtgacttgcctggaactttgcaatctgctccaagagcccggaaacatttcacctcatggtccggtgcaagttattatgaggaagtgaaagagctctggaagaatcagaaggtagttcacatcccaaaatctgattcgcgtcttgctaacaacggtcttccaattgatatccagagattgagatgccgctgtctttaccaagcactgcgtttttcggatctgattgaggaccttggaaagaagctagtagagcgtctaagatctcatggaaaatatattgctcttcatctacgatatgagaaggatatgctagcatttacgggatgcacttacggtctgagtgatttggaagcaaatgagnt

SEQ ID NO: 70180 - DNA, 809 bp, Zea mays
  Clone ID: MRT4577_163996C.1
ccggccggggttcccatcttgcagttgcgtcccctctcgctcgcggccatggcgaaacctcgcggggcgccgaagctcctctacccccgccaccggcggctcctacggtcaccgatctcgcgctgcgcttgcctgttcctcgccttcgctgcgctcctcctcgtctcctccctgcaccaggtcgttcgggtcgacctactacgcccggacccgccccaccagaacacaggctgcggctctagaacaccagcagcagctccagaacaccggcggtgtctccaaaacactagcgacgagatgagctcctcatctcaaggtgtcaaatgatcaactgtgggcttctaatggttatggttatcatgcttgtgttacaccaacctctagatataaggttcaaggcaagtcagacagctacatgactgttagaagtaatggaggactcaaccaaatgcgtactggaatctgtgatatggttgcagttgcccgtttggtgaatgcaacacttgttatccctcagttagataagcgatccttctggcaagataccaggttctgagtattaggttatagtttagctattgccatatattctgtctgattgctccttatttttttgtttaacaactcccaccactatctacagtacatttaaagacatatttgatgagcctcattttattaaggctttggaaggagatgtccacattgtgagtgacttgcctggaagtttgcaatctgctccaagagcccggaaacatttcacctcatgggcccggtgcaagttattatgaggaagtgaaagagctctg

SEQ ID NO: 70181 - DNA, 1499 bp, Zea mays
  Clone ID: MRT4577_163997C.1
gggtacctcgaggccggccgggagcagctgcggacttgcgagcccaggcaggagaggactcgtccacatctattccttccttgttcggccgcccttcctcagttggggaaggacgacccaagggaggaggaggaggaggaggacagtgccgccatgaccggaggaggggaggagcaggggaggtcgctgttcggcgtgtctctgacaaacaggcccaggtggcagcagttcatgatctgctcctcgggcttcttcttcggctacctcgtcaatggcatctgcgaggagtacgtgtacaacaggcttcagttcagctacggctggtacttcacgttcgtgcaggggttcgtgtacctggcgctgatacggctgcaggggttcacggtgaagcagatggtgaacccgtggcggacctacgtgcgcctctcggcggtgctcatgggctccaatggcctcaccaagggctccctcgccttcctcaattaccctgcacagatcatgttcaagtcaaccaaggttctaccggtgatggtgatgggagccttcatccctggtctgaggcgcaagtacgcgttccaagagtacgtgtcggccgtgatgctcgtcgtcggcctcatactcttcacgctcgcggacgcgcagacgtcgcccaacttcagcatggccggcgtggccatggtgtccggggcgctcgtcatggatgctttccttggcaacctgcaagaagcaatcttcaagatgaacccggacacgactcagatggagatgctgttctgctccactgtcgttggccttccgttcctagcggtgcccatggtgttaacaggagagctcgtgacggcttggacttcctgctcccagcatctgtacgtgtacgcggtgctggtgttggaggcgatggccacgttcgtcggccaggtctccgtgctctccctcatcgcgcttttcggtgcagcaaccacagccatggtgacgacggcgaggaaggcggtgacgctgctgctgtcgtacctgatattcaccaagcccctgacggagcagcacgcgacgggactcctcctcataaccatgggcatcgtcatcaagctcctgccggagaacaaggagggacgcccgcgccggtcgcccaagaatgacgacgacgacaagccccgggagagcagagaagcgggggaggaaacagcatgactgctatagacccgacacccgaccccagcaaagcagaactgacgccagctcgatcagcaacagcaaccctagaagaaattctcagtcctccaaaacagcaatcccaggaggacgatgggatatacatgcaggatagagcactacatacagtaataataatctttttcctcgctcctcccctcgcttttctcatgtgctgtggttaatgttaagtgtgcacttcgctctaacatcttaagctttttataaaggcaagggccagaagtctgaattctaattagcgcaccaaaaaaaaaaaaaaaaaagcggcc

SEQ ID NO: 70182 - DNA, 573 bp, Zea mays
  Clone ID: MRT4577_163998C.1
gcagaaacaaatttatgtactaacataatttacatgagttaccaaagaatataaaaggaaatttcaaatgttgaaaaaaaagtacaaggatgcagcaaacacaaatgtgtgtgtttgcaatggttctagtggtacaattagtacaaaacatctgagcaaagaaaccagctgcagttcagatatctcatgattcaaacaagtaattcttgtagaagagagtccaatcagagtcatccgatgtgacaagctcgaatccttctgcattcatggactctgcaactgtaacaggatttggagaggccttgatgctatcattgttcagttcatcaccaatgcaactgagctcaacagagccaaagccgcatgcttcctgttggtcgctaccctcatgcaggcaacaaccattacatggctcaaaattggtaccatcagccaaagccttgtcagtgtgcaaaaacactggtgaatcttcatcgtcagatagccatttgcagcaatccaagtcacccatatcaaacattctgctgacaagcccctcccgccaagagatccgagtgtctgccatgactgatt

SEQ ID NO: 70183 - DNA, 276 bp, Zea mays
  Clone ID: MRT4577_163999C.1
gggacgccgtccccgtccccgtcccgacaattgtaatatgagaagcacagagatgggtgtggtcgcagtcacaatatggctgatccacgctgagacatgctgttcttggagcatctattcgaccaccaatgagagtttctacgagaccacgtgacgtattttttccacagagtatcaagcgaaggtgttatttgagctttactgcgcgaggtggaacagtcggcagacaaactgcaatccaaacgttgagccccattgacaatccacaaagggact

SEQ ID NO: 70184 - DNA, 186 bp, Zea mays
  Clone ID: MRT4577_16399C.1
ggggcgcggtttaaaattaacatgttttaatttttatgggttggagtgacgctctattttttttgtccaacaatagcaatttacatgaggagctgtgttgaacacaaaataactggtttttcttaaagaaatgtcaactggggagtttttatttttttactaaggatatagagtccagtatagggt

SEQ ID NO: 70185 - DNA, 2890 bp, Zea mays
  Clone ID: MRT4577_1639C.1
gggtaccccggccggcaccgctgcttttccaatccgtctacgccctcacgcacgcggcccaactagcctaacaaaccctagctagatttagaaaaaaagtttgtccccaatccgaaccgacgaggagctcgccgccgtgagatgtccgagtacgacgagcgctaccagggcaacgccgacatgcccgcagccgaaggcggctatccgcaggccgagtacgccgccgccgccgcgcctgccgccgggggttcgccgcccgcagacagcaagccctccgggttctccgaccacgccgacggccgctcctcccagcaccagcatgagacacaatcacatgacagtggttcctcgaaatctcgagaaagggaccgagaacgcgataagggcaaggatagggagcgtgacagggatcgtggccgagaaaaggggagggaccgagacagggataaggatcgtgaaagaagtgacagagacagagatcgcgatcgccaccacagggaccatcgagagcgcagcgagaaaagggaacaccgtgatcgttctgatgatcgtgaccgtcaccgtgatggtcgtgaccgccaccgtgatgatcgtgattctgagaggagaagagatcgtgacagagatggtcatcgtaggcatcgctcccgctccccttctaagagtcgtgaccgtgaaccgcagatctagatctcgttcacgctctcgatcaaagagcaagcgcgtttgagtggtttttgaccaagcacctccacaacatgcacttcctattgttgctgctggtgctatccctggtcagcttcctggtatcactgctcctattcccaggggttggggtgcttccgaacttgtataatttggctgcaggacagttcaacccccttgttattcagccacaagccatgacacaacaggctacccggcatgctcgccgtgtctatgtgggtggacttcctccaacagctaatgagcagaccgttgccatattctttaatggagttatggctgctattggaggaaacacagctggtccaggtgatgctgttcttaatgtctatataaaccatgacaagaaatttgcttttgtggagatgagatctgtggaggaagcaagcaatgcaatggctttagatggcataatgtttgaatgtgcacctgtcaagttaagagaaataagcgactgtagagatgcgatcggttgagctagcaagcagtgcaatggccctggatggcattatgttcgaaggggcaccggtgaaggttagaaggccaacagactacaacccttcccttgcagccgccctgggcccaagccagccaagccccaatctgaatcttgctgcagttggcctaacagcaggatctaatggaggactagaaggtccagaccgtatttttgtgggtggcctcccgtattacttcactgaagcgcaagttcgggagttgcttgaatcattcggtcctcttcgagggtttgatcttgtgaaggatagggaaactggtaactcaaaaggctatgcattctgtgtttaccaggacctcaccgtcactgacatcgcttgtgctgcactaaatggtatcaagatgggtgacaaaacccttactgtcagacgagcaaaccagggggcatctcagcccagaccagagcaggaaagtatcctattgcaggcacaacaacaggtgcagttgcagaaacttgtgtatcaagttggagcgcttcctacaaaggttgtatgcctcacacaggtggtaactgcagatgaattgaaagatgatgaagagtatgaggacattatggaagacatgaggctagaagcaggcaaatatggtaatttggtgaaagttatcatcccacgccctgaccccagcggacagccagttgtaggagttgggaaggtgttcctggaatatgcagatatcgatggtgctgccaaagcaaagacagcgctgcatggaaggaaatttggtgggaacccagtggtcgctgtctgctatgcggaggacaagtttgccaatggggaatatgatggatgaaaatcttatccctcttgaactatagcagtagccggtctttgtctttggctctatgctacctgcttgtttaattgcaacaaagatgaacggtctctcatttaagctgaacctctacctgtattgatatccctggattttttctgagccaccacctgttgtgatttgtgaacgttgtaagaataggtttctttgcttgggttcgcttgttgctgtcgaaaatatgtaacgaatgttattaataaagaatttcttgtatgacttttacagttataagtatggagcaggaccaatcgataagcgataagtttgtgcagtaagattttgttttgttaggttactttagtattgatcccaatccaaatcaatatatgttaaggtattgttcggttaatctcattacaaattgattggagtgtatcggaatggattttaacatgctatggatttaaacaaactcaatatcatccaatccacatggattgatgaagaaatgaataagccctaaggtggattgaggtcaatagtagaatacccaaactaggccttagttggaggatttgtacttgctactagggcagctaagatgaattcattcgctgtttgttctgggtccattgtttgctcaaattaacaggtgttgttatggtgctagagatggaaagacgtatggctcctagtttagaatgtgctgctgctgctgaggtaatatggaatatccgtatgatagcttgagtatgctggtttgggtttgtcaaacttggaaagtgtctacattcctcctgagtgtggcttcgtgcccagtaaatgatgtgatctcttatgacgattttgcagtgtgcaatgtcgtcattattat

SEQ ID NO: 70186 - DNA, 388 bp, Zea mays
  Clone ID: MRT4577_163C.1
aacaacaacaactactaccattcaaccagctaactgaagagaggcctgttgccttcttgacacaacaacagtcgctgtagtcctacctgcacgctatgcctaatgctgccacccttttacaccggcaacatgctgtgtatttgcagcaactaggtgggacatacacacagtttttttacgaatactctcaacatgaacaacttctttcatttaaccaattggacgcactcaaccccgctgcttatttgcagcaggagatactactaccatttagccagctagctgcaacaaaccgggcttgcttgttgacacaggatcaggtgctggctttctaccagcagggagggggtaaggcggggggcctgttacggctgcggggggggggggc

SEQ ID NO: 70187 - DNA, 347 bp, Zea mays
  Clone ID: MRT4577_164000C.1
ctgaagattcgaccaacagggcttctctacgtatactggatctttatgctccctcgacgactccggatggtgtgttctgcgatgattactgcgccatgttccccaaatgctttcctgaaccttctgccggggaactttgcacctgtcgagctctagtggtgtatggagtacaaaggtcatctcgcttggatgcactacgatatgaatctcggcatcgtccatacatcagactacatcgatgagcaatgctctggacaattgcgagagattctgatgaggagcaactacgtaatgaatctccggggagttccactacatccacatatacacgatgccctaggagacta

SEQ ID NO: 70188 - DNA, 630 bp, Zea mays
  Clone ID: MRT4577_164001C.1
caatgttttagccctcaatcttctttctattctattttatatctcacaactaaaaaattagtctgcaaccttgctgttagtgccttttcttatcttgtcaatgtgtccttccatcttgtattagtttgctttcgtttttacattaactagaacacatgctctggttctggtttcctctttttatgctacaggtttggttagctaccatatcactcgctatctacaaggttagttttccgcatcgagaaatattatgtgatattgattgtcgagttcttttttctgtttcaaaaaatttagtacttgtattcatagtaacatttgatgcattaatgtatacatttttattttcatatataggtttttgatcatctcggcatgttaaagaagaagaaatgcatctagctgtaaagaaaaggaaggcaaatatcatcttatgcaattatttgtgtgctgtcggcggcgcgctatggctaccggcaaagaactacctgatccccatggacggagctggaacctaatgcctggcaaacacactgattaacacagtcatgttaatcattgggaacgtgcagcagcagggcacccgtgtcagactgtcagctttgacaccgtcaagggcgccatcgt

SEQ ID NO: 70189 - DNA, 519 bp, Zea mays
  Clone ID: MRT4577_164002C.1
atggcttcgcaaggcaaccaaactgtggcacgttcagctacgaagctggtgctcccaatcacaggcggttcaagttctgaaccaaccgataagaagcagaaggaagtacaaagaatggtacaacatgttgggatgcagggacccttcatcaagtccaagtggtctcatataccaatcaccttctcacaggaagaccttcagctcaagtattatcatcacaatgttgcaatgattatatcttgtgttatcaaggggtttttggttcacaacgtccttgtagacacaggcagtgcaacagacattatctttgcaaaagctttcaggcagatgcaagtgcaggatgataagatacatgatgcaacacaccacctatgtggcttcagaggaagacaaatagtggcattcgggaagataacaatgccaatcacttttggttatgtttataacacaaggacaaaccaagttgtttttgatattgttttctggaatacgcaggagagctgcgcatctttgtattaa

SEQ ID NO: 70190 - DNA, 264 bp, Zea mays
  Clone ID: MRT4577_164003C.1
gggtaccggcgcctccctcgagtttttttttttttttttttttttttttttttttttttttttttttttttttttttttttttttttttttttttttttttggcccctataaaaggatttttaaaagaggggaagaccttcagtggcatgaaacccccatcccattatagagaggggtcctaaaaccctaatcaaaggaagaaggggtttaaaacccttttaatgacaatgaaatgggggggaactaaaaggggatttgaaggg

SEQ ID NO: 70191 - DNA, 479 bp, Zea mays
  Clone ID: MRT4577_164004C.1
gtagttgatttttttatttgtatttttccacttcagtagatcgcatcggttaaattatatacaaaagaatcgttttccagaattaccgtagatacacatatcttttcgtttcttatatcgaagccttgattctacgcttctttcctactaagtttaaataataaatgtgaaatttaataaacttgcacaataagtatgcagtgaatgaagtgaagactctccactgtaccacaattttgataactatctcgaagtacagacgagatcagtttttgttttttttttaaaaccgccgtaatatccggcacatattttcggatcttttcaagtcgacagtcttagtggtgttttttagagcaccgaaattcctagaaatgaatactggagcttcatttgagtcttcgaggactcttggagtttctaccccgagacaattgccctaatgagggattttgtcttattttattttcgccattttt

SEQ ID NO: 70192 - DNA, 748 bp, Zea mays
  Clone ID: MRT4577_164005C.1
aatcttgctgctgctgctgctaccacactaccagccagccagaggcagcctcctctccccggaatggaggcgtaggagggcgtccgagccagacagacagagagcgggagctagggttccgccgcatcctcctcttcctcctccgggtctgaagtctccggcgggcggcgggctaggaggcggcgacgatggggaagtccccggccaagtggctcaagtccgtgctcttcgggaagaagacctccaggtctggctccgccaaggccaaggatttatcgaccgggagcaacagagggtatgttgctgctgggaaggagcccgggttctcggagagctccccggtgatctccgagccggtgctcgtcaccccgcgcaacaacgacgccgtgccggaggcggggaagggtgagaattccagctcgcaaggcgaagcggtggtgcagcacgaagtgaaccatgatttggataagcagagcactgtcgggtctgatgtgctgtccaatgacccggagcggctgaaggaagaacaagcagccgtcaaggcccaagctgccttccgaggctacctggcacgtcgggctttccgtgcattgaaaggaatcatacgacttcaggcgctgattcgtggccatcttgtaaggaggcaagctgcttcaactctccgtgctacatggttgattgtgaagttccaagctattgttcgtggtagaaatgtcagactctctagtgatgcaattcaattcagttg

SEQ ID NO: 70193 - DNA, 381 bp, Zea mays
  Clone ID: MRT4577_164006C.1
cccacgcgtccgcagctagttgctgcctacccccaacaatttcttccattcaacggactagcagcattggactttggtggttatttaccggaagaaccacttctaccattcaacccagttggttgtgggaagccttgttgctttttggccacaccaccagtggtggcggtctacctggacgctttgcctaacggttgcacccttttaccactggaacaattggtggcatttcaaccacttggtttgacaaaactaacaagtggtctaccaccacccattattgggggggcccttttttaaaatggttatgaagtataagtcaataatgaaagtttttggatggtggttgggggggtccaaaaataaaaaaggacatttctt

SEQ ID NO: 70194 - DNA, 665 bp, Zea mays
  unsure (1)..(665): unsure at all n locations
  Clone ID: MRT4577_164007C.1
ggccgggnaaaaaaaaaaaaaaaaaataaaaaaaaaaaaaaaaaaaaaaaaaaaaaaaaaaaaaaaaaaaaaaaaaaaaaaaaaaaaaaaaaaaaaaaaaaaaaaaaccctctcccaaggtggcctggggtttggttttttggtttttaaggaggggggccctttgttgtggaaaaagaaaacattgggaactccttggggggtttccaaaaaaatcaggttgggggggaaggggggacccattttttgccccccttgaatggaagccaaaatggctggtggtggggtgggaaaaaaattccttaacaaaattgggccagttgggacccttttaaaaaaacgggacggttaaaaaattattttttccattttttaaccctttaaaaaaaaaaatgggccctggtggaattttaagttggtttttggggggaaggggaaactggggggaaaattttaggaacggggagaaaaataaggtaaatttaacggggctaaaaccattggggggaaaaagggaatggaagggatttggaaaaaaaaggcaaaagggaaaaaattggggtggggcccaaaaaatttttaaggggaaaaattttcaagagggggcccccaaccttgttttggtttgggggttggaaaaggaaaccaaacttttatttcaaatt

SEQ ID NO: 70195 - DNA, 2365 bp, Zea mays
  Clone ID: MRT4577_164008C.1
tcctggtgttactaacttactattgttcacattaatgtgcattatgttgacttctaaatttcccgggcgaagcctagacgccggccccaaccactctctcctacgccgccgccgcgatcccgtcgcgatgagccacgacaccggcgccggcgtggagtttcggacctgctggcccacgcgctggccgcgacgccatctccagattgctcgaggcggtcggggctcgagcgtcagtgacgaaaggtttcgccagcgccgagcctcaccatcagccacccgtccaccaccacccagcccatttctcgtccccaaaatttcgagtttcgaaaccaaaccaaacgaagcgacactgcacgtgtacgaacctacgacagctctctacttccctcgcgtcctctccatcgagagctgctcctgctcgtctcctcccacaccgcgcaattcgtcgggattcgggaaccctagcgccggatctccgcggcagcggcggaaatggcgaatcccctagcggggctgcaggaccacctcaagctcgcgcgggactacgcgctcgagggcctctacgacacctccatcatcttcttcgacggcgccatcgcccagatcaacaagcatctaactactttggacgatgctctgattcgtacgaaatggatgaactgcaagaaagcaatctctgaagaagtggaaattgtgaaacagttggatgctcaattaaagtcccttaaagaagctcctgggacaaggcggtcatcatcacctcctattcggtctaataaatcatttgttttccaaccgttggatgagtatccaacatcttcaccagcaccctttgatgatcctgatgtgtgggctccaccaagggatacaccaacccgaagaccaacaagaggtcaatctagtgcaaggaagtcctcccaagatggagcctgggcacgtggttcatcaaggactggaacacctagtcgaagcgcaaaacctaatgggattaaaggaggtgctgttaaatcaactgcctctaacagttctgtaaggaaagggaaacaaagttcaaacaaggctgattcaacgagtagtgatgctgaggaaggtaagtccaagaagggtcagtatgaagggccagatatggacttagctgcaatgcttgaaagggatgttctggattctactccaggagtaagatgggatgatgttgccggacttagtgaggccaaacgactcctcgaggaagcagttgtgcttcctctctggatgcctgaatattttcagggtattcgtcgaccttggaaaggagttcttatgtttggtccaccaggcacgggaaagactcttttggcaaaggcagtggccaccgaatgtggaacaacattctttaatgtttcctctgcaacactggcctctaaatggcgtggcgagagtgagcgcatggtccgttgtttatttgatcttgcgagggcctatgctccaagtacaattttcattgatgaaattgactccttatgcacgtcgcgcggtgcctccggcgaacatgagtcgtcaagaagggtgaagtctgaacttctagtgcaaattgatggtgtaaacaatagctccaccactgatgatggccagccaaaaattgttatggttctggctgctacaaattttccatgggatattgatgaggcactgaggcggaggctggagaagcgtatttatattccacttccagattttgaaagtagaaaggcacttatcaacattaatcttagaacagttcagatagccgcagatgttaacatcgacgaggttgctcggaggacagaaggctatagtggagatgatctgacaaacgtttgccgcgatgcctcaatgaatggcatgaggcgcaagatagcaggcaagacccgcgacgagatcaagaacatgtcaaaggacgagatagccaaggacccggtggccatgtgcgactttgtggaggctctggtgaaggttcagaagagtgtctcgccttcagacatagagaagcatgagaagtggatggctgagtttgggtctgcctgagacctcggccatctgcttgggtcctgttcaaacattcgttttgtgtgggttgacacggcattccgtagcaatgatacggtgttacccgccggtggtcttgcttcatatagaccagaggcacgagctatcttgtctgtttccagtgatgctaggaattgagttcacgatcgtttcagttcttggtatatgcactttctgctgtcaaacgtatctcatcaagtagccgtggccgcctctatttccagatgctccgtgtttggttgaaggaatatcacaggaaccaaagttttagcgtgtttcaaaaaaaaaaaaattacaaaag

SEQ ID NO: 70196 - DNA, 2172 bp, Zea mays
  Clone ID: MRT4577_164009C.1
ccttcgcgtcttctcaagtctcgtatactcatgcagagagagacacggaggacctgggtttggttgcactgcttgactcgctccgtgttccaagcgccttttgagcattcaggcatatataaaattcctctttttacactacatccatccccgcttgattagcggcagccactctctccctctccactcttggtgtccgagtcccttggccgtacgctctgcctcactcctccgtttcttgcttctcctgccgccggcgtcggagagcgagcttctcggcgggcggcggcggcgcgcggcgccgggtgcggatcggccgcgggtgcatggtggaagccgccgccgggcgccggtcaggcaccagccgtcggcggcctagcggcagcggaggggagcaccagcgcctggttgcgctcgccgtcgccgcgcgcgtcgccatggtcagcacccggtctgcgggtccagcagtggcgggaggagatggagcgggagctgctggaacaggcgccggccccgctgccggtagaggacgatgcatggaggacttcttcgactgcctcctcggcttgctcggcgcgttaggcatgacatgggctacggcgcggccccagcggcagccgctcccgccgctgcctcgcggggttggggcggggcctgagccaaccgacgcccggcgtttcgcagcggcgctcagggccacccggatcaatttgttgtgctggccgcctgcgccgtcgcgtcactgtacacgctgcagggcaagaagggcgtcaaccaggatgctatgatcttctgggagaacttctgttcaagagatgataccatcttttgtggtgtgtttgacggccatggaccttatggccatttggttgccaagagagtaagagatctgctgcctctaaagttaggagaaggtttgacgacggaagatggtagagtaacatccactggcaacattaagctcaacacacatgatgtagcttcaccagaacacatagacaaaggaagtactgccatttcctctgaagctcagcagaatggagagtatccagagaccttcccagcattgagaacttcattcttgaaggcattccgtgtaatggatagggatctcaaattacataaaagcattgactgctttttcagtgggactacagcggtggcagtgatcaagcaggaacacaatcttataattggcaatttgggggattcaagagctgtcttaggcaccagagatgaaaataaccagcttattgctgttcaattgacagttgatctcaaacctaacattccaagcgaagcacagagaatcaggcaacgcaggggcagaatattcgcgcttcccgaggagccggaggttgctcgtgtttggcttccaaagtacaactctcctggactggccatggctagggcatttggagacttctgtctgaaggaccatggtgtaatttctacgcctgacgtctcctatcaccacatcacggagaaagacgaatttgtggtgctggctactgacggggtctgggacgtgctatcaaacgatgaggttgttagcactgtctgccgagccacatctcaggcctctgcagcccggtttctcgtcgagtcggctcaccgcgcttggcggactcggttccccacttctaagatcgatgactgcgctgttgtctgcctgttcctgaacacagacaaagcgagcgaatcgtcgagttctttggccaagaacttggcagatgctgtagaagttagcagtgctgggcgcgccacaactgtccaggtgagcgctggtgcatctacagatgttgccgccctggtaccagtaccagatgggaacgaggtgtctattgctgaaaccatcacaaagctggtcacgctcatggatttgcccaacgatagtagttgaggcagagagcgggggcatgaacatgctgtgctgtgcctgtgattggcatttgtggagccaagatatagcacgtcggtgggtttctgcttgctatttttttctggacgcaagtgtggttattatatgcgacattagatttttataggagaaacataaattgtagggtacttgaagttttggctttaaacatttatgttaactagatatctgtatcattctttggcctcgttgctactcccaaaaaaggttttaaagcttgttgatcccat

SEQ ID NO: 70197 - DNA, 468 bp, Zea mays
  Clone ID: MRT4577_16400C.1
tgcgttgcccccgcccgcctctgtcgtctcccgtcgcgccgcgcgcaggctgtccagcatgataagtagctgccgcgccgcgccgtaatcgatccctcctcacaacacaggacgcaacgcatccaacgcgccccgcccgcccggttggattcgattcctcccaaacttgtctcgtccccaagcagcagcctttccctctctttcccatggccaccaagcccggcagggcggccgccgcggtgctgctcctcaccctgctcgccgctctacacgcggccgcccgcaacaacaacaacaacaacgagaaccgcaacccgggcggcggcggcggcgacccgggcgccttcttcgccgggatgccgcggttcagcggcggcggggtgccaggcggcggcgggttcttcggcgggtggggcgagggcgggctcgggtaccggcgcgatgctgtgtggccgccctccacggcgt

SEQ ID NO: 70198 - DNA, 679 bp, Zea mays
  Clone ID: MRT4577_164010C.1
cgaggccggccgggatagaagccgccactcacgcctggaagatctggaggcgtggcacggcagccgtcgcccgccacaccagcagcgaactgcttcccggtgcccgcggcggcgaagcacaggagagaggcggcgagtgaaaccgatgacgccgccgatggatccgcccgacgtcgagatggagatggagcccgcgccccagcctccggctccgacagcggtcggggaggggtggagcatgctgtcgcgcgcccgcgggctgctcgaggagggcaaaccgtccctcgctctgcaggcggcacagacatatgtagttgctgagtaatgaaaagctgttgggttgtagttggtagacccaagaaacacgaactcgactcgtccaaggtggaagttgaacaggacacagaagacagaacacaagaacactcgtcgttttcgttggacggactgaatagccagcggcaccgccttttgggtgttttcttttatcctatcgccgagacagttgcatcgcccagagcccgatccttctgccatatccgcgtcttccgccatgactcagcatgaaacacgcggaagccgctggagtggagaaaccggcaaacgcgcccacgcacgctcgatgtgcgcggtgaccgcgctccgacgtggctcatgacatgccctggcttgcgcccat

SEQ ID NO: 70199 - DNA, 2467 bp, Zea mays
  Clone ID: MRT4577_164011C.1
attccagactcgcagtacagtacacacagcaaaagcaccacccgggccggcttccgctagactagattagtgttgctaagagcctttttaactacgggattacgcaagtctcgtatactcatccagagagagacacggaggacctgggtttggttgcgctgcttgactcgctccgtgttccaagcgccttttgagcattcaggcagatataaaattcctctttttacactacaatccccgctgaatcagcagcagcaactctctccctctccgttcttggtggtccgagacccttggccgtacgctctgcctcactcctccgtctcttgcttcccttgccgccggcggcgcgcggcgccgggcgcggatcggcggcgggtgcatggtggaggccgccgccgggcgccggacaggcaccagccgtcggcggcctagcggcagcggaggggagcaccggcacctggtcgcgctcgccgtcgccgcgcgcgtcgccatggtcaccacccggtccgtgggtccagcagcagtagcggaaggtgatggagcgggagctgctgtaacagatgccggcgccgctggcggtggcggacgatgcatggaggacttcttcgactgcctcctcggcttgctcggcgcgttaggcatgacatgggctgcggcgcggccccagcggcagccgcgcccgccgctgcctcgcggggctgcgggggcggggcctgcgccaactgactcccggcgtttcgcggcggagctcagggccacccccggccggatcgccggcaatggcgcctgcgccgtcgcgtcactgtacacgctgcagggcaagaagggcgtcaaccaggatgctatgatcttctgggagaacttctgttcaagagatgataccatcttttgtggtgtgtttgacggccatggaccttatggccatttggttgccaagagagtaagagatctgctgcctctaaagttaggagaaggtttgacgacggaagatggtagagtaacatccactggcaacattaagctcaacacacatgatgtagcttcaccagaacacatagacaaaggaagtactgccatttcctctgaagctcagcagaatcagagtatccagagaccttcccagcattgagaacttcattcttgaaggcattccgtgtaatggatagggatctcaaattacataaaagcattgactgctttttcagtgggactacagcagtggcagtgatcaagcagggacacaatcttataattggcaatttgggggattcaagagctgtcttaggcaccagagatgaaaataaccagcttgttgctgttcaattgacagttgatctcaaacctgacattccaaaaccacgccacgcggagaatcagatactaccatgtgatgtgaagaaggattgtctaaacaatctatgcgccatgaacctcttagaattttatctattgtatcaatgaaattgctacgaaaatctcatcgggttgatcaaatcaagccgattttgagacattccaagagcctctgttttcaccgtcaatcatattgacaatcgcgtcaggtgaatcacagagaatcaggcaacgcaggggcagaatatttgcacttcctgaggagccggaggttgctcgtgtttggcttccaaggtataactcgcctggattggccatggctagggcatttggagacttttgtctgaaggatcatggtgtaatttctatgcctgatgtttcctatcaccacataacggaaaagtgaatttgttgtgctggctaccgatggggtttgggacgtgctatcaaatgatgaagttgttaatactgtcagccgagtcacatctcgggcctctgcagcacgatttttagtcgaatcagctcaccgtgcttggcgaactcggttccccacttctaaagtcgatgattgtgctgctgtctgcctattcctgaacacaaatgaagcaagtgaatcttcgagttccttggccaacaatttggcagatgctgtacaagttagcactgctcagtgctccaaaactatccaggtgagcgcacctatagacggaaacgaggtgtctgttgttgaaacgaggtgatttgcacaatgatggttgaggcgcaaagtgagcttgcatgctgtgcctgtgactgagatctgctgaacgatagtagttgaggcagagagagcgggggcatgaacatgctgtgctgtgcctgtgattggcatttgtggagccaagatatagcacgtcggtgggtttctgcttgctatttttttctggacgcaagtgtggttattatatgcgacattagatttttataggagaaacataaattgtagggtacttgaagttttggctttaaacatttatgttaacaagatatctgtatcattctttagcctcgttgctactcacagaaaaggttctagagcttgttgatcacataattttattctgatggtcat

SEQ ID NO: 70200 - DNA, 140 bp, Zea mays
  unsure (1)..(140): unsure at all n locations
  Clone ID: MRT4577_164012C.1
cgcaaccagaccaaattcccgaaagcccnccaggcccgggggaagacgacaggggtgtggcccaccctagctggagcatcactacaagacagcaagaaaacgacccgcactcgccgaactcgcctatgcctaacctcacc

SEQ ID NO: 70201 - DNA, 677 bp, Zea mays
  Clone ID: MRT4577_164013C.1
atcccttcttgattagcggcagccactctctccctctcactcttggtgtccgagtcccttggccgtacgctctgcctcactccgtctcttgcttctcctgccgccggcgtcggagagcgagcttctcggcgggcggcggcggcgcgcggcgctgggtgcggatcggccgcgggtgcatggtggaagccgccgccgggcgccggtcaggcaccagccgtcggcggcctagcggcagcggaggggagcaccagcgcctggttgcgctcgccgtcgccgcgcgcttcgccatggtcagcacccggtctgcgggtccagcagtggcgggaggagatggagcgggagctgctggaacaggcgccggccccgctgccggtagcggacgatgcatggaggacttcttcgactgcctcctcggcttgctcggcgcgttaggcatgacatgggctacggcgcggccccagcggcagccgctcccgccgctgcctcgcggggttggggcggggcctgagccaaccgacgcccggcgtttcgcagcggcgctcagggccacccccggccggatcgctggcaatggcgcctgcgccgtcgcgtcactgtacacgctgcagggcaagaagggcgtcaaccaggatgctatgatcttctgggagaacttctgttctacagatgataccatc

SEQ ID NO: 70202 - DNA, 697 bp, Zea mays
  Clone ID: MRT4577_164014C.1
gtttccattcgcttctctctctcgattctctctaacacgttatcacgcactttgctctgccgagagcgaggaggccacaagaacaagtgcctcgctgcaaggcgacggcaccgtccccggcacggactggaaggaattaccgcaactcacttcaataattcgtcatcggcgatgcccctaaacaaagaccatccagcgaatcgtttctagcaagagcagaagaagagaagatcagcaatagaaaaggtacagagatcgtgccaattctcaaagtgaaggactccatccacaggatactcacgggacaacagcgccctcaaccatggccttcggcttgatttcacatggcttggcttggcggcgaggccgtgcccagcccgcctccatgcgacacggccgctcatggcgcaatggacggcacccgtcccggtggcggcgcaaagcgcggctccctcgcgagcacggcgcaacaacgcccacgtcggcaacggccgacgcacggcggttgactcatcaggatgcggccgcacccgacaccacgcctccctgccggtccttcgtgaggacgccctccggcgcacgcggggggaagttcgctccatcctgccatcgagacggcggaagccacaggcgcggactcggcgcccggcaagcccttcgccaccgtgctgttccccagcgacgtatacgaatcatc

SEQ ID NO: 70203 - DNA, 335 bp, Zea mays
  Clone ID: MRT4577_164015C.1
aaaaaagaaaccccaaaatgggtgggacccgattttccattgggtttttaggggcctaatcctccccattaaatggaattatcaattggcctaaaaaaaacttgttttaaaaaagggggtgacccttgccttggcccccaccaaaaaacccaggtttcattctttgcaatccaaggggacccccaaacacaatgttcttgggaggaaacttaaattaaatttggccccccaaaacagggtttttttcgagatttaaccccttggaaaaagggggttccaaaaacttggggcgaaaaggaaaaccccctttttttttaaaaaacccgcccccctgg

SEQ ID NO: 70204 - DNA, 444 bp, Zea mays
  Clone ID: MRT4577_164016C.1
cacacgcgtcaacacacgcgtccgggatgacattccaacttggcggaaagtgcgctgtggtttggtgtctcgttttgaacttgtgaataataaagatgcctcctgttgcaccattgtttggaatctcaccaaagacagttaatcgtgaacttgagcactggatgagcaacctaaatgaagtccaaagtgtgataaatagtgtcgaacccaagttgaatacaactccagccaagtggaaagctctctcccaacacgtgaaagaagtctctgaagagttgagtcatattcaataaggaggatcctcattatgatgttattgtggcaggagtacaagctagtaaaaattttgaaagtgcagaagcagacatttccaaaaacgatggtattagagaacgagcgatgacaaggttgagaaagtatcgtgacgaaatcgaatctcttcgt

SEQ ID NO: 70205 - DNA, 275 bp, Zea mays
  Clone ID: MRT4577_164017C.1
atcacgtacagctcagccctccaccggtacagacggatcagtcggatcgagcaacatcccgggactgctctgtcaccaggtctttcggacgatgttctctcgccaggagtaaccagccatatccagcttaactatgagacgctaacacggctcctaacgctgctcctgccaagaagggatatgccaacacccaggccttaaaagtagccaaagctgcataatcttgatcagaccattggaccatgcacatacgaacgtacgtgacatttcaccac

SEQ ID NO: 70206 - DNA, 699 bp, Zea mays
  Clone ID: MRT4577_164018C.1
gcttcgaagaaggcgacgaggtcgtggtacaggcactccgttcgccggactccataataccaggctcaacaattgccctcgacaagctcgactctgaaatgcctgaggttgcaggagatgacaagcccgcgaaacggccaactgccgaggagtttttctttcggttgtaccagtggagattgaacttgagaacaaggagtgtctcaggggagtatctatctgggacagactattcgctggagtttccgatcatcagtagccagtacacgggcttgcagcacagatacgcctatgcgcaagtggtggactcctgtggcaattgtgggaaagtaaacccaaagtatggaggatttgcaaaattctaccttgacgagagaagcaacgcagagataccaggtgctagccttgtaaaaacgcaaaaccattggcttggtaaacacgagttttgctttggagcatcgtttgtaccgaaagctggtgggtcacatgaagacgatgggtgggtagtttcatttgtacatgatgaggaaactaatacatctcaggtgcacatagttgatgcgaagagattcgaggatgctcctgtcgcgaaaataacgttgccacgaagagtgccttatggctttcatggaactttcgtcagtaagaaaatgaatgatgtaatgtgattccatcagatgttaaattttgttttctctc

SEQ ID NO: 70207 - DNA, 346 bp, Zea mays
  Clone ID: MRT4577_164019C.1
tcaggcggcgggatacatttcaagagagttgtacaattccctcttccccatcggtcgagactgagcttaatgacaatgtcatctacaccaatgtcatccacccacgataccgtggaagtgcttgcaaagagagggcgtgaccatactgaagaatgcggtggagatggtacggtgcggagcatgagtccttgatatgccccccagcacggcgaggacctcggtcggttctcctgggggcgcgcgagctacttcagcagcaagctttcccgtgattacgggatgggaacaagtggtggtcaccgcctgctgcggagaaattgggcaagaagactacagtgtgagaggc

SEQ ID NO: 70208 - DNA, 2169 bp, Zea mays
  Clone ID: MRT4577_16401C.1
ttgggtacctcgaggccggccgggattggcctctgaaactgctcttctttcatgtcttaagcctccactaccaaaatcaatcttctatgaaggtttagagcatgctcaggacattggagacattttactgaagagcagtggcaagaaagaacatatagtacatggtggaagatatcctggtacagcacaaagtggatccttggccaaccttgaagatatcctgcgaccgaaaggccctaatatttccagcagcatgtccttgtatgtcaaagactctgtttcttttgaaaaatcactatattctggttttgctctgcatgcatctgctgcaaatagctccttttatgatggcttatctaaaggaataccatcatattctttttgtactgataataagcggggtttaggagaaacacacatggtccctgattcatcagtgtataaagcttcaataaggctaccttggttggaaccaaaccgtcctggcatgcagaccagagatgatcattttagtagcacgcgacgagatttcagcatcaatgactctatgaagagcaattcctctttgcaaggggatatcattccgaactctgatactggagggttgcctttctccagatcagcagtgaacttggagactggatggaagcctcgtggaattctagtggcacatctccaggagcatcgcttttctgtcaatgacattgccgtgtcgaatgacaataccttttttgtgactgcttctgacgactcgagtgtcaaaatctgggatacaagaaaattggaaaaagacattgctttcagatctaggttaacatacagcatgggtaatagccgagctctatgtacgacaatggttcatggtacttcacaggttattgtcggtgctagcgatggaacattacacttgttttctgtggattgtgcacgcagcgttgggagtgttgtggaaaggtatgctggaattgttgatgtaaaaaggaacgagattaaagaagacgcaattctcagcgttgtaaattgttcaaccgacagctttagcccgactgttcttttcagcactgaacattgtggcatccataaatgggatacaagaaccaactcagaatcttggtcttttaaatcctctccggaggagggctatatatcggcacttgttgtgggcccgtgtgggaattggttcatctcaggttcttcgagaggcgtccttacactgtgggataataggtttttagtacctgttaaatcgtggaattattcaacattaagcccaatagagaaactatgcttgcttatacctccaccaagttcgatatcctctgctggaaggccattagtttttgttgccgctggatgcaacgaagtttctctgtggaatgctgagaatggaaactgccatcagatgtttagaacagcaagcactgacaatgaagctgtgatgtcaaaggcgccatcgaggcctgttaacaagccagtcatcaaagatataaggcgagcaggcaattataagtacagaatcgatgaattgaatgacccacctgtacgccatccagggatacgttctttgctgcccttgccaggtggtgatctattaactggaggaacagatttgaagattcgttactgggatcaagcaaggcctgagcaaagcttctgtattgctggtccctcggcgaaagaagtccgttcggcaaaaggagatatcttggagaaagcagttggaaacgatgagtcttacgatataagatccagttttggaatacaggtcgtgcaggaaatgtacaaacagagtagctcggtctccggtttgacgcccaagactcagctcgcggtggcagctgcagattctgcagggtgccatcgtgacgcaatactcgcgttggcatccttcaacttgtctagccagagattggtatcaggcagcagagacggcgctgtcaaagtgtggaaatagcttctccagcatggggtaagattacaagtccacaggcgtgtacatattttggcctgtctagtgctcatacagtacatatgccactagttattgctgtacagaagattattccgatcaatacaagtcaaatttgacatgtaagctttcatcctgtgtgacctgacctgtgtatataaataccaatggcttacctcatccggtgtgaccaccaagaa

SEQ ID NO: 70209 - DNA, 374 bp, Zea mays
  Clone ID: MRT4577_164020C.1
cccacaccatcgatagtgtatttctctatcatcatttgataatcacacaataccgaggcggtccacatgcttatgtggctgccatatccacatgtgttcataccgcgacaatgatgactcactgcatacacactcttatagtgttgccttttgcaacatacctggcatcactcttagacaaagcacttgcaaacccacctcttaaccatacatgctatagcaagcatcacctactaagcatcctgcctgtgtcaccctagtttcttaaacttaaccagccctatgttttgagccgtctttgcttcataccataacatcacaacatttgcaatatctctcacttcttgagatcaaactacaaaccacttactaca

SEQ ID NO: 70210 - DNA, 195 bp, Zea mays
  unsure (1)..(195): unsure at all n locations
  Clone ID: MRT4577_164021C.1
tacgcctgcantaccantccnnaattccctnttcgagcgacgcttacgggacagcgcctaaggcagcgacttcaagctcctgtctggggtcagcggctgcgtcccgctgagcgtggtctctgggggggcggggtcactcttcttatggacctacctcctatcaaagtagcagcggcggtttttttttacccttct

SEQ ID NO: 70211 - DNA, 289 bp, Zea mays
  unsure (1)..(289): unsure at all n locations
  Clone ID: MRT4577_164022C.1
acaagcaacatagaaattggaatccagtagcaacaacagagcaacaatggcgaccaagatattttccctccttatgctccttgctctttctgcatgtgttgcttacgcgacanttttccctctatgctcacangctcctattgcttccctttttcccccntcccttgcatcaatgattgcttcagtgtgtgaaagcccggctcttcagtcttctttttttccacaagcaatcgcagtaagccacatacctttttgacccttgttggttccacagtcgcccgccctattt

SEQ ID NO: 70212 - DNA, 164 bp, Zea mays
  Clone ID: MRT4577_164023C.1
cccacgcgtacgaccacactttcaaggacaagtggacggacgcgagggccgtgtccttatactactacgcaataatctaccatatcctaaataacccgaagtcctaccgattcagtgtttccaacctttgatgttgaaaaatcttttagtaacttgaccataat

SEQ ID NO: 70213 - DNA, 567 bp, Zea mays
  Clone ID: MRT4577_164024C.1
atttcaaccatttccatctcttcgtgtcacggagcgtactagcatggcagaagcgttggtgcctgggacttgactaacaaacctgaaatttaaatttgttggttcctgcaggtacagccttagctacatacctttcgcaaggtcgattgtgtcgaaggtgatgacatcgtgcttcgacactgatttctagaccaatcttcattgcctatgtctttcactgtggggcgagtagatattgtaatctagtgacaagtgaagaggaagtggcagtgaccttaaattacccctccaacaggctcttgttgtaatcatcgtgaatcgagctgtgcattttatgctaagactagaagatcgtgttgatattgcatgttctcttgatgcatgtacacttgcaatccacgcttcgctttccatctgcgaggagtgcccagcacagcgcagcacatgcatagaacaacaatattgttctgccatttgctgaatattgatgtagattccatggtaccctggttgtatgatatgcttgatctgctgaataccgttgatactgcgtattcttttgcctcc

SEQ ID NO: 70214 - DNA, 1625 bp, Zea mays
  unsure (1)..(1625): unsure at all n locations
  Clone ID: MRT4577_164025C.1
atttccaccatttccatctcttcgtgtcacggagcgtactagcatggcagaaacgttggtgcctgggacttgactaacaaacctgaaatttaaatttgttggttcccgcaaaactgattgttaggcctagttacaccattggggacaacccgtctgtcggcacataggctctgggctctggcgctaatgttcgagcaaggcgctgctcctgttgctgtagaagggattttttgaccaaccctccaaccggtgcggcttcgatctttcctctcctatcacctgaatccctcgagtattcatcgccggcgcagcgcggtctcttcccttcgctggagaagggggaaggggacacgaacggagcagaaggccatggacacgatgcggggcgcgctggagcgggccaagatgctggtgggcatggaggtcgacgaggagtccgcgttgccaccgcccgaggagcagtccttcttcgacgacatcaatcggcactgcaccctcaacaccactcagaggctctatggtttcgcgatatgcttggctgccggactgacgtgcacattcttgtcaatgcttgtcttcttcaatccagtgaaatttggggtagcattcacccttggcaatttgatggcccttggaagtacagcatttctcataggccccaaaagacagtttgatatgatgcttgattctgtgcgaatatatgccactgctatatatattgcaagcatcataattgctctattctgtgctatctacgttcgcagcaagctgctgactctagtggccatcattttggaatttggtgcccttatttggtacagccttagctacatacctttcgcaaggtcgattgtgtcgaaggtgatgacatcgtgcttcgacactgatttctagaccaatcttcattgcctatgtctttcactgtggggcgagtagatattgtaatctagtgacaagtgaagaggaagtggcagtgaccttaaattacccctccaacaggctcttgttgtaatcatcgtgaatcgagctgtgcattttatgctaagactagaagatcgtgttgatattgcatgttctcttgatgcatgtacacttgcaatccacgcttcgctttccatctgcgaggagtgcccagcacagcgcagcacatgcatagaacaacaatattgttctgccatttgctgaatattgatgtagattccatggtacgatctgttcaattcatatatcttcaccctttgttagaatctatttttttctgccttagattttggttttacagtaaaattgtatatggacaaaatgttagaacttcttcccaacgtaacccaaaccactgacacttaatgtaaaactaactgaccttgggcctaaacattttgcatttaggtccctatcaaaattaacttttagtgacactggctttgggagggtnnnaaaaaaaaaaaaacaaaaaaaaaaaaaaaaaaaaaaaaaaaaaaaaaaaaaaaaaaaaaaaaaaaaaaaaacacaaccaaaaacaaaaaaaaaaaaaaaaaaacaacaacaaaacccaccccacccgcgaaaaaaaaaaaaaaaaaaggccccttgggggggggcccctttaaaaaaaaggacccccc

SEQ ID NO: 70215 - DNA, 782 bp, Zea mays
  unsure (1)..(782): unsure at all n locations
  Clone ID: MRT4577_164026C.1
agagcaaagaatctgaccgagggcaagttgccaaattgggacgtcgtctccgactccgacgctgctcgatcgagcaaaccgacaaccccctctccgccgccgcgcacctacgctgccctccgtttggtcgtccgcccgcttcgacgggactggtccggccgtcggcggtcggcctgtcgacccaccagcccgctcccgtggcaggcgagttcgtccatcctccgaccccatccgtcggtcgccgggatggcggcgtcgggcgggaacgagccggaactcgccgtggtaacagatgtttgtaatgcttcaagcacacctcaagaaaataggcttgctggtgacagcaacaccatttcagaaaatgcccaggaatcattgagttctttaccagaacaagagtcaaatgatgctagtgttaacacagaaaagcaggaacctggcatttcaaaatgcaaatctgtggacgaaattccaaaaacagtaactgtaaagagatgcaagaacgttgattcaaaaaaagtctcctcaaataacaataataatccaagatttactggcagtccagctctgaaaaagcatcccacaaagggggaccatctttttcaactatgtgaaaatggcatggctcaagacacaaagcctcctagcacaaggatatgcataaattcagcctgcanagctgtcttcaactcagataacacattntgtaagaggtgttcatgttgtatttgccatggttttgatgataacaaagatcctagcctttggctggtatgctcatc

SEQ ID NO: 70216 - DNA, 569 bp, Zea mays
  Clone ID: MRT4577_164027C.1
cccacgcgtgcgcgttctgctgcagcttctgctgcggcgcctccgcctctaacgcagtttcttacgcagcagcctgaggcaagaagggtggccagatcgacattgatatggtcatccatccggtaaacctggcggaagctaatgcacaagataaagaaactcaaacagacactcaactacttgttcatggatgtttagatggatgggagctgccacagaagctctgttataacccattcccacactgactctgagagtgctggttggcgaactggcctctgacctgccatatgacgaaaggcaaggcgaaatgaagggtgctctgttggctggaatgtacactagaacggatactagattgaatgtgggctctatgccatattctatggcaaagaattgcctttagatcagactttacataagatgttctatagcatgtatttgaggaatgatgggtactatgaaacttacttccggactgatatgtattgtgatgaacatagggatgaacgaatggatattatgatgtatactatgatgttgacgataaaaaaaaaaaaagggcggcc

SEQ ID NO: 70217 - DNA, 353 bp, Zea mays
  Clone ID: MRT4577_164028C.1
gtacgtacacttctctccctcccctccccctgtcccggagcctttgcttcactcgcggcgccgagctggctagcgacaagcgcgacaccgtcggcggcggcgacgccggcccgcgcctcgatgacggcgaggactcgtccgccgtgagcagcaaggcggtggtcgaggagctgtaccgcgcgctggagcgcggcgacgtggacgccgtgcgccgcctgctgaacccggacgtggactggtggttccacggcccgcgcgcgcaccagcacctggtgctcatgcgcctgctcaccggcaccggcaccggcaccggcgccggcgccggcctcccgttcaagatccggtccctggac

SEQ ID NO: 70218 - DNA, 219 bp, Zea mays
  unsure (1)..(219): unsure at all n locations
  Clone ID: MRT4577_164029C.1
ctgtagcngnngcgcattannagcgcggnncgggtgggtggtggttaccgcgccanngcgtgacccgnnctacacttnngccagcgccctnnnagcgcccgnnctcctttcgctttttcttccctttcctttttctcgccacnngttcgccggcttttcccncgtcaagctcttaaatcgggnggctcccttttaggnngttccgatttaaaagtgctt

SEQ ID NO: 70219 - DNA, 365 bp, Zea mays
  Clone ID: MRT4577_16402C.1
agtttcttttttcttgctcggattgatttcatcggcggcgtcaactacatatacaatgtgaccggaaggaacaaacctcttcctctcacgctcaatgtatggggcgggcaatatgtataagcattgcgcgagaggaagaggttttaaacgttaaccagattatgaattttacgaagaagaacgaatatcgagacctgtctattctttaactggtgctaatcctaaaaccacaccaactgatttgccgaatcattatcatcatcgcctgtatcaaccttcttttttttatgggttattgacattatcgtgggcagcttctttataccccgtttacttcctcgaaggtgaccctgagcttcactggc

SEQ ID NO: 70220 - DNA, 175 bp, Zea mays
  unsure (1)..(175): unsure at all n locations
  Clone ID: MRT4577_164030C.1
tgagcacttagcactgtgtacgntcagctcgagaatttcgctcagagtcggacgccaccaccggcccagccccttcagtagccactccgatgggcgccccctcagtcctacacgggctactccacggcctcttcgtccatctcagagtccgacgaggaggaggaggacctctatg

SEQ ID NO: 70221 - DNA, 454 bp, Zea mays
  Clone ID: MRT4577_164031C.1
cgttgccttagagtatatttatgcagggttgcgaaatctattgattcctactgcgtgaaggcataccagcgagatcaagctattttgctaggcagcctatcgcgcaagccgacgaagacgctcggatcggcggcacacactatcccgctggaggttgcgcacacactcagcaagtatcgctgagggcgcccgctgtacatacgaccaaagaggcggccgaacagaaaacaacgagggggacccgactgcgccatccgctgggtctgatagcaccaaaccctccagcgcgctatccggccggctgccggacgagatcacactagctatcgcgcccgacgacgcatgatggctctgagcgcatccgggcaacagctcgcaggacgcgcccggcatattcaaggcgagccgttcatatcgagccggccgaatggcggccagaccaaatagggggagc

SEQ ID NO: 70222 - DNA, 551 bp, Zea mays
  unsure (1)..(551): unsure at all n locations
  Clone ID: MRT4577_164032C.1
ataaactcatgttgacgcgttggtatttttattaaggtatcgaaaagcgcccaagcttttccctaattctcgtttaagacccaagcaagggaatgtttacacgagacccaagattgtgattaggtaactccgtagatagctctagctcttctccacaagtaagtggtgctccggttgtggcctcttccggatgcttccatcgtctccttatcgagttttggtcaaaacatcgcgaaccccattcccaccaatactcgatagcggccacaccacaaacacaaccaatatgatatcattgcatcccttcccaatacacctattacaatgacgcgcacaagcatcaaggggtaagaggtgcgcctgacctcacttctaatcactaggcctaaatctagagcaagagccaaagatagtggtataactaatataagtacttcacaaattactcacactaatcatcaagtgatattggaccactttggtgtctagggctactagagatgagattcaattatcttggtatgttcccggacggcgtgggtcgacnccgg

SEQ ID NO: 70223 - DNA, 334 bp, Zea mays
  unsure (1)..(334): unsure at all n locations
  Clone ID: MRT4577_164033C.1
tttagatttaagggataataggttcgttctcgaatatttattgncggacagtttattttaaactaaaacttcaaaaaaaaaagaacggagggaataagaattttgtgctgcgagcctgagcccctatgcttgaaagccctcccgaatcaagttgctgtcgtcgtggtagacgtcacggaagctctccgtgctgtcgtgtctcctcgcgagggacgaccaacggagctccttctttcagccctccagccgcgggaacccacagtgcttcttcccgaagtcgtcgcagtagtcatagtcgtcgaggatgtcgtgcgccaagtgctttcccctcgcg

SEQ ID NO: 70224 - DNA, 406 bp, Zea mays
  Clone ID: MRT4577_164034C.1
attcggctcgagaaaaaatatgcagtatttttttgcccaggccatatgtgaatatttgccaaggatgaaagggaacactcctgcttttttttatgctatccaagtagatgaagatgatctggttacagatgtgtcttgggctgatgctaagtcaataatggattatacctactttgttgatgtagcgtgggttgacacaagatattgcgcacgtgactatgggagacctctactattatatactggtgataaccataacaatcctatgattatatatgaatcagcgctgattatgatgactaagcacaatactttacatggcagttggagacctccaattctgctgtgggtgcaaatcaaccgaatgcagttttgactgaccaggctgctgcacttagcgaagcag

SEQ ID NO: 70225 - DNA, 474 bp, Zea mays
  Clone ID: MRT4577_164035C.1
acgcctcgcatcaaccactctttcccaatccaccgccggctcggctcgcccatcttcgcgccaagcaccgaatctccgatggcccgcacgaagcagacggcgcgcaagtcgacgggcggcaaggcgccccgcaagcagctggccaccatcacgcccaaggacatccagctcgcgcgccgcatcaggggcgagagggcttgatctcccgttgtcgtcgtccacgttgttgggcctttcctctgtgtctctgcttgtagaatccttgcttctgttcggttccttctgttcgcatgatggtgttcgtagtgttaggagttgcattttctaatctgcttgttcttgcaaaaaaaaaaaaaaaaaaaaaaaaaaaaaaaaaaaaaaaaaaaaaaaaaaaaaaaaaaaaaaaaaaaaaaaaaaaattcttgtttctttacccgttttataaaaggggcaatagacgaatagccttatacg

SEQ ID NO: 70226 - DNA, 857 bp, Zea mays
  Clone ID: MRT4577_164036C.1
acacactgcacgccgccgccgggtcctcctaggtttcgccgcgatgtcgctccggccggggagcgggggcagatgcggaagggcaactacaagcagacggtggacgcggaggagagccgccgccgccgcgagggccagatgatggacatgcgcaaggccaagcgcgaggaaagtctccagaagaagcgctgcgatgggtttcccgcctccgccgccggtgtgccgccgatgggccactccaccgcgctccagcagaagtcccccaatcgaagaggtgatcagcacaggagtggtgtcgcgattcattgagtttcttacacgtgaggaccatccccaactccagtttgaggctgcatgggcactcaccaacattgcatcaggcacatcagagaacactaaggtggtcgttgagagtggtgctgtgcgcctgtgcccatctttgtcaagctactcaactccctcaagcgaggatgttcgtgaataggcatgcactaaattacaagagatgtgtcttattatgacccggggcagatccagaatttttctatgacccaagccaaatctaccaaattttcttctttttattttatcttaactattttgtaccatattaaatagagacttatatagagttacatggatcaagccctgggccacagatcgggtggcctgtggtgtagatctgccactgattatgactatggatgagacttttgtgatgtaattgatgagactatggatttaaatattgttatgtgattgtgtgtgagatattttatgtgaaaatatgttgtgctatatagttgttgatatatttgttatgttgtggaatgtggaataaaataaaaataaacaac

SEQ ID NO: 70227 - DNA, 314 bp, Zea mays
  Clone ID: MRT4577_164037C.1
tctcgactacggcagatgtgaccgcatactacgtgaccagcgcaattatatccttgcaatggtccaagataccaaggcggctgcatgcaatggattgctcgttgcaaaaagcatctgtgcgagatgcagtcactgacttgtctctgcactatcttgctcaccgacacattctgctggtgcatgacccggataggaactatatgcagtgcatcacctacacccgaaactgacttttccatgtcaacaatggggacttccgcaaccataaaccctaatagtccgaagatgcttatgaatgcactgttccagagggc

SEQ ID NO: 70228 - DNA, 1436 bp, Zea mays
  Clone ID: MRT4577_164038C.1
tcataaggtgagaaagaagggcagatgttacgggcccgtacactttcagagaagctggagctcaggtggaactggccacctagcttatgaaggacagtgggttggttagcctggtccgccattaccacctcaaaactgttggcctggccttgggcaccggaggcggggaaggggaggcggtctgggcggcggcctcgactccgaactttacgtcagtaccgaagtcaataacccggccggccgggattcatctccattcgaaacaccctcgcacccacactctcccttcgtccccagcctaaatccccgcaacgatggctcgcacgaagcagacggcgcgcaagtccacgggcggcaaggccccgaggaagcagctggcgaccaaggcggcgcgcaagtcggcccctgcgaccggcggcgtgaagaagccgcaccgcttccgcccgggcaccgtggcgctgcgcgagatccgcaagtaccagaagagcacggagctgctcatccgcaagctgcccttccagcgcctggtccgcgagatcgcgcaggacttcaagaccgacctccgcttccagtcctccgccgtcgccgcgctgcaggaggccgccgaggcttacctcgtcggcctgttcgaggacaccaacctctgcgccatccacgccaagcgcgtcaccatcatgcccaaggacatccagctcgcccgccgcatccgcggggagcgcgcctaggcggccggccggataggccgtggcccgtggcgcaggctcttctcggaagtttgtactagtggtcgggtcgtgtggaaggagtggtgtactgatcagcaatgtctcaaaccatgtcaacctctttgttgtcatcaatggaaatcgccacttatgtgtgctaaaaaaaaaaaaaaaaaaaaaaaaaaaaaaaaaaaaaaaaaaaaaaaaaaaaaaaaacccccaccgaagcacagcgccggaaaccgccgccatcgatcgatcgcccggaaactgacctctaccgatgtctggagccggcaagaaggaaaaaaagcccgcggagggcggcgcccacatcaaccttaaggtcaagggacaggatggcaatgaggggttctttcgcataaaaaggcccacccagctgaaaaagctgatgaacgcctattgcgaccgccagtctggggacatgaatgccattgcattcctgtttgatggccgcaggcttcgcggcaagcaaacccctgatgagctggaaatgaaggacggcaacaaaatcaacgccatgcttcaccagaccggaggcagcgttcctagcaccacctaaaagcagcagctgcggagcctcgttttgctctccgccctgcgtagaactaaacaaaagggaaaaagtctttttaaggaacttgggatgctctggctccttgtgccattgctgagggacatccttagcct

SEQ ID NO: 70229 - DNA, 812 bp, Zea mays
  Clone ID: MRT4577_164039C.1
cattgggtacctcgaggccgggccgggctcaccggccaccgcgaatccagagccccacgccccgtccgaaccccagagcagagcaaagcctcctcgacctccctgtccccagccttccccgatggcccgcacgaagcagacggcgcgcaagtcgacgggcggcaaggcgccgcggaagcagctggcgacgaaggcggcgcgcaagtcggcgccggcgacgggcggcgtgaagaagccgcaccgcttccgcccgggcaccgtcgcgctgcgcgagatccgcaagtaccagaagagcacggagctgctgatccgcaagctcccgttccagcgcctggtccgcgagatcgcgcaggacttcaagacggacctccgcttccagtcctccgccgtcgccgcgctgcaggaggccgccgaggcctacctggtgggcctcttcgaggacaccaacctctgtgccatccacgccaagcgcgtcaccatcatgcccaaggacatccagctcgcgcgccgcatccgcggcgagcgcgcctaggcggttcggttgcggcgcctgctcgctactgctggaggtgcttagtttagcccgtcatggttgtgttataggtgtgcgttgttttcaagagtaggcttcttgctatgtgctgatgttaacggaggattatgattagcagttctgaaaaaatgcaatggatgtgatctgctctatctacatgttttctgtctttgtcctgaaatcccatggtgtttagcattgatttgacatctgttacacgacctgcttgactgcttcaaaaaaaaaaaaaaaagcgggc

SEQ ID NO: 70230 - DNA, 233 bp, Zea mays
  Clone ID: MRT4577_16403C.1
gagctcactagtcttttgccgcccttttttttttttttttttttttttttttttttttttttttttttttcgaaaaagccccaaacgaaaagggttctatccataacccctggggaagagtttaaagggaccccaatatttttttgtctccctggcttatgaggagggattacaatttattccggtcttccaaacatgactttgtagctcagctttttattggacaagatgcc

SEQ ID NO: 70231 - DNA, 1528 bp, Zea mays
  Clone ID: MRT4577_164040C.1
aaaaaaaaaaaaaaaaaaaaaaaaaaaaaaaaaaaaaaaaaaaaaaaaaaccgcaatcttcaatctccccagcaatccctagcagaagccttccatcctcactcgctcgatggcccgcacgaagcagacggcgaggaagtccaccggcggcaaggcgccgaggaagcagctggcgactaaggcggcccgcaagtctgcccctgcgaccggcggagtgaagaagccccaccgcttccgccccggcaccgtcgcgctccgggagatccgcaagtaccagaagagcacggagctgctgatccgcaagctgccgttccagcgcctggtgcgggagatcgcgcaggacttcaagaccgacctacgcttccagagctctgctgtctccgcgctgcaggaggcggctgaggcctaccttgtcgggctcttcgaggacaccaacctctgcgccatccacgccaagcgcgtcaccatcatgcccaaggacatccagcttgcccgccgcatccgcggggagagggcctaagcgtcatattttctgtcatcagtgcccgatcagaagatgtagagatatgctgggttctgtagtttgggttactgtcgaatcatcgagtgttggctgttcactgctgtaacttaattatcatgatgcatatgaaatggcaatgaactctgttatcagttctcgaaaaaaaaaaaaaaaaaaaaaaaaaaaaaaaaaaaaaaaaaaaaaatcacacagctttgcaaggccgccccatctctcaaaccatccgaacccccctcgccgctcactcccaagctaatccccgccggcagcgatggcccgcacgaagcagacggcgcgcaagtcgacgggcggcaaggcgccgcggaagcagctggcgaccaaggcggcgcgcaagtcggcgccggccacggggggcgtgaagaagccgcaccgcttccgcccgggcacccgtggcgctgcgggagatccgcaagtaccagaagagcacggagctgctgatccggaagctgccgttccagcggctggtgcgggagatcgcgcaggacttcaagacggacctccggttccagtcctccgccgtggccgcgctgcaggaggccgccgaggcctacctcgtgggcctcttcgaggacaccaacctctgcgccatccacgccaagcgcgtcaccatcatgcccaaagacatccagctcgcgcgccgcatccggggcgagagggcctgagcacccccggtctctactgcgattccttcgcttcctgatttctgtagcgggaagaactactgtagtaggcgaggaactactgcgtgttatattggggttgtgggtaggaaactaggaatgttctgttggtttcgatgcagtgccccccgtgatactgacatccgtgctgcttgttctgttcttcctactacgaatgcgattgttactattattttagcgtttgtttatgcggttatgcttctggaactgaacagtgctacttgttaccgctttctgccccaaaaaaaaaaaaaaaaaaaaa

SEQ ID NO: 70232 - DNA, 766 bp, Zea mays
  Clone ID: MRT4577_164041C.1
cggggcgacacgctccagcgctccacccgcacctccgctcccacacaccgatggcccgcacgaagcagacggcgcgcaagtccaccggtggcaaggcgccgcggaagcagctggcgaccaaggcagcgcgcaagtcggccccggcgaccggcggcgtgaagaagccgcaccgcttccgcccgggcaccgtggcgctccgcgagatccgcaagtaccagaagagcacggagctgctcatccgcaagctccccttccagcgcctggtccgcgagatcgcgcaggacttcaagaccgacctccgcttccagtcctccgccgtcgccgcgctgcaggaggccgcggaggcctacctcgtcggcctcttcgaggacaccaacctctgtgccatccacgctaagcgcgtcaccatcatgcccaaggacatccagctcgcccgccgcatccgcggggagcgcgcttaggcgtttacggttgattgtcactactgtagatgtttaggctatgttctcgccatgttctaggtctgcttcgttcttatttgtttttttttggtttcatcctgtgcgttgatgtgtgtcgatgagctatctgtgcctgtctgagagaaatagagtgatctattggcgccattgttgaacaccatgaagttgcgagctcggacgttataaattcctaccagacataaatatgcatgaacaatacaattaactggagatactggtagactagtacctctactaaaaaaaaaaaaaaaaaagcggccctc

SEQ ID NO: 70233 - DNA, 394 bp, Zea mays
  Clone ID: MRT4577_164042C.1
cctttttatcttttttttcaatatctgcaacgcataatgcaaccgcttgaatttcgggacgcttgcgtgcaggataatttaacggtcgcattgacacccagcggatcaaccacggggatcacataacgattttaccgcaacatcaaaaagggaacctcactctggcctaaagttttcccagaagggaccccaaaaacaaaaacccggcaccattttggtgagcaacgcaacgtaaaggccgaacatgaaaaacatgacttgggacaggacatatttagttggcgacccaacgggcccagacgccccaaggatggtgctgtctttggatcttgccattcactaaattgttgctctggaaaggtgctatggcattaccggtttcaaatcactttgg

SEQ ID NO: 70234 - DNA, 861 bp, Zea mays
  Clone ID: MRT4577_164043C.1
tctgccggaaaaccccgccgcttaaaaacgcacccgaatctgccactccaaaatctcccaaagacgccgtcgccgctcttgttgtttccgatcccaaaccccaaacacgctccaccggcacctccgctcccacaccacaccgatggcccgcacgaagcagacggcgcgcaagtccaccggaggcaaggcgccgcggaagcagctggcgaccaaggcagcgcgcaagtcggccccggcaaccggcggcgtgaagaagccgcaccgcttccgcccgggcaccgtggcgctccgcgagatccgcaagtaccagaagagcacggagctgctcatccgcaagctccccttccagcgcctggtccgcgagatcgcgcaggacttcaagaccgacctccgcttccagtcctccgccgtcgccgcgctgcaggaggccgcggaggcctacctcgtcggcctcttcgaggacaccaacctctgcgccatccacgccaagcgcgtcaccatcatgcccaaggacatccagctcgcccgccgcatccgcggggagcgcgcttaggcgtttacggttgattgtcactactgtagatgtttaggctatgttctcgccatgttctaggtctgcttcgttcttatttgtttttttggtttcatcctgtacgttgatgggtgttgatgagctatcggtgcctgtctgagagaaatggagtgatctattggcgccattgttgaacaccatgaagttgcgagctcggacgttataaattcctaccagacataaatatgcatgaacaatacaattaactggagatatactgttagactagtatgtctactacatttgcttatgcttggatgtgcattctc

SEQ ID NO: 70235 - DNA, 806 bp, Zea mays
  Clone ID: MRT4577_164045C.1
cattggtacctcgagccggccgggaaaaaattctcaaacgcggcacagagcctcattcatctccattcgaaacaccctcgcacccacactctcccttcgtccccagcctaaatccccgcaaagatggctcgcacgaagcagacggcgcgcaagtccacgggcggcaaggccccgaggaagcagctggcgaccaaggcggcgcgcaagtcggcccctgcgaccggcggcgtgaagaagccgcaccgcttccgcccgggcaccgtggcgctgcgcgagatccgcaagtaccagaagagcacggagctgctcatccgcaagctgcccttccagcgcctggtccgcgagatcgcgcaggacttcaagaccgacctccgcttccagtcctccgccgtcgccgcgctgcaggaggctgccgaggcctacctcgtcggcctgtttgaggacaccaacctctgcgccatccacgccaagcgcgtcaccatcatgcccaaggacatccagctcgcccgccgcatccgcggggagcgcgcataggcggcccgccggataggccggtggcccgttgcgcagtctcttctcggaagtttgtactagtggtcgggtcgtgtggaaggagtggtgtactgatctgcaatgtctcaaaccatgtcaacctctttgttgtcatcaatggaaatcgctacttatgtgtgctaatcttcgtgctgcgtttgtttcgtagtaacacaattcgatggattcgtacctgtgaacaatcgattcatatcgtcaccagatgcgaaattggcagtttgtgttcaaatttc

SEQ ID NO: 70236 - DNA, 1019 bp, Zea mays
  Clone ID: MRT4577_164046C.1
taccctccgggctcggccggggccaccttttgctatgatagttaaatatttctgggggatgaatcatagcttttccctcaaaacccaatcgcacatgtgggagacctagccctgccattgcaacgatccctttaatttatcctaccaccttatctgctcgattctaatactttaagggctagtttgggacacgcagctttagtcccatctctcaaaccatccgaccccacctcgccgctcactcccaagccagtccctgccggcagcgatggcccgcacgaagcagacggcgcgcaagtcgacgggcggcaaggcgccgcggaagcagctggcgacgaaggcggcgcgcaagtcggcgccggccacggggggcgtgaagaagccgcaccgcttccgcccgggcaccgtggcgctgcgggagatccgcaagtaccagaagagcacggagctgctgatccggaagctgccgttccagcggctggtgcgggagatcgcgcaggacttcaagacggacctccggttccagtcctccgccgtggccgcgctgcaggaggccgccgaggcctacctcgtgggcctcttcgaggacaccaacctctgcgccatccacgccaagcgcgtcaccatcatgcccaaggacatccagctcgcccgccgcatccggggcgagagggcctgagcaccccccgtctctgctgtgttcccttcgctttctgatttctgtagcgcgaagaactactgtagtaggggaagaactacctcgtgttatattggggttgtgggtaggaaactagaaatgttctgttggtttcgatgcagtgcccccgtgatactgacatccgtgctgcttgttctgttcttcctactacaaatgcgattgttactattatcttagcgtttgtttatgcggttatgcttctggaactgaacagtgctacttgttaacgctttgcgttccaacttccaacagaaataaatccgctacactgctgcggaaaaaaaaaaaaaaaaaagcggcc

SEQ ID NO: 70237 - DNA, 865 bp, Zea mays
  Clone ID: MRT4577_164047C.1
cattgggtacctcgaggccggccgggatcactgccaaatcccccagaaaatcaactcctccccaaatccacgctgccaccaactcgccgtcctccgcgccaagcaccaaagctccgatggcccgcactaaacagacggcgcgcaagtcgacgggcggcaaggcgccccgcaagcagctggcgaccaaggcggcgcgcaagtctgcgccggccaccggcggcgtgaagaagccccaccgcttccgccccggcaccgtcgcgctccgggagatccgcaagtaccagaagagcacggagctgctcatccgcaagttgcccttccagcgcctcgtccgtgagatcgcgcaggacttcaagaccgatctccgcttccagtcctccgccgtcgccgcgctgcaggaggccgccgaggcctaccttgtggggctctttgaggacactaacctctgcgccatccacgccaagcgcgtcaccatcatgcccaaggacatccagctcgcgcgccgcatcaggggcgagagggcctgagcgaggcgagctcctctcaccgcaggcgggcgtcgttgttgcttcgggcctgcttgtaggacttgtgcttctcttggtttcctttctggtggcagtggcatcttggtaccattgtgcttgttcttagaatcttagggatagagagttgttcagttgctgggtaacctgattgtttatcttgcattcctgcctctgtaatggttgtctgctgtcttaatggaaatgatatttgcttttttaattcccagtttcatcaatatgttcaatctgtggttaatttttctgtggacaacattgtacccagtcagtttcatctataatataattccttatgtttt

SEQ ID NO: 70238 - DNA, 387 bp, Zea mays
  Clone ID: MRT4577_164048C.1
gttaaacacatggtaaaacaaatcccagtaaaattgagtatttacataagctaagaaaaaaaatcacagggagccgcctatgccaaaagaacaccaaggactggggtaaacaaaagcccgggttgacaagagaaacagaaccctaactttgggggcggggctacagaatcataactaacccaggtcttccaaaaggaggaattgttccccccttctgggggggaaaaacattctctttggggacctctttcttgggggcggacctatagcaaaaacaagggggataggtaaccaaaatccacccctttcgagaaacagggctcggggcaaaatcattgcatcacgttcctggcacaccaagggccctcaaagggccaaaagggaaac

SEQ ID NO: 70239 - DNA, 898 bp, Zea mays
  Clone ID: MRT4577_164049C.1
attgggtccctcgaggccggccgggaccggccaccgcgaagccagagccccacgccccgtccgaactccgaaccccagaacagagcaaagcctcctcggcctccctgtccccagccttccccgatggcccgcacgaagcagacggcgcgcaagtcgacgggcggcaaggcgccgcggaagcagctggcgacgaaggcggcgcgcaagtcggcgccggcgacgggcggcgtgaagaagccgcaccgcttccgcccgggcaccgtcgcgctgcgcgagatccgcaagtaccagaagagcacggagctgctgatccgcaagctcccgttccagcgcctggtccgcgagatcgcgcaggacttcaagacggacctccggttccagtcctccgccgtcgccgcgctgcaggaggccgccgaggcctacctggtgggcctcttcgaggacaccaacctctgtgccatccacgccaagcgcgtcaccatcatgcccaaggacatccagctcgcgcgccgcatccgcggcgagcgcgcctaggcggttcggttgcggcgcctgctcgctactgatggaggtgcttagtttagcacgtcatggttgtgttataggtgtgcgttgttgttttcaagaggtagcttcttgctatgtgctgatgttaacggtggattatgattagcagttctgaaaaaaatgtaatggatgtgatctgctctatctacatgttttctgtctttgtcctggaatcccatggtgtttagcattgatttcacatgtcttgtttttctctgaatcctgcttgtaatgacatcgacatctgttacacgatctgcttcaatttgtttttaaaaaaaaaaaaaaaaaaaaaaaaaaaaaaaagaaaaaaaaaaaaaaaaaagcggcc

SEQ ID NO: 70240 - DNA, 1165 bp, Zea mays
  Clone ID: MRT4577_16404C.1
ctcccgccacgtaagctcggaattcggctcgaggaaatcgtacgtagagaggcgtagagctagcaagctgtagctagctaggagctagcgatcgagctcaattcgttttcagtcgagctcgtcggcaatcgacgatcagtagtccgttaggacaacaatccatggcgaacgcgggcatgaggccggtggccggcctcctcctggtgctcaacttctgcatgtacatcatcgtggcggcggtgggcggctgggccatcaaccacgccatcaactacggcttcttcatcggcgccggcctgcagctcccggctcacttctccccgatctacttccccgtcggaaacgcggcgaccgggttcttcgtcatcttcgccgtgatcgccggggtcgtcggcgcggcctcggcgctcgcggggttccaccacgtccgcgcctggaacgccgagagcctgccggcggcggcctccgccgggttcattgcctggacgctcaccctgctcgccatggggttggcggtgaaggagattgaactgcacggcaggaatgccaggctgatatgcatggagtccttcaccatcatcctgtcagcgacgcagctcttctacctgctcgccatatacggaggcttgagatgaaatcatcacactggatggaggaagagactgcattggaatgaagatttatcgtttccgtacgtatcgaattgagctggtgtgcatcggtttcacgggacagagtgtggctttcctcgtgttttcgttgtgggtttcttccaagctgcagaggcagtacgtatatgtgtatctgtttgtgtgtatttctgtgtgttaattacgtacggagctaaatgcatcggtgaagtctaaacttgtaaggttttatttggatactttagtatttgtcctaatacatatcctaatccacctcaatccatgtgtattaggatatatactataatatccaaacaagccttagaggataccacttagacttaccgtctttgtaaatatatttctgttctctaaatttattttatggtgcgccacacatatctaaactagtaaaatggtgtgtcctagttccatttccgaaccataacgaccattgtggtacaccacttcatgattttagggacattggaatatgttttcaaagctcatggcat

SEQ ID NO: 70241 - DNA, 439 bp, Zea mays
  Clone ID: MRT4577_164050C.1
tgctattactagtatagtacgtgataaaaggcagccaggctggtgtgtgtggtgcagggtcttccatacacgcgcaagcatggtgccagtgccacgttccggcaggtcacatgggttggaagccggacggacggggtagggcgtccggtgctagtagcctctgacgaaagagacggaaggctgctttcgtgacattctattctatttgggggggtctaatccgccgtctctctgcagttttcttgttgcgtgtagcggtagtgcagcagcagtactacgttaaaaaaaaagaaaccgcgtggtgcatagtggagcacggggtttcgagaaaagaaagacgaccgggccacagggaaaaacgcccagagaagcctcaaaaaaggcaccctactaccttggtggtggtggcagtggtaggaacagtagacgacagcacgct

SEQ ID NO: 70242 - DNA, 562 bp, Zea mays
  Clone ID: MRT4577_164051C.1
attcgatcgactaagcctgactctgaaccctttcccacacggacctctcccgcatttcaaattcaaaccccgtcgcctcggctgccaccgtggctcccctacccatggcgatgtctccggcggcgggcaggacgcccaaccccaaggcggcgccgtccccgtccccgtccgcccgccgagccggggcggattcggcctcggccgccgccgccgccgccgcgtcggacaccaaggcccggttcgaggcgtacaaccggctgcaggcggcggcggtcgcgttcggggagaagctcccgattccggagatagtggccatagggggccagtcggacggcaagagctcgcttctggaggcgctcctcggcttccgcttcaacgtccgggaggtcgagatgggcacccgccgccccctcgtcctccagatggtccacgaccccaccgccctcgatccccggtgccgcttccaggaggaggactcggaggagtacgggcaccccatggtgcaggccgcggcgatagccgacctcatcaagtagtgcaccgagtctcacctccggacgat

SEQ ID NO: 70243 - DNA, 1350 bp, Zea mays
  unsure (1)..(1350): unsure at all n locations
  Clone ID: MRT4577_164052C.1
tgtttgagctggacgtgctgttggaatctgttagtgttacaattaagcgtgttgaggagttggtggtaagtatggaaggcaactcactgaaacctgatagctctatccacctcgatgaacatttgactagtttgaatatgaggtgcattgagtggctatatggtgaccatggacttgatgttgtggatgttcttcaaaaaaatgctggtgtgacattaccagttattttaaccaggctgaaacaaaagcaggaggagtggtcaatgtgccagtcagattttaataaagtttgggctgaagtatattcaaaaaattatcacaagtctcttgactacggcagtttctattccaaacaacaaaacacaagaatctgaacacaaaagattaacgaaatcagtgagaagaatagaaagggggatgatgtgttacttgctatttctgctgggaataggtggccactagtaggcaagaagcagaggactgctggaaagcgttgggctctgaagaagcacaggcacccgcccgcctgggcttctggtaccatgccgccgcccttgcttgcgtcgagggcctccaagaaccgcaccacctcgtccatgtcagggcgcttctacgggctcgcgtcccagcccttgtgcatgatgttcgccatcgggcttgggcagcagcaacaggccgcaggttctgcacacacagaatgtcaggccgcaggttctggcacatgcatgttcagttcagtatgtggacgattaccagcagtgaatccaggaactgagaacaaacctgatgaacaacggcggatgatacgtctgcaaagctgaggtctgcatgtcacagatttcccacaagcatatgccaaagctgtacacatggcacttcctgttgtacggcttgccttcaagaacctgcagacgccgacagaaaaagaccaaacagttgctcaaaacacttgtcctggtacagaacggaaacacagcaacagtgattgctttttttttgtacagatctaaaacagtagcggaagtatagattatagtgaccccatttttttaaaagaatttaaaagtccctttttcataaaaaaaaaaaaaaaaaaaaaaaaaaaaaaaaaaaaaaaaaaaaaaaaaaaaaaaaaaaataaagaaaaanaaaaaggaggaaaaaggaaaaaaaaaaaaaaaaagggggccctgggcctccacttttggttccttttagggggggtaaattgccccttgggggaaacccgggaaatagctgttcctggggggaaattgttttcggttcacatttccacacaaattaagaccgggaaccttaaggtgtaaacccggggggggccatgggggg

SEQ ID NO: 70244 - DNA, 105 bp, Zea mays
  Clone ID: MRT4577_164053C.1
acgcactaacacgtagggcaaccactacggtgagtcgttgaccgtgttgcacccgtagttccgggtcttgctatacaaccagtactcgagctgctctagaagact

SEQ ID NO: 70245 - DNA, 246 bp, Zea mays
  Clone ID: MRT4577_164054C.1
ccggccggggccgatatggcggcacctcaccgttgaactcgagggtcgtggtgtgtgcttggaccggcctgcgaggatttaagtgtcgagtacctgaggtccccaaaccctctctccccgtcgcaactcaatcgtcctcgtcgtgggtagaatttagaagggggggaagcgagagagaacaagccaccaccaccctttttacgagcaaaaaaaaaaaaaaagaaggagaaaaaaaaaaaagcggcc

SEQ ID NO: 70246 - DNA, 1123 bp, Zea mays
  Clone ID: MRT4577_164055C.1
cctcgaggccggccgggccgggggcggcgtccgacgcactgacccgcacaaccaccaccaccatggccgccgcgccaacaagctccggcgactcgccgccgcctgcgcagccggagtacggttccatctcctccatggtagcctcgtctgcctcctccgctgcagccgcggtcgcggacttcacccgctgggccgagaccttcggcaccgagaaggccgacgccgccaaggctgccctaacctccgccaccaccttggccacctcatctgcctccgaggcggcttctgcttcctccaaggccgcgtcctccgcctatgcggccgcctccgacctcaccctcgtcgccaaggaggagctggaatggttcaagacggagtactctgctcacgagcagattgtgttcggcaagatcaaagagggtgtcgtcatggcgataatgcatccaggcattgctgcaggctccgcaacccttgcagggattatccttttcaaaaggccaaggagctaccttattcaacgagtacggcacatgtttgttagcaaggagaccctactttctggagtacaagctgaagtgaatcacatgcggcagactgtgaatcttgtatccaatgaacgccaaaagctgttggatagagcagcaactgcagaaaaaagattccaaaaaggatggaatacactcagggaagaagggcgttccattcaacacgagttgcgtgagattagtgatattgaaaaccaagcagtaggtctgaagggaattcttgatcagcttcccagagcacatgcatctgaatttcggtcgaagatgtctggcctagcttctcaggttaagaaggagaagcgagtgctcaacgccgccctcacgaagattgtgaactacggtgtccccatctgactgccactccagccagttgttctgagggtccattgtattgtatcagatttttgtgaaggaagacatgttcgatgtgtagggtgaacgctatactgcccacttggtttcgagaaaaggaaaagagaataagttgtgacccgtgcagatttctaatgtcgcaaaagcaacatctttgaaacctgagtaacagatgacattttgctaaataaaaaatttaataattt

SEQ ID NO: 70247 - DNA, 1943 bp, Zea mays
  Clone ID: MRT4577_164056C.1
gcacgaggtcccgcacaaccaccaccaccaccaccaccatggccgccgcgccaacaagctccggcgactcgccgccgcctgcgcagccggagtacggttccatctcctccatggtagcctcgtctgcctcctccgctgcagccgcggtcgcggacttcacccgctgggccgagaccttcggcaccgagaaggccgacgccgccaaggctgccctaacctccgccaccaccttggccacctcatctgcctccgaggcggcttctgcttcctccaaggccgcgtcctccgcatatgcggccgcctccgacctcaccctcgtcgccaaggaggagctggaatggttcaagacggagtactctgctcacgagcagattgtgttcggcaagatcaaagagggtgtcgtcatggcgataatgcatccaggcattgctgcaggctctgcaacccttgcagggattatccttttcaaaaggccaaggagctaccttattcaacgagtacggcacatgtttgttagcaaggagaccctactttctggagtacaggctgaagtgaatcacatgcggcagactgtgaatcttgtatccaatgaacgccaaaagctgttggatagagcagcaactgcagagaaaagattccaaaaaggatggaatacactcaggcatcccccccccctctgaatcatttatttctgtccttattactttatataacatgggtgatgctttctgctttatcagggaagaagggcgttccattcaacacgagttgcgtgagattagtgatattgaaaaccaagcagtaggtctgaagggaattcttgatcagcttcccagagcacatgcatctgaatttcgggtcgaagatgtctgggcctagcttctcaggttaagaaggagaagcgaataggaattgatcttagattttttctagccaataagagcttttaataacacacgtctcctaagcctgtattctaaaatacattgaagcctttgtcttactagttgctcctgacatggatactatgtgcttgagaatgaattttgttaaacagtagaccatttgtatataggattaattgtagacatgccactcatcttttacaaaattggatggctagttcattttgatgccattcaaaattttgagtggcatgtttgcaactgacccttttatatatgggaatatgggatgcataatgctgttggatcgctcagaagctcttatatagagaattacatttagtttcgtagtgatttctttcttatcataaccaacatgagctgctagttgttgcagttgagcctcttttcagaaatacacacttgccatagcagttcatattttactgactcttcctgagcgctcatgtagagagtgattaagtgaaaaactgtgctatacgctcgtagcattatcctagttatggatgagtggatgaccattgacgcagcgtcctctgaatattagtatttttgaagctaaggtggcttgtgtgatctaaactcacaccagagatggtcttttcatgtgttgcagatgtctggcctagcttctcaggttaagaaggagaagcgagtgctcaacgccgccctcacgaagattgtgaactacggtgtccccatctgactgccactccagccagttgttctgagggtccattgtatcagatttttgtgaaggaagacatacatgttcgatgtgtagggtgaacgctatactgcccacttggtttcgagaaaaggaaaagagaataagttgtgacccgtgcagatttctaatgtcgccaaagcaacatctttgaaacctgagtaacagatgacattttgctatgtttttttttttgttggcttattgacatgttcaccgccgtcagctgccgtatgcctgggaatcgtagaagtggaatgaaatttttggttgaaaaaaaaaaaaccaaa

SEQ ID NO: 70248 - DNA, 468 bp, Zea mays
  Clone ID: MRT4577_164057C.1
agctccaaagagactttattataatgctaaacaagtttgggggtacaaaacattacactttcgagggtgatgataccctttaacaaagatcaaaaagagagctcagaagactaataaactgtcttttaaattgaaaagaaataccaaaatgaaagaacaaaacaagacttaatagatagatattattatacctctatttacttcatcacaccttttttatttcgacaaaattaaaaaaaaaactctctatggaaaaaaggctcatgaaataccaatgcataaagcttgaggggtgacttgtaccatcccccaacagcaaaatccaacacagctttatttacaaactaaggaaccatcgatcacttcaaaagtctccttccagcatgaaattgatctcatctaagctccataactccactgggttttcctcttcctgagtacagcaccaacatttgcgccaagcatggc

SEQ ID NO: 70249 - DNA, 294 bp, Zea mays
  Clone ID: MRT4577_164058C.1
acgcgtccgcgcacgcgcgcctcaataacaaaacccattggtacaaccccaccaccgacaacacgctccgcaccttaaaagacaccagcggcgcccacaacacccggcaccaacaacaagagagcactgcacaaagcaacaacatcgcaaagcgacacattcagcacccgataagcaccacatgacccccgacacacccaaaggcccggaggacccgaagaaaaaagacctacagacactttggggcaaccgccactgatagccctaggcgaacaaccgcgactactacaacaa

SEQ ID NO: 70250 - DNA, 699 bp, Zea mays
  Clone ID: MRT4577_164059C.1
aaaaaaaacccaaaaaaaaaaaaaaaaaaaaaaaaaaaaaaaaaaaaaaaaaaaaaaaaaaaaaaaaaaaaaaaaaaaaaaaaaaaaaagggggcctattaaaaaaaataagggatgcatgcacataaaatgcccccaaccatgcaaatttgagttttgttggttatgtttgggcccatggcaaaagcatggaaagaggactggggaattttatgcttgaaaccgttttaagtaagaagggaaaaaaggagtgtatgataaatctgaaaggaaaaaaaaaagggcaaaaaactcgtttgaaaaatatacacatttttataaacgaggggcagccaataagtcgtggaggaaaaaggcactgggggaccttaaaagcctacaaaacaacaagcttgaaaggttaagggacatacaaagtaaacctgagtaaaagttgaagttaattataaaggcatggttacaaattgtcaaatgcaaaagggttattgaaggggacttatgcctatggattttacctgccaaagcatgagcttgccaaaaaacagttttttgaatatctgcaaggggaggcaaaatcaggattggagcggttacataaatgggcaaaaaaaaaacttaaaatataccttgatgcaaaatctccttcaaaagacttaaatgatttccgaacaaagttggctggataaactagggggactc

SEQ ID NO: 70251 - DNA, 1560 bp, Zea mays
  unsure (1)..(1560): unsure at all n locations
  Clone ID: MRT4577_16405C.1
tggcaccnnnnnnnngtaatgctgaccaagactgcaagacatcattcagaatgcaactgccagcagttcactcatggtcatccaaaatactattttgcaacgtagacttattgttcgcagaatggaatttaaatatgggtaagaggatgggtaagctgctggaacataaccttagtatcaagtatttctctacatctttcactctacttcaaaagggaaagaccgtcaaatatgccacatttgccttgcaggcaacttgggggtgaaaaaaaaatgtgcacctttgtgcaccttatagctaattagctattgtgaattcgtcttgctttcggggcttcttactggattgaaatacgggtgagccatggtttccttggctgtaggccttttctggtgatcataccggaggagtttatctaccaaatcaatagcctcaggtgttgcaagatgtctgttcctagcattcacaaacttgggccatggtttcctattatgtcttccaataagtctttcaagctgtgggtcaagctggaggccatatttttcaaggtagttatacaggtctcctgtgccaagaacctcagctattttcactaattgatcataattatcctggccactaaagaaagggtccactcggaatatcattgctgcgaacatgcaaccaagactccacaaatccaatgagtaatcataatctaacaaatccacaagtagttcaggacccttgtagcatcttgaagcaactctagcattgtattccatcttgggatgatagaactctgcaagaccccaatcaataagacgaagctgacgtttttcatggtcaatcatgacattgtggggtttgacatctcggtgcattataccacgtgaatgacagtaatctagtgccttcaataattcaaaaatatagtatctgacatcataatcagataacgcagggtagagtactttgaagtcagtgttgttgacatgttcaaagatcagactaggtgtctttgattcatcatctctgacaatatcaagtagttttacaatgttaggccctccatataagttctgaagtatctttatttccctctttatcttcttcttcttcacgggcttcaggatcttaatgacgcatctctcatcgctcccggcccggaacccttcgaacacctcgctgtacttccccctccccaccttccgcagcacctcgtacccatcctgcttcccccactggatgtcgagcgactcgtagtcccagtactccttggggcgctgggcgttggcgtcggcgtagacgcgcgccaccgaggcggcgccaccgggttgccgcgtggcccgcccgaagcgcggcgtcatggggagcggcgcctcagccgcagctgccgcggcggcggcgtaggccgtgggggcgaggcggcggcgccggtggtggtgcccgtggtgcgggaccccggtggagagaagtaagcgtagcaagagcccgtggggcgcggcggtggcggcgggtgccgggagcggaaggacacggctgcgcagggcgccccaggccatgaaaccgcggcgcgg

SEQ ID NO: 70252 - DNA, 230 bp, Zea mays
  Clone ID: MRT4577_164060C.1
attaagcagttaatccaaatataacgggggagaaggtaaataaccggacggcatacgacggagtcagcgttccacttatttgccctgttacaaacaacgccacaatgaagggcccagaccattacaccaatcgcaagaaatatttggccacaactactgctgaccggcaggacgtctggctaggccaatagagatcgagagcttttaacaaatcagaaaaaacgcaggat

SEQ ID NO: 70253 - DNA, 750 bp, Zea mays
  Clone ID: MRT4577_164061C.1
cgagcctcgtgaccatacccttgtttgtaccatatagctagacataaacatgtgagtgtggctgacatcttaacacttcgcctttgaatttgtcttggtgtagagatctgttaggacataaattagtagtgtggaacgatctaactccacgacttgctgatgtagttctatcggatgaacaagatggatttcgatgtaatatgtgagtagatggacaattctttgtgaagtcacgttacattggcttaattcacctagatgtacccaaccttaataaaaagattatggaaactaaaggcccaaaataaaaatattcctttagtttttacgaaaaggcacaatattaactaaggataatctagcaaagtgaaattggaatttcaacgtgttggcaagttgttcacagaacctcatttctgcttgctgttcaaaagatggtcaagattagcaagttgttcacagaacctcgtttctgcttgctgttcaaaagatggtctagatttttgcatgcttcctcgtcttgcatgtcgcacttagtggatgtggtgatctgagggatcccagaacatgcctggtttcgttcctcggcggaggtcatcctaatggactcatattgcattgaagaagttcatccagataccctgatgaagaaagatctttcatcctacgtggtgcgagcgtggtgctttgatccagcaatattacaacggaaattggcgcttcacatattggaaaaagggttgcaggttg

SEQ ID NO: 70254 - DNA, 252 bp, Zea mays
  Clone ID: MRT4577_164062C.1
attcttattaactactaaaatcggggaccgttttaaagcgagggttttactatttccacttaacatggtcctacctaggatatacgccacaccatagcatctattttacaagacagtcgagaaactttttgtttgtgacgacttaacataatttgccacaggggttctaaattaacacttgattgaccttgtccaagttgttcaaaagcctatggcgctgacttacgggccacaaggcaccatacaagttcc

SEQ ID NO: 70255 - DNA, 423 bp, Zea mays
  Clone ID: MRT4577_164063C.1
caggacacagaagctcgcgccaccgacggcggcggacgacgccatcctgctggcgatcaccatgacggccggcccgcagaaatgagaccgcgagtcgggcctgtgatgcagacgcctcgggtactgcgggacgcgacgacgactactgcgaaggcaggggacagtcgggcccctgcgacgtgacggagaccaacaacgcgaccgaggccagcatagcgacgccggacttctgcgacgcgctcctcgcgcaggccgccggctcgcgcgaggtcaacggcatctacacccgtgtagtcttcctcgccgccgacggctactaccaggcgatcagacgtaccggcaccgtccacgactccaagaacgagatccacgccttcttgggcaacgccaacgacgagaccataaagttctgctacatcaacg

SEQ ID NO: 70256 - DNA, 293 bp, Zea mays
  Clone ID: MRT4577_164064C.1
ttacttcacgcgttttttaacgcctgggcgcaagccagtcacgttgcttttaaaaaagggtgggtcctcctccttacatctccactccccatttcacagatccgctcctccatctcatgttagccctcctctacaccaacggcaatcaatttgaccaccgcgtcaaataatacctcactcgataagtatctttgcatgctgctctataagtacaccaaagtgctcatcatactaacctacaaccctacccccaaacacttttaatacattcctcgtatccttaagacctactt

SEQ ID NO: 70257 - DNA, 5273 bp, Zea mays
  Clone ID: MRT4577_164065C.1
atggacggtgatcggagggtgatgtatgacgggtggagaaaggatggggcacattcgaatgaatggatggttgtaacaaaggcttttcttgagcatgctttcaaagacgcaactggtcgtctagtgaagtgtccttgcaatcgttgcgagaacaagtggcctcagaagaaggaagaaatggagaaacacctttgcaaaagtgggtttatgccgaactaccttgtatggtactggcatggagagtgtattagacacgttgacgcagaggtggaacttgatgatgatcatgataggatggacgacatgttgcatgatcttggtagggaggttgaaatgaacgctgaggagccggggcagcttccacgcgatgctcaggaattcttccggctactcgccgcgggggaagagagactgcacgagcacactcagatgtcagttcttgggactctcacaagactaatggcgataaagtcgaagcacaacatttcaaacagtgcttacaacgacatcgtccaactaatgggcgaggttctcccggagaatcataagttgccaaagaatatgtacttcgcaaagaagatgttggctggtcttgggatgacatatgagaagatcgacgtgtgtcccaacagttgcatgctattctttgaggaggatgacaagctgaaccgttgtaagcattgtgaagcttctagatatgtcgaggtgacaaatgatgagggtgaattggtagttacgaaggtcgcagctaagcaacttcgtcggttgcccatcattcctcggctttcaaggttgttcctcaacaaggaaatagctctgcatatgacatggccaaagaatggtgtacgtctcgtcactgatccagacataatggtccatccgtcggacggtgatgcgtggaaggcaattgacgagtttgatcccgaatttgcaaacgaccctaggagtgtacggcttggtctatcgacggacggattcacacctttcaataccagtgcaagcccttactcgtgttggcctgtcttcattgtgccatataatcttcctcctgagttggtcaataaagaagagttcatgttccttgcactagtcatcccaggccccgagcatccagggccaaagctgaatatgtttgttcgccctttaattgaagagctgaaacaattgtggagaggtgtgaaggcttatgacagccatactgaaaaggagtttaccatgcgcgctgcttatttgtggtcagtgcatgatctgctggcgtatggagattggtctggatggtgtgttcatggtcggttgtgctgtcccatatgtatgaatgatacggatgcattcagattgaagcatggtgggaaagtgtcattctttgatgctcatcgacgttggactccattcaagcatgatttcaggaattcgcttactgcattcagaagtggagccaaaatcagaaatgggccaccaaagaggcaaactgcaccgcagataatggcatggcatgcttgtctgaagcaaggagaaaatgataggtttcaaggctacggggaggaccacaactggacccatatttcatcaatatgggatcttccgtatgcaaaagccttgatcatgccgcacaacatagacttgatgcaccaagagcgtaatgttgctgaaagcatcataagcacatgtttcgatgtgactgataaaacgaaagataatatgaaggcaagaaaagacatggctgaaatttgtaagagaccgatgctcgagttgaaagtaagcgataaagggcatgagagtaggccgcgagctgattactgcctcaagccagatgaaaggaaagaaatatttaagtggttgaagaatctgaaatttccagatcgatatgcggcaaatctgaaacgggcagtcaatctgaagaccggtaaattgatcggtttgaaaagccatgactaccatattattatggagaggctgatgcccgtgatgtttcgaggctattttaaggatgagctttggagcatatttgcagagctgagttacttctatagggaagtatgcgcaaagacggtatcgaagaggttgatgcagaaatttgagaaagaaattccaattcttatttgtaaatttgaaaaggttttcccgccaggattcttcaatgtgatgcaacatctaattgtgcatttgccttgggaagctttggtaggcggaccagtgcaattcaggtggatgtatcctatagaaagggcgttgaaaaagctcagggcgtctgttcgcaacaaggctagagtcgaagggtgtattgcggaggcttttgcccttaaggagatatctcaattctcaaccaggtatttcgctcgagccaacaatgtgtttgctccttcagtgcgacttcatgtcgaaaatgaatcgccccaaagcacccttcaaatttttgcgaatccgggtaaagcagttggaaaagggagtgtacgtcacattgaaggatcagatttgaacacgctaatgctatatatgtatagcaatattgacagcacacaggaggcgttcgacatgtttgatgaagaatgttggaaatctactagtaaacctacggccatccaattagaaaatcttcgacgtgatgggttgaaaggtggaccaaacttcgtgcagtggtttcgtaattatgtttccaaaaactctgtgcacccggacttgcagcaaatggcacatacctctgtgtccgtccggaactatactcgctatgatgtaaatggatatcgcttccgaaccgcgaaattggagaagagtcgaccattggcagccaccaccaatagtggtgtgttggcaagttcatatgttgacgatgacaaagtagtggactattacggtgttcttcaaaacattgtagagttgattttcgatggccccaaggaacttaaagtcgtgtttttcgagtgcgactggtttgatgctcatagtgggactcgtgtcgacaagtatggtaatgtcgaggtgaagcatagctctaggattccgagcagtatgagcgatgttgtccttgcaaatcaggcaaaacaagtgtactacctgccatatcctcacccaagccttagggcttggtgggttgcaatcaaagtcaacccacaagtcgtcgctccagagagtgctgactacgtgagtacgagcagggacaacgatgatgctgtttttcaaccagaagcggcgtcgaatcaagacatagctcaccgattccatgtgaccaatggagaaggactagaaaatctctgttgcaattcaagcgacttaattgaagaacctaggtcaaagcgcaaacgacctgtcgtcgttagaagatcattgaacatgttcaagcataggagatcgaggaggagtgggggcagcgcggccagcgaggacagctcgggcagtgggctttttcagggcacctcacagagccgacagaggcagcagcaacttctcgactgtctagacgaagtgcagggtgaggagggtgagcaggagactcctcagcaggatgctcatgtgcagggtgaggagggtgagcaggatgaggagggtgagcaggatgaggaggttgaccctatgggggcaggcagcgcgggcgatgcgtcagatggttctacatcctttaggtataagaagagcaatgcgcttggtccgaggcctgctgagaggaggctcatccggccgcatggagaatggtcatgggaagacttgacttgggacggtacaggcagacgtcccaaggtgaacgcggtgttgggtagcctctgtcgcttctactaccctggcatggtggagctcaatggcgagaggttcgcggctatgcagtgggccgactggggtctgaaggactatgtccagccaggggaaagcagtagcggagggggaagttcagaacaaaaaccaaggacttgtcaggtggctgtgtgggacgagttctgggggaggttccaattgccggatgacatcgaggcggatcaggctcagtgggcacgtgtgaagagacactttcggaagtgcgctgataaggtcatcaaggatgccatgtacaatgctcgcatcgcggccgttaactactactacaagaagataaaggggcagaaaatgagcaaagcattaggggccaatgagatctacctcacagaggagcagtacctggagagcgttgtggattggctggcgaaggacatggaagcctggaggtggttggcaaagagatgggcgtcgcctgagtggattgcagagtccaacaagcaccgtgtcaaccgtggcactgaaggaccggggcataggtacggcgccgatggacaccttggtaccgcacgccgcatggaagctgaaagtggagttgctccaagttttatggaggtttacgtgcgtggtcaccgtggccctgatccggctaaccctgatgtgctatgcagcgaggcggcaagggagaaaatgaatgcatatggggaggaaatgactcaacgccatgggcctgacttcgactggatgcattcagacttagatgtctcagcgttgtaccacagtggtgggggtagaaagcatggcaggtttgcctttggcaccggcgttgtggattataacaggacaataggtcaagggaaggcatcgtcttcgggagggagttctcgctcctccaggtctgctcgagaggctcagctggaggaggagactcgggcagcacaggagcaggctcgagcagcacaggagcaggctcgagcagcgcaggagcaggttgggcagctgacgcaatatatggcttcttattttcaggaaatgactactagactcggccctgatatgaacttgcccgcttttcgccctccccaggcacaaggatggggacagtggccaggacaagctccagcgtcgcagccacccgggaccggtgttgggtggacgcaggcacctccaggcacttggacgcctccaccaccccaaggatcgcagccagtccggggatgggtgccaccggtcttccagccaccggcgggctctcagccatttcaagcgtggatggcaccgccaccgacggggtgggtgccaccacctctggggtggccagcacaacagtacccgtggatgcatgcaggatcacagggttcagtgtcaaatgctcagggatcggagggtgctgccaacgtccaaggcttccatggttctggagggagtggccaccttcctggtggcggaggagggagtggccaaaactcccacagcccgcaggagtgagggaaatgtgcccttgggccatttctaagtattttggtgattga

SEQ ID NO: 70258 - DNA, 1171 bp, Zea mays
  Clone ID: MRT4577_164066C.1
atggggaatgcttcccgtccctgtttatctgatggggagaaaattttccatttacattctctaatggaagaattcaccgcggcgaatcgcggatcgatgcctattgccatcagcgaacccggtagaagctacagtataggtcatgcacagacaaggtttgcctttggcaccggcgttgtggaatataacaggacaataggtcaagggaaggcatcgtcttcgggagggagttctcgctcctccaggtctgctcgagaggctcagctggaggaggagactcgggcagcacaggagcaggctcgagcagcacaggagcaggctcgagcagcacaggagcaggctcgagcagcgcaggagcaggttggacagctgacgcaatatatggcttcttattttcaggaaatgactactcgactcggccctgatatgaacttgcccgcttttcgccctccccaggcacaaggatggggacagtggccaggacaagctccagcgtcgcagccacagtggaccggtgttgggtggacgcaggcacctccaggcacttggacgcctccaccccaaggatcgcagccagtcccgggatgggtgccaccggtctcccagccaccggcgggctctcagccatttcaagcgtggatggcaccgccaccgatggggtgggtgccaccacctatggggtggccagcacaacagtacccgtggatgcatggacaacctcctcctcaccatggatcacagggttcagcgtcacatgctcatggatcggagggtggtgtcaacgtccaagacttcctcgtccatggtgctggagggagtggccaccttcctggtggcggaggagggagtggccaaaactcccacagcccgccggagtgatcagtgaggagtgagtagtgagtagtgagtagcttatggacttatggacagagacttatggactagagttttgtgaattgtgtatttgaatggacaatagacttttggactctagacttatttgaatggactatggactatttatgtatatgtgaatgtgttttgtgaattatgtattaagcttgtgaatctgtatatgtgaattgtgatattgtgtatattgctgtgaattattaataggtgcagaaaaatccgttttggggggaaccatcaattttcgtcggcctcggtg

SEQ ID NO: 70259 - DNA, 831 bp, Zea mays
  Clone ID: MRT4577_164067C.1
ccaactcctatattggtaatgccaacctctgtgagtcctacgacgggcactcctgtgcggcggacacggttcgcaggtctgccctgaagacggtcaagaccgtgattctcgtctgcggcgttctggggtcggtggcgctgctgcttgttgtggtttggattctgatcaacaggagcaggaagctggccagccagaaggcgatgagcttgtctggtgcttgtggtgatgatttctccaacccctggacgtttacgccgttccagaagcttaacttctgcatcgaccacatcttggcatgcctaaaggacgagaacgtgatcggcaaaggttgctcgggggtggtgtacagagctgagatgccgaacggggacatcatcgcagtgaagaagctctggagggccggcaaggacgagccgatcgacgcctttgcagctgagatccagattccggggcacatcagacaccggaacatcgtgaagctactcggctactgctctaacaggtctgtcaagctcctgctttacaactacatccccaacggcaacctgctggagctcctgaaggagaacaggagcctggactgggacacgaggtacaagatcgccgtcgggacggcgcatggcctggcctacctgcaccacgactgcattccggcgatactccacagggatgtcaagtgcaacaacatactgctcgattccaagtatgaggcctacttggctgactttgggctggacaagctgatgaactcctcaaaataccatcacgccatgtcacgcattgccggatcttatggatacattgctccacagtacgcgtacactagcaaca

SEQ ID NO: 70260 - DNA, 5849 bp, Zea mays
  Clone ID: MRT4577_164068C.1
atggacggtgatcggagggtgatgtatgacgggtggagaaaggatggggcacattcgaatgaatggatgggtgtaacaaaggcttttcttgagcacgctttcaaagatgcaactggtcgtctagtgaagtgtccttgcaatcgctgcgagaacaagtggcctcagaagaaggaagaaatggagaaacacctttgcaaaagtgggtttatgccgaactaccttgtatggtaccggcatggagagtctattagacacgttgacgcggaggtggaacttgatgacgatcatgataggatggacgacatgttgcatgatcttggtagggatgttgaaatgaacgctgaggagccggggcagcttccacgcgatgctcaggaattcttccggctactcgccgcgggggaagagagactgcacgagcacactcagatgtcagttcttgggactctcacaagactaatggcgataaagtcgaagcacaacatttcaaacagtgcttacaacgacatcgtccaactgatgggcgaggttctcccggagaatcataagttgccaaagaatatgtacttcgcaaagaagatgttggctggtcttgggatgacatatgagaagatcgacgtgtgtcccaacagttgcatgctattctttgaggaggatgacaagctggaccgttgtaagcattgcgaagcttctagatatgtcgaggtgacaaatgatgagggtgaattggtagttacgaaggtcgcagctaagcaacttcgtcggttgcccatcattcctcggctttcaaggttgttcctcaacaaggaaatagctctgcatatgacgtggccaaagaatggtgtacgtctcgtcactgatccagacataatggtccatccgtcggacggtgatgcgtggaaggcatttgacgagtttgatcccgaatttgcaaacgaccctaggagtgtacggcttggtctatcgacggatggattcacacctttcaataccagtgcaagcccttactcgtgttggcctgtcttcattgtgccatataatcttcctcctgagttggtcaataaagaagagttcatgttccttgcactagtcatcccaggccccgagcatccagggccaaagctgaatatgtttgttcgccctttaattgaagagctgaaacaattgtggagaggtgtgaaggcttatgacagccatactgaaaaggagtttaccatgcgcgctgcttatttgtggtcagtgcatgatctgctggcgtatggagattggtctggatggtgtgttcatggtcggttgtgctgtcccatatgtatgaatgatacggatgcattcagattgaagcatggtgggaaagtgtcattctttgatgctcatcgacgttggactccattcaagcatgatttcaggaattcgcttactgcattcagaagtggagccaaaatcagaaatgggccaccaaagaggcaaactgcaccgcagataatggcatggcatgcttgtctgaagcaaggagaaaatgataggttccaaggctacggggaggaccacaactggacccatatttcatcaatatgggagcttccgtatgcaaaagccttgatcatgccgcacaacatagacttgatgcaccaagagcgtaacgttgctgaaagcatcataagcacatgtttcgatgtgactgataaaacgaaagataatatgaaggcaagaaaagacatggctgaaatttgtaagagaccgatgctcgagttgaaagtaagcgataaagggcatgagagtaggccgcgagctgattactgcctcaagccggatgaaaggaaagaaatatttaagtggttgaagaatctgaaatttccagatcggtatgcggcaaatctgaaacgggcagtcaatctgaagaccggtaaattgatcggtttgaaaagccatgactaccatattattatggagaggctgatgcccgtgatgtttcgaggctattttaaggatgagctttggagcatatttgcagagctgagttacttctatagggaagtatgcgcaaagacggtatcgaagaggttgatgcagaaatttgagaaagaaattcccattcttatttgtaaatttgaaaaggttttcccgccaggattcttcaatgtgatgcaacatctaattgtgcatttgccttgggaagctttggtaggcggaccagtgcaattcaggtggatgtatcctatagaaagggcgttgaaaaagctcagggcgtctgttcgcaacaaggctagagtcgaagggtgtattgcggaggcttttgcccttaaggagatatctcaattctcaaccaggtatttcgctcgagccaacaatgtgtttgcgccttcagtgcgacttcatgtcgaaaatgaatcgccccaaagcacccttcaaatttttgcgaatccgggtaaagcagttggaaaagggagtgtacgtcacattgaagcatcagatttgaacacgctaatgctatatatgtatagcaatattgacagcacacaggaggcgttcgacatgtttgatgaagaatgttggaaatctactagtaaacctacggccatccaattagaaaatcttcggcgtgatgggttgaaaggtggaccaaacttcgtgcagtggtttcgtaattatgtttccaaaaactctgtgcacccggacttgcagcaaatggcacatacctctgtgtccgtccggaactatactcgctatgatgtaaatggatatcgcttccgaaccgcgaaattggagaagagtcgaccattggcagccaccaccaatagtggtgtgttggcaagttcatatgttgacgatgacaaagtagtggactattacggtgttcttcaaaacattgtagagttgattttcgatggccccaaggaacttaaagtcgtgtttttcgagtgcgactggtttgatgctcatagtgggactcgtgtcgacaagtatggtaatgtcgaggtgaagcatagctctaggattccgagcagtatgagcgatgttgtccttgcaaatcaggcaaaacaggtgtactacctgccatatcctcacccaagccttagggcttggtgggttgcaatcaaagtcaacccacaagtcgtcgctccagagagtgctgactacgtgagtacgagcagggacaacgatgaggctgtttttcaaccagaagcggcgtcgaatcaagacatagctcaccgattccatgtgaccaatggagaaggccttgaaaatctctgttgcaattcaagcgacttaattgaagaacctaggtcaaagcgcaaacgacctgtcgtcgttagaagatcattgaacatgttcaagcataggagatcgaggaggagtgggggcagcgcggccagcgaggacagctcgggcagtggcctttttcagggcacctcacagagccgacagaggcagcagcaacttctcgactgtctagacgaagtgcagggtgaggagggtgagcaggaggctcctcggcaggatgctcatgtgcagggtgacgagggtgagcaggatgaggagggtgagcaggatgaggaggttgaccccatgggggcaggcagcgcgggcgacgcgtcagatggttctacgtccttcaggtataagaagagcaatgcgcttggtccgagacctgccgagaggaggctcatccggccgcatggagaatggtcatgggaagacttgacttgggacggtacaggcagacgtcccaaggtgaacgcggtgttgggtagcctctgtcgcttctactaccctggcatggtggagctcaatggcgagaggttcgcggctatgcagtgggccgactggggtctaaaggactatgtccagccaggggagtcaggggaaagcagtagcggagggggaagttcggaacaaaaacgaaggacttgtcaggtggctgtgtgggacgagttctgggggaggttccaattgccggatgacatcgaggaggatcaggctcagtgggcacgtgtgaagaggcactttcggaagtgcgctgataaggtaatcaaggatgccatgtacaatgctcgcatcgcggccgtcaactactactacaagaagataaaggggcagaaaatgagcaaagcattaggggccaatgagatctacctcacagaggagcagtacctggagagcgttgtggattggctggcgaaggacatggaagcctggaggtggttggctaagagatgggcgtcgcctgagtggattgcagagtccaacaagcaccgtgccaaccgtggcactgaaggaccggggcacaggtacggcgccgatggacaccttggtaccgcacgccgcatggaagctgaaagtggagttgctccaagttttatggaggtttacgtccgtggtcaccgtggccctgatccggcgaaccctgatgagctatgcagcgaggcggcaagggagaaaatgaatgcatatggggaggaaatgactcaacgccatgggcctgatttcgactggatgcattcagacttagatgcctcggcgttgtaccacagtggtgggggtagaaagcatggcaggtttgcctttggcaccggcgttgtggagtataacaggacaataggtcaagggaaggcatcgtcttcgggagggagttctcgctcctccaggtctgctcgagaggctcagctggaggaggagactcgggcagcacaggagcaggctcgagcagcacaggagcaggctcgagcagcgcaggagcaggttggacagctgacgcaatatatggcttcttattttcaggaaatgactactcgactcggccctgatatgaacttgcccgcttttcgccctccccaggcacaaggatggggacagtggccaggacaagctccagcgtcgcagccacagtggactggtgttgggtggacgcaggcacctccaggcacttggacacctccaccaccccaaggatcgcagccagtcccgggatgggtgccaccggtcttccagccaccggcgggctctcagccatttcaagcgtggatggcaccgccaccgacggggtgggtgccaccacctcaggggtggccagcacaacagtacccgtggatgcatgcacagcctcctcctcaccatggatcacagggttcagcgtcacatgctcagggatcggagggtgctgtcaacgtccaagacttcctcgtccatggttctggagggagtggccaccttcctggtggcggaggagggagtggccaaaactcacatagcccgccggagtgagtagtgaatttgtttatggctatgtatggatatgtatagactttgtttatggttctggatggagtgactttgtttatgtatggactatatatgggctatatgtatggaatatgtttgaaccaattatgtaagtgtttgtgaatggccccggggaaacataacctgcacgagcacactcaaatgtcagttcttggaactctcacaagactaatggcgataaagtctaagcccaacatttcaaccagtgcttcaccgcatcgtccaattaatggcgaggttcttccggagaatcataacctgcacagaatatgacctcacaaaaagatgtggctggtcttgggatacatatgagaagattacgtgtgtctcatggttgtcaaacattaggataataaaaggccaaatcaatattaatccgtcacggtcaactagtggagtttgtgacaccgtctggcgaaagcaaattaaatattattccccggcccaagagaatgagaattacaacgagacataaccaaattaaaagagaccagttacgcggccgtcgcacccaaaagatacccgcgtctctgcgttgttaccacgct

SEQ ID NO: 70261 - DNA, 603 bp, Zea mays
  Clone ID: MRT4577_164069C.1
cgcgtacgagcgaaagtgctcaacatcgcttagtgcagcctgcatcgatcgactagggctgtacgaacgatggggtccgcctgcgcctcagtgatgacgaccagcctgctggcgctggcgctggcagagctggctttcgacttcaggagccagcggtgcaaggcaacggctgttccagcgtgatgatgaccctggccccgtgcatggacttcatctccagcaaggcgtcggagccggggatctcctgctgttcggagctggctggagtcgagcagaccgacccccgctgccgctgcccgctgcggtacctgctaccgacgcctcccgacgaaccatcattggcagcggaggaagaagccgacacaggtgcagatgccccttcagcaaatggagcctcaagctccacaaactcaaagaatgcatcgagctcactgcttgtcatctgcgcattgctggatgccttctaataagtggtgatacaacttcggtggccatgtcaccgcgcaggaatcaggtctttccctgaatcctgactatgcagttacccatgattctgggcaaaatttttgcacgggatgggatgaggttttgatgtgccacatc

SEQ ID NO: 70262 - DNA, 551 bp, Zea mays
  unsure (1)..(551): unsure at all n locations
  Clone ID: MRT4577_16406C.1
ataacccgcgctattccttgttcattgacctaaaccccgtgctagcgagtgactgttgcattgcttgtgtgagcatgcctagcgacggctcccacccgacagatgctgtaaaggaaagatggaggctgagaggtactgcagggcaggtatcgccatggactcgtctactttggtctagcgcggccagaaatgtgttattatggcctttctgagctttaaagcatcaagggcggatgccgaggttatcgaccataacaagaatactgttggtataaaaacacactcagaggacacactagcagagctgtgacacagcctacgcaaagctgaagatcgcctgtggnttcgcaggagggagcacgcgcaaagggagcgcagccaggtcatactcatctccatggccgatgctggcactatatgttgctggcagcatctacacgccgactagaaccgaagactactctacgccagcgcatgctaatgaaaggaatatagccctgtttgaccagagggaacgatccctgcacgtagaagagctccacgaagaacta

SEQ ID NO: 70263 - DNA, 111 bp, Zea mays
  Clone ID: MRT4577_164070C.1
tgcaagggttcgacacacaagaagaacttgacctccggaattgaactgaaccacaagaaaagcctccaacctccgggcctcctggcccaaattccaaaatccggcaaggtc

SEQ ID NO: 70264 - DNA, 469 bp, Zea mays
  Clone ID: MRT4577_164071C.1
agggcaaccaaaaaccatgctagcattacgggtccagaggtcaagggaaccacagacgttaaggtaacaaagcatcatttcggctggggtcattcgctacaggatccactcaaagggggaacgaaaacttggaactaccggaaaaacccactggaccaaataccctttccatgccaaggaaaaccgggttttcaggctccaccaacctggggtttccaggagtcccccaaaaagagctcggctactccccaagcttaaaagcttccatcagggaaaaaccggctgaacgggaaggggattttgggcgctctcagctcctttattggaatctaaagaggggcagtttcaccctcaagctcaaccatgacgggagcattcatgcttatttgcaagggtcgggtacccaggaagcgcccacgttcgaacttcggaatggattttggtggtttggggtaccctggggcttttc

SEQ ID NO: 70265 - DNA, 1065 bp, Zea mays
  Clone ID: MRT4577_164072C.1
tgggaccctcgaggccggccgggccgggaggattcaccaccatggccaaccacctgtgcggcgccggggagagcatgagcatggcgccttcctggtagcggtgggttccatcgaggccggcgggcaccacagcaatattgcccctcgctcgtttctcattcagcgcccgtacagccaccactcaaccgagccatatcgaaagttctcaacatcgcttcgtgcagcctgcatcgatcgacgagggctgcacgaacgatggggtccgcctccgcctcagtgacgacgaccagcctgctggcgctggcgctggcagcgctggctttcgtctccagggccgcggcgcagggcaacggctgttccagcgtgatgatgaccctggccccgtgcatggacttcatctccagcaaggcgtcggagccggggatctcctgctgctcggtgctggctggagtcgtgcagaccgacccccgctgcctctgcatggtcctggacggcaccgccacgtccttcggcatcgccatcaaccagaccagggcactggagctccccggcgtctgcaaggtcaaggcgccgccgctcagccagtgcacaggcgtccctgcggcacctgcaccgacgcctcccgacgaaccagcagcggcagcggaggaggaagaagccgacacagctgcagatgccccttcagcaaatggagcctcaagctccacaaactcaaagaatgcagcgagcttactgcttctcatctgcgcattgctgtatgccttctaataagtggtgatacaacttcgctggccatgtcaccgtgcaggaattaggtctttccctgagtcctgactatgtacttacccatgattctcggcaaattttttgtatggtatggtatgggtttctgatgtgccacatcaaacaacattgcttttcgccaaatgagaaagatcagttctcgcccattgtttcagcggaattattggtgattggcaccacatggtgatcattatcaagaataagaacaccaccccatcagattgcagtgaaaaaaaaaaaagaaaggcgctctacaggata

SEQ ID NO: 70266 - DNA, 336 bp, Zea mays
  unsure (1)..(336): unsure at all n locations
  Clone ID: MRT4577_164073C.1
ctatttattatccactgctgctttcactncccggagcgggctatgtatttttgtggggacaaaagaaaccacaagcgtcttacattctgccccagaagtacccctgataaagatgcagctgtctgcacaaccagcacaaattattttcaaaaaaccatggccagcctacacctagaaatgatgaggccctagagggagagggaccaattctaacacgcgcaccacgcctgccggtgggagactaatatgtgcaagcctcgtgagccgcataaactccacacaacagcggatcgaagcgttttgatgagaacgtacgccctttgcatcgctgaagtg

SEQ ID NO: 70267 - DNA, 983 bp, Zea mays
  Clone ID: MRT4577_164074C.1
cgggacgacacgactctcggcaacggatatctcggctctcgcatcgatgaagaacgtagcaaaatgcgatacctggtgtgaattgcagaatcccgcgaaccatcgagtttttgaacgcaagttgcgcccgaagccttctggcggagggcacgtctgcctgggcgtcacgccgcctcgcatcaaaccaactctttcccaaatccaccgccggctcggctcgcccatcttcgcgccaagcaccgaatctccgatggcccgcacgaagcagacggcgcgcaagtcgacgggcggcaaggcgccccgcaagcagctggccaccaaggcggcgcgcaagtcggcgccggcaaccggtggcgtgaagaagcctcaccgcttccgccccggcaccgtcgcgctccgggagattcgcaagtaccagaagagcacggagctgctcatccgcaagctgcccttccagcgcctcgtccgtgagatcgcgcaggatttcaagaccgacctccgcttccagtcctccgctgtcgccgcgctgcaggaggccgccgaggcctacctcgtggggctcttcgaggacaccaacctctgcgccatccacgccaagcgcgtcaccatcatgcccaaggacatccagctcgcgcgccgcatcaggggcgagagggcttgatctcccgttgtcgtcgtccacgttgttgggcctttcctctgtgtctctgcttgtagaatccttgcttctgttcggttccttctgttcgcatgatggtgttcgtagtgttaggagttgcattttctaatctgcttgttcttgcaccggtgcctctgaagtggcgtttccctctatcttaatggaaatggaatgtgcttttggaaaaaccccgagtgaattctaggctctgaacacactttctgggcttatctttatgtggtgggatcaatgtgtgaattttgagacatgtaatttttagttgtcaggtctacacaattgcctc

SEQ ID NO: 70268 - DNA, 375 bp, Zea mays
  Clone ID: MRT4577_164075C.1
cccactcgttcgcgatgattgctgggcagagccacaacgtgacgctatggtacgcacggcacaacacaagccaatgcttcaagtctcaacttacctgagctgaacgacgattggtggcgagacaagagcctaatgctgcttcggccgggctctctgtccctggtgggccgctttgcagggcaacctggtggccaacaaccagaacggttccgcaccggatcaaagggctggcgggctacctttcacgggaaggggctcaagctcgggatctactccgacgccgggtgagagtgacgagggagaaatagctagcttgcgtgcttgactgcttgcctccggcggcacttggtttttcgccgtatagtctaccacgac

SEQ ID NO: 70269 - DNA, 684 bp, Zea mays
  Clone ID: MRT4577_164076C.1
cccacgcgtccgcggacgcgtgggatcctcccctgcgccgacgcggcggtgacggcggaggcgctgcggcggagcaaggaggtgaactaccagctggtctccaagctcaaccagctgctctccaacgtgtcgaacggcaacgtgcctccgcaggccgggcccccgctctactacaaccagtcggggcctcccgtgccgctcctctgcagcccctacagcgccgacctctccgaccggccctgcgccgtcggcgaggtcaccgccgccgacgcgcagcaggtacgtacggtacggtacggcacgaacaaagaacctgtgcgtgcgttgttggcgagatgtctgacgtcgcgtgttcgtttcggtcgcaactcgcatcgcatcgcatctgcaggtctggcagcgctacgtgtgccgcgcggcggcggggtcgggccgggaagaggtgtgctcgacggcggggcgcctgacgccggcgatgtactcgcagatggtcgccgtggccggcctcagcgacgggctgaggcggcagtcccccgccctggccgacgtggcgagctgcgtgaccgtgcggcgcgcgttccggacggtgggccagcgcggctgccccccgctgcggcgggacagccgccgggtgtaccaggcgctgctcgcggcgtcggcggccgggatgctcgccgcggccgc

SEQ ID NO: 70270 - DNA, 798 bp, Zea mays
  unsure (1)..(798): unsure at all n locations
  Clone ID: MRT4577_164077C.1
tacctcgaggccggccgggaatctagcgtatcttcgtctatcatcacgcactccatgctttttgtcacgaaaactgttagccggcaacaggattaacctcccaactgcagccgaaccacgcacatgtcagctagcgcctcctcccgcctcccagcactgatgctggcgttgtccggccactggtggtggtggctcgcaggcgaatgcgcggcgccctggacgccgcacgcgagctgcgccttggtctgcaatgcatcagctgcgcttgcaggatggcgacctgctgctggagagcgaagatctgggcgacgcagccgtagacggggtcgcgccgtcgcggagcctggcctgcgcctcgtaggtgatggagacgacggtctcgcagcggtcggcgacggggaggtgggacagcagcttggaggtgttgctttgctggcgccaacaccttgtggttggcggcgaagcgcggcagcgcgcggcgcccctggtcgtggtcgcgctgttgaagtagggcgcgaacacgcacgcactccggcacgcaccgccggcccaggaacttgcacgcgccgcacgtacggagaccccgagcccgtcgcggcagcagcagctccggccatgtcgatcgtcgtcatcactggcgcaaataattaaagggaaaagctagcaaaggaagagctaactagctagctagctagtcgatcgtcgtcgcgcacggcgcatctctccgagctactggtgctactagctatggtaggataggacgcccaagctgcaccctgcttgtgngctacggtgcac

SEQ ID NO: 70271 - DNA, 340 bp, Zea mays
  Clone ID: MRT4577_164078C.1
ttttctcagctgccagctcttgacgtgtcgttgagtgccctctgccgagatgtctattccgcctaacactgttgtcagtgcaccgtgctgcggaccgtccacgcactcaagcgtatactaatgggacccgagcaaggaataatctaacatgaagaagacggccacgactcctaccaccagtagccagcatcaatccgcagactgacatgtcgtatccgtactgcgacaagaacaaggactgagagcggcaaaggctgtaccgccgcttctgcgccgccctggtgtgcgtcctcgtggtcgtcatcttcatcgcgatcatcatctggctcgaccttttttt

SEQ ID NO: 70272 - DNA, 390 bp, Zea mays
  Clone ID: MRT4577_164079C.1
caaattcatggggaatttcttgcccaaccccaaaaggccacatgccgggccgggcgcctgtgattttttgaccaacctgtttaccagatgtacaaccacttgttggagctgcagcctacacatacaaagccggcccaaaactagcacccccccccccctgaaaaaactacccgttaccggccccccccaacggcccgtttcaggggctgcagcgtcttgttgtagctgacgaaccccctgaaccaaaactcgaaaccctcggggggggcgagccccacgttcctttggtccggcccgtgcctttttttcttgggccccaccccccccacctttcccagggggacggccctctttttcggcgcccggaagctgccttccccccccgggggg

SEQ ID NO: 70273 - DNA, 985 bp, Zea mays
  Clone ID: MRT4577_16407C.1
accttccgcagatgatatataccttaagccagcagaaaattaggtataggcgtagagactagagagcgagcgagctcagtccgtgttcagtcgagagagctcgtttagcttggccatcgacgagctagcagagcaatagctaggatccatggcgaacgcgggcatgaagccggtggccggcctcctgctggtgctcaacttgtgcatgtacgtcatcgtggcggcggtgggcggctgggccatcaaccacgccatcaactacggcttcttcatcggcaccggcctgcacctcccggctcacttctccccgatcaacttccccatcgggaacgcggcgaccgggttcttcgtcatcttcgccgtgatcgccggggtggtcggcgcgggctcggcgctggcggggctcaaccacgtccgcgcctggagcaccgagagcctgccggcggcggcctccgccgggttcattgcgtggacgctcaccctgctcgccatggggttggcggtgaaggagattgaactgcacggcaggaatgccagactgatatgcatggagtccttcaccatcatcctgtcggcgacgcagctcttctacctgctcgccattcacggaggcttgagataaaatcgatcaccgtgttggccggaggcactgaggcagtgactgatgaatggagacttgtcgtcggttccgtacgtgtgtgtctgtcggattgagtgggcgtgcatcggattcacggggcagcgcgtgtactatatatgtgacttcattcggttcgctgtgtcgttgtgggctgggctgtcttccaagatgcatggagaggcagtacgtatgtacacgtacgtgtatctatctgttcgtgtgtgtgcgcccgctgctgcttgatttatcttgtgcgtccgattggttacgtcattccgtgtcattcattgattgtttcggagatggagagtcaatatgtctacacgtcatgatgacgtggtgatt

SEQ ID NO: 70274 - DNA, 219 bp, Zea mays
  Clone ID: MRT4577_164080C.1
gggacggacaattagtggaggcctatgtacaacgagacgaggatcttcagagcccgcgacggcacagttttttgcagtcgtaaacacactgaaaactgaagatcctaagtcgtgggacatggtgtacctcgcgttgaatgcctgagcagggaagagacaacttggcggaccgagacacttcaatcgtgagacgcatagaacgccaaatcccttacccga

SEQ ID NO: 70275 - DNA, 419 bp, Zea mays
  Clone ID: MRT4577_164081C.1
gccgggggatgagcccaggcgcaggggctcttccccctactgggggtcttttatccttaccaagcaaatgttccattaaaattaaattccatcctgtgcaaatttatccccaaataaaaaaaatgcaattgacatatccaaaaatgagaggaattatttatgataaatttatttggtgtgataatattctgttcggcctctttccctatgtcctttcaattcaagattaaggattaaactccatatgaacttcaaattccaaatttcaaattcctactaatgtgaattgtctctattgctagaaatgagtattcatatattattgtatcccttgcattcattattcatggacggaataatgggtcaataaaaattccctctgatttctatctcgtccaattgaaattccaattcagata

SEQ ID NO: 70276 - DNA, 176 bp, Zea mays
  Clone ID: MRT4577_164082C.1
tcggacgcgtgggatgtgccaaccatcagggggtgtttaaaaattagggggaggatcaacagcttatgggccccgagattcagatccaaagtgtccagaaagaggttagggaaggaaggcttcaacaggcaggtcggaaccttacagattggtatgctttacaggagtaaatcaga

SEQ ID NO: 70277 - DNA, 755 bp, Zea mays
  unsure (1)..(755): unsure at all n locations
  Clone ID: MRT4577_164083C.1
cgaaacaactaattccaagatttctgctattaaagaggagaaagatatgctgtcaaagttccttgaggaacaaaagaaaagtacggttgaagctcaggaaaacatggaggatgctcagaataccataaaaaggcttgggactgagagggagagttttgaagtaaggtctaagaaacttgaagaagagttggccacagcgaaaggtgagatattgcgtttgaggagacatattagtacaggtgggtctccgaacacccaagttctttcggaagcaggtgcagcgccaattagcagtcgagcactgaaacagcaacccatgaatgatcatgttcaaaatatcaatggtgctgatgctgtagcgtcacgttcgcctaaacggatttataggaggaaacgcaaaccagcagcataaggattatctgaatgccaagggctagattgagaactccatttttccaaccaaggctagtttgggaactccatttttccaaggatttttaatttctcaaggaaaaatgaactaatttctcttgaaaaaaaaattccttgaaaaaatagggttcacaaactagccttaaaagcaaaagctggcgttctttttattcctctattattcaccttgttataacatcttgtgaactcccattcttcgaaaggtagacctccttacagtattatcttcggtggtgctggctcttccgcgcatccctactganaccgagaaccttatgtagtcacatacggtttgatgggat

SEQ ID NO: 70278 - DNA, 173 bp, Zea mays
  Clone ID: MRT4577_164084C.1
ccgggccgtctcacaccttgagcctttcatactttccgcgatctctctaaaccctaggagcgtgctcaccgttggcgatggcgaggtgatggggatgtaccccgacgctgtggctatagcctatgcggagcactactactcgtacgtatcgacaccaaccgatcagggatggt

SEQ ID NO: 70279 - DNA, 636 bp, Zea mays
  Clone ID: MRT4577_164085C.1
aatccctccctctctgctattccccgtagcaccttccgccaatcctaccgaccatgcctgccgcgccgactctgttgcccccgagagacgcgtcggagacgatgatggcggagtcctccgaccgcttctgcatgataccgatacgtttctcgcagatgagggagttctacaagaaggcggcggactccttctggaccgcggaggaggttgacctctctgccgacgcccgacactgatacgaggggctgcccccctacgactggcacttcatctgccacgtgctctccttcttcgctgcctcccacaggatcgtgctcaagaacctcggttcccgcttcatgaccaacgtgaagggcgccgaggtgcggcccttctacggattccagatcggcatcgaaagacatcctctcggagatgtattcgctgctgctccagaactacatccacgatctcctagataatgaccgcctgttccacgccatcgagaccgtgccctcatgccgccgcaaggatgaatgtcccagtgcttgcatccacgtcgggagcgacatcgctgagcgcatcactgacgtcgactgagtataggacataatcttcgaggttgccttcagcgtcatcttcattgtcgagaagcgc

SEQ ID NO: 70280 - DNA, 478 bp, Zea mays
  Clone ID: MRT4577_164086C.1
gtgcgcccacgcgtccgcgatctccaaggccttccttccatttccatttccatcggcatcaattgttccccggggtgggcttgtggctctctccggtcgcctgaacaagccacacggagggggtcacactcccctgagcggcgtcgggcggtcggcttcatttgatgcgcagtgggcccggcgggcatggcgttccacgaagtggagacgtcgcgtcggtgctaagacgtcggggcatggtcggcgcgcagtgacggcggtcggcggctgggtccgatccgtgcatgcatgccctgcgctcttaccctcatcgagtcgtcgctcgaccggtggtgccccctcccccgcgcctgctcggcgcccacaaggtcgcagccacggggaggcgcacagggaaaaggaagatgagctgctttccgtgcttcggtggcggaaagggcaatgacgacgacgacgacgcggagagcccaggtgatgc

SEQ ID NO: 70281 - DNA, 296 bp, Zea mays
  Clone ID: MRT4577_164087C.1
cttccggtttggactgggcctagctaacaggctgaaaaggtcggccttccctcattgcacctgtagcaattctgctgttcctagccgaaccaagtccaacctgacaatatggagctacataatatcgtaacaagagccgcaacaattttgaggcatatgccaggttgacgaccgagctttgacaaccttagtgactgggactgtgcttaatatgatactaatgtcaagagaaactagtgacatgcacattccatggaactcggagattggaaggaatctccagctgctagagtgga

SEQ ID NO: 70282 - DNA, 332 bp, Zea mays
  Clone ID: MRT4577_164088C.1
ttcactaccatttttcctttcacaacatgccgggtgtctgtctgtctgggtggctccactcacctcctctgctacttctcgctttcttccatcttggtccatcctccactcttcctgctgagccatggcagctgccgaagaatgccacagccactcaggtatcaaactctggcccttagggtgagcatacactgctaggtctgcaagaagaaggtgatataatgtgctccacatcatataacgcttgttcaatacttacatagacacccatcagcataatgtggtggtcataggcaacttttcttcatacactctcttcaataagctcctca

SEQ ID NO: 70283 - DNA, 305 bp, Zea mays
  Clone ID: MRT4577_164089C.1
ggacgcgtgggcttttttgtcgtaactagcaaacatgtccgtgcattgctatggaatccgatacgtataggaatctgattccgtatcatcgctggacgcgagatgttattccatgggtcatgagtccgggtcacatttgagatacagaggcattgaaatcggaccttgaatctgttatcgataggtgagttattctaactcgaatgaggtcataagttcatataaagtaaaaaatatgaggctgaagaaactctttactactcgggtagttagggagaggcaaaggggaaaaaagataaaatttt

SEQ ID NO: 70284 - DNA, 1353 bp, Zea mays
  Clone ID: MRT4577_16408C.1
tatacctcaagccagcagaaaaatagtaggtataggcgtagagagcgagcgagggagcgagcgagctcagtccgtgttcagtcgagagagctcgtttagcttggccaacgacgagcagagcagtagctaggatagatccatggcgaacgcgggcatgaagccggtggccggactcctgctggtgctcaacttgtgcatgtacgtcatcgtggcggcggtgggcggctgggccatcaaccacgccatcaactacggcttcttcatcggcaccggcctgcacctcccggctcacttctccccgatcaacttccccgtcgggaacgcggcgaccgggttcttcgtcatcttcgccgtgatcgccggggtggtcggcgcgggctcggcgctggcggggctcaaccacgtccgcgcctggagcaccgagagcctgccggcggcggcctccgccgggttcattgcgtggacgctcaccctgctcgccatggggtacgtacgttacgtatgtcgggtcccgcgtagacgcgtagtacgtgtacgtgtgtgtgtgtgttggtccattaattgtcgatcgatttgctgacccgtttcccgttgcattgcgtgggggaccgggctgttggtctcaggttggcggtgaaggagattgaactgcacggcaggaatgccagactggtaagctaagatcgatagatgatggggcaatatatatatggcctcctcttgagccgatgatctagctatatatctcgtgtgcagatatgcatggagtccttcaccatcatcctgtcggcgacgcagctcttctacctgctcgccattcacggaggcttgagataaaatcgatcaccgtgttggccggaggcactgaggcagtgactgatgaatggagacttgtcgtcggttccgtacgtgtgtgtctgtcggattgagtgggcgtgcatcggattcacggggcagcgcgtgtactatatatgtgacttcattcggttcgctgtgtcgttgtgggctgggctgtcttccaagatgcatggagaggcagtacgtatgtacacgtacgtgtatctatctgttcgtgtgtgtgcgcccgctgctgcttgatttatcttgtgcgtccgattggttacgttcaaaaaaaaaaaaaaaaaaaaaaaaaaaaaaaaaaaaaaaaaaaaaaaaaaaaaaaaaaaaaaaaaaaaaaaaaaaaaaaattaaaaatttaaaaattaaaaaaaaaataaaataaaaattaaaaaataaaaaaaaaaaaaaaatggggggggccctttaaaaaaataaaattttttttccccgtgtttgaaaagttaaaattttttttttgtggcaccaaaatta

SEQ ID NO: 70285 - DNA, 333 bp, Zea mays
  Clone ID: MRT4577_164090C.1
attcggctcgagggccgactccacgccttcttttacctcctccgctcggcgacgtttccgggacgaggcgtcgcctactgcggagccactcatactagctgtagatcgcgtatcgtgtaccatgacaagatcactgtacaccaacctcatgaggcaacttatgagatcggtctgtgcatcgacatcaactgctgtgacaagaccagctatccatgaattgatgaactaacaatgaggacttaagggctcccttaatgcagatggggacataagtgcaacacgagtatgctgctgatcacgacacccattaagaattttagccaacaagtaaaa

SEQ ID NO: 70286 - DNA, 575 bp, Zea mays
  Clone ID: MRT4577_164091C.1
cccacgcgtccgggccgccctttttttttttttttttttttttttttttttttttttttttttttttttttttttttttaaagaaaccccttctttttttttttatcaggttttatataacattcaaagcccccggggtttgcaaatccaaacataacaaaggctttttttttcaataccatttatacaacacccccacaatacttttttttttggggcaaataaaaaataacaatgtctcccggttaaaaatggggtaagcccacaggttcagggcctaaacaataatttccagcgtccaccaatatatttcttgttccggcacgggcaggttaacgaacacaaggccggtgtcggaatggaaattaaactccatttccgccaagtcaaataaacacctggccggttcccgaaagaaaaaagcgccaaaccaaccgaacccgaaaaccttaaaagccatggccttgccgccaactttgttaataactttaaattcttaaaggggccccccagggttaaaaatataaagcaccccgacgggcccaaacaaaaaccttggaacaagggggcgaagg

SEQ ID NO: 70287 - DNA, 369 bp, Zea mays
  unsure (1)..(369): unsure at all n locations
  Clone ID: MRT4577_164092C.1
aaaaactctttttttttaattcacaactatcccttttttnagccaacnaacacctgccnacgtgcactttcaaagttcttagttcaccaannnnacacccaacccctttcaattcatcctctaaccaactcataataccacatacctgacacctaaaaaatattttcatatcccaaaaaaccaacacacatctacgtctctttccccccccacttatatcacatacaaaccacatattcagattcttcatacacaacacacataaaaccaaactctacaccacaaccacacacaccactcacatcttttacattaaacacaaacacaccccatcccaactcatatacaacacaaatccctaacacaaaa

SEQ ID NO: 70288 - DNA, 2277 bp, Zea mays
  Clone ID: MRT4577_164093C.1
cgacgtctgggtgaccgccgccgcggacccggctctactcctgggtgccgtgcctaggcattcgccggcgacgagcacccaattttggaggctgaagctgtggggacagatttgaagcagctgatgctactgtgtgctgcatctctcttacgaagtgtgggggttttcaggtgcctttcacccctcgttcgggccatatccttcccgtggagacggtagggagaccgctgccgcagctgtacactaggttcctaggtattcgccgggcccttccccggcgacgagcacccaccatgtacatgagaaatccttcttcaaatttatggcataggctacctctgtggggatcttctgtgaagcaagagaagttacctagcacacaactcaaagttcagtagattattgaggatcaacatttcagccatctgtatgttagttaatatgatggccgatggtaacatctggttagaaagatagaaactcattattgcgctacatatggtagtgcccattcgacataagaactaagctggacattggtagatccaagttattaatggcgcacacttcctgtgatggtgtacatcatgttataagtgtagcacatggggaaactgcatcaacatcaaccagtcatcaagatatgtgcagtgactcggatgaaccacatcaggaaggcgggctgttgtgttggatatgccactccttttataatgtgtgcagcaatatgctgctgctttccatgcttgatttctgttttgcgtcttcaagaaaaattgagtcaaaatagtgagctactcaagagctagtagatgcatttacaacctacaaattcaaaccaaaacacatcaaaaactgggggattgaccatgcttcaagctcagagcaatcttgatgagggtggcattctcctttgttcgcatggataatggatatacttgtttcagctgcatatgctgtcttcctcttatttattggcggtatgttcatcgaaacagacatttggatcaagaacctcagcagccacctacaacatatcctactttgactccttctcagtcatcagaaggacgcaaccatcgtaccagtggtattgttttgcatcttggatgtatctcaatttcttgcccaaggcttagtgtgctggcttatcacttcaagacaggtgttgactgtttctttgctgtatggtttgttgttggcaatgtgtggatttttggtgggcgcagtatttcatcagatgctcaggacgctcccaatatgtacaggttgtgtttggcattccttgcgcttagttgtgttggatatgccattccttttataatgtgtgcagcaatatgctgctgctttccatgcttgatttctgttttgcgtcttcaagaagatttgggtcaaaatagaggagctactcaagagctaatagatgcattgccaacctacaaattcaaaccaaaacgtgtcaaaaactgggggattgaccatgcttcaagctcagagcatcttgatgagggtggcattcttggcccaggaactaagaaggaaagagttgtttcagctgaagatgctgtgtgctgcatctgtcttacgaagtatggagatgatgatgagcttcgtgagcttccttgcacacacttctttcatgttcaatgtgtagataaatggcttaagataaatgcggtgtgcccactctgcaaaacagagattgggggtgtggttcgatctttctttggcttgccatttggccgccgccgtgtcgataggatagcggcaagaggtgtagctagctcaagattcagtgtatagaacaatgctgtttttccgcataaagagctctgctctgttgcaatggtttgattgattgtcaaggaaagcgctgtgtgcatgacttgaagacaatgacacctggtgggagacctgatgcttgtaggggcaaatttctaagaaatgtaacggactgaaggtgctgctatactctgatgaacattttttttccaagtatgtaaataaggaacacgaagttcgcttgccaggtataatgcaactttgcaagcaacttcacaggtgctctagcatcggccttggtgttctttccttccttctggttctgtgattctcttcataacggcaatgcactgcatgcattgtaaggctgtcttcagtagcttactcattctagtttctatcatcatatattctattttaaacttcaccttgtaaacagtgtaatttataatataaaatagttatttataatataaaatggtgttttatgcgatc

SEQ ID NO: 70289 - DNA, 454 bp, Zea mays
  Clone ID: MRT4577_164094C.1
gaatagtaacggattggattggtttggctttttacaggttggcctgtaaccccccatgggaggggggacaaaaaacaatcagggggctttccacaaaaaccaggaggggagaatgccaataaaccacccagataaaccattaaaaaaaaccgccccacccaccagggtaaatgcccaacccaaccatgagaaaaagacccccggagaaaccaaagggaaaaggcaaaacccgaacccaggcgaaaagccaaggggaaaaccgaaaccagggtcccaatgaaatgcaggaagaaaacaaacgggtgccctagacccccagccgtaaaccaaaccgtggacccaaccccccaatggattcccccccccccccctttgacggcccccggggagaaaaccttgtagaatgcgggccccccccccttggaggccccgagaataaaaacctttggcgggg

SEQ ID NO: 70290 - DNA, 2117 bp, Zea mays
  unsure (1)..(2117): unsure at all n locations
  Clone ID: MRT4577_164095C.1
ggggtacccctcgaggccgccgcgagccggcattcgggtcggtgtcgccgaaacgaaaggaacagctgctctcttcgcctctgccgggctacccttcctccttctccctcgtgaccacgcacgctgagcatccgcgcacctgctcgcccgattgccccggcgttttcttctcccgttcgccctgcgtgcgggcgctatcgttctcgtggcgacgtctgggtgaccgccgccgcggacccggctctactcctgggtgccgtgcctaggcattcgccggcgacgagcacccaactgatccaagttattcatggagcacgcttcctgtgatgatgtacatgagcatgctataagtgtatcacatggggaaactgcatcaacatcaaccaatcatcaagatatgtacagtgactcagatgaaccacatcaggaagataggccatcaacgagcacgcaaaccccgtcatcagagtcttctccatcaacatcaccaactgcttatagctccagaaatttatcttttcctagaagagatagtatatatggtcatggaagaaatccttggaattctggtttgtggatctcatttgaaattgtcatgtacattgctcaggttgtagctgctattgtaatcctcctcttttcaagacatgaacaaccccatgctcctttgttcgcatggataattggatatacagttggctgcattgctagtcttcctcttatttattggcggtatgttcatcgaaacagacatttggatcaagaacctcagcagccacctacaacatatcctactttgactccctctcagtcatcagaagggcgcaaccatcgtaccagtggtattgtcttgtgtcttggatgtgtcacaatttcttgcccaaggcttagtgtgctggcttatcacttcaagacagctgttgactgtttctttgctgtatggtttgttgttggcaatgtgtggatatttgatgggcgcagtatttcatcagatgctcaagccgctcccaatatgtacaggttgtgtttggcattccttgcacttagttgtgttggatatgccattccttttattatgtgtgcagcaatatgctgctgctttccgtgtttgatttccattttgcgccttcaagaagatttgggtcaaaatagaggagctactcaagagctaatagatgcattgccaacctgcaagttcaaaccaaaacgtaacaaaaactgggggattgaccatgcttcaagctcagagcatcttgatgagggtggcatcctcggcctaggaactaagaaggaaagagttgtttcagctgaagatgctgtatgctgcatctgtcttacaaagtatggagatgatgatgagctccgtgagcttccttgcacacacttctttcatgttcaatgcgtagataaatggctcaagataaatgcggtgtgcccactctgcaaacaagagattgggggtgtggttcgatctttcttcggcttgccgtttggccgccgccgtgtggataggatggctggaagaggtgtagctagctcaagattcagtgtatagaacaacgctgctttttctgtggtatcctcttacgcataaagagccctgctcatgttgttggaatggttttgatggattgtcaagcaaagcgctgtgtgcatgactccaagacaattacacctgatggagacctgatatgcttgtagcggcaagtttatgtagaaatgtgaagggctgaaggcgctgctatgctgtaatgtaacatttttttcccaacgatgtaaataaggaacacgaagttcacctgccaggtatattacaactttgcaaacttggcttgccatttggccccccccgtgtcgataggataacggcaaaaggtgtagctagctcaagattcagtgtatagaacaatgctgtttttccgcataaagagctctgctctgttgcaatggtttgattgattgtcaaggaaagccctgtgtgcatgacttgaagacaatggcccctggtgggagaccctaaggcttgtaggggcaaatttctaaaaaatgtaacggactgaaggtgctgctatnctggaaaaaaccggttttttcccccaaagtaacacacggccccg

SEQ ID NO: 70291 - DNA, 832 bp, Zea mays
  Clone ID: MRT4577_164096C.1
gccaggtcacccggggactctcactcatactccctcgtccctccgtgccaaaacgaaagggaccgctgctctgctctgcctgcctccccttcatcctccacttcttcctcttggtctggttcgggcagagcatccgcacctgctcggccgattaccccggcgttttctgttccctttcaccccgcgtgcgggcgctatccttcccgtggcgacgtctgggtgaccgctgccgcagccctacactaggttcctaggtattcgccgggcccttccccggcgacgagcacccaccatcttaggctacctctgtggggatcttctgtgaagcaagagaagttacctagcacacaactcaaagttcagtagattattgaggatcaacatttcagccatctgtatgttagttaatatgatggccgatggtaacatctggttagaaagatagaaactcattgcgctacatatggtagtgcccattcgacataagaactaagctggaccttggtagatccaagttattaatggcgcacacttcctgtgatggtgtacatcatgttataagtgtagcacatggggaaactgcatcaacatcaaccagtcatcaagatatgtgcagtgactcggatgaaccacatcaggaagataggctatcaacaagcacacaaaccctgtcatcagagtcttcgccatcaatatcaccaactgcttatagcaccagaaatttatcttttcctagaagagatagtatatatggtcatggaagaagtccatggaattctggtttatggatctcgtttgaaattgtcatgtacattgctcaggttgtagctgc

SEQ ID NO: 70292 - DNA, 770 bp, Zea mays
  Clone ID: MRT4577_164097C.1
ggtatcaaaacgaaagggaccgctgctctgctctgcctgcctccccttcatcctccacttcttcctcttggtctggttcgggcagagcatccgcacctgctcggccgattaccccggtgttttctgttccctttcaccccgcgtgcgggcgctatccttcccgtggcgacgtctgggtgaccgctgccgcagccctacactacgttcctaggtattcgccgggcccttccccggcgacgagcacccaccatgttgtagctgctattgtcatcctcatcttttcaagacatgaacatccccatgctcctttgttcgcatggataattggatatacacttggctgcattgctaggcttcctcttatttattggcggtatgttcatcgaaacagacatttggatctagaacctcagcagccacctacaacatatcctactttgactccttctcagtcatcagaaggacgcaaccatcgtaccagtggtattgttttgcatcctggatgtatctcaatttcttgcccaaggattagtgtgctggcttatcacttcaagacaggtgttgactgtttctttgctgtatggtttgttgttggcaatgtgtgcatttttggtgggcgcagtatttcatcagatgctcaggacgctcccaatatgtacaggatgtgactggcattccttgcgcttagttgcgctggatatgccattccttatataatgtgcgcagcaatatgctgctgctttacatgcttgatttctgttttgcgtctt

SEQ ID NO: 70293 - DNA, 640 bp, Zea mays
  unsure (1)..(640): unsure at all n locations
  Clone ID: MRT4577_164098C.1
gtcaactgacccttctaatacataatcatatganaagggtggcctacttccaaagtcacacacggaacttagaggatttttgggactcacaggctattacaggaagtttgtcaaggggtatgggatactggcaaaacctctgacggtactgctgcaacaaaaacagtttggatggccaccatcagcacaaactgcctttgaggctttgaaggatgctatgattaccactcctgttcttgccttacctaatttcagtgagacatttgtcattgaaactgacgcttgtgacactggcattggagcagtgttgtcgcaaaagggacatcctgtggctttttatagtaaagctttaggagtgaagaacagccaactgtcaacttatgagaaggaatttcttgcaatattaatggcagtagagaagtggagatgttatctgagtagaggaccttttgtgattcggactgatcacagaagtttgtgtcatcttcaggatcagactttggcaacggatatgcagaagaaagcaatgaccaaattggccggactgcaattttcagtacaatataaaaagggagcagaaaataaagctgcagatgccctttctagagtggcccataatatggaattgtcggccatttct

SEQ ID NO: 70294 - DNA, 1217 bp, Zea mays
  Clone ID: MRT4577_164099C.1
gccggccgggttgggggccattcgggtcggtgtcgccgatacgaaaggaacagctgctctcttcgcctctgccgggctacccttcctccttctccctcgtgaccacgcacgctgagcatccgcgcacctgctcgcccgattgccccggcgttttcttctcccgttcgccctgcgtgcgggcgctatcgttctcgtggcgacgtctgggtgaccgccgccgcggacccggctctactcctgggtgccgtgcctaggcattcgccggcgacgagcacccaactggctaccgctgtgggatcttctgtgaagcaagggatgctactagcacacaactgaaagttcagtagattttgaggatcaacctttcagtcatctgtattttagttaatatgatggccaatggtaacatctgatccaagttattcatggagcacgcttcctgtgatgatgtacatgagcatgctataagtgtatcacatggggaaactgcatcaacatcaaccaatcatcaagatatgtacagtgactcagatgaaccacatcaggaagataggccatcaacgagcacgcaaaccccgtcatcagagtcttctccatcaacatcaccaactgcttatagctccagaaatttatcttttcctagaagagatagtatatatggtcatggaagaaatccttggaattctggtttgtggatctcatttgaaattgtcatgtacattgctcaggttgtagctgctattgtaatcctcctcttttcaagacatgaacaaccccatgctcctttgttcgcatggataattggatatacagttggctgcattgctagtcttcctcttatttattggcggtatgttcatcgaaacagacatttggatcaagaacctcagcagccacctacaacatatcctactttgactccctctcagtcatcagaagggcgcaaccatcgtaccagtggtattgtcttgtgtcttggatgtgtcacaatttcttgcccaaggcttagtgtgctggcttatcacttcaagacagctgttgactgtttctttgctgtatggtttgttgttggcaatgtgtggatatttgatgggcgcagtatttcatcagatgctcaagccgctcccaatatgtaccaggttgtgtttggcattccttgccctaagttgtgttggatatgccattcctttttattatgtgtgcagcaatatgctgct

SEQ ID NO: 70295 - DNA, 187 bp, Zea mays
  Clone ID: MRT4577_16409C.1
cttactctagtccttttctagcactttacggacattgaatatcaatgggaagggtcaatcataagcgtaaagtaactcagatataaacgaatctgttactcataacaatcacggtcccaagagtgttccctatgcaatcgtcaacagacacacttccttaacatgaatgggtaaccttaattccata

SEQ ID NO: 70296 - DNA, 292 bp, Zea mays
  unsure (1)..(292): unsure at all n locations
  Clone ID: MRT4577_1640C.1
acccaaaaaccnccaacaaaacagcaaaanngggcaaagccaaacccngaaaccccgagccggaagggaacaacacaaaagggccggggacaccaaaaaaggagaaaaacccgaaagaacaaggccaacggacccnggggaaaccaaagagccgaaaaacaacccaanncaaaggaaagaacccccaggagagggaggcaccaaaaccgggcccgccgagccagacccgccnggaagaaaaggaaaacccaacaagggaagggccaaacaacccaagccngaacccaacccg

SEQ ID NO: 70297 - DNA, 734 bp, Zea mays
  Clone ID: MRT4577_164100C.1
tactcaagagctaatagatgcattgccaacctacaaattcaaaccaaaacgtgtcaaaaactgggggattgaccatgcttcaagctcagagcatcttgatgagggtggcattcttggcccaggaactaagaaggaaagagttgtttcagctgaagatgctcagtccagctccatgtaccaacttgcgttttggtggaatccagtttatcacaaactgtgaatcagttcatgaattctggtgacagtgagtgtgctgcatctgtcttacgaagtatggagatgatgatgagcttcgtgagcttccttgcacacacttctttcatgttcaatgtgtagataaatggcttaagataaatgcggtgtgcccactctgcaaaacagagattgggggtgtggttcgatctttctttggcttgccatttggccgccgccgtgtcgataggatagcggcaagaggtgtagctagctcaagattcagtgtatagaacaatgctgtttttccgcataaagagctctgctctgttgcaatggtttgattgattgtcaaggaaagcgctgtgtgcatgacttgaagacaatgacacctggtgggagacctgatgcttgtaggggcaaatttctaagaaatgtaacggactgaaggtgctgctatactctgatgaacattttttttccaagtatgtaaataaggaacacgaagttcgcttgctaaaaaaaaaaaaaaaaaagcggcc

SEQ ID NO: 70298 - DNA, 511 bp, Zea mays
  unsure (1)..(511): unsure at all n locations
  Clone ID: MRT4577_164101C.1
cggacgttttggcggagctgggtggttatgctccaaaaacacatcacgcacacgtgggggacccctcgccaaaaaaaaaaaaactgagacatgaaatcaaaaaaaataggatccaatactgaagtataaagaccaagttaccttcattgcaagctcaccttaaattttatcaggagaatgattaaaatacaacttttaatgggagaaaaaaaaccanaatatccacaaaactctcaaattggatactattattggcatgtggcaatcactatttgcttaaatgagttggcctctcattaactactgatgccaatatctacatgataggcttagtcaagcaatgggcagggatacatgagcacactttttttattctgttatgacaattgatccttgattaaccaaatatgaccaacaaggtgcttggcccttcccaagcgatgaatatgtggtctacttctaagacaaccgacttgcctagcgttcaacgcgcgcgaaattgggctgtatg

SEQ ID NO: 70299 - DNA, 486 bp, Zea mays
  Clone ID: MRT4577_164102C.1
taggggccttttttttttttttttttccttttttttttttttttttaggggccttttttttttttttttttgcagagatcaacggttttgataccaattgtcagcaacctaggatccaggaagctgagaattacaggaagggaagaaaggaagacagagttagagaagaacagtggagggaaattcagaattgtttactgttttctcgtcatcccctttccctgctatccacacttcccttaagtattccttaggagcgtttacaaggtcaggcccactaattcacccactcgcacacgagaatttggccggcacacccgacggctcacacacggcccaacatgttacaacgcactccagatacccacactcgaccactgcatctgagctctcctcctgattgtcaccctggttagtggttaccggtcatgacatctgggtacctgacagaagacgaacccacgcgcgactcccgacccggccggc

SEQ ID NO: 70300 - DNA, 270 bp, Zea mays
  Clone ID: MRT4577_164103C.1
gagtattcaaaaaactaaggctgtgttcaaaattatcttcctctttagcattcagaaaagcagactgaagtgggaactaaaaatgccagtgagatatctgctgctgcacagagaaacatagcgttcagctctaataattctgtagcaaagcctctagagaaaacaacgaaagctgctgttgaagagacgtcatcaggatcaccaaaaatagataagaaaaaaagtccttatggactgtggatacctgtctaaaggaaaactaaggggttg

SEQ ID NO: 70301 - DNA, 555 bp, Zea mays
  unsure (1)..(555): unsure at all n locations
  Clone ID: MRT4577_164104C.1
catgggtcaatacccttgtgaaggagccaacgccagagaagccatccatcaacgggacanctgcaaaggagaccattgcttctntgagtgaggccgcaagtcatgaggacatcggcggtgaggatgacacagccggggtcatcggtgactggcttgaacagctccagccggatgagatggtagtctagaacaaacataggcataaatcaaaggtgccattttttttttttttttttgctgtgattcaccagttgcttctacagctaactacatctaccaaccttcatacctcgctggtaattactggtgatacattctgttggagttggttagtgtaggtgttgagatttgcaccaccatttagaattccccgcaagtgagagaaatgaaggaaatggaaaccaatgcaactatatggaatttcaggtttcggtaggtggacattgtgtttctccttgtactttccacatccatatcctttgctcatcattccaaaggtgatttcctcgcccattgtgaattatgtatgttggttatatcatcttctaatcccat

SEQ ID NO: 70302 - DNA, 276 bp, Zea mays
  unsure (1)..(276): unsure at all n locations
  Clone ID: MRT4577_164105C.1
tcggtgccctctcttcctcggagtcccctttccgaccacacacggggcctcgccgcccttcttcttgtagtagaatctccctctccctcttccttccccccctgctttttcctgtgcgcgcgagtctttttgactctttgtagtgcagtgagagaatgctacggacatgtctttgcgatcgttactcctattcctatataatatatgatatatagataaagaaatattaacgggaaaaaaaaanaaaanaaaaaagaaaaaaanaatcaagaatat

SEQ ID NO: 70303 - DNA, 323 bp, Zea mays
  Clone ID: MRT4577_164106C.1
acgttcacgcgagcgtacatctcatttatagggtcttctatagtgaaaccattggtcgacgtactagaactcctttaccgggaaaaccattgggaaacccatgttaataccctagtaaaacatctcgcttttcatacctgttttaacagctgggaggctcgcaaagagggcccttccgatcgactttgcaacctgtattggcaaatgggacgccccctgtaacgctccatgaaccgcggcattagtggcggttacgctgagggttaccggtacactggccactgccttagcccgcgctctttccgctgttcttttttcttttt

SEQ ID NO: 70304 - DNA, 254 bp, Zea mays
  Clone ID: MRT4577_164107C.1
gttatcgcgctcgtctcgcctggcctagctagctgcctgttttcctttttttgcttgctacgtcctgtacggagcgatgtgaaggacaggagcaagaaaagaaagaagacagagagagagagagtccgttcctttcctcgaacttattccatggagacctcttctcacaagcgggcgcgggaggcggtccatcattccgccggcgccgccgccgtcggagaggccgcgtggccggagtccgactcatagaggct

SEQ ID NO: 70305 - DNA, 2280 bp, Zea mays
  Clone ID: MRT4577_164108C.1
catggggccctcgagtcggcgggtggaccgactaccccccgtctattctggtcacttcttttggggttctccgttcccctccccattcccctgcccccgcctcttcgagctagggttagggtttgctttgcgttcccttggaaattgatcgaatcgggcacccctaaccggtgtcctcaccgatccatccgttcatccttcgattcgatcaaatttccacctctcgacatcagcaatctcgctgcctctctctctctcttttgagggagggggaagtaataaaagggaaaaagctagcaaggggatttccttgatcccatcatcgtgctacagatcctttagttctagcaaggaggaggaaaaagagagagcaagcccatggatcccagccagatgatgttccccatctggggggcgccgcctcccgccgccttgaagccgccctccgatgaccacgccgccgcccccaacgcgcaggcgcagcccttcctcccccctcccaatcccaaccgcggctggaagcgcaagaatcccgccgccgccgcctaccagccaccggccctcggcgatctccaggtgcagaaccgcgccaaggctcgccgctggttcaagaacagcggcggcggcaaccccaaccaaagccgcaagtatttcttccccaagaacaagaacaacaaggtcgccgcgccgcgcaacaccacctccttcatcatccgggccaagcgcgccggcggcattgcctccctcgtctccccgtgccccgtcacgcccgccgtgctccccaccccgcgtctctccccctcccgcgagggcctagctgacatggcccaggcgcagtggggcgtcgatgggtacggctccatgaagggcctcatccgcctccgtagctccccccagccagccaaccccaatgctgccgcatcagatgacgacgatgaggggaactccagtggaagcgacgtcgaggagcacgtcgaggtggagcgacgcctcgaccatgacctcagccgttttgagatggtgtaccctggtagaggggaggatgctgggggctacgtgttggaggacgatgacgagtatgaccaggatgcgcatgtggctcgccttgaggaagagaacctgaccctaaaggagaggctcttcttgatggagcaagaggttggtgacatgaggcgccgcctggaggctcttgaggcaaaattttcgctaggtggtggtgttggaggtggcgagaatgaagtggaggaagctcctcctcagaatgatgcagagaggatccatacttggccagagaatagcagcgaggatgatgtagagatggttgatgcgggatctgagaagggcagagcacaaactcagggtgcaatgacttcagagaaatctggcggggatgataccacaaatcagggtgctgcgcgctcagataagactggcggaaatgatgcaggtgaacaggatggtgttggtgttttggagaagactgatgcgcacaatgcagagaagcagcaggttgctgcgggttcagagaaggctggtggaaatgatccaggtgagcaggttgttgttggtgttttggataagaccgatgcgcacaatgcagagaagcagcagggtgctgcaggttcagagaaggctggtggaaacgatgtggatggacaggatgtcgtagttggtgtttcggggaagactggcgcagatagtgcagagaagcagcagggtattgtgggtaccgagaagacaggtgagcacagcatagagatggttgattcactgatagaggagaagatggatgacgacaatggcgagaatgaggttaggcttgcggcttcacagtgatgattgattggagatggacaagagaagtagtagttcattcaatgacggattgaagggatgcgacgtggaatgggcttgctttggagattgacgattgacatgttgtgcgagccttgatattggcgatatattttgttttctgtcgtgttttcactttgtttttcttactacaacttgcagcttcttatgatgatgatgcaaaagtcgcagacatggaggaaataactgagatgatgaatatgttgttgtaatccttgtccccaatgggtggtgtgctgaagtcgtcctgtttatgtgttgcttatttctatccagctgtggtggatatgtatctgaatctgaatgtatcgtctgtttatgtcatttgcttggattgtaaaatggggtagcatgtttatatcttactactctcatcacatgataagtgaatattggactgtcttg

SEQ ID NO: 70306 - DNA, 282 bp, Zea mays
  unsure (1)..(282): unsure at all n locations
  Clone ID: MRT4577_164109C.1
acaccatcatgaaaatatcataacatcaaccctgaataggtaacaactcattgataagatacacgactaccttgcaaacaagaggtaataggtcatcactgatgacataatggggtatatcaacatggaaaccgattagatgtgctctggtggacagtaacactggaagtaggatactcataactactcgcgtacgtgaagtagcaagaaaggcacgtggtgaccaatattgannaccactctctcttgatgactccaagacattattctatactagagtat

SEQ ID NO: 70307 - DNA, 181 bp, Zea mays
  Clone ID: MRT4577_16410C.1
caagcaccggtttggctggtcagctttctggagatattggattactatctgaattagagactttggatctatcttacaacaaggacttgactggaccacttccagaatccattggggaattgaagaagctggcaaccttaattcttgttggttgtagcttcaagggtcctattccacacaa

SEQ ID NO: 70308 - DNA, 773 bp, Zea mays
  Clone ID: MRT4577_164110C.1
ccccttcccgctccagtctcctcctagtctcccacacacccatcccctcccccgtcccctgaatctcgagccaataaaccctagaattccccctcccccgcccccctcgatgcgctgacctgaatcctagcaagatttgcgtttgcattgctatgtcatttgggagtttctcatagaacaagcccggttacataagatgagcacaggattcagcgcagagatctttgtgcaggagcttgcgaagcttaatattgcacaacagagtatagagactttatcacactggtgcatcttccatcatcgttgttgccaggaagttgttgccatatggaataaagattttcactcagctcctcaagagagaaagatatctttgctgtaccttgcaaatgatattatgcagaatagtaagaaggatggcatgagatatatacatgagttcttgaaggtcatcgctgctgccttagatgacctgtttcaccaatggtgatgattttggacgaaatgttgtaaaaagactggttgacatatgggaagatcgcaagttgtttggcacccaaggacaactcctaaaggaagaatacacccgcaaatttaaggagctaaagtcaaaaaaaccaggtggagagctggtggagaaggttatatcgagctacaagcatatgctgcgggcacctgtagatgaggccaagttgatgagagaatgcaacagtgctctaagctttgttgacaacctgaacaaagagtacggaaattcgtacttagggagcagc

SEQ ID NO: 70309 - DNA, 288 bp, Zea mays
  Clone ID: MRT4577_164111C.1
agagaaaatataatatacatgaacgtactggaactaatagataaacaaatcatagagtggaaagaatacaagatcctggggcggccgcttaaaagaatcaaagcttaggtccccgtgcctcgcaactacatagttcttctattatgacccttaaattcaatccactgcccgtcttttacaaacgttgaaactggaaaaaccttgcggttacccatcttatttgccttgcagcaaatccccttttcacaacctggcgaaataccgaaaaggcccgaacctatcgccctt

SEQ ID NO: 70310 - DNA, 316 bp, Zea mays
  Clone ID: MRT4577_164112C.1
ccggcgacagtcagacagcagcaccacactcgggtctcgagctccctccccccgcgtgtcgccctcgacggagttgccgcgccgtgcccagcactcatggatacaccgccgctagacggaccgtaccgtgtggcactcacagaacgctgcaagagcgaactagcacaacataccagccgccttggatcaccgactgatgtcgaacaggacaccgtaccggctccgctgggggaggcgctcccggccaagaccaaccccagccagccttcctcccccaccgccaaacgccgccacgcgcctcctgcgccgggctcgg

SEQ ID NO: 70311 - DNA, 249 bp, Zea mays
  Clone ID: MRT4577_164113C.1
aagcaaccagtgcctcctttctccacactcgaagcaatcttctcttcctccggcgctttctctctccctctcactcatactctctttctccagtctctccatagaagaggcgtgtcaggtttcgcccaccgcgccatggactcgggatgtgctgctgcatgggctcaacggcggcggcggcgacgagggcggagcttacgccggcggcggccgtcgaccccaagggagttcctctggcgatgatgattg

SEQ ID NO: 70312 - DNA, 463 bp, Zea mays
  Clone ID: MRT4577_164114C.1
gtccggaaaagcccttattttttctgttgtctatggcctagtttctgagatatagcaaggcagaagcgactacgtataaaaaactcgacctgcaggggtaagtcagccccgagcattatattaagaaaaatactttctcacgcaggtcgagaaaaccccggaatccctgccaaacccatacacagtgtcaccgtagcccatgtgagaacacgacatcgaccgggaccaggccttagacatgtgctttggcgtgggacgaggacatttttttaaccacaacctaaaattcgctcccacgcggagtcgaactcaggacctgagaagtgctactcaaaccacctaagcaactcagctagaggccctttcgcaacaacagctacttatcacttaccatgttggcatgttgtgtatgcatgttattccctttcttatgtgtcatcttttaattattccctcccctatc

SEQ ID NO: 70313 - DNA, 551 bp, Zea mays
  Clone ID: MRT4577_164115C.1
ccggccggtgtgatccgcgcctgtacgtctcttctctctctgctcctccgcctacgactgatccatccaagagagggatcgccatgtacgaactcggcaggagcaccacttcagatcgattgccgacgctggggcgtgcaagacctacccgagcagggtggcaccgtccgtaagaacggctccatgcgtcatcaagagaccgtgcgtgcgaggctgacggaggggtgtacctgcaagactggtaagcatggcacacgccaagatgccagtttgtcgacatagacatattcgatggcaaaaagctcgaaaatattgtgccttaatcacacacctgggacattccgcatgtgaaccgcactgagtctcaagctgattgagatttctgaggatggatacgtgagccttcttacttcagatggcaacactaaggatgatcttagactcacaactgatgagactgttgtggcccagattaaggaagggctcaagagcgggaacgatattgacgagactgtccagcctaggacggtggaggagcagatctgcacgct

SEQ ID NO: 70314 - DNA, 573 bp, Zea mays
  Clone ID: MRT4577_164116C.1
tcaagcgggcggccgggcaggtacaagctttttttttctttgtttttctttgttcatgacaaaccaccaatggttggactcgtgctgacgtaaatatacacaccgaactaggagtgcccagtggtgaaccccattactaaaatgcgcatgaacgatgatgcacaccaccgggttgtggcatagaacacctgctgcaaacagctcgacgactgtaccgggggtaactacgcctacaacaacgagatcacaggcgaccacaaaaccgtcagctacatcgggaggttcatgcgtcaacagcagcaacggcatccgcaagggcaccacctgcagcatcaacaacagcaccaacaacaacatcaatgtgaaggccaacaacaacatcaccaacaatcacaaggccatgggcaacaacacgaacagagccatgagcaacaccaaggacagagcctggagcaacaacatcaacaacaattccaggggcatgacatgcaggaacaaccacaacagcctgagcaatatcagcaggcccaggaaaaatcacaacagcaacaatgtcattgccgggagcagcaa

SEQ ID NO: 70315 - DNA, 260 bp, Zea mays
  Clone ID: MRT4577_164117C.1
ttgacgcgtgggcggacgcgtgggccgaggaggtcatggacgaggtgcgccgcctcatggacaagtacaagggcgaggagctcagcatcacggtcgtcggccacagcctcggcgccgccctggcgctcctcgtggccgacgaggtcgacacctccatccccgacgcgccccccgtcgccgtcgtatccttcggaggacccaaggtgggcaatcgtccagattgtacataggctcgcccgcaggggcacggtcaacgtatt

SEQ ID NO: 70316 - DNA, 184 bp, Zea mays
  Clone ID: MRT4577_164118C.1
ggaaagccttcacttgcacctccggaacggatcgcctggccgaccctggtcctattcccatacttctcgccgctccatcctccgtctgcggcggagaaccccgtcgttgtctccggctgtgctacctggaggctctacgcgaactcgcaggacagaccactcattcttgcggtgcgcttactac

SEQ ID NO: 70317 - DNA, 294 bp, Zea mays
  Clone ID: MRT4577_164119C.1
gacgaggacaaggccacgctcggcgacgtcctggcggtacgagtcacgaacacgacgtgccatcgttttcgtttcgtgccgctgctgctatatatctgacagtgcgtgttggtggtgcaacagagcagagatcttttgactatttgttctttgtcgtacgtgcagaacgcgacggcgaggttggtggcggacaagccggtggagagcgccgatgcgttgggggtggctggcgcggagaaccgcaacaggaacgacgggacggcgaggcccggaggcgtggcggcgtccatggct

SEQ ID NO: 70318 - DNA, 1140 bp, Zea mays
  Clone ID: MRT4577_16411C.1
cattcctcctctccctccccatccatcgcctctccggcctcctcctcgctctcgtctagctctagctgctttcttctccaccacctccgtcctctttctccacccgatagctaagctatactgcttgctgttcatcttctgcatggccatggctgtcgtgctccctttcccttcctccatgcatgcatgctcccgttccgtctacccatcaccccactctctctgcatggccctcgaaaagaaaattgaggagaaatggaatagtagctatgatgttggctcggctcactcagacgacgtacgcgcgcgcgagatcatgtgctatgccgctgctgtttctgattgagccgtgccaatatcttagtactcttccatgcatacatcgtctatgtgccgtgttccttcttcacttgcgatctcgatcgaggtaaacatgagcacgtagacgacgatggtcctagtatgcgtacgtaggagcacgcacacgcacacaccgtctcgttctttaattcctggtgtttgcacaaatccacccgttgtggttttcttagcatccggtgtcgacttgaagaaatgcatgctcataattcaaagtgctgatgaactagcaggttatttgcatgtatatatgtctatcataaactacatgatctatcgcacttgcatatataatcctctttctgtcataaactgcatgcgcgaccagcaggtgaagattagttggatctcacgaagatggatccggaagaaagattattgtacgtactcgatcgtgaagtagtcgatgtcatagtgtgtgtgtagatgttcaagcatgacatcgcacactgtgatctaccactactggagtcgaacacggcatcggagatcagagctgtaactgatgaaggggcagtgtatagtttactgccaagcctccaggcatctggcctgataattccttgtcggctcctcctttgaatttctgtgtgaggttgtgtgtaatgcatatccagcagccactcgacaggcttctaacgatgctttattcgatcacatcttacgtctatatcgtgctctgaattcagacaagggaaatgttcgcttgttatatatacaaacaaatcagttgtactacaaaaaaaaaaaaaaaaaaaaaaa

SEQ ID NO: 70319 - DNA, 260 bp, Zea mays
  Clone ID: MRT4577_164120C.1
aataacccaccgagcggatgctgccgcggccagccaccgccgccagttcatctatcgacaccggttcatctgccacctgcagggcaccttccaactgcggggcatctaccaccgacgatccacctgccatcgcctgtccacctgccaccttcagtccatgtgccgcctccagtacatctgccgtcatcaccatgccactaccctactcaaccgcccctacctcaacctcattcacagccacacccattcccatgccaaca

SEQ ID NO: 70320 - DNA, 416 bp, Zea mays
  Clone ID: MRT4577_164121C.1
gcccggcccggaattcctgggcttgcccacgcgcccggtgattcgaacctggccgagctcacaccaaccacgcctgttcgccagggtggcgcggcacggcccgccggcaagtgcaagcggcggaaggcgaacgacttcgaggccgagttccgggagttcgacgaggactccgaggaggaggaggaggacgactagggggtggtaggagagcaagcccgccttgctctcaaacgtctattacaagaggacgagtctactacaccgccacagagctaggtaaccggtgccgggcgccataatagctgtaatcatggattatcaggatctgctgtaatgcctgatggccctcgagaaccgctactagactatgggcgggcgatattatatatggaagctatgtctccattagctacata

SEQ ID NO: 70321 - DNA, 579 bp, Zea mays
  Clone ID: MRT4577_164122C.1
ggcagaaaagactggatgctagtgtgatgctgtccaaaggaaggagagcctcttgattcctgataatgcacagttcgtcggttgtggatcgctgcccacatcgttctgagatccagagtgtagctcttgcagagggcgaagatgactgtttgattctgggaacggttgactcatatggtcatcttattgtatctcgtttggacatcgtggcggcaggacatcctattcagtaccacctcgtgattgtggtgttggggaaggcagttgggctggggtatgctttagcccaatgcagcaatccatggtagctgttgctcgtcagttgtgcaagaccattgatatctatgatcaagatattcacgttcggagtttacgcacatagagcctatattacaagctactgcatacccaaaatgactctagcttcctcatcgactcttaatgatctttgtatgcacaatctttttattcaaaggaggctgctgtggattcaacacataaaccatgagttcttttagcagcatccattatctcacaattgcagactgtaatttgcacgatttaagggggtaaacttaa

SEQ ID NO: 70322 - DNA, 577 bp, Zea mays
  unsure (1)..(577): unsure at all n locations
  Clone ID: MRT4577_164123C.1
tataatctttattacataacaaaagtatcttaaaaaataactgataaaaaataaattggactaatattatttcctcggtgccaacaactgactgggagacgacacctagatctcgttgtagtagtcctcctccgggggtacatgctcttcaccttctgcgagcttctgctcggaatcttcaacctgatgtgctctgggctcctcggtcacttgctcgtctactcaaaatagtaaaaaacattgcataggagaaattaacatcacaccaaatatgagaacacactgcataataatggtctacgcgttgcaacgagatcgtagattcgagaaccactaaaatcggagttacgggtaaaaagatatggttttccgtagttcttaggggattaaatggtaaagatatattctattaatataaaccatatgagccatacaatctaaaaaaataactaattcaactttaattataacatgattaaagatcatattttagtcaaattatagatggataaagntaatcatattgactgggactagaaaaggaagtccaataaacattggggtaaccaaatattta

SEQ ID NO: 70323 - DNA, 1726 bp, Zea mays
  Clone ID: MRT4577_164124C.1
gaacggcgagaacacgcggatttcgctgcgggagaaccggagaaggatagcatgcggtcgacggtgttggtggcgcggagcctgcagaaggcgtccgtcccgccggccttgctctcagacccgacgcccggcagcctccagcccacccgcctcgccgcccatgtcaatggcgccggctcctcgtgctctgtttacctcgcctctggctgccgcgtctacaggatcgagataagactggatgctagtgtgatgctgtgcaaaggaaaggagagcctcttgattcctgataatgcacaggtcattggttcgtcttgctcgtatcgctgcccacatcgttctgagatccagagtgtagctcttgcagacggcgaagatgactgtttgattctgggaacggttgactcatatggtcatcttattgtatctcctttggcgatcgtggctgatggacatcctattcagtaccacctcgtgattgtggtgttggggaaggcagttgggctggggtatgctttagcccaatgcagcaatccatggtagctgttgctcgtcagttgtgcaagaccattgatatctatgatcaagatattcatgttcggagtttacgcacgtaagttcactcatgcaataattttggcattgtgccaatctgtccaactgccttttttataaaaaaagtcagattccgctgataaatgacatctttcagataaataaatgctaacccatgacatttttggctacagatagagcctatattacaagctactgcatacccaaaatgactctagcttcctcatcgactcttaatgatctttgtatgcacaatctttttattcaaaggaggctgctgtggattcaacacataaaccatgagttcttttagcagcatccattatctcacaattgcagactgtaatttgcacgatttagggggtaaaacttaacttgcaggctatggtatccatcttcgtttagctttgttcaatactctccacatgtgaacgaaagtagttctctcttggcaactgcagaaggttctcagctgagcatctgggacctaagaatgaataacaatgggggatgcgtacatcgcattactggatcagttggagacattatatactccacatgtagctcaccttcaggactgattgctagtggtggaactgatcgtgctgtcaccatctatgatcctcgcaggtggtctgctctgtcaagatgggtgggctgctccaagtttgagattacaggtcttgcgttttcatcagttgacgaatctttcatctacgtccaaggtgttgattatgagattacctgtggacattggaaacaaagtgagcgagcattctcatttcgaggggattccaactggttggggttttcaaagtgtgccaacaatgatgtgatagcagggtggtgcgagtctggaagtatcttcattgctgatgctaggcagctataggatcaatatccccttcatctggtgccctggagccccggaagtcaccagtatgtgttgtgttttgccatttctgtaagaatgtgatgtttacaggaggaactgttcttaactctccagtaccaagtagcatgcgaactcatgcccatgagcccatcggccattatggttcttgaaaaacatgattattccagatttcatccagcaaattgaattgtaaaaaaaaaaaaaaaaaagcggccgcttgcccctgttaacagtttc

SEQ ID NO: 70324 - DNA, 416 bp, Zea mays
  Clone ID: MRT4577_164125C.1
tttttttttttttttttttttttttttttttttttttttttgggtttggggttttttgaacaaaaccccaaaaagttggccttgggaacaacaaatcaccctttaaatccacaaacggcctccaacaaaaaagcgtcttttacaatacaatttagtccatgttagtccctcgcttaaaaatataaattgcaatctacaaaaaacaatgaaatttttcgcaaaccctgcaaccaacatgaaaggggcaatggtccttgtttaaaagggctggccttcactcgtaatcttttaaagcatccccatcttcatgggggaggtctatatcttcaatatcaagagtgtttcctgtctgaaaagttgactcatttttaccaaacattttaaatttaaatgagtcccgcagatttgggagttcc

SEQ ID NO: 70325 - DNA, 462 bp, Zea mays
  Clone ID: MRT4577_164126C.1
aagcataattggcaattccataaccaaaactttttaatgcacaaaaaaaattggggttacaaaaaaagaaccttgtcatagagcgaaatgagcaaaattaaaactccttttggccagccaataaatggcaggaccacccaaaaacccccgcaaagggggggcaaaaagcaagggtacacgcctacagcctccttacccggctaccaaccttttggggagagccgtcagggggaaccggggtaacaccctcaatgcggccaatttttatcccagaaccaggaagaaccctgagagcagactgaacaccaagtccaaggggcttggaattgttgcctccagaggcaccaaccttaatggggagcgctgggataccgacctccttgcaacgctgtgcaacatcttgggcaggaagcctcagcccctaaggagacgactcaacacgatcagccttaacctttatgc

SEQ ID NO: 70326 - DNA, 390 bp, Zea mays
  Clone ID: MRT4577_164127C.1
tgactacgcgatctgcggctgcaataaggagaagtttgattgccttacccagggggtagtccctggatgtggaggacttgaagctaagaatgtttcaatagatctctgagggcgaggctgcacccttccaataattgaaggtgagttatgcactactagtactatcacgacttgcgacataaacatgactttctaccacgtgaaactcgagttctggaaagacaagacggctaacgagaagactgacgctctatctccaatggctgtgcatcaaaagagcatactgtgatggacacgcaatgcgggagatcgttgggagggacaagagagcctggttggttgggccaaagccttgctgtgcggcggcggaatgggcgagctggctgaacc

SEQ ID NO: 70327 - DNA, 117 bp, Zea mays
  Clone ID: MRT4577_164128C.1
tctttttcacaaaccctagcagccactagggtttgtccgctcccacccgggcggctgcctctctcctccgatgggcaagtcaagcaagaaggcggtcgccgtggctgcggttccagc

SEQ ID NO: 70328 - DNA, 571 bp, Zea mays
  Clone ID: MRT4577_164129C.1
gccggccgggtctgcgattgtgcattgccaagcaaccgcgcaaggtccacaagtagccaaaagatggaggcacaggccaaggcaggtgctagaggtgccaggggcgggacgaaggtggccatggtgtactactccaagtacgtcaagacccagaacagccctgccgtgagtattggtatagcacagcagctcgagtctacagccgccgccgtcgtaggagtagcaggaggcggcggcgacgcggacgtcgacgagagggcgtcggctttcatactggcagtccgggagcggttcaggaacgagaacaagtattaacctagctagctcatccggtgaggaagctccggaagaggttaatatttacagcaatgtcttccgggtcgccatggacgatgtgtagctaggtaaagaagaaaaaaaaaagtagctcttgattgcgtgctatatacatgcacctttgatgtctcctcttccctctttctttagggccgcctacggttgtatgtacctgaagaatggaacaagtgaaaaaaaattaactatgcaaaaaaaaaaaaaaaaaaggccccta

SEQ ID NO: 70329 - DNA, 258 bp, Zea mays
  Clone ID: MRT4577_16412C.1
ccacctttctggacggagaccttggctgcgacaggccgtgccatcccggccggcgtagatggagctgatccgtatcactcgaccgtgctgccgctggtgatctgagggttgttgaactaggatcacgtcttcctgatctcgccgtcctttcccgagagaaccttgagggcgctgagcttctccaaggccttggcgaagatggggacaaagcaaagagttttgtccgacatggccttcactatgggctacgtcgttttg

SEQ ID NO: 70330 - DNA, 542 bp, Zea mays
  unsure (1)..(542): unsure at all n locations
  Clone ID: MRT4577_164130C.1
ttagagtgcggggctgaagcgacgtgcctgagctaggatttaggttgagatcaggagagggagaaggcggcggcgatggggctgcgggtaggtgcatgctgaagccggcatcttgaacaatgatcataccgccatggtgactattctggggggtttttttttttgttgtttatctacaagaagggcgcatcgcagatctccggggcgtcttgcgcacgccagagggtcgctgctcattcatgcttcttccactcaaggagcaaagcctctactgaggtacttcttagccgattcatggtgatggacataaatgtcttggatacggtatgtagcggctacttcgctatagctagaataaggggttctgcatttgccgcgagaatatcgaaacctcaggagcaacttgggtgccatcgaatatagcaaatacttaaatggcgaaggtgcgaggacatatacagcaaatggtgcaaaagcgacctcatgnggagagggatcttggaaactcttgaatctcaaagcagcttcaggcaactacgagc

SEQ ID NO: 70331 - DNA, 574 bp, Zea mays
  unsure (1)..(574): unsure at all n locations
  Clone ID: MRT4577_164131C.1
aatgacatanaacactggggtcacagggcacgacctcaagtcctcaacaaattccgtggggccattagctgctagattctgttgtttgcaatgatcgacggcggtcaatgcctccagctccaccccctgtattatcttgctatatgatacatgatccgtgacagacttaaatttgggattatctcgtagacacatttttcatatgcaacgcctacctatatttggagtcagtgtgaattttcaaatgtacatcatcattgtgagtactagtagtgacggtgtgaggtaatttccaatcaactcatgatataagaccacatgaagttgttctagtcttcttgctaatgctattaagattcataacagaatgagctggagcaaacaactttctcatcatgtagtgtttgaaccaaataaaagttcagcatgacatcagttttttttgctgtcttccgggccaccatggcatactgcctggctctatcttcctgctttgcaaaaaggaagcactaagaggtgatgcgatacatcctgccaattgttacatctcatgcataatacgtacagtcggtct

SEQ ID NO: 70332 - DNA, 529 bp, Zea mays
  unsure (1)..(529): unsure at all n locations
  Clone ID: MRT4577_164132C.1
cccgnnggcagtgtacaagctttttcttttttttttttctttttttgtacaagctttttttttttttttttttttttttttttttttttttttttttttttttttttttttttttttttttttttttttttttttttttttttttttttttttaacccgggccggaaccccctttgggggaatttccaaaacattggggggcgttttttggggatccgagtttggaaccaagtttggggaaaaaatgggaaaaattttttcctggggaaaattgttttcccctaaaaattccacaaaaaataaaagccggaaaaataaagggaaaacccgggggggcctaaggggggggctaactcactttttttggggggggctcattgcccctttttaaaggggaaaaccttgggggccattttttttaataaatcgcccaacccccggggaaagggggtttgggtattggggcttttttcctttttttgttaaatgaatcggtgggctggggcgttcgggtggggggaggggtttt

SEQ ID NO: 70333 - DNA, 698 bp, Zea mays
  unsure (1)..(698): unsure at all n locations
  Clone ID: MRT4577_164133C.1
cgnntccggcggagctcaatatgcaatatggttatgctgattggatttgttttgatgcatcagtggtccgtggccttgcatactacacaggaattgtatttgaggcatttgatagagaaggaaaactgagagcaatttgcggtggtggaaggtatgatagattgctttcaacatttggaagtgaagatataccggcttgtggctttggatttggagatgctgttatagtggaactgctgaaagaaaagggtctcttgcctgatatgtcacgccaaattgatgacatcgtcttccctttggacgaagaacttgaaggaccagcatccagtattgcttcctctctgaggaagaaaggccgatctgttgaccttgtagaagacaaacgtctcaaatgggtatttaagcatgcggagaggatcaatgcgagccggctgatattggttggaaattctgagtgggagcgaggcatggtacgggtaaaggtgctatcaaccagggaagagtttgaggtaaagacaagtgaactagagtgattgtagaaatgttacgttatgctagcctcggctaatgcttgtgagatgatacaatcaaacagtagctagctatttctggagagtttaaacttattgtaacagtctgtaacaactattcatattcatacagaatggatgggcatgatccttgccagctagtatgct

SEQ ID NO: 70334 - DNA, 436 bp, Zea mays
  Clone ID: MRT4577_164134C.1
tcttacgcgtgggctctcgcccgcgtaactggggtctgttgactaccaaatgcggatcaaccgaggcaaaaggaagggggtgggcgaggaaaagcgatctggcttctcttccagttccggattcatcgttagaaacacatgactgcaatggatatctgaagcatgaaaaggcaaaccatctcactcttcaaacagttcacttagcacacttaatggcggaggtgtttgcatgacattctctttgagctgatatatatggggtaggtgccaaaaaagaaagatttactatcatcttatgacaccgcaaatattatttttgccatgcaaacataattaatatagaagggcaggtctggtgcatcgatgagagctattttattgaggtaccagggtcccggttccctttttaaaattaaagtatatttggatcgcttga

SEQ ID NO: 70335 - DNA, 371 bp, Zea mays
  Clone ID: MRT4577_164135C.1
attaaggggaggcacaggagctatatgtccattgcacccaaaaggggtgcaaagaaaaccatcgcccgccaacacatgacaagagcaccatttgttcttgccggccgggggcacgaacagaggctggtagatctgaacttaaaaacggtgacatggggagctaaccgatgatctggaagagggcgccagtgtttttgagcccgagcacgatgcccaacccgaggatggggaccacggagcccaaggccagccagatggcgagggtgaacccgggggggttaaccctctgcaggcccgaggcgggctccaccaacttgagccccgcccacttgttgtggttcgcggacagcgccacgccgaacacggcccgg

SEQ ID NO: 70336 - DNA, 246 bp, Zea mays
  Clone ID: MRT4577_164136C.1
gggaccttgtataattcttaacattttgggtcacaattaaatgttggtcccccacatggggaatgaaagataacaatggaacaaagcttcctactgtttttttagcacaatggagatttgttgcaacaatcccagttggtcctttttttaaccattctaccacatacagggctttttttactggcgcaatctttgattcggtggtcaaaactctttcttttaaatttggcacaacttctttgtttt

SEQ ID NO: 70337 - DNA, 760 bp, Zea mays
  unsure (1)..(760): unsure at all n locations
  Clone ID: MRT4577_164137C.1
gccggtccganaattggctggctacccagacaagagcacgcaacgcaagcaactgcgacgtctcccgcccccgccgcgccccggaccttttccgcagatattttttttatccccccacgcccccggctcgttcccttccattccaccacctctcgccagacaacgagatgtgcgaggcaccgcggccggcgccgtgcgcgcgctacgccacgtgccggggcctgcagctgctcatccgccacttctcccagtgccaccgcaagagctgcgcgcggtgccagcgcatgtggcagctgctccgcctccactccgcgctctgcgaccgtaccgaccgctgcaacaccccgctctgcatgaggtttaagcagcaggagcaggataaggcggctgccaagggcggcgatgatggcgacaaatgggggcttctggtgaagaaggtgaagactgccagggtcttctcttctctggccaacaggaagcagatgagcaccaccaccacccagtgctgaggagcagcctgggatgcttaggggtcaaagttagattagtgagagagaatgaagcgagcagtttttttttgggtctgttttgagatgtcagatctcttttgagatatgtacatgtacatgcctactttgtcaccctacgttggtatagctaaaaaaaaaaaaaaggagcctatcagccggaagtctatgtaaaaagtgcgcatgtatcattatataataatagggaaatatgagaagtattttagtcgtat

SEQ ID NO: 70338 - DNA, 1449 bp, Zea mays
  Clone ID: MRT4577_164138C.1
aagactaaaatacttctcatatttccctattattatataatgatacatgcgcactttttacatagacttccggctgaccaactcccacctcgataaaagcgctataccaacgtagggtgacaaagtaggtgtagggcatgtacatgtacatatctcaaaagagatctgacatctcaaaacagacccaaaaaaaaactgctcgcttcattctctctcactaatctaactttgacccctaagcatcccaggctgctcctcagcactgggtggtggtggtgctcatctgcttcctgttggccagagaagagaagaccctggcagtcttcaccttcttcaccagaagcccccatttgtcgccatcatcgccgcccttggcagccgccttatcctgctcctgctgcttaaacctcatgcagagcggggtgttgcagcggtcggtgcggtcgcagagcgcggagtggaggcggagcagctgccacatgcgctggcaccgcgcgcagctcttgcggtggcactgggagaagtggcggatgagcagctgcaggccccggcacgtggcgtagcgcgcgcacggcgccggcgccggcgcccgccccgccgggccgacctccgtgcatccctccgtgcagatgtggtccaggcagtccatggcctcgctcagctccatgtacacgcgctgctccgcgcgcttccgccgccacttgcgccgccgcatgtcggcctcgtgcaggcgctgcaggacgtggagctcctgccaggggtcgttctcctgcaggaagcgccaggcctcggtgcgctccacggccgcgaactccttggccagcagcctggcgcagcgcaggtgcaggcgcggcgcgtcgcagaggccggccagctgcagcacgtccaccaccgagtccgcggtgaggcgcgcgccgatggcgccctcgcacgcccgcttcagccacggcacctggtacgcgtgcgccagcaccagcacctgcaccgcgtgctcctccatgtcgtcatcctcatcctcgccgcacctgccggcgtagaggaggcggacgaaggccgcggcggcgtcgtcggtgacgccgcggatccggacgacggaccgcccgggcttgccgctctccctgtccttccgcaggcgacgctccaggatgctgccgagcaccggcgacgccgaggccaggacagaggaatgcgcggggatcctccggcgcccgcccgtcgtgacgacgtcgacgtcggcggcggccgggtcgccggcgccggcgcggttgccgagccgcggtgcctcgcacatctcgttgtctggcgagaggtggtggaatggaagggaacgagccgggggcgtggggggataaaaaaaatatctgcggaaaaggtccggggcgcggcgggggcgggagacgtcgcagttgcttgcgttgcgtgctcttgtctgggtagccaggccaattc

SEQ ID NO: 70339 - DNA, 394 bp, Zea mays
  Clone ID: MRT4577_164139C.1
acccacacccacgcgggagcacacggtttttggattcttcgcaggcggactccggccgaccaaagagtgcgggcatccaaccacaagcaggccagccggactcccataacaccccaaacacacggccatcaaacacccacccaggcgcaaggaacccggcgtgactccacatgaccagccagaccgacgaactcatggagaccctgaccgcgctcggcgccacggtccgcagatgctccggcacacggacgccaacgcaggaccacgccgccgccgccatcgagcgcgactcggccgccgagtacgcctgcaaggaggagacccttgaggagcactggcggtgcaccgagcgctgccttgactggggcgaggcgggcggccccgaccacatcgc

SEQ ID NO: 70340 - DNA, 1012 bp, Zea mays
  Clone ID: MRT4577_16413C.1
agattcctctactccctcccctccatcgcctctccggtctcctcctcgctctcgtctagctctagctgctttcttctccaccacctccgtcctctttctccacccgatagctaagctatactgcttgctgttcatcttctgcatggccatggctgtcatgctccctttcccttcctccatatgcatgctcccattccgccgtctacccatcaccccactctctgcatggcatcgaaaaggaaattgaggagaaatggaatagtagctatgatgttggctcggctcactcagacgacgtacgcgcgcgagatcatgtgctatgccgctgctgtttctgattgagccgtgccaatatcttagtactcttccatgcatacgtcgtctatgtgccgtgttccttcttcacttgcgatctcgatcgaggtaaatctgagcacgtagacgatggtcctagtatgcgtacgtaggacaggagcacacacgctctcacagtcttgttctttaattcctggtgtttgcacaaatccacccgttgtggttttctcagcatccggcccccgcgtccggaaatgcatgctcataattcaaagtgctgatgaactagcaggttatttgcatgtatatatggatctatcgcaattgcatatatatatacctttctgtcataaactgcatgcgcgaccagcaggtgaagattagttgatctcacgaagatggatccggaagaaagattattgtacgtactcgatcgtgaagtagtcgatgtcatagtgtgtgtgtagatgttcaagcatgacatcgcacactgtgatctaccactactggagtcgaacacggcatcggagatcagagctgtaactgatgaaggggcagtgtatagtttactgccaagcctccaggcatctggcctgataattccttgtcggctcctcctttgaatttctgtgtgaggttgtgtgtaatgcatatccagcagccactcgacaggcttctaacgatgctttattcgatc

SEQ ID NO: 70341 - DNA, 661 bp, Zea mays
  Clone ID: MRT4577_164140C.1
cattggtacctcgaggcggcgggatcttcacacatctatccgactcctccgtgcggctcccttgtccggcaatctgctccgtccacccagatagccagatgcaccatgctccacctgatggttcctaacgacactaatgctagctcctctctagcgcgtttccaaccgccccgccgacagtcagtttgccctccgctcatccatctagtgtataaatgaatgtagcgaatacagatccaggcagttgtgtgatacaatggctctgcaaatggtagagatgtcttggataacgataatgcacagataccagtggttcctaacatatttcggtcgcccacaacacaacctggagatgggtatgaatgcgccagaaaaacgactttgtacgtgatgatgtcaactctacaatacgtagtcttagagcgacaaataactatattgaagacgtgtatctgcgttcaactgctatcgatatggacaacaccgggcacaccacctactacaatgagatgggtgccggtcaccaagatggcccttgtactgctagcagaagcatatcgtgatcctgaagtcaaacagagagaggttaacccgaattacgtgcgagacatcaaatgcaccgacaatgtgtggatgtataccagcattgcgttacctgtat

SEQ ID NO: 70342 - DNA, 423 bp, Zea mays
  Clone ID: MRT4577_164141C.1
acggaaacgaactacttccacaacccacgagcgaaaacattggggtcaaagccccccccccttcctccataggggggggcccccgcccgaaccccccccatggggtcaggcccacctcccctgggcgggggaacatgcatccacaaaaccccggtacaaactggggaaaccaccattcctaaaccccataaaaaagggctgggggcgggccccccccgatctaactaaaaaaacccggggcattattttattactttcccccagggccatgcatgcattcctcgcccgggacccccacaggacccccaaattaaaaaaacggggggcagaaaacgggggggctgatcttggaccggagggcgaccccccactttctgggcaacgcggggggccggatgaagaaggggcccctccccttggccc

SEQ ID NO: 70343 - DNA, 451 bp, Zea mays
  unsure (1)..(451): unsure at all n locations
  Clone ID: MRT4577_164142C.1
ggtaccctccggnctgtgccaccctgacgacttcttctccgacctcgcggagctggagtcagatcccatgagcttaatcttctccaagagtacatggaagcgaaaccaagtggtggtgatcgtggccatcacgagaaagcaatatccaaggacttggatccactgtttgacatgctagattggtctgctaattcttcatcagcagggagctcatttgagcaaggaaagagaggctaatccattggcatatgtgcagacatacatttgatcagagctaataataactagaaattaagattaccacaaggtcagcaagaaaattaagatgacagagttttccctttctttcactttcttttctctttggttcttttgcttcttattatcattgtgtgagaaagattgtaatttttttgttcaagttgctcatagatatgaaccttattttttt

SEQ ID NO: 70344 - DNA, 462 bp, Zea mays
  Clone ID: MRT4577_164143C.1
gggggaacccccataagctgggcaaaaagggcaagggaaacgaggaaagggggccccgctacaaggtttttggggccaaacaaaaaacaaaacagggtggttccgggaattccaaaaaaatagcaaaaggggagggcactgggcaccaacttttatggaaaatacaggggttattctaaaaaaaagggggggcagcccttgggattaaccctggacaaaaaaaaaaaatttttaagccggggggccatttatttgccccggccccgggggccaccccggaaatcccggcccgggcccggagggggacacaagttttcctatagggaggcggaaaaaaacctgggggaaacaaggggaaaacgggttcctcggggaaaatggtatcccctcaaaaatccaaaaaaaaaacaaacccggaaaccaaaaaaggaaagcccggggggcccaaagagggggccaacc

SEQ ID NO: 70345 - DNA, 370 bp, Zea mays
  Clone ID: MRT4577_164144C.1
acgaagacttgctctttcaccctggtgcatcgagcaatttgcacgtccagaggaatggtcgaagttgcggttagacaaggtaaggtggttgacatgtatagttgagaggagggaagaaggtgcattatccattgtgccactgctatcaaactgcagaaatgtggaagagctctgcgtgtctgttgtgccatcgcagggcaaatggaggcggaatagtggcgatggaggaagtcatggtgtgcttggtggtaagagggtatcggtgaaacatctaaaggtcgttaggatgaagtacattgatgaaagcagaagtggatttaaactggtaaaggtcctgctcaagaacgcctctgcactggagaccatgaca

SEQ ID NO: 70346 - DNA, 552 bp, Zea mays
  Clone ID: MRT4577_164145C.1
ccccctgcgccgtcgccttcctgcttgccgctctcgctccgcagacgccgccgccgccgccgccgccacggccagagctcgactcgctccctaggaggtaaggatggtgagagtcagtgtgctgaacgatgctctcaagagcatgtacaacgctgagaagcgtgggaagaggcaggtcatgatcaggccttcttccaaggtcattatcaagttccttatcgtcatgcagaagcacggatacattggcgagtttgagtacgttgatgatcacaggtctggcaagatcgtggtcgaattgaatggcaggctgaacaagtgtggtgtcatcagtcctcgctttgatgttggtgtcaaggagattgagggatggactgcaaggctcctgccttctcgtcagtttggctacattgtgctgacaacttctgctgggatcatggaccatgaggaggcaaggcgtaagaatgttggtggcaaagtgctaggctttttctactgaaaatggaaaatggaaaattggatgaaagtacctgagatgtgttagtaggatatttc

SEQ ID NO: 70347 - DNA, 344 bp, Zea mays
  Clone ID: MRT4577_164146C.1
actgaagaggcacaattgcaagcattgcattgttgacaggtgcacatatttttatatatatgtcttattgtgtagaacctaaaatgaccaggaccttaataatgaccaagttttagcaatacacattctgtggctgagtgtataccatacacatttttttgccaacaaatacatatatgtattgcatggaatgctcaacccacattacagtgtcattgttatgaaccgcaggaaaacaaataatgtaggcgaagagctatggggagattcagaataccacctccaaggtggttatattatgtgccgaaatgctgctcaagaagttatgggaacttgcgagcaca

SEQ ID NO: 70348 - DNA, 297 bp, Zea mays
  Clone ID: MRT4577_164147C.1
ggggggggcaagaaacaagaaaaaaaaaaaaaacacaaattaaaattttaaaaaaaaaaaaaaaaaaaaagggcccccgggaaaaataaaaaaacaaaaaaccccaacatcacatccccttccttaccacaacataccccaactacaaaaccgcctaaataaaatatactggccacggccttcacaattcccgacagaaaaaaccctctgcgcaccaaacttaactaccactccaaacatcccctcatgcccaaccgccttcaataccaaaaaatccccataaaaaatgccttccaa

SEQ ID NO: 70349 - DNA, 365 bp, Zea mays
  Clone ID: MRT4577_164148C.1
cccctggggttggtttttttttttttttttttttttttttccatgtccttttcttttttttttgacaccccaaaacattttttaaaaccgcttccattacctggtttttctggccaaaatgttcgatgccctcaccggctgattttgccgcttaaagggaatgttgaggttttgggctgacacaaaatttgccccataaaaatgggcatttcatcaaaatacaaccctcaaaccctttggacagggcatccttacaattacagggggagtttccacgccccctctttgagttgggaaaatttatctccccgggggaaacccctccaggacctattacagaaagggctccttgcggcggatccccc

SEQ ID NO: 70350 - DNA, 794 bp, Zea mays
  Clone ID: MRT4577_164149C.1
gtgacagaagtggtatcagaggaaaacggcatcctcccttcgcaaattgcaagcaagccggcaagggacggcaccaacaagagcgcgatcgacctaccaagctagctagcgaattaaccttctcctcccatatggctccgacgacggccacggcggcggcggtggggacgaaggcgacggcgctgggggtggcggcgtgcgagcgcgacgtggagaagctggagttcatcgaggagaagaccaggaacttcgacgcggagcaggtgcgcgtgctcgcggagatcctggcccgcaacaacggcgccgagtacctgcggcggcacggcatggaggggcgcacggaccgcctggcgttcaaggcgtgcgtgcccgtggtcacgtacgaggacctccgcccggagatcgagcgcatcgccaacggcgaccgctccaacatcatctcctcccaccccatcaccgagttcctcactagctcggggacgtcggcgggggagaggaagctaatgccgacgatcgaggacgagctcaacaggcgccagatgctctacagccttctcatgcccgtcatgaacctgtacgtgcctgggctggacaagggcaagggcctctacttcctgttcatcaagtcggagacgaaacacgcccggggggctcccggcgcgccccgtgctgaccagctactacgagagcgaccacttcaagcaccgcccctacgaccccctacacgtgtacaccagccccaccgccgccatcctctgcaccgactcctttcagtccatgtactcgcagatgct

SEQ ID NO: 70351 - DNA, 692 bp, Zea mays
  Clone ID: MRT4577_16414C.1
ccggccgggccggccggggacgacaaccagcaccaccgacaactttgtgcccacgacaaccgacacaatggccgccaaggataccaagggaaagaaaggaggcaacaaggccgctcaggctgccaaggccgctctcaagggcaccaactcccacaagaaggtcaaggctcgctacagcacctccttccaccgccccaagaccctgatcactagccgtgctcccaagtaccctcgtcgatctatcccccaccagcctcgcctcgatgagcacaaggttgtcatccgccctctcaacactgagagcgccatgaagaagatggaggagaacaacaccctcgtcttcatcgtcgacgtcaaggccaacaaggctcaaatcaagcttgccctcaagaagctttacgacattgactgcctcaagatcaacaccctgagccgagctgacggcagcaagaaggcctacgcccgccttactcccgatgatgacgctctcgacatcgatgtcaacaaggtctctctcgattaaagacattacttggattgtggatttctggcgtgtgattgggctggcttattgtctgctgaaaatgcaagacacggacatgtgaaaaggcgtaagaagtgcttctcgattacagtgcaaatgatcatgaatttacaacagcccagcacactgtcgtgcctattcgtcgagg

SEQ ID NO: 70352 - DNA, 584 bp, Zea mays
  Clone ID: MRT4577_164150C.1
tctgcagcgtggatctaggtatatacattaggggccaggatggcagaagatagcatggaatagcaatatgattaacagtcataatatgggggtaccgtggcttcatcagacttcttgcaaacatatctacgatctctctccctaatatagactagagtctggctccatccaccttaatttcatctaggatccagtatgggactgatggaaacgaagaaggataaaatttgttggcatgggcggtgggcatgaaagatgggtacaatgcttaggctctctgagtctggctctgctctgggtcagatgagggagaagcacagtcactcttggatttctcgtcttggagtagcgggccggaaggtcctggactactaacacgagactgttccagggagaaggtataagatggaagctcctggatctccgaaatcggcactcgtcgtcatggggtgagcaaggcagtgacttctcccccatgggtaccatggatggtaccgccttgtatgctggtgctttccttacacgctcaaagaggatgctgtggaggagggtgcccatgctggaaagaaagctgccaccaggac

SEQ ID NO: 70353 - DNA, 1004 bp, Zea mays
  Clone ID: MRT4577_164151C.1
cagattcttgccaagatcgtggtcggctgcgacggagtgaactcgccgatcgcgaggtggatgggtttctcggagccccggtacgtcgggcacatggcgttccggggcctcgcggagtacgccgacggccagccgttcgagcccaaggtgaactacatctacggccgaggcgtccgtgccggctttgtccccgtctccgcaaccaaagtctactggttcatctgcttcaacagacaagatccagggcctaagatcactgggcccacggcgctcaagaccgaggcgctggagctcgtccgcggctggccatcggacctcctggcggtgatgcgcagcacgcccgagggcgccgtggtgaggacgccgctggtggaccggtggctctggcccgggctggccccggccgcgtcgaggggcggccgggtggtgctggccggcgacgcgtggcatcccatgacgcccaacctcgggcagggcgcctgctgcgcgctcgaggacgccgtcgtactggcgcgccgcctcgccgacgccggcgcggacggggcccaggccgccgccgccatgcgcgcgtacgaggcggagcggtgggcgcgcgtgttcccgctcacggcgcgcgcggggctggtgggtgcgctcgtgcagtgggagaacgcggcggtgtgcgcggcccgcgacggcgtggtcatccccaggctcgtcaggctgggaccgttcctggagcacaccaacttcgagtgcgacctgctcgaaccggcgccggagtcgccatgacaccggcacactagctttctccggcacaatgtaactagtagtatattgattaacctcttcttcgaaagatcgattaacctctgattgacatgtactccctctatctcatctcaaaatagtatttattttagggtgaatttatacaatatttgatatatatgaatttataaaaaaaaaaggagggcggccgccgaatagacagctcgtcgcacccggtaattaccgtccgcggc

SEQ ID NO: 70354 - DNA, 654 bp, Zea mays
  Clone ID: MRT4577_164152C.1
ggccctaggggccttttttttttttttttttcaaaatttaattagtattgcacaatgatagatccacatcacataaaccatcaacaagcaccacaacaaaatcattcacaaaacctacacatgttattatgttttgcacatatttgcaaacactttacaaaatcattcacaaaagtactaacgcttcaagtgattcgcaaaagccttcacaaaagcactccaacttcttgtatcagtgaacaaagctcccttttcttctcctccaaatctttagatttaagatcagtcactgacttagcttccagtagagcattttcagctgttccagaggttgctgttgatgctttatgttgagcagcctctagctccttgaatagctatcatttgtctttcagaaaacagagtacccacagcttcaatttatcgcccgcatcttagcctgcaaactgctaagaagccaactgtgctcagatttgctgcagccatggcagcggttcctggtgtcctggcgagagcaacggcgtggctgcgctgctcggcggccggttgcctggcagcggctggagaagaggaggggagagaagcgaggagagagagggagagccgcttggagagagaggagcagagcagggcccggcccggccggcctcgagg

SEQ ID NO: 70355 - DNA, 365 bp, Zea mays
  Clone ID: MRT4577_164153C.1
ggggggggggacaggagactactactgattgtaggcgacttcaacaaactggccaacaaaacagtcgcatacagatacgattcatgttgattgaaggccatttactggagtgcccactgggcatgccacgctgtttccagctaccgtttcctgttgtcccgggcggccccaagtcacttgccaggccgagcgtacggagaaccttgcgaaatggatatcgagacaccgcccatcttgattccggtgataaaaacggcacccttgtaaagcttgcatgggagtgcgtgcgaatttcccgttctcaatctccacaaatcacaagacatagggcttgtaaccactacgtatgggttccttgtgcacta

SEQ ID NO: 70356 - DNA, 723 bp, Zea mays
  Clone ID: MRT4577_164154C.1
attgggtacctcgaggccggccgggatatcttcccagtcatcttctcttcgtctctcgttgcaccgcctctgaacctcctccgccgctcgccctgcgcgtgcccacccgacccgaaccgcccccgacgatcgaactaccggaggcctaaaccccgatattctacttcgactccctttcctccgcatgacccaaaccacgatcttcaagttgccaacgccattacagatgccagaccacatcaagctctcgcagaaaaacatgagatgagcctgaaccaccagaataccaagcccaaatgcaaggtgagctacgtacacaggctctcgaaagacgcccgcactccgattgaaactaaggttttctcgatcaacaaaaaacgctatgcatagaacgactcaatcaacaagaccctagaattgccccatgagtcatacaaatgattcaacggtgaggatcatgcgcaaaaaactgatcatcctccgtatctactgaagctcgatcacacgcaccgtgctaatatactcttttgcacaatctagcagtagagaaggataatgttgccaaatgtaatgatacctctggcaaaggacatacctgataggtgaacaacaaatgtaccaggagctacgaactggacagcgaaaaaccaccattgatattagaatggataccatagccactattgttgtaactggatttctcggaaaccaccaaagtatgag

SEQ ID NO: 70357 - DNA, 123 bp, Zea mays
  Clone ID: MRT4577_164155C.1
gaatctaaaaatgtactgtcttatttattgggaagccacaaacgtgccttcaaaaaacttaattattagaactatacactgatatagcatatctaaagagagggcacactgcaatagatgagg

SEQ ID NO: 70358 - DNA, 626 bp, Zea mays
  Clone ID: MRT4577_164156C.1
tttttatttggatagggcccctgcatagaattctttttcccaataaacgctagcactgccggttgctaacaaaccggcactattatgccgtatgccgaccgtccgtaaaagtcagtttagtgtccaggtttagcgtacaaaaggttttttcgttctctttctctacacctcaatcatattgtatcgccattcacagcacggtaaaagtcacgtctactgatctacatggcagcagcattattgtcgtgagacatcctcttcttgtacacgtaaacgcgcgagacgatgatgaaagcagccaactccacggcgcagagcccggcgagcagccagtagaagtagtcgaggtgcgcgcgattgaggttgttggagaaccagctcgctccgctcttcttggtggcaccgtcgatggcggagatgatgaagctgctgaacaagtgtcctacgccgaagatgctgaaaaagaaggccagcccgaggctgcgcagcgcgtcggggacctggtcgtagaagaactcctgcaggccgatcatggcgaacacgtccgagagcccgaacagcacgtactgcgggaccatccaccacaggctcatcggcagcgccgccttgggctggccacgagcccg

SEQ ID NO: 70359 - DNA, 1663 bp, Zea mays
  Clone ID: MRT4577_164157C.1
ccacgcgtccgaccggatccgctctggctccaacaacgtgatgggctccatggaagcgtcgaccgcgccggagaacggctcctccgctgccggtggcggagccggcggcacggcgtgcaacggggcgggcgccgcgtctaacggaggaggcatggagaggcggctgaggtcctcggccgcgtccgcgtcgtgggcggcgcaccttcccctggaggtgggcacgcgcgtgatgtgccggtggcgcgaccagaagctccacccggtcaaggtgatcgagcgccgcaagggctccgcgtgctcttcccccgccgactacgagtattacgtccactacaccgagttcaatagaagacttgacgagtgggttaagcttgatcagcttgatcttgacactgtcgagaccgttgtcgatgagaaagtagaagataaggcaacaagcttaaagatgacacggcaccagaaacgtaaaattgatgaaacacatgtggagcaaggacatgaggagcttgatgcagccagcttgcgggaacatgaagaattcacaaaggtgaaaaatatcgcgaagatcgaactggggagatatgagatagacacatggtatttctctccttttccaccagagtataatgactgcccgaagctgtttttctgtgaattttgcctcaacttcatgaagcgcaaagaacagcttcagaggcacatgaagaagtgtgatcttaagcaccccccaggtgatgaaatctatagaagtggaactctatcaatgttcgaggttgatgggaagaagaacaaggtttatggacagaacctttgttatctggctaagctatttcttgatcacaagacattgtactatgatgttgatttattcttgttttatgttctctgcgaatgtgatgatcggggatgtcatatggtgggatatttctctaaggaaaaacactccgaagaatcttataatttggcttgcattctcactctccccccataccaaagaaaaggatatgggaagttcctgattgctttctcatatgaactttccaagaaggaaggtaaagttgggacaccggagcgccctctctctgatcttggtctgctcagctatagaggttattggactagagtgcttctggaaattctaaagaaacataagggaaacatatctataaaggaactaagcgacatgacggcaataaaagcagatgacatcttgagcacgctacagagcctggacctaatccagtaccgcaaagggcagcacgtcatctgcgctgacccgaaggtcctcgaccgccacctcaaggcggcggggcggggcggcctggacgtcgacgttagcaagctcatatggactccctacaaggagcaaggctaaaaggcgaactgctccgtgtctcagatttagactcgctgaccgatgcgatgcagtccctgtacatagcatctccccacagctcacttgacttgacttgactcgtgtaccgtgaaactctacttgtaactttgaacatccacatcgttgtctcctcatttcactttgcatgaaacaactcatgtatttttaaaatctacaaaaaaaataaaaaaaaaaaaaagaaaaatcctcctttctccttgcattaacccggctaccctttttttaaaaaaaaaaaaaaaaaaaaaa

SEQ ID NO: 70360 - DNA, 294 bp, Zea mays
  Clone ID: MRT4577_164158C.1
ccgtaagctcggatcctgtatattggccgccctccacttcgttcggtgcatgcggaagtaccagtacaggggaattcgtgcggctgtcctgtggcatgtgggcgcgccgaaaacagagaccccagaacgggcgtccgattcttggatagacacatacagaaccgtcgaggaggcggccagggttttctacgccgatggttttacgagacgcagaaagaaagccaaggccgatttccgggactaacaaacggctgaaggcgatacgatgctaacaaccgctactactccaactga

SEQ ID NO: 70361 - DNA, 1807 bp, Zea mays
  unsure (1)..(1807): unsure at all n locations
  Clone ID: MRT4577_164159C.1
gggtacctcgaggccggccgggatcggcccagaagtcccgccccgaatcgctcacagtcacatctgatccgctccggctccgacgacgaatgggctctatggaagcgtcgaccgcgccggagaacggctccgccgccggcggcggagccggcaacggggcgggcgccgcgtcgaacggaggaggtgttgagaggaggctgaggtcctcggctgcgcccgcgtcgtgggcagcccagcttcccctggaggtgggcacacgcgtgatgtgccggtggcgcgaccagaagctccaccctgtcaaggtcatcgagcgccgcaagggctccgcttcctcttcccccgctgactacgagtactacgtccattacaccgagttcaatagaagacttgacgagtgggttaagcttgagcagcttgatcttgctactgtcgagaccgatgttgatgagaaagtcgaagataaggcaacaagcttaaagatgacacggcaccagaagcgtaaaattgatgaaacacatgtggagcaaggacacgaggagcttgatgcagccagcttgcgggaacatgaagaattcacaaaagtgaaaaatattgcaaagattgaacttgggagatatgagatagatacatggtatttctctccttttccaccagagtacaatgactgcccgaagctgtttttctgtgaattttgcctcaacttcatgaagcgcaaagaacagcttcagaggcacatngaagaagtgcgatcttaagcaccctccagcggatgaaatctatagaagtggaactctttcgatgttcgaggttgatgggaagaagaacaaggtttatggacagaatctttgttatctggccaagctatttcttgatcacaagacattgtactatgatgttgatttattcttgttttatgttctctgcgaatgtgatgaccggggatgtcatatggtgggatatttctctaaggaaaaacactctgaagaatcttataatttggcttgcattctcactctccccccataccaaagaaaaggatatgggaagttcctgattgctttctcatatgaactttccaagaaggaaggtaaagttgggacaccggagcgccctctttctgatcttggcctgctcagctatagaggttattggactagagtgcttctggaaattctaaagaaacataagggtaacatatctataaaggaactcagcgacatgacggcaataaaagcagatgacatcttgagcacgctgcagagcctggacctaatccagtatcgcaaagggcagcacgtcatctgcgcggacccgaaggtcctcgaccgccacctgaaggcggcgggtcggggaggcctggacgttgacgttagcaagctgatctggactccctacaaggagcaaggctaaaagcgcagctgctcccagccccagattagagtccctgtacataacgtttggtactaggatctcccctcagctctcacttcactcgtgtaccgtgaaaactgtacactgtaacaaccacattgctgtgtttgtgctgtctgccgctgagttcctttatagatatgttacccttatgtttctttagaatttccagaagcactctagtccaataacctctatagctgagcaggccaagatcagaaagagggcgctccggtgtcccaactttaccttccttcttggaaagttcatatgagaaagcaatcaggaacttcccatatcctttttctttggtatggggggagagtgaggatggcagcccaaattataagattcttcagagtgtttttccttagag

SEQ ID NO: 70362 - DNA, 138 bp, Zea mays
  Clone ID: MRT4577_16415C.1
gacctctcttatttctgttagggtcgacacatggcagaaactgcatcattatagaactatatgtcataatagatcatacagagggctccatcaacgaaggggaagagggcagaacactgatggagggccgcaagcatg

SEQ ID NO: 70363 - DNA, 296 bp, Zea mays
  Clone ID: MRT4577_164160C.1
gaccacacctggatgtggtctcacgacaatgtcagcattccatctgtctcgcctctcgcaacgtagacacactttcggaaatcagagactgtgtacactcataaccgattttattgatctctatttatctctgatttcgcatgtttagatttcgttcttagctggcaaggcacttcaccatgaagcttttgtaccccacctctctcaaactcgacattcaaagcctcaaaggatttgcggtcaccctccatccgtacgatgtccaggcgcccataccggacgagttaattgatgct

SEQ ID NO: 70364 - DNA, 482 bp, Zea mays
  Clone ID: MRT4577_164161C.1
ctctctcggcaatgtcaacgccgccggcctagccctcacctccccttgccgtcctcttcctgtccctcgtcgcccattttttcgccccgaccggccggcgccgcattccctgatgccaacccagatccggcgatgggcaacagcgtggcgaggctggccacgccctgcttcgcgccgcccgacacggcaggggcggcggatgacgatggcactaccggcgtctgccacgttctcagcttcgatggccgcatccacggcgtgctgctgccgtcgaaccagtccacggcgggcggctccgtgctcctgaccgaccgggcgtccttctccggctcctcgtccttcgacagctccaactccttctcgttccggacgctccagccgagccagtactcgggcccgctggacggcggcagcagcagcgcgtcgacgtccgccacgaactcgggcgtgtcgtcggggccgcgtcgcaccgacgaccagat

SEQ ID NO: 70365 - DNA, 338 bp, Zea mays
  Clone ID: MRT4577_164162C.1
ttagtcgcatgtagagaaagaaactcggtgatattgtattcctcatgcctattacgtggttttgtggataccttggttataattgatattttacgtggttttgtgaactactttataaaccagtagcaacaactgttccagctttgattttctttggttcttccatacttctatgacactgaaattcattgcttgttattatttacattactgaaatattctatttaaattaatttgatttcacctattgttttgtgctcatctatgcatgaattactaccaacaaccaacaagtttcatggttcaaaacttaggttggaacgcctagcatccctgat

SEQ ID NO: 70366 - DNA, 428 bp, Zea mays
  Clone ID: MRT4577_164163C.1
tatagttcaataataaatctaaaagaggtcaccaccaaagattgcctgcttatgctaggcggtttttctgcgtgggctgctactgccaccatgatccagcaatgcatttaagctgctataactacccttcttcctccgtacctcttatcagcgatgtcttcattatgataaaacctaattattcaaccctacaggatccaacaggcagtcacagctggcatcttaccttcatcacccttgttcctcctacaaccatcatcagtattacatcaattacctctggtgcatttattgtcacagcacatcatgacacaactactactacaacttgtgctagcaaacctcgctgcctactatcatcaacagcagcatattacattcaaccaactagctgcattgaactctgcttcttattagcaacaacaaca

SEQ ID NO: 70367 - DNA, 283 bp, Zea mays
  Clone ID: MRT4577_164164C.1
ggaacgccacgctccgcttcgccgtcccagccacttgcgccggctccctcctcgtcctcctcctcgccgagcgctccctctgcgatcgccatgtcggcgaggtccatatcccgctgtccgagctcctctccgtctcccccgacggccctttccccgccaagttcgtcgtctaccaggtgctcaagatcttctccggctagccccagggagtcctcaacctctcgtacaagctcggcgaggtcgctaacggatacgcccccgcttccgccgtccagtccgtcta

SEQ ID NO: 70368 - DNA, 501 bp, Zea mays
  Clone ID: MRT4577_164165C.1
atgggacaccacccatttttcatacaaattttgggttattatctccccaaacttacgagaaccttacagtacaccaatagcaactgggaaatgtacaaaccgggctagcagtttgcaattttttgtaacagatcccagctaaatacattcacatttttttttttgccgccttggcgggcactttctgatcattgaacctgtcaggggggggcacccgcaggggtgggggattcacttgtcacgggcttaacctcccaaaaaaaaatttttttgccagttttggaaacaatttgcaagacggggtcaggggtaacattgcccttcacggggaccctttgttccatgaagtctaccggggaggaattaacacctttcattttgcccaagacccccttgacaagttcaaaacagcccttaaaggaaatgccaaccttgaacacaacaatctgggccataaccccagaagggaggaaggtccgggccctcccgccgggggggggg

SEQ ID NO: 70369 - DNA, 435 bp, Zea mays
  Clone ID: MRT4577_164166C.1
aggcctagccgcctatggtagtcccgtccggtctcccgcggccagcgaactgactgcctggcgccggctaatcgatgggctactggaggcaccgcgtcgagctgacggtgcggcggacgtggctcggagtgacataccgcttcggtgttcgccaaaccgggctgaggatgctgctgcaggaggtgagcacgtgcgattacgaggacccgcacgtgatgtgggagatgctgaaccgcaccacggggccggcgcccgcgcccactatgcgggatcacagtcgtgtccggccgcagcctcaggctgaggctgaggatgatcaggacctcctctgccgaggcgtttaatctaccaaggacgacaacgccgctgacgacggcgctgccgctgccaacgcctctcgtataaagatagaatgctgttaatgctgcatacata

SEQ ID NO: 70370 - DNA, 364 bp, Zea mays
  Clone ID: MRT4577_164167C.1
aaaactccccttgggggggctacgggcatggttaactaaccaaaaccacaccccccctttcattgggtatttttttcacccttcttccagagtgggccaaacaacctttttacaaactaagcgactgatcaagattgcgggggcaatcccggccgatcaccaaatagaaaacttatcccgcaattttttccccttataggagaatagctagatttttgttaggcttctggaacgagggagatgccttcaacccacgcttatttagagctttaaccggcttgcaacaattccttggaatctgccattggcctggggctgccctggagtttcttaagaccaggctatgtttgtggctccaagggtt

SEQ ID NO: 70371 - DNA, 487 bp, Zea mays
  Clone ID: MRT4577_164168C.1
gcacgcttacgcgatgacccctatatagtcaaccaatgcaatcattgatcgtgttaccacagattgtgtacaggaaaaatccgaggcaagcaccgctatacaaacactacatccgaatttagaaacaaccgacgctatcaatcaaccaacccaaacatagcatgagctaggctctgcacggcttagccccaactaacagaagacgaccgaacatgaaccggctctcacagatggttgagagcatgcagagccatcactggcagctggttgtaccggcctgtgccatgaactgaagacggtgtcgtgcatcaccaaactgaactacaagatgcattattcgaccctgactgtcttgattcgcttcaatgaatgccggacgaaatcatccacctgctgatattctgtcacgataccgcaagagggcgtgaacacgactaaccgccctgctagacgctgcggtggcgctacaatccatagaagttcttga

SEQ ID NO: 70372 - DNA, 567 bp, Zea mays
  unsure (1)..(567): unsure at all n locations
  Clone ID: MRT4577_164169C.1
ttggtggtctcgaacttccacagggcagtatcaattgtaatacctctctcacgctcagccttgagcttgtcaagcacccacgcatacttgaatgaccgtttgttcctctaggcggactctttctcgagcctctgactcactcgcttgggggggggggcgagcttgtccttcaggcgaccactggtggctcgctggccngagcgacccctccctcngcccccattgcctgtcctacttgcttctgtgtgacactgctctcctgccgggcgcccgccgtggcgccgccgccccggcggccccccgcctgcgccgcgcgctcncccccccccncctcgccccgcctcccccccccccgcgncgggcccccccccccccgctccctcccccgcccccccccccccnccgcctccccccgccgccccnccctccccccccgtnctcccctcccccccccccctgcccccccccncncccccccctnccncggcccccnccccccccgctccgccccctgccccnccccccccccccncgccctctgcccccccccccccccccncccccccc

SEQ ID NO: 70373 - DNA, 301 bp, Zea mays
  Clone ID: MRT4577_16416C.1
attgcacccacacatgcttaaaaacagaggggggggaaaccccgggctttttaaaaacatatccacgctcacattttggtattggacaaacaccgtttttatacaggccaaggggaaaaggtttgtccagttttggattaaaaaaggaaggaagttatggaccgcacctactacaagggggggattaaggggtactggaagcgccggggttactaccgaattaacccccccgttgggcaaggccggccgccgtttcccaccggggagctcggagggggcgtgggtgtcccccaggcccaac

SEQ ID NO: 70374 - DNA, 1603 bp, Zea mays
  Clone ID: MRT4577_164170C.1
gggtacctcgaccccggccgggcgtctccggcgccgtcaaccccgcgacgcgcaaaggtgagcttcgacccgaagccgaaccgatcgagaggcccagccgccgcaaccggaggagagagagaggcggatacacaaacacgaaaccctagcaagcaagccctccacgcacagtcaagaagggagggggaggcgatggagtacccggcgacggccgccggatcggggagccacaagtactactacccgcagcagcactcgcactcacagccgcaggcgcttcgccgcccgccgcgccccgccgctcggtgggtcaagcaatggatcccgcaggatctcgcgtcctccggcggcaaatgctcgctcttcaagtgggtcagagaggatgggtacagaaactccaaggacaaccccagagtgttagatgtagaagcccccaagcctgaacccaccacggagatcctcttcctctgcagctacgagaactgcggcaagacctttgttgatgtcagcgcgctccgcaagcatgctagcgtgcacaacgagaagcagtatatatgcaacgagcccaactgtgggaagaaatttgttgatagctccaagttgaagaggcattatcttacccacacaggacaaaaggattttgtctgtccacatccaggctgtggtaaggccttctcattggattttaacctacggtcacacctaaaaacacatgcattggagaattatcacatatgccctttcccagcatgtggcaaaagatttacaagtgacttcaaactaggagcacatgtcaagtcacatgaaaagactggaactcctattgcagtgcagcatgcgccagcgccaccagcagaaaaaccgcgtgtcgccccaaagcctccgactccagcaaccacaagctatgctgatcggccatatgtctgcccctatgaaggttgtgacaaagcatacattcacagttacaaattgaaccttcatctaaaaactcagcaccctgaacacggtcaagaggaaaacggtaaggtcggtgcttctggtgggcagcatgctgcgaacgaacacacttaccagtataactatgccgaggttggcgagattgcaccaaaccccaaaaggagcaagacgaatcatgggcacaaggtccactcatccaaagcctacaatgccaaggtttcgagagcaatgccttctgacattggcgtcaggaaccagtggccaggtaaagctacgtaccaagatgatagtgaagagacggaagaagatggaggcaacaacattgaagatggctggagatatggcaacaatgatgacgatgaggaaacaccagatgaagattgacctttatttaggtttggatatgtagatatatgagggtgatctgttgtcctttagtttcaatgcagtcatggggaagttcaagctttaaccttaggtagtagttcattcagatggtgcatggatatattgtactcagttacctgctcctaaatgctttcactcccctatcttccagagccacatgtattttagatagtttggatatgtttgccttggaataaattttcatttgaaatgttaaaaaaaaaaaaaaaaagcggcc

SEQ ID NO: 70375 - DNA, 578 bp, Zea mays
  unsure (1)..(578): unsure at all n locations
  Clone ID: MRT4577_164171C.1
gcgttctgccgccgcaaccggnagagagagagaggcggatacacaaacacgaaaccctagcaagcaagccctccacgcacagtcaagaagggagggggaggcgatggagtacccggcgacggccgccggatcggggagccacaagtactactacccgcagcagcactcgcactcacagccgcaggcgcttcgccgcccgccgcgccccgccgctcggtgggtcaagcaatggtgcgttcttaacttccctccctctccctgaaataagataatttccgcttcttctgactggaattaacctgagctaatccattgcgtgcggtggccattggtttcgggtgcgcttcgtttcccaggatcccgcaggatctcgcgtcctccggcggcaaatgctcgctcttcaagtgggtcagagaggatgggtacagaaactccaaggacaaccccagagtgttagatgtagaagcccccaagcctgaacccaccacggagatcctcttcctctgcagctacgagaactgcggcaagacctttgttgatgtcagcgcgctccgcaagcatgctagcgtgcacaacga

SEQ ID NO: 70376 - DNA, 343 bp, Zea mays
  Clone ID: MRT4577_164172C.1
ctcgcgggtcgacacacgcctctacaattcgtcttctaaacctcgacctctatccgtccgacccttattccgcacccttctctctcgcacctccgcactcgaatgccgccggctcacaatgatcattctcgacagaagcaccggatgaaccaggatggaagatgacaccccgctcacaagaaccatcaacggtacagtcaccagcatcaccaccagggacatctggggcacagtcatcaccattatattcaaactttgattgtattgaacacaacatctcgctccctgttgtcaacacgtggcccgatacctgctgcatctatggcaccagtatcaccaccat

SEQ ID NO: 70377 - DNA, 634 bp, Zea mays
  Clone ID: MRT4577_164173C.1
tttggtgggttctgctcaccaatctcgctcgcagtatacgaagcctccatagtccatcatcctactgcactcggagaccacggacttggaataccaccctcgcccacagtcccacaccaggaaccatgaggaccatcatggcgaagagcccccacgactcctccttctcccggaggaacttcaagtggccggttcttgtcaagagcagcagccatggcgccgcagccggcggcggggaggacagctccggcaagggcgcggaggacgccgacgaggacgaggcgaccatggcgttctcctccagctgcccgtcgttccactcggaggacttcgtatccccgccgcccaatcccaaggcgccacctccaccgaagcagcggggcaagaggtgccgcgcggcggtctcccggctgcgcgcggcgcttgccgcggccatcgccggacggcaccgacaggtcgggctcggagcgcggatcacgggcacgctctacggccgccgccgcggccacgtgcacctcgcgttccaggtggacccgcgcgcgtgccccgcgctgctgctcgagctcgccgcgcccacggcgtcgctggtgcgcgagatggcctcgggcctcgaccgcatcgcgctagagtgcga

SEQ ID NO: 70378 - DNA, 701 bp, Zea mays
  Clone ID: MRT4577_164174C.1
gccggccgttccgggaactttttcttctgaacgacaacctacagcaagaacttgtagcttcagtctccggtcccgacggttaaatcgattgaactcctgttcctacaaatcaccaaaccacaatcacaatgaagcacctcgcggcatacctcctcctcggccttggtggcaacacctcgccctccgctgccgacgtcaaggccgtccttgagtccgttggtatcgaggctgactccgaccgtcttgacaagctgatctccgagcttgagggcaaggacatcaacgagctcatcgcttccggttccgagaagcttgcttccgttccctccggcggtgccggtggtgctgccgcttccggtggtgctgctgccgctggtggctccgctgaggctgaggccgctcctgaggccgccaaggaggaggagaaggaggagtctgacgaggacatgggtttcggtctcttcgactaagcgcatcaccatcgccaaacgaacaccttcacctacctttacgaagtatgatccggccaatccctcgactatcacgagaatcatgcgcaatgagaacgatttggggagtgtcgagcgtgcactgcaaggggcttggagaaggataccgcggcaatagtagaatagttgcctgctgagatacccggaatgaagccatgcacctccagaaaaaaaaaaaaaaaaaggccccta

SEQ ID NO: 70379 - DNA, 186 bp, Zea mays
  Clone ID: MRT4577_164175C.1
taatataacaccacctaaatacaattcactctctccttattatacaacgactcacactactaaaaccttgtcattacccaacttaataccattccatcacatcctactttatacagcattcttaataacacaaacacccaaacctaactcccttttcaacatttccccaaccacaatctcaaatat

SEQ ID NO: 70380 - DNA, 526 bp, Zea mays
  Clone ID: MRT4577_164176C.1
gcgcgccgccgaggccaccacgacggagacggcgagcacgttgtcggagaagacggcgtagtggtagagcgacgggtccgcgagctggggcggcgcgacggggggctcgtcggggatggcggaggcgttcgcgaggcgggcctccaggaggcgcatggcgaggcagtggagcgacttgggcgtggaccacgcggcgatgcgggagttgagcactcccgcgcggcgcgcgcggaggagctgctgccccacggcgaatacggtgtcggagagcttctgggtcttggactgcgtgtcgaacgcctccttggcgccgcccgcgagggagcgcgcgcgcttcacctgggccttgatctccttctccagggccgccacggtggagaccgagagacgggcggcgagggcggagaggcgcgaggagatggagaggaaggcgtccgtctgggaggccgaggccgcgctgaggtggcgcgcgtgggccgtgtaggccgccaggacggccgcgtggtcctcggcgtggcgttgcacg

SEQ ID NO: 70381 - DNA, 667 bp, Zea mays
  Clone ID: MRT4577_164177C.1
gtgtgcgatgatgggcactgccgtggacctaggacggaggcagggcgacagccgcttctacgacgctgccagggctcgacgagggcaccatcacggccttcccaagtcgaggtgcgcagccgccgccgttacccaggagaaggcgccggaggagccctcccggctgccagcgtcccccgtaggagttgcaggcaacctcaagaggttcgtggcagccgttacgctgtccgtgccggcggagtacccctccgagagaggagagtggaggggttgcggcgtggatgccaaccgggagaggccctacttcgttcttgacgacctatgggaggcgtataaggagtggagtgcgtatggtgccggggtgccgctcgttcttgacgggtgcgacggggtcgtgcagtactatgtgccttacttgtccgccatcgagctctatggagactcatcagtcctgcagtcatcttccaacccaaggttacatatgatggacgacagtgatgaagatttccgtgattccagcagtgatggtggcagtgattatgaacatgtaagggccaaacactttgctcaggaaggcttctcaagggatgttggtgaatctggagttactcatggccgcttgctctttcagtacctcgagtttgattctccgttttgccgtgaacct

SEQ ID NO: 70382 - DNA, 626 bp, Zea mays
  Clone ID: MRT4577_164178C.1
agtttcttcatccgccgccaccacgcctcatctctcctcgaccccgtccttcgcctccaagcgatgatgacggcatgagatccatagcgacaacagttgcagcggcccgatggaagcggcggacaaccctagccgcggtggcgcgcctctgcttctcgcatccaacgacctgggccatggatctgcggcagatgccttcctccttcatctcgcaagccgcgcagctgccttgccatccggagatttggagcagcaatcgctggacgaggagaggacgaccaccgtgacctgtgggagggtcgacctcgacctcgccggcgacggcgacgcctcgcacatggaggaactctctgcctctctagttcgatggacggcgacgaccgggacccacgctcgagcccgacgaccgggacaactcgatggcgaggtcctcctccccgaccaccatgattccccggagaacatgaaggtttatttggccaatccctgtaggcagcagcaacctttgctacaacgtgatcatctgtaatgaaggtaatctcgcctgtggtgattgcagcagcactctgtagctgctagaagagccaacgcttctgcttgaagcggagaggtgacatcaattgtta

SEQ ID NO: 70383 - DNA, 398 bp, Zea mays
  unsure (1)..(398): unsure at all n locations
  Clone ID: MRT4577_164179C.1
ngacnccaaataataaattagatcccacgccgccangaagcanccgccggcgccacgggagcaacaacaaagaacaagggcgcccccccccccgccgcagnacnaccaggcggggcacccnccgccgccgcccccgcagggcaaccaggcgggccctccgccacccgcaaaggggggccaaccgccaccgcaggcggcggcggcgccggcgccggccggcggaggggcgggggacgaggcgaggacccncnggaacggggaccngcagnacngganggacgaaaacnaccccnaaagcggcgccncccaggcgggcgaggacaannccgcgaagaaaangcggaacaagcagacggggcaaccngagggnnaaggccccaaggaaaacagcaaccaag

SEQ ID NO: 70384 - DNA, 129 bp, Zea mays
  Clone ID: MRT4577_16417C.1
ttgcctccttaggagaaaggacgttgctcacaacatgatcggcgagcacaattatgttccagattgcatagatgaggacctaacatatttacagcattttttattgatcatctcctctccacagtgctc

SEQ ID NO: 70385 - DNA, 341 bp, Zea mays
  Clone ID: MRT4577_164180C.1
tccaccgcggtggcggccgccctttttttttttttttggctgtgtacaagtgcatgcatccattcatgactggttcatatattacaaatcaccaaactcaagcggctgctcaccgaattaacgaagacctaaccaccacgggaagatcaatcttgccccgtaccatccatcccatttgtcacaaaacgtaacacgcacacacgggtatgatgccctctccaggctcatagagatttatcctagttaatggaagaccacgtttcaatggatggccggagcgggatcaagggcggactcaagaggatcctccgaccttgaccagatagtgggataccattggg

SEQ ID NO: 70386 - DNA, 366 bp, Zea mays
  unsure (1)..(366): unsure at all n locations
  Clone ID: MRT4577_164181C.1
ctcgaggccggncgggatcttttttcttgcccggctccctatggtgctatgtgagcgctggactgagcctctatctaacgctcctacgccaggtagaaacaagtgttgtatctgccttcgacgggtggagaaccacgtcgtggcattcgatcatacctcctgcgggtgtcgcctacgttggccagacattacttcgacattaccatcaccatatggcgtcactgacttacgctacgtggttgctctctgatctatgagtggacagcatggaccgcgggagtggatagatccccatggcactggtgattgagatctgagtcgctgtattcgacttcgtggacaagctctaacttgacgaacaaggaa

SEQ ID NO: 70387 - DNA, 396 bp, Zea mays
  Clone ID: MRT4577_164182C.1
atgagttccctcccaggagatgagatctatgtacacccgagaactctctgcgccgtcgcgaacggtccacctccctactgcggatggtctggtgccctaccacggatggtccggcgacccatcacaaacagtctggcacctcatagagaggtccctaaggtctcgactccccgtgagttggatctagggatcattaatgtttggcccaaaaaaggcaccaacacaccttttgacaacatcgctggggacaacgagatcaaatctataagatcggccgtgatggccggttccaaacataactctaatgtctccaaagacaacattctaaagccgggtcttgagagcttgtcggctaacgagcaacaacaatttcaagattacatgaacaacatgtag

SEQ ID NO: 70388 - DNA, 695 bp, Zea mays
  Clone ID: MRT4577_164183C.1
cactcctatgggcgattgggttcctcgaggccggccgggattccacgccgcaccgtcctttccagaaccctctggtctccgcgtgcggcggcgcgatttctttgcttctcccttccacttcgagagattgttgattattctagagccagatccgggtaacagattcgagtttgcgcccgccctgttcggcttcagatatggggaacactacatctgtgcaagctgaggcttcagattcagcgcagaaacctgccacaacagctcctgcacctgggtcaaagccgaaaaagatctgctgtgcttgcccagatacaaagaagctgagggacgattgcatcgtgcagaatggcgaggatgcctgcggaaagctcatcgaagcccacctgaaatgcctgagagccgaagggttcagcgtctgacgtggtgctccatcatggcaactccacacacctgtttctgcagtaatctgattttgatcatgaacagtgtgatgaataaggacttctggtagagtgatagaaacaactcgcagttttatttctagactggaaggaggaaatcccctgaacattgccagtttgcaagagtttttctatcttttttcaatgcatttagtgccacacatatctgcaattctggataatactttatggagcatatgtatatggaaaaaaaaaaaaaaaaaatttgcggcc

SEQ ID NO: 70389 - DNA, 778 bp, Zea mays
  Clone ID: MRT4577_164184C.1
gtgtggcactaaatgcattgaaaaaagaagaaaaactcttgcaaactggcaatgttcaggggatttcctccttccagtctagaaataaaactgcgagttgtttctatcactctaccagaagtccttattcatcacactgttcatgatcaaaatcagattactgcagaaacaggtgtgtggagttgccatgatggagcaccacgtcagacgctgaacccttcggctctcaggcatttcaggtgggcttcgatgagctttccgcaggcatcctcgccattctgcacgatgcaatcgtccctcagcttctttgtatctgggcaagcacagcagatctttttcggctttgacccaggtgcaggagctgttgtggcaggtttctgcgctgaatctgaagcctcagcttgcacagatgtagtgttccccatatccagtgtcagaggctcccacacgagggaggtttggggaagggataaaccaagatgagcgttcccccgcaaatgcgaaaaggctgctttgaaacctggtgactcagtgagaccctcaccgctgcaccacctgtcctggagggcggaggacggccgacggcggcagcgtctgtctctggcggctccgcggctgtgcgtctggcagtttggcggctgaagccgaacagggcgggcgcaaactcgaatctgttacccggatctggctctagaataatcaacaatctctcgaagtggaagggagaagcaaagaaatcgcgccgccgcacgcgcccacgcgtccgcccacgcgaccg

SEQ ID NO: 70390 - DNA, 586 bp, Zea mays
  unsure (1)..(586): unsure at all n locations
  Clone ID: MRT4577_164185C.1
anttccctgatcggcttcctgaatttcgcaagtacgtgttggtgatacttgatggcaacccaaacttcggcaagcctgctcctgcgcctggaccaggtggtaacagcaatgacactaagcctggggatggaagtggtggaagcaacaaggcttcctcttctaccggcgtcattgttgggtcagtggttggagctgttgctgtactaggccttattgctgcattagggttctattgctacaagagaaagcagaagccttccggaagggtgcagagtccacatgctatggtcatccatccccggcactcagggtcagatcctgacatggtaaagatcacagttgctggtggaaatgccaatggtggtgcggncacaagcgagccatatagccaagcaagcagtgccccccgtgatatccatgtcgttgaggctgggaatatggtcatttcaattcaagtactgcgtaatgtgaccaacaacttcagtcaggagaacatccttggtcgtggtgggtttggaattggatacaaaggtgaattccctgatggttaaaaaaatttttgttcaactaaatgaaatttgttgtt

SEQ ID NO: 70391 - DNA, 731 bp, Zea mays
  unsure (1)..(731): unsure at all n locations
  Clone ID: MRT4577_164186C.1
attcactgcgccgacgcctccgacctcgtctcttccttcccacgaacaaccgataatccgccggcgctgacatgttggtttatcactcacctcctatctggagtcgagctcctgtcagattcattcgcctacgatgagttctagaacggtgtcctgtggtgaggccgagtgaaggagccatcttccaggtgctgttgatgtagacactgatggccatccatccgccgtaggtgctgaggatgcaagcgttgatgacacagtcgtttagatggcccgatattgccgactcttaccatcaacgggagcaacctctgtttagcacaaaatcatgttgtcgcttacgatttgatcatacatttagaatcccactgctgtgtaccatccaaagaaacgggatgacctcaaatatgctgtcaagggtgcaatcaagtttctccttactagctgtaggaccttcaactttttgttggggccctcatgacctacgaatcgtccttgtgattcccctattaaggggatgttgccactaatccgacattcctctatttctttcatgcccttaaggagatcaagtgctatattagttacccatgttggggactatatatgctctattgttatagccacaactatatatgccctgcctgaactgaactcangtttttttaacaaaagaccggctttcattggattgcatgtgacaggtaacctgtgttattgactcgtccttg

SEQ ID NO: 70392 - DNA, 533 bp, Zea mays
  Clone ID: MRT4577_164187C.1
gccggccgggtcgggcttccggctctttccctcctcaacgacgccaacactccgcaccccacctgtaccgtcagggggtgttggtaaaccgcagctacctgccttccttgttggacaccgcggtgtcgctctgcccatatgccgctcggcggcgccgctcccctccccccgcagccgatgcggacggcgaactaagaggaaatgcccaaaccctaggggaagctgcacactagcaagaagcacacggagatacgtccggcgaggcacacaccgatgaggagacttctccgaagagctgccgatcggggcgccgcggcgccgcgggctggcggtgcacgtcacagtctacctgatcgcaaactaccatcaacgcgatgacgtcgatgagacctacttccccctgctcggagcccagtgcggactctgcggccacgacctctctatcgtcatggttcctgacaaagtggacaatcgccagtgctgacgcgaggacgactacaaccgtgcctggagtctttgagtcccttagacga

SEQ ID NO: 70393 - DNA, 375 bp, Zea mays
  Clone ID: MRT4577_164188C.1
agcaataggatttcaatgtaatcaaactcagttacatttttttcttttatttttgcttgaaacacattacaaattgcacttgcacgcttacgccacatttttcgccactttgaacacaccgtccattcacactccgaacacatctcgaagacaagagaagagaagatgagctggataggttagttagtcgaagacaacaaacctctcgagaacattttcacccgtccaaaaacgaacctggtggatagtaggttccagcgtaaaaacctaaccaacgagcagagctggaataaagaatatcaactgtatttttctaattggctgcacgaccatcttgttgaataattgaagttccctcatagaaaatggccacga

SEQ ID NO: 70394 - DNA, 348 bp, Zea mays
  Clone ID: MRT4577_164189C.1
gctggagtatatggcagcagacggcgacaagaccatcatggtgttgttgctccaacctcgtaaactagcagaaggtcttaaggacattgcggacatttataagaagcataagctcactatcaatgatgtgcggattgagtaccagcgtaaatcgtcttagttaatttgcctgtatgtatgtcagtatgtgtctactctactacccatataatataacctgatatgtacgtgtttctgtttccccgtcgtctactgtactcctcgtagcctactattgtatgagtttatacgtagcctgctatcgtacctaaggtactacaactattacctcatatgaggtaagatttt

SEQ ID NO: 70395 - DNA, 232 bp, Zea mays
  unsure (1)..(232): unsure at all n locations
  Clone ID: MRT4577_16418C.1
acccaaacaatnacatacctaggttcgatgctaacatgcactcgttcctccctataattgacaataaacaaacttctttttctattaacaataccctcacacactattatgactcattccatactcctagtgcattatagaccaacgttaacacaatcaatgaaacaaaatctggaataaatattggagcttctgagcccaatttattcgatgttggcatgatgtttaacat

SEQ ID NO: 70396 - DNA, 813 bp, Zea mays
  Clone ID: MRT4577_164190C.1
gcaccaaagtgccatgtacaccagatacgttcccaaaaaaaaaggatgaacaatgtttgcgacaagtctaatacctacaagagatacaaagaataagaggaacaatgttttaatgctacagatctgtaatacttaactagaaaagcgctcataaggatcgaaagacccaagggattgttctaaattgggcttctaatattgacttaattaaaaactacttcacgccgactaggcttggcgttccagtgtgggtgggtgtgaaaccaaggctggcatattttttttgccatgaaggctagatgagagcattcggcaattgcagccaccgggcaggaatgagtgagatctaggagcgatgtagagatatttaatttgccaagttccatttctccacgagaaccaactgcacggaaatggaagcatgcattttggtcttggctttctggctgggacaggcagcatcatgtattcatgtattcccacggtccttgaattcaggtcaactcctgagcctatccctctggcgagtgtttttgggatttaaacccaccaaatctcactcaatccacatggattgagagctaaccgaacaagcctaaataacccaccccaaccaactcataactagtggattaaacccattacctaaacccatggaagatcgagggtggtggggggaactctctggtggtgatctagtaggatggccaaaggtgggcgaacagcagcggggcggctcagccggggcagaggttactccagtgagcaattccgcacaggaaaaggatgaatccgtgactgattaaggccccg

SEQ ID NO: 70397 - DNA, 267 bp, Zea mays
  Clone ID: MRT4577_164191C.1
caacgagctgtgcacagcggtggcggcgacacaaagaaggtcacggcaacttctctccgccgccgcacgctgcgtcctttccagttccagactacgcagcagtaccggaagtcaaagagcatggacaaggacaaagcagcaagacaagttgaattggtccaccaccaccaccacctccatcattgtcattgccgccggagcagctcaaagtgaagagcacggacgacaaaggctgcaagaaagaagccgccaacgtttccccgacac

SEQ ID NO: 70398 - DNA, 270 bp, Zea mays
  Clone ID: MRT4577_164192C.1
ccctttattctttttgggggctattaaaagctcgaatcggggggcgcaaacctgcgaacgcaaacaagagacccgcgacatactaccaacggcggacacatgaattacaagtcagggcacggacaaaaccacaccacgagcagctaaagatgaaggcaactctgcagaacaaagtagtggaccgcttgaaacacaaccgagcccatcctctcaagagcggacgcacctcgagacagcaccacaggttcctttaaaacctactgttgaacg

SEQ ID NO: 70399 - DNA, 238 bp, Zea mays
  Clone ID: MRT4577_164193C.1
ggagtgcgccaatcgcatctgtgagaagagcgagcccgagtgcccggtctgccacaccgcggtcactcaggccatccgcatcttttcttaaaggcagcgggcgctgctagtgcgcaccgtgctgggggaagggggacccctccccatcctctttccccagcgctcgcctgcctccctgggtgccccccctctcccttctccttcccggccccaccaacactctgagatccgagaggag

SEQ ID NO: 70400 - DNA, 1205 bp, Zea mays
  Clone ID: MRT4577_164194C.1
taggggcccttttttttttttttttcgggtattctttatttttttatttttttttgtttttttgggtttttttttttttttttttttttttccttttttaattgttcccaactttttatgcaaacagggttccaaataacttgttttaatggctgtcaacagttcacacaattggcaaccagacgacattcagcagtgtacaagcaaacaatgcaccataaaatggattgatacaagctacctggttgcaattgcaccaaaccgcagctccaacaagctacctggttgtatctccaggacaagcccacgataaaatggattgtgacaccataaaatctagaactcgagtaggcttctcagcagctcgctcaaaaccgagcagtgatctgggagaacagtgccctaaagtcctttgttggcgtgcccacaccttcaggctttgaggccaaatcaaatgccttgaacttggcctcttcgtactgcagagcctggacacaaacctcagccacatcggctctaggaatcgactttgtgtcagtctggagaagttcatcgtctttccccacaagtagctctctcactcctccgtccttgtcttgtagacctcctggccttatgattgtataagggattccactgtctgccaaatactgttctgctttgcgcttccataccagtatattgccattacccatgctgttcagcggatggttaggatttgttcctcccatagatcccaccagcacaatatgcttcactccagcagctttagcagcatcgatctgattcttttggccaacccaatccacctgttcagggtacattccgtcttcgtagtagaactcgggccgtccacctttgctagggtcgaaacccggtttcattttcggggcagcactggtgaggattatgagcgcatccacaccttgtacagcaggtgctagacgatccgcgtctcttatgtcagcaacgtaaacatcaccggctgccccaatcttctgcttgctctcctctgtcctgactagccctcttgccacgaactgctcagacctctctttcagtttgttgtagacaatttggcctgtgcggccgccggcgccggtgacgagaacggttggacgggaagtggccgaatccgccatgacttctggcgacgattcaattcgtgctggacaccaaccccttctcgctgctcggtgttgtag

SEQ ID NO: 70401 - DNA, 783 bp, Zea mays
  Clone ID: MRT4577_164195C.1
ccggccgggccccccgtccggcaccgctggcctcgcttaacggcctgatctcccagccgccgcttccgcctcgcgtcccaccggtctccatctacatgcagccgcgctcgccaccgccgtcggaggcgcctgcgccctccgacgccatcatgatgcccggcgtgggcggcgtggagccggccgtcacgttgggccaggtgccgcgctggagcgaccccgaccagcgcatcttcctcgcctccacgtccgaagaggcgtccgcggaggacgacggatccggcacgacctctgcgtctggcttcatctctttctccgacccgctcacggtcgacgacggcgccgtcgggggtggccacgccgggggtgcctcgcgcttccccgtcgaccaggagatcaactctaggatctatctctggcgtggccagccctggaacctcgaggtcgacgcggtcgtcaattctaccaacgagagcttggacgaggcgcacagtagcccggggttgcatgctgctgccgggtcagggctcgccgaggagtgcgccaccttgggaggttgccgaactgggatggccaagatgaccaatgcctacgatctgcctgcaaggaaggtcatccataccgtgggccccaaatatgctgtcaagtatcacacagctgcagagaatgcacttagtcactgctatcggtcctgcttggaactgctcattgagaatggtcttgaaagcatcgcaatgggttgtatatacacagaagctaaaaactaccctcgtgaaccagctgctc

SEQ ID NO: 70402 - DNA, 399 bp, Zea mays
  unsure (1)..(399): unsure at all n locations
  Clone ID: MRT4577_164196C.1
gtacgtaagctcggaattcggctcgagcacacaaagaacaggttgncgaagtcatagccaaccacaaccaggtggggcatatttaagccagtgtggctgcttgacaagcagtcgagcatggaagagtgcaagtgcatcatggaccaggatagctatacgacagatgccgagcaaaagctctaggcatgaccgctggcgacatatggaagtggataacggacttatgtgagttgaaaaaggcggccaactcagccgtaagactccgtctattctgcagtctctgaaacgaaactttaaaagtgcacaaaaatgaaggaggacgaattcctgatatttcaaacgggtccgaggacatcttctctgaaagaagcggaaagatctcagctgattttgcaccag

SEQ ID NO: 70403 - DNA, 476 bp, Zea mays
  Clone ID: MRT4577_164197C.1
aatggagctgacagcctgacagataatgagatagtagcaagtagctagctactgctgccgcgctccttctcgaccacttgtgctctcgctgagacgagaagcgactcgcgcatggcctggtacctgggccgcagcttctcgagcggcggcagatgggccctgacggccggcgagctgaggaacctccccatccacgcagcgaggcacggcatcttctcctccgcgaccatcttattattcgtcgtcacgctcacgccgccgccgatcacctcctcgtacatcgatcggaagcacgtacgccagcgggccgagcgataggtccacgaacccgaccttgtccccgccgaagaatggcttccaggagacggcgagctccttctccaggaccagcagctgctctacggccgcttcgtacgctgcctcctgctcctcgccctccgtggtgaaccacctccagatcggcgctcgtgccgaat

SEQ ID NO: 70404 - DNA, 276 bp, Zea mays
  Clone ID: MRT4577_164198C.1
gtcattacccgcgcctaccaccgaacgccagaggcctccggggcgcgcatatcacaggacaacggctgcatcttctggatgtgccacaacttcgacatgctggacagtgccagggataccatctgcgtgcgcgccgttcaacaacttgtacgcgcgcaatcaggcgtagctcaccaaccacgtggacttcgttgtgtacatcaccggcttcataggagagtccatgcagtccgaatgggacatgttccataacttggattctggggcacagtacca

SEQ ID NO: 70405 - DNA, 264 bp, Zea mays
  Clone ID: MRT4577_164199C.1
ggggcaatacttttttcttttcatttcaattgggcattcagggcattgctcacactgaccctgccacccatggggaggcgtgacacattattactcaatcattgcccctaaatgactcaactagctacctagcccacggctatactaccgcacatagtttcttcagggggggacaccccccgcagcagcgtaggggcatggagcccgctgtttaaagccccacatccccgtcagttgctgggctatttgcgccgcccacagccc

SEQ ID NO: 70406 - DNA, 273 bp, Zea mays
  unsure (1)..(273): unsure at all n locations
  Clone ID: MRT4577_16419C.1
cctttgtatccctctgttggtggggaaaggtgtctttctttctgccctctcccctcaaaataattctgttcacttttgtgttatttccttgtgtactccagcattggttatagtcatgggaaaggaaggtgtctacggaggctcacttaacaagaaagcatatgaattcgcatttgnactgaggatgtctgatgtgtaagcagcctctccccatctacctagctactgtcttcatcaacaatcctaattatggtcacatgctaccattctgta

SEQ ID NO: 70407 - DNA, 180 bp, Zea mays
  unsure (1)..(180): unsure at all n locations
  Clone ID: MRT4577_1641C.1
tcaacntccatgtntagctagaaagatcttatgtttcttctccgagcattgactgtaacaacaaaaagatgaagagatctagccaggtccacgcgcacctggttctaaggggcttcacaaagggttatacacgttggacaaagcacggtgaagaccatcaaagttaacttcatcctgccg

SEQ ID NO: 70408 - DNA, 258 bp, Zea mays
  Clone ID: MRT4577_164200C.1
atcgtaactaagtggaaaatttagatgatgttagtttaagtacgaacaagattaaattatgcggggtgtaatgggattatgtaaatcgaaaaaaaaaaaaaaaaattgggagggtgatgaatgggaaaaagctgacgttacgccagcttagataggttgtagtatattatagtgtcaccataatggcaatatagtgaacatggttgtacaaattgatgactggaataatcgtgcagtttgaaaagtgaatgggattgg

SEQ ID NO: 70409 - DNA, 332 bp, Zea mays
  unsure (1)..(332): unsure at all n locations
  Clone ID: MRT4577_164201C.1
gatacgcgacaataaaccgagcgagtccaactgcaatccaccacgcactgtcatcacgcctcctcccagatagagcctcctccgtcccactcccaccccagctgctgcgtgcatgcccgctctccccgtcgacgacgtgcacctgcactgcactgcactcctcgccggcgcgcgcgcgagctgcggcggcactgtggtggtgggtgttgacgtggnccgncacannctgcanctgnncgnccccggccctatagtcgtcgcggatatataggagcatggcccgatgagtgaggctgtcggcagccggcgatctggcggtggtcggttcgccg

SEQ ID NO: 70410 - DNA, 165 bp, Zea mays
  Clone ID: MRT4577_164202C.1
aggcgctgtcaatggtgcagcacaataaactcgtcaagtatatttgggcctacctagaagcagtcatagtggtcgtgacagagctactcgtggggggctcattacgcaagtatttggtcagtctacgacctatgagccttgagcctcgtgtagcagtggtgtttg

SEQ ID NO: 70411 - DNA, 613 bp, Zea mays
  Clone ID: MRT4577_164203C.1
cgacgcactagaccgacccgcgaatcccccgcgcgcgcgccgtgcggtcaccgtccgaggccacggcaccgccggcccccgcccccgccccggccgccaagagcaaaggcaaggccgacgcttcctcctcgtcgtcctcctcctccactccaccgaggtcgcgccgcgcgcttgccgtcgtgatggccgcgtcgctgctcgtgctcgccgtggcgttcttggttggctctggctccggggggatcgatgggggcgcagcggctcccgtcgaggtggagggcaccgaggtggcctacggtagtgtgatcaagctgatgcacgagaagacgaagcaccgtctgcactcgcacgatgtgccctacggctcaggcagcggtcagcagtctgtcaccgggtttcctgaaggcgatgactcaaatagctactggatcataaggcccactccagattcatcatcaggttgcaacacatgaggacacggaggtggttgcacagtcacctgcacgcttcaccgttgtctggtaaccttgaggttagctgtttcggcggggatgaattgtcagatagtggtgaccattggaggctagaaattgaaggaagtggaaaagtatgg

SEQ ID NO: 70412 - DNA, 290 bp, Zea mays
  Clone ID: MRT4577_164204C.1
gatggggctgccctcagtcctctagatcaagattctgactattagggggcagtgattgccatctggggacctgtcaggctttgtcatttcccagtttgttggtggtgcctttagtggttccctaatttgggaacactgatggggccttggacagggctttctctcaggtaggagaaatgggcccatgatctcctcacagtcgcccccagtccttggccctgcttccctgtgtctcatgcactggcacatatggtcaccttggagggcagacctaggagctcctctgacca

SEQ ID NO: 70413 - DNA, 199 bp, Zea mays
  Clone ID: MRT4577_164205C.1
gtaccaacagggtgggggattaaacaaggtaagtgttcacaaatttttcattacactattcaaatgataccagtttttaacagcttgctcaaccaacctatttactctcatcctatgctatcctacttgttaacaggttgcttttttaagactttggcttatgttcgactttaagaaaaaatctgactccttgtccgac

SEQ ID NO: 70414 - DNA, 1218 bp, Zea mays
  Clone ID: MRT4577_164206C.1
cattgggtacctcgaggccggccggggtcatgggacgggcccgaaatcgccgagagcctcccctcagtttacgccgcacgaaccgacgcactagaccgacccgcgaatcccccgcgcgcgcgccgtgcggtcaccgtccgaggccacggcaccgccggcccccgcccccgccccggccgccaagagcaaaggcaaggccgacgcttcctcctcgtcgtcctcctcctccactccaccgaggtcgcgccgcgcgcttgccgtcgtgatggccgcgtcgctgctcgtgctcgccgtggcgttcttggttggctctggctccggggggatcgatgggggcgcagcggctcccgtcgaggtggagggcaccgaggtggcctacggtagtgtgatcaagctgatgcacgagaagacgaagcaccgtctgcactcgcacgatgtgccctacggctcaggcagcggtcagcagtctgtcaccgggtttcctgaaggcgatgactcaaatagctactggatcataaggcccactccagattcatcgtctaagcaaggtgatgccatcgaaactggtggcatcatcaggttgcaacacatgaggacacggaggtggttgcacagtcacctgcacgcttcaccgttgtctggtaaccttgaggttagctgtttcggcggggatgaattgtcagatagtggtgaccattggaggctagaaattgaaggaagtggaaaagtatggaaaagagatcaaaaggtgcgacttagacatgttgacaccggaggttatctgcatagtcacaacaagaagtacaatcgccttggcggtgggcagcaagaggtctgcggtgtccgagagaagcgagctgagaacatttggttgacagcagagggtgtttatctcccagttaacgggagcaagtgaaaaagcactttctagcatttactatttttaatgttaatcagtataggatcagatattttgccagctttcattcgtccttgtcttaagaaaaacgaacatgggacctgaccccctagtgatatgtttaagttggaatgttggatatcgatgatgtcgacaagaccaggacagcgcatgcttgtaattgatatttataatccatatatgaccgtgtagatacccagaggccaaaaatgcatgtgatgtgacactttgttaacaaaaaaaaaaaaaaaaaaaaaaaaaaaaaaaaaaaaaaaagg

SEQ ID NO: 70415 - DNA, 1213 bp, Zea mays
  Clone ID: MRT4577_164207C.1
cccccgccggtcttgtggacgtccgggaaaagaaacagaaatccggctcgcacctcgcacgcaccgacgcacgagagaccgaccaccttcctccgccccaccactccccccgcgcgcgccgtgcgatcaccgccggcccccgccctcaccctggccgccttgaggaaaagcaaggccaacgccttctcctcctcctcctcctctccaccgaggtcgcgccgcgcgattgccgtcacgatggccgcgtcgctgctcgtgctcgccgtggcgttcctggttggcgctggccacggcggcatcgatgggggtgcagcagctcacatggaggtagagggctctgaggtgacctacgggagtgtgattaagctgttgcatgagaagacaaagcaccgtctgcactcacatgatgtgccgtacggctcaggcagcggtcagcagtctgtcaccggctttcctgaaggcgatgactcaaatagctactggatcataaagcctactccagattcatcgtctaagcaaggtgattccattcaaactggtggcatcatcaagttgcaacacatgaagactcggaggtggttgcacagtcacctgcacgcttcaccgttatctggtaaccttgaggttagctgttttggtggggatgaattgtcagatactggtgactattggaggctagaaattgaaggaagtggaaaagtatggaaaagagaccaaaaggtacgacttagacatgttgacactggaggttatctgcatagtcacagcaagaagtacaaccgccttggtggtgggcagcaagaggtctgcggtgtccgagagaagcgagctgagaacatttggttggcagcagagggtgtttatctcccggttaacggaagcaagtgaaaaagcactttcagtatttaccagttttaatgttaattagcataggatcagatattttactcgctttcattcgttcttgtttttcttaagataaatgaacatgggacatgacccctagtgatatgaaattggaatgttgggcatcgaaggtgtcgacaaaatcagaacagtacatgcttgtaattggatatttgtgatacatgtatgaccgtgtagagactcagagatgcaagtgacactttgttcacaagtagagatgctgatcatcttctagatgtgacgcagaaaagacagtcgtggtaaatcttgagttttcgccgcaccc

SEQ ID NO: 70416 - DNA, 560 bp, Zea mays
  unsure (1)..(560): unsure at all n locations
  Clone ID: MRT4577_164208C.1
attgcccacaaaaaaaatttgtgcctgggttatgtttaaaggggggggggcaaaacaaagggggttttttaaaggggggccgaaaggggcccaaaaaaagggcccccccggggggcaggggtaaaagggtgaaaaacaaatgaacggggggcaggttcccaggggacccaagccgggacccaaagggggggaacccgggggaaaaaggggggccgggggaaaaaatgaaaggggccacaatcccccgaacgcttttgaccgggaagaacaaggggcaacccggggggggctccttggggggccccccccccccaaaaaaggggtgggggcggtgggcgccccttccccgtggggggaaaccggtcgcggccgcgctgctttcaggacaccggccccccccgcgggggcgggggcgcctccaccggcggtgggccgcccctcccccccccctccccccggaaaccccgctggnctcgggtccggtcgcgctggggggccccggtgggccccccacccccccgggggggggaccgggcgccggccgccgggttcccgggggg

SEQ ID NO: 70417 - DNA, 702 bp, Zea mays
  Clone ID: MRT4577_164209C.1
ctctacgtctccccgtcgtcgccgtggccgttctccgatcgagccatggatccggctcttcggcgccgctcccgcctccctatccacctcctgctggtggccgtcactttactcgccgccctggccgcgcgatccgacgcggaggtcatcaccctcaccgaagagaccttctccgacaagataaaggagaaggacacagtatggtttgtgcaattctgcgtcccttggtgtaagcactgcaagagcctaggaactctttgggaggacctcggaaaggttatcgaaggtacggatgaaattgagatcggagaagttgattgcggtgcaagcaaaccagtctgctcaaaggtggacattcattcatacccaacattcaaggtgttctatgatggcgaagaagttgcaaaatataaagggcctagggacgtagagtctctcaagacctttgtgttgaacgaagctgagaaagcaggagaggtgaggcttgaagatgagctataggtgttcgtagcaggcacatgccgatagacgatgatactctggtcaagcaactttggaatgctgctcgacctgtttaaatttttcgaccgagttggcttgtactgccgcctcctggcgcttgtcgctaacttagaatgcaagaagaaaacatttttgtaacttttaaccttttcaactcagttagatgaacctgctctgtgc

SEQ ID NO: 70418 - DNA, 475 bp, Zea mays
  Clone ID: MRT4577_16420C.1
gatggtctgaccgaaggtcgggccttcacggctgtcgatcaccaggttgacctgacgtccgctgaacagctcgggcttgagcaggtaggcgatgacggtggcgtcgtgtaccgggccgccaggaataccgtagtgttccatgtcgcccttgacgtattcgttgaggatatcactgaccaccttgctggcgttgttgttcagtgccgcgatctgcttcaggcgctcgtcgctggtgaggatcttgtgggtcacgtccagcggcaggtaggtcagcttgacgccactcttgagtaccacttctgcggcctggggatcggcgaacatattgaactcggcgaccggggtgatattgccaccattgaagtgcgcaccgtccatgaccaccacttgcttgatgccctgggtgatctcggggtcctggatcaaggccaaggccaggttggtttctggcccgagcatggccagagtgatgctt

SEQ ID NO: 70419 - DNA, 441 bp, Zea mays
  Clone ID: MRT4577_164210C.1
gaagcggccatggatcctccctgtgccgcgccctcggcgtgcgacgtattgcagcagcgacgccctttgctgcgacacgctcgccaggtcggtccactcgccgtcgatctgcgcagcccttgcacgtcgtcgtcgaagtccgcgccctccgtcgatgtcgtgctcgtgctctgcctatgcgacgaaatgctagccggtggacagcacatgcgactcagcgatccggccaggttgcttttgttttacttgcgattcaaacaaaaaaataaaaatataattgtatgaatgaaagcatgtagaggagaaaatgaagtagaaagaactcggatgtttccatattttgataggaaaaaaatgcgatgcgttgtttgatgcgaaaaactaagttacaaaatgcggattatgttttgggaaatgcatcgatatgtgtttatgtgaaag

SEQ ID NO: 70420 - DNA, 416 bp, Zea mays
  Clone ID: MRT4577_164211C.1
gggggggagaccaacattgccttggggttgaccttattaagcctatcatatatttatatattattaccctagtttaatagccgattggggggtgcagctcaaaaaccacaagtcccgcaggccctgactcttgggcttgggccacacccccgtcaaacatttaccatttggactaaaaaccccatcatactttttgctcggacagaatttattggaaaaattaaacctccccctatctttagttatagcaaaaaatagtagccgggcccccaattttggccaccttcctcgcttaaactgggcgtcggccccggcgccggggccggaaccggggcaaaacccgtttaataaaccaacttaatgtgggaataaaccacccggccttcccactcggagtcggggctgttgtcccccgc

SEQ ID NO: 70421 - DNA, 404 bp, Zea mays
  Clone ID: MRT4577_164212C.1
ggggacccacacgtccaaacaacatataaattcgaatttaatttcaacaacagagcaacaattgccagcagcatattttccctccttatgctccttacactttctgcatgtattgctaactctacatttttccctcaatactcacaaactcctatagcttcccttcttcccccataccttccattaattatttctttattatgtgaaaacccatctcttcaaccctatattctccaacaagcaattctatcaagcaacatacctttatcaccctttttacaacaatctccatccctatctttgatgcattcatttctacaaaccatcatttcacactaactatatcaactcttgctactcttgatcaaccaaatatctttgacaaactctttcttctctacttt

SEQ ID NO: 70422 - DNA, 846 bp, Zea mays
  unsure (1)..(846): unsure at all n locations
  Clone ID: MRT4577_164213C.1
ccggccggccgggctccgtcgcctctgctcccttcctggcgccgcttaccccttcccgggtccctggtttcctccacctccaaacgacaaaaagcggcggccgggctcctgtgcatcggcgtagctctcttctcgccctcccgccgtccgccgccttggcgtcgcagtactcgcgcccgtgccgtgcgctaccgaccaagcctaagagtgacatgtcggcgtcggatcttcccgacgagctgtgggcgcgcgtcctggagctgggagccgcgtcgtccgcgctggggttccgcgacctctgctccattgccatcgcgtcccgccgcctcggacgcctctccgtctaccccgccctctggtcggaactcctctctcgcgatttcccctcccaatccgaaccctccacgtcctcggcctccacctcccagccgccgccgcagcggctccaccccaaatccctttacaagaccaagtttgagaggcacaaggtgaggatggctgaggcgaggcggcgggcggtgttcgaagcggaggcgcgggtgctagtttccaggaggcggctggtggagctggaggagtccattcgggaagagggggagaggatggagacggctgcgcaggagctcgacaacctcgagagggtcaggagagcttctgtggcattaaacgtatggcaaccacaagttgttcgtggtcgtcagaagcagttggttcagcaatgcacagttcctgttgattcccgtcttagtgatctaaacatggagctgaaagtttgtaagcaacaaatagcaacttantagaatgcctatagcaaggagaagcacagctgaatgattgtgaggaagc

SEQ ID NO: 70423 - DNA, 406 bp, Zea mays
  unsure (1)..(406): unsure at all n locations
  Clone ID: MRT4577_164215C.1
acatacatttctagatcgctatcttcctctctattttttccaaacttacttacgcttncatactgcgtggtttctattatatagtggtacctaaatacaattcactttccttcnttatacaacttctttactgttaaaaccctttccttacccatcttaatctccttacattttttttttcctttctccatttaacaaaataactaaaatttcctcacctatctctctttccaacaatttttcatccttaattactatttttactcactcttttatcttttcattatatatttttattttttttattattctttttttttatatcttttttttttttctcatcatttatttttttcctttataatactatattattttttttcttaaatttaattttttttttttt

SEQ ID NO: 70424 - DNA, 1804 bp, Zea mays
  Clone ID: MRT4577_164216C.1
aacttccctgctgcgtccgccattgggcgcaaacacacccacacccacacacacattcagctactgatacccgggagcttccggccggtcgaggagctagagcagccgaggtgggcgtacgtggtgcagcgcaggcagcaggcctcagcagcaaggccggggtcgaaaggaaggaggagcgaggaccggaaccggaggcatgaacgcgggcaccagcatctcgccgcggccgggcacggactggggccccatcatcgtggcggtgatcctcttcgtggtgctctcgccgggcctgctgttccagctgccctcgcggacgcgggtcgtggagttcggcaacatgggcaccagcgccatcgccatcctcgtccacgccgtcatcttcttctgcctcctcaccatctttgtcgtcgccatcggcatccacgtctacgccgcgtaggcgtacgtagcccagccatgctaggtagcttaggctccatacgttcgtctggcttgcttcgcttcccgcgatggtggtctctttgtaactttccaggtcttttgagtatgtaggctacggatggcgcaagatttagttgctcacaacaaaaaaaaaaaaaaaaaacgaaaaaaggtaaacacagaaaaaaaaaaaaaaacttccctgctgcgtccgccattggcgcaaacacacccacacccacacacacattcagctactgatacccgggagcttccggccggtcgaggagctagagcagccgaggtgggcgtacgtggtgcagcgcaggcagcaggcctcagcagcattcagcaaggccggggtcgaaaggaaggaggagcgaggaccggaaccggaggcatgaacgcgggcaccagcatctcgccgcggccgggcacggactggggccccatcatcgtggcggtgatcctcttcgtggtgctctcgccgggcctgctgttccagctgccctcgcggacgcgggtcgtggagttcggcaacatgggcaccagcgccatcgccatcctcgtccacgccgtcatcttcttctgcctcctcaccatctttgtcgtcgccatcggcatccacgtctacgccgcgtaggcgtacgtagcccagccatgctaggtagcttaggctccatacgttcgtctggcttgcttcgcttcccacgatggtggtctctttgtaactttccaggtcttttgagtatgtaggctacggatggcgcaagatttagttgctcatctgctatgttgtgtagtgctcggcttttcactacaggaaacgcctaaattttcatgggccaaaaacccacgaaaataagcttaaaccgacgaaaatagattattttcgtcggcatactgacgaaaatagccgccgaaaataagttcgacgaaaataggcacctattgtggtgggtaccgacgaaaataacctattttcgtcggctttcccaagggccgacgaaaatcaatggtcggctgactattttcgtcggcccggtgatggccgacgaaaataagtgccagactattttcgtcggccatcaccgggccgacgaaaatagtcagccgaccattgattttcgtcggcccttgggaaagccgacgaaaataggttattttcgtcggtacccacgaaaataggtgcctattttcgtcgaacttattttcggcggctattttcgtcggcctgccgacgaaaatactctattttcgtcggtttaggcttattttcgtgggtttttggcccacgaaaatttaggcgtttcctgtagtgacaatatacatagtaacacctatctgacccacgcgtccg

SEQ ID NO: 70425 - DNA, 808 bp, Zea mays
  unsure (1)..(808): unsure at all n locations
  Clone ID: MRT4577_164217C.1
cattgggtacctcgaggccggccgggacgactctcttctttctcgcccactgcacgtaccgcacgcactcctccaccgcgtcgccgccagccatcgtgctcgccgcgcctccgccaccgctcctccacctcgcgcgctgccaccaccgcacccaaccgcgcccgccgagccgccgccagacccgtgcccaatcgcgccagtcgcgcccaaccacgctcaaccacgaccaccgcgccgccgccagacccaccgctcctccatcgtgctcagcacaaggcgggccgcatcgacaaagacgatctcactcccctcttctcgttcctcccactctcgcacgacgagccagctccaccccgtctcccgcggcaaccaagcgctccgtcttctcgccacacttcgctacccgtccgcgtcgcggccgtggccgtgactgagcganagggaccggcctccctcccgcccacccgggactcgtcctggtggagcccaaggcgcgcgtcctggtggccggcggcggcatcggcggtctggccttcgcgctcgccgccaggcggagggngttcgaggtgctggtgctggagcgggatttgagcacgcccgcgnngaaggggagtaccgcagcccgatccagctgcagagcaacgcgctcgccgcgcttgaaggctcgggtgcgcctccccgctcgctgccctcgtgcctctggcttctgcaccgccgtcggncagggagacacaaccgacctccctcttcgncaggtgggctacgacgcccatgcgtccctggggaacccgtggccactccaggcgac

SEQ ID NO: 70426 - DNA, 497 bp, Zea mays
  Clone ID: MRT4577_164218C.1
aaaaaaaaaaaaaaaaaaaaaaaaaaaaaaaaaaaaaaaaaaaaaaaaaaaaaaaaaaaaaaaaaaaaaaaaaaaaaaaaaaaaaaaaaaaaaaaatttaaaaaaaaaaatttaaaaaaaaaaaaaaaagggccgccctttttaaggatccaatttttcttcccccttctttccaagtttttattttttttttgggccccctaaatttaatttcctggcccggtttttaaaaccttgggactggaaaaacccttggtttccccaatttaattccttttgaaaaaatcccctttttccccgtttggtttattacaaaaaggccccccccatttcccttttccaaaattttcccccccttaattggaaattggacccccccttttaccgcccttttaaccccgggggttttggggtttcccccaaggttaccctttccttttccaagccccttaccccccttttttttgtttttttcccttttttttttcccccttttc

SEQ ID NO: 70427 - DNA, 219 bp, Zea mays
  Clone ID: MRT4577_164219C.1
gggaaaagggcccctcacaataaacagggatgggaaagggaaaatgcaagtgacaaccgtttaaaggggtttccaacccaaccagaccggggttcaaggccccccggcaaaaaagaggggggacaccgagggctttcccgggaggattttattcgggggggccccaaattttactgtcgacagtgataacaagggtggcacccaagaaaccaggtttca

SEQ ID NO: 70428 - DNA, 229 bp, Zea mays
  Clone ID: MRT4577_16421C.1
agagacgagcatctattcttagcattatcccgcatcatagtttacagagagttacaacttacaggcgaacacctttagcttgtaaataccaaacattgaacaaacctacatgttttgcgccttaaacccagctaacactacaagcacgacgcctttcaaacaccatctttaaaccctaatggctttacagcataataaacataccacacagccagtttcaaatactaaa

SEQ ID NO: 70429 - DNA, 1508 bp, Zea mays
  unsure (1)..(1508): unsure at all n locations
  Clone ID: MRT4577_164220C.1
gtaccgccgccggccgggcctggataacgcaagcaaagcctctgctgcgtgctctgctcctctctctcctccatttgctgccgcagctctccgagctcgccctcgccgccgccgcctcagcgcagcacagcacagattcggagagcctgcccttagcacgcagcgccagtgaagaaggccgagataatggaggtggagacgatgctggacgacgacgtgttcttcgccgagctcagcaagcggatatcgctgctcatcaccgacgacgacgagggcgcggacttcgccgccgcgcagttcatccccgccgccgccgccgccgccgcgcccctccaggggttcgcgtcgcgcgcccatgtgccgtcgcaggcgtcgctgctggcgccaccggcctacgcgctgtaccactacccaccacggcgccagctacggcggggacgacagcgccagggcggcgtggcagcagctgcagtgcggcagcaagggcaccggcgtgttcatcccccggtccacgcccgggtccgcgcaccccaagaagaagggcaaaagccggggcgccgccgccaaggccgcgcggccggccggcgcgggcgcaccgcccaggaagcgcgtctgatctccgcttctctgcatcgtgatttaatggatcagcaaggagaaaaaaaagaagaagaaaaaggaggggcaaaaaaaagagccccagaactacgaactaaccccagatgcagcgctcgtcggaaccagccggattagctatgtttaattaatcattaaattttcagtgttgctgtcattcttatatggtaaataataaaaaaaccatagctactccccccctgggttaaaatgtataatgtgagccctaggggatcaggctgtgggctggggcaccaccgcaccaataatctctatgtgtgtatagtaaaagctagcggttggtggtgtcgtagttttcctggctaagtcgatttattaattatttctttgtatttcctttcttcccacatttttgtaagatgaagaaatgaattgtgctattgggtgtccaaaaaaaaaaaaaaaaaaaaaaaaaaaaaaaaaaaaaaaaaaaaaaaaaaaaaaaaaaaaaaaaaaaaaaaaaaaaaaattttgggggaaggggccttttttgggccaagcccggtttgggggtttttgggggggggaaaacctttggggtgggagggggggggggggttttgggtccttgggcttaaaaaaggggggggggggggaagggtttttttaagggttgggttgggggggggggaattttgggtttttaaaaaggggtttttaaaaatgggttttggggtccaaaaaaaaaaaaaaaaaaaaanncanaaaancccccttttgggggaaaggcccctttttttcccaacccccttgggaagggtttggaagggggggaaacctttttgttggggggggggagggggttttccgaaccttcgcctaaaaaagggggggggggggaaaggtttttt

SEQ ID NO: 70430 - DNA, 151 bp, Zea mays
  Clone ID: MRT4577_164221C.1
taatcctcccattgacgtacgctaggggttcggagcatgccttcccaagaagtgggactgcttccttcgtcgggggggaaaattgggaagactccggtgcggattaaggccgttgtgtactccctgtttgcctttcatcataaggtgattc

SEQ ID NO: 70431 - DNA, 860 bp, Zea mays
  Clone ID: MRT4577_164222C.1
ctactatagtattgcatctacaggaaggttggtaggcagaccaagatgtggaggacagtagcccagtttgctgccagatcgagcaccgcgaggcaaagtttggcataattagccacaatgggaactgctgataccttgattgagacattccgccagagctgaggaagcattgtacatttgtcatataatacctccagtgtagcgagtcagatattttgccttctggtcaaactgctcgtgtgtgtgtgttttggtagggaatgtataggttcaaaccttgatgttatgttgtattttttggtagatgacccatggtagaaatagcgctgttatggttatggcactctcatgttgatgttcatgcacaaatatggaagccacattttgtgttcatcatgctttcttatatctttgtgtatatatttggacttgtgtgaatttgtgatatgaacatatatcaatgtgtttgttgaggctgtgttggctgaactttgtcatctgcttcttcagaattttcaacacggggctggattttgggagtgcaccttctagtcaaggaatgtgctaagcaagaaatttatggtgaatgaattattacttttaaattttcttgggtaatcaaagcaatcaactaattgatatgtttagtttctgtttttaataggtatatccttacatgccttctatttttgagatgaaaccaaattagtgcagcaagaatcaaaccaaaggtattgtattcatatcacctttgtggtcatagaggattctatccgcaatctctttctccaactgtatatttcgattaacctaagaacatgcttttggaacctttaaacctttttggcccaccggaggtt

SEQ ID NO: 70432 - DNA, 460 bp, Zea mays
  Clone ID: MRT4577_164223C.1
ggcaagagattagatgttgaatcccatgaccttgtaagtttttttttttccgagtactgataaactcaccagcaccatggctttgaaaaactttaatcttcttactaaactgagtctcgacttgtttttgaaaaaccatatacacatcacaaaaatgtgactaggacttgagaggaaatatccatgaataacgagaaaaatcatccacactaactgcataatatccgaaaccttgtaccgatacaaccggagatggaccccatacatcacaatgtaaacgatctaatggttccttaacactacaaatcgaaaaagaaaacggaagcttatcgctctttcccattatggcaaggttcacaaacagaagattgtgctgctcttattaactagaattgcctagctgttttgtaaaactcgaagaatcttgaattttgcatgaccgatccaatgatgccaaacc

SEQ ID NO: 70433 - DNA, 740 bp, Zea mays
  Clone ID: MRT4577_164224C.1
ctcttctttccttccccttcgatctccgccgccgcccccgcccccgccccttactcctccagggtcgcgcctcttcctcctcctctccagtggcgccgtccccccgtgccccttcctcctcgcagtcacggccgcgcggcacgtgctccgcctcgccttcgccgttgtcgtcgccgccgccaagtaaagagagacagggaggcgcagtcgacgggggcgtggtgaggagggagttacgcggaggaaggaaggaaggaagggtgactgcggctgccggcggactaccatgtcgtctctgggaacttccaaggggatccttgagatcgccaagttcggcgtctacgtctccgtgcccgtcgcgctcacctacctcgtcgccaccgactccaagaccctcaagaagctcatgggcctccgcccgtacgtggtttacccgcctgaaggcccacgccctccaccgccagaagaactgcgcgaaagggcacgtgagattgcccggaagaggcagcagagctgaatgtatgctgtgggttctctaggcgcctgtgtggctgttgtgtctagggaacaacacggacgatgaatcctcccatctcacgagaacagcctgggctggtctttagcatcctttcactgctgctgttgttacaataataataataatatactgagaagcgagaatcggctagatataatataatcccgtgtattttctcaaaaaaaaaaaaaaaaaagcgggc

SEQ ID NO: 70434 - DNA, 493 bp, Zea mays
  Clone ID: MRT4577_164225C.1
cccctgtctcaattgagtcgcgccaatttgtcgcgcggtctcgggaatgggcgagcgaacgtagacatgagcgccccgctagtgcaatggccacacatatgggcgccgacgtcgggaccacctaactgttgcgtcgggatgtggctccacgagcgcgagcggaagaatatgcacgaaggagcagatacaagaacacggcgtacgccggaggacagcacgccagctcgccagcaggtcacagatggaggacatccgcaaggacaagcgcgaggaaagcatcaacaacaagcgtcatgacgagcgtcccatctccgccagtggtatggcggcgatggtccactacaacgtgctgcagcagaacctcaatggcttgccggcgacgtggcgggaacgcacagttcagcgacccatcacaagcagtgatgaggaacacacacacagatcatggaaagatgcttctctataggaacgttatcacagacagcctgaagag

SEQ ID NO: 70435 - DNA, 744 bp, Zea mays
  Clone ID: MRT4577_164226C.1
ctggccgcagttgtagcagccgccaccaccaccgccgccgccaccgccgtagccgccgccgccccttactcctccagagttgcgcctcctcctcctcctctccagtggcgccgtcccccgcgccccttcctcctcgcagtcacggccgcgcggcacgtgctccgcctcgccgtcgccgttgccgttgccgtcgccgccgccaagtaaagagagacagggaggcgcagtagacgggggcgtggtgaggagggggtcaagcggaggaaggaagggggactgcggccggcggcggactaccatgtcgtctctgggaacttccaaggggatcctggagatcgcgaagttcggcgtctacgtctccgtgcccgtcgcgctcacctacctcgtcgccaccgactccaagaccctcaagaagctcatgggcctccgcccgtacgtggcttacccgcctgaaggcccacgccctccaccgccagaagaactgcgcgaaagggcacgggagattgcccggaagaggcagcagagctgaatgtatgctgtgggttctctaggggcgcctgtgtgtgtggctgtgtctatggaacaacacggacgacgaatcctcccatctcacgagaacagcctgggctggtctttagcatcctttcactgctgctgttgctacaataataataataatatactgagaagcgagaatcggctagatataatataatcccgcgtattttctccttgggagccagg

SEQ ID NO: 70436 - DNA, 1142 bp, Zea mays
  unsure (1)..(1142): unsure at all n locations
  Clone ID: MRT4577_164227C.1
ccgcaaccctcttacaactacaacaattgttgccctttgtccaacttgctttgacaaacccagcagcctcctaccaacaacacatcattggtggtgccctcttttagattgcttattagttgtaattcaataataaaggtttttggatgatgtatgtggccaaccagaaataagaagttacatttgcagattctaatgtnaaaaaaaaaaaaaaaaaaaaaaaaagcttgacctgcccgggcgggtattgggtacctcgagccgccgggggcgggaaagcgcagtgctcctcttctttccttccccttcccatctccgccgccgccgccccttcctcctccagagtcgcgcctcttcctcctcctctccagtcgcgcggtcgcgccgtcccattgcgccccttcctcctcgcagtcacggccgcgcggcacgtgctccgcctcgccgtcgccgttgccgttgccgtcgccgccgccaagtaaagagagacagggaggcgcagtcgacgggggcgtggtgaggagggagttacgcggaggaaggaaggaaggaagggggactgcggccggcggcggactaccatgtcgtctctgggaacttccaaggggatcctggagatcgccaagttcggcgtctacgtctccgtgcccgtcgcgctcacctacctcgtcgccaccgactccaagaccctcaagaagctcatgggcctccgcccgtacgtggtttacccgcctgaaggcccacgccctccaccgccagaagaactgcgcgaaagggcacgggagattgcccggaagaggcagcagagctgaatgtatgctgtgggttctctaggggcgcctgtgtgtgtggctgtgtctatggaacaacacggacgacgaatcctcccatctcacgagaacagccctggtctttagcatcctttcactgctgctgttgttacaataataataataatatactgagaagcgagaatcggctagatataatataatcccgtgtattttctccttgggagccaggtcatattgcacgcttgacttccaaccgtgctgttgtaatgattaagaacttgtgatcctgtctgtggccaaggctaaccatttggtctctcccaaaaaaaaaaaaaaaaggggccgccc

SEQ ID NO: 70437 - DNA, 247 bp, Zea mays
  Clone ID: MRT4577_164228C.1
cgcgaggacgcgtccgccaataacggtcggatgaataccctcgctactgacggcggcgacaggatcatacagctcacggggcagaccaacagcggacccgtagctctatcgattcatggagctctactgtcacgtgttggtgaggctaaggcgagggatcacgaggcccttccaatatacggaagcgatcttctggtgcatggaggcccggatcgaaaccttgtcattagatggcagtggctgtgag

SEQ ID NO: 70438 - DNA, 938 bp, Zea mays
  unsure (1)..(938): unsure at all n locations
  Clone ID: MRT4577_164229C.1
gccggccggtccgggcgaacgactctcggcaacggatatctcggctctcgcatcgatgaagaacgtagcaaaatgcgatacctggtgtgaattgcagaatcccgcgaaccatcgagtttttgaacgcaagttgcgcccgaagccttctggcggagggcacgtctgcctgggcgtcacgcggccggccgggtttccttccccttcccatctccgccgccgccgccccttcctcctccagagtcgcgcatcttcctcctcctctccagtcgcggggtcgcgccgtccccttgcgccccttcctcctcgcagtcacggccgcgcggcacgtgctccgcctcgccgtcgccgtcgccgtcgccgccgccaagtaaagagagacagggaggcgcagtcgacgggggcgtggtgaggagggagtcaagcggaggaaagaaggaaggaagtgggactgcggccgccggcagactaccatgtcgtctctgggaacttccaaggggatcctggagatcgccaagttcggcgtctacgtctccgtgcccgtcgcgctcacctacctcgtcgccaccgactccaagaccctcaagaagctcatgggcctccgcccgtacgtggtttacccgcctgaaggcccacgccctccaccgccagaagaactgcgcgaaagggcacgggagattgcccggaagaggcagcagagctgaatgtatgctgtgggttctctaggggcgcctgtgtgtgtggctgtgtctagggaacaacacggacgatgaatcctcccatctcacgagaacttgtacaacgccgacgatgaacacactctgggtggntgnntgntgntgntgnntgataacttgacgtggaagtggaacggccctggtctttattagaatcctaaaaaaaaaagggccatcataatatactganaaacgagaatcagc

SEQ ID NO: 70439 - DNA, 1464 bp, Zea mays
  Clone ID: MRT4577_16422C.1
gtctgagaagtcgggcttgcgtgctagctagctgcaactgaagaagatggcgaagcaagctgtcctccttcccatggctgcactggcactggttcttggagcacttgcaaccattcctgcaggtgtgcgatccatcggcgtgtgctacggcatgaacggcgacgacctgccgtcggcgagcgacgtggtgcagctgtacaaggacaacggcatcgactcgatgcgcatctactccccggacaccgacgtgctccaggcgctgagcggctcgggcatcgccgtcaccgtgggcgtccccaacgcggacgtgggcggcctcgcctcgcgcccctcggccgccgccgcctgggtccagagctacgtgctggccttcccggccgtccagttccgctacatcgccgtcgggaacgaggtcgtcgcgggggggcgcgtcctgctgcccgccatgcgcaacctcgaccgcgcgctctccgcggccggcctcgccgacgacatcaaggtgtccacggcggtggcgacagacgtggtcggcagcagcttcccgccctccgcgggcaccttcgctccgtctgcgggctacatgccgcacgtcgcgcggtacctgcagagcaccggcgcgccgctgctggccaacctgtacccttactactcgtacatcagcgacccgagcgccgtcgacatcaactacgcgctcctcgccatgcccgccggcacggtggtggtgcaagacggcgggtacagctacgacagcctgttcgatgcgatggtcgactgcttctactcggcgctggagaacgccggggccgggaacgtcaccgtcgtcgtgtcggagagcgggtggccgtcggccgggagcgacgcggccaacacgaccaactcgcaggcctacagccagaacctcatcaaccacgtcggccagggcacgccgaagcgccccgggcccatagaggcctacatattcgccacgttcaacgaggaccagaagcttggagacgacgagacgcggcggcacttcggcttgttcaacaaggacagatcgctcgcgtaccccatcgattttgtcaacccataacagcaggatcatcaatctcgttctctcttcaatgttccaaaattggtgatgtgcactttttgttaaaaccagtagaaatgcacgcaggttcgtatgtctacatgaaaacaaaattaaaaaatattaagcaatattaaaaaaacctttttggaaagccaatttatgtagtgatagtacataaaaatactactacaccattctcgaatatttatcacctgctagctcatttttaaacaaaaacacaataaataaaaaaaagaacggagcaattattagccagcccatatagcccatgatgacactaaaacataaatagatgtaataagcatatttgtggaagcgatgatttcatcgtgcaatttgtaacagtgtataatttaagttgactttat

SEQ ID NO: 70440 - DNA, 560 bp, Zea mays
  unsure (1)..(560): unsure at all n locations
  Clone ID: MRT4577_164230C.1
aattcggcacgaggggggatctaccgatgcagcagctccaggggtgcgcggcgcggaagcaggtggagcgcagccgcgcggaccccaacactttcatcctcaccttcaccggggagcacaaccacgcggcgccgacccaccgcaactcgctcgccggcaccacccgccacaagttcccgtcgtcggcggcgcctcagccgccgccgccgtccgtcgtggtgggcggtgacgcgcaggaccggcagccgagcccgagcccgacgtccacgtcgaccgcggggctctcgcccacgacgccgctgcgcacgccgtccatggaggaggaggaggaggaggaggaggaggaggagganggangacnagctgctggnggaggacatggagatggntggcgaggacgagctcctgttcctcagcaccgacgccgacgccggggcaccgacgtcctcgctcttcgacgtcgtcggcgagcccttcctaagccctccctgggtgacagccggcagcagcgccggcgagccagccacaggggcagccggcgctgggagctgacttcttct

SEQ ID NO: 70441 - DNA, 617 bp, Zea mays
  unsure (1)..(617): unsure at all n locations
  Clone ID: MRT4577_164231C.1
gtatacatccttagggcgattgggactctcgaggccggccgggctccagagtcgcgcctcttcctcctcctctccagtcgcgcggtcgcgccgtcccattgcgccccttcctcctcgcagtcacggccgcgcggcacgtgctccacctcgccgtcgccgccgccaagtaaagagagacagggaggcgcagtcgacgggggcgtggtgaaggagggagtcaagcggaggaaggaagggggactgcggccggcggcggactaccatgtcgtctctgggaacttccaaggggatcctggagatcgccaagttcggcgtctacgtctccgtgcccgtcgcgctcacctacctcgtcgccaccgactccaagaccctcaagaagctcatgggcctccgcccgtacgtggtttacccgcctgaaggcccacgccctccaccgccagaagaactgcgcngaagggcacgggagattgcccggaagaggcagcagagctgaatgtatgctgtgggttctctaggggcgcctgtgtgtgtggctgtgtctagggaaacacacggacgacgaatcctcccatctcacgagaacagcctgggctggtctttagcatcctttcactgct

SEQ ID NO: 70442 - DNA, 796 bp, Zea mays
  Clone ID: MRT4577_164232C.1
aaacaaacaaaaacaacttcaaaaaggggcataagaaagaaaaaggagggaatgcaaaaagaaaccacaaagccccttaaaacgctggggacaaagctaaaagaacaacgacaatgggaaaataaaaggaaacgctaaagcaaaagaaacgaaacaaaaaaaaggggggacaaagccaacaaacgggggaacttaaacaaaaggaaagaacggccggaagagggaaaaactaacgctaaagaaacgggacaaaagaagaaaaaccacgaaaaaaaaaaaaaccccaagtagaggggacacacaaaaggaaacggcagaaccaaaacaccgggaaaacaaagatttgggagaaaaaaaaaaaaggaaaaaatcgagaaaaaccagaaggagacccaacaaccgaaggaaccaccaaaggggaaactagaacagggcaaaaaagaggaacaggggggaacctgaacaaagaaaaaaaaaaacaagacacgaaaaaaaagcacaaacggggggacaaagaaggcatcagaaaaaaaaaaaaaagccaggaaaaaaaaaaaaggaaaggaaaaaaaaaccaacgggaccaagaaaccgggaaacaaaagcaaaaaaaaaaaaaaaaaagaaaaaaagcaaaacaaaaaaaatgaaaaaaaaagaaaaaaaaaacagaaaaaaaaaaaaaaaagaaaagaaaacgaaacacatcaaagaaaagacaaacgacacacaaaaaaaacaaaaaacacaaagaaaaaacaacaaaaataaaacaaaacaaaaacaaaaaacaagc

SEQ ID NO: 70443 - DNA, 325 bp, Zea mays
  Clone ID: MRT4577_164233C.1
gagtccacgccttacgtgctatgtaatatacatggattcacagcgtccgcacaagagccactcaacctgaccaggttagactagtgttgagacccgcacacaaactaacatacacctgtgctagctaccgctgacaccacatacatcactcttgaacctaatgcaaactgctgactatgagcatggtctgagacacaggcgaggtgagcctaagcgtcgcaccgcgctcattattgctctctttatacgtgcacctaaaactgtccaggacgaagagctgacttgtcctacctgagattgtactacgtgatggttcggatggagc

SEQ ID NO: 70444 - DNA, 224 bp, Zea mays
  Clone ID: MRT4577_164234C.1
gcacgagtagtctcagtttttatttttttttgttttttttagttgaaccatatatcattaaaagatggatcatttgttaaaagtacccaataccaaggctacttaaaaacataaagctagctagcataccaacctaagggttcatcataatctcaccaactattgcttgcttgaacccaatctataagcggaggcactctcaaattttattgatcccaacagtt

SEQ ID NO: 70445 - DNA, 2029 bp, Zea mays
  Clone ID: MRT4577_164235C.1
cgggaaaaaggccaatcaatttcatcgtatcaattacatgtttaaaaaagaatcacccgggccgatccagctctggcgagcccgtcgacccacgcgtccgggagacaccaactgcccgcgttcccgtgcccgtactaaaactaaataacggactgccatctcctcgtgcactccgccaaccgccgccgccactcgccactctcacgtctcgcccatcccgccactgctgctctccagagtccaggcgacccaggctgcgcggtcgctcggtgttgttagtcccgaccgccgccggccatggcatccaacggcatcgcccccagagatgtatgtgttgttggcgttgcacgcacccctttgggtggtttccttggtgccttgtcttccttgcccgcaacaaagcttggctctatagcaattgaagctgctctgaaaagagcaaatgtggatccggccctcgtgcaggaggtctttttcggaaacgtcttgagtgctaatttgggacaagctcctgcaaggcaagccgctctgggtgcagggataccaaacactgttgtttgcaccactgttaacaaagtctgcgcatctggcatgaaagctactatgttcgccgcacagtcaattcagctgggtatcaatgatattgttgtggcaggtggcatggaaagcatgtccaatgccccaaagtacattgctgaagctaggaaagggtctcgttttggacatgacacacttgttgatgccatgcttaaggatggactttgggatgtatacaatgactgtgccatgggaatgtgtgccgaactttgtgctgacaatcatgccctcacaagagaagaccaggatgcttttgctatccaaagcaaccagcgtggaattgctgctcgtgacagtggtgcttttgcatgggagattgttccgattgaagttcctgttgggagaggaaaaccccctgtatttattgagaaagatgaaagcctggataagtttgacccagcaaaactgaagaaacttcgcccaagtttcaatggtggtaccgttacagctggaaatgcttctagtataagtgatggggcggctgcattagttttggtgagtgggcagaaggctcaagagcttggcctgcaagtccttgcaaggatcaaaggatatgcagatgcagctcaagctccggaactttttacaaccaccccagcacttgcagataccaaaggctattatcaaatgctggattagagtcatcccatgttgatttttttgagattaatgaagcattttctgctgtcgcacttgcaaatcaaaagcttcttgggattccttcagaaaagattaatgtccatggaggagctgtgtctctagggcatcctcttgggtgcagcggtgctcgcattttggtcacccttcttggtgtccttagggaaaagggcggcaagatcggtgttgctggtgtctgcaacggcggaggtggagcatcagctcttgttctcgaactcgcataagaagcattggcttgaagcactggatatgtagctaattcagtcgcattcatctatacatgatgaagtattgaaaaaaaagaccctacgatatccatgccgggtgccactgtctgcttaattcaacagaatatgattgtgcaatcattctgccgtgctgcttttgctgaccttaggaacacggcggcggaggcgcaatcattctggcaattagcaccagctagctccctgaggggcgaccttgtactctttacattgatgtatgtgtagtgctggacattcttaagttaattcggcaataaagtgtgttgtgcttctgctacctgcatcttcgataagagaaatggagcagcctctttgatcagttcaataaaaaaaaaaatcccacttggagacaaagctccctgaggagatagtgcttctgttggttgcatagtagagtatcatgtaataagagcaatggggattattcatagatatttttgaggatgctacagaaatattttatatactagtgagtgctcgtgcgttgc

SEQ ID NO: 70446 - DNA, 2456 bp, Zea mays
  Clone ID: MRT4577_164236C.1
ttgttcgagtgctaccttcttgcgttctgattcgtctccgaccaagatcagcaaggacgggatggctctcgaatcatagtaccactacctgcacgtcatcgtcttccagggcacgcctacacaagaagcatgactcctcggcgtcctcctcctcctcgtcatccggctagtcgcggcgttgaggagctcgtccgcgacgtcccccgaatgtaagcaacacaggctggcgccgacgcctccggatgaagatccccatcatcgggcacctccacctcatcggatcccacccgaacgtctccttccgagacctccatgccaagtacggccacaacggggtgatgatggcgcacgccggtgccgggcccaccgtcgcggagtccacgcctcaggccgtcgaggtcgtgttccgcacgcacgaccacgtgatgtggtcacgcccgatataccccggcgacgagatcatccgctacaagtccacgcacgtgagcttccctgctcgagccggccagcgttccctacttgctcttttcttcctccgcttcaacctgtccccagcgccccccgcgcacacactgtctttctctgcctttctttccctagcgccgcgccggcgccgccattcgatcagtcttcgtcggccgcttcgccggcgacagcatattccaggtcggttggttttggcacttcggaccggcggccatggcttccgacggcatcggccccagagatgtatgtgttgttggggttgcacgcaccccaatgggcggtttccttggtgccttgtctcccttgcctgctacgaaacttggctctatagtaattcaagctgctctggaaagagcaaacgtggatccagccctcgtgcaggaggtctactttggaaacgtcttgagtgctaatttggggcaagctcctgcaaggcaagctgctctgggtgccgggataccaaactctgttgtttgcaccactgttaacaaagtctgtgcatctggcatgaaagctactatgtttgcagcacagtcaattcaattgggtatcaatgatattgttgtggctggtggcatggaaagcatgtccaatgccccaaagtacattgctgaagctaggaaggggtctcgttttggtcatgacacacttgttgatgccatgcttaaggatgggctttgggatgtatacaatgattgtgccatgggaatgtgtgccgagctttgtgctgacaatcatgccctcacaagagaagaccaggatgcatttgctatccaaagcaacgagcgtggaattgctgctcgaattcggcacgcgtttgcatgggagattgttccgattgaagttcctgttgggagaggaaaaccacctgtactcattgagaaagatgaaagcctggataactttgacccagcaaaactgaagaaacttcgcccaagtttcaaggagaatggtggtaccgttacagctggaaatgcttctagtataagtgatggggcggctgcattagttttggtgagtgggcagaaggctcaagagcttggcctgcaagtccttgcaaggatcagaggatatgcagatgcggctcaagctccggaactttttacaaccaccccagcacttgcgataccaaaggctatatcaaatgctggattagagtcatcccatgttgatttttttgagattaatgaagcattttctgctgtcgcacttgcaaatcaaaagcttcttgggattccttcacacatgtggggttgcaggaaaagattaatgtccatggaggagctgtgtctctagggcatcctcttgggtgcagcggtgctcgcattttggtcacccttcttggtgtccttagggaaaagggcggcaagatcggtgttgctggtgtctgcaacggcggaggtggagcatcagctcttgttctcgaactcgcataagaagcattggcttgaagcactggatatgtagttaattcagtcgcatgcatctatgcatgatgaagtattgaaaaaaaaaagaccctacgatatccatgccgggtgccactgtttgcttaattcaacagaatatgattgtgcaatcattctgccgtgccgcttttgctgaccttaggaacacggcgtcggaggcgcaatcattttggcaattagcaccagctagttcccctgaggggcgaccttgaatttttaacattgatgtatgtgtagtgctggacatttttaagttaattcggcaataaagtgtgttgtgcttctgctacctgcatcttagataagagaaatggagcagcctctttgatcagttcaattcatctttacatcccacttggagactccggtttcaagtattttttttttgaactgaagctcgtctgcttaaactctgagcagacatgtagagcaggacatggggcaagtcagttttgtgttactgatgcttccaaaattgccttgggcagctacttatcccca

SEQ ID NO: 70447 - DNA, 167 bp, Zea mays
  Clone ID: MRT4577_164237C.1
tctgctgaatccccaaaccccgggccactgctggggggggggggggggggcgacaaacggttgagcgcggaccagcaagccccacgccaccctatggctatggaggtccggcgcagggttccgtcgccgcacggggagcgctcccacggccgccagtattttttttt

SEQ ID NO: 70448 - DNA, 586 bp, Zea mays
  Clone ID: MRT4577_164238C.1
ccttattcaggaaaactgccctcatgctagcattgtgcagatttctacgcgacaagtatagtcttgcagctgtacgtggcactctgccctcttattcttctacagaagcgatctggtttcctcaccgaactgaaaatgcaatgctacataagattttctgcatgcctggtcatatagtttcgagatattcacctataacccagtgcttcagttttgcttctcatcttcagacttttcacttgtaaaataaagcaggttttatttgtcatatttctgataattcaacttaaaccaaagcgtctttcactttcttaatcagtgattttacctgtgcgatgcactgatatagaaataaagtagtttttcttcttgcgaaaatttccagaacatagaatatctacaatgagccttttctatttgttctcttcacattcaggtcacaaatgatatattcacaaaagaagatggagaattcttaattaaacatggagcgctccctgaagaacgtatacgtgcagtggaaactggaggctgccctcatgcggttattcgcgagacatcagcatatatcttggttctttggagg

SEQ ID NO: 70449 - DNA, 377 bp, Zea mays
  Clone ID: MRT4577_164239C.1
acggcagctgataatcaagatattgcgctgtttgtatgacaatctataggacgaggtagaggtaagcgtggatgaagaatgcagctcccaagagtcttacgtatggcgtagagtaacggggatgatttggccgactcaaattctcgactttcagtgattcattaataacctgtcgatactgatgcatcaacgtatattcatactgcttgaacattttattctttatctagctatgtgatcaactatgtttagtttttgtttgactaccagtcatctctaaagcagtttttgtaggatttcaaggatgatgggacagcttcttagctgtcacttgtaacatttaatatcatgcttgccttacaaaataatttagaatc

SEQ ID NO: 70450 - DNA, 370 bp, Zea mays
  Clone ID: MRT4577_16423C.1
gccggccgggtcgggaatcctcggtatatcacgagttaatccattcgcattgtcccgtctcctgactcctaccgatactcgcctggtgcagccatggcgatttccgtgacgcttttcaccgccgacaatcccacctcatgtctactcgtccccgtgcttctctgaaatacccgcagaatctgcttgccctgagcatgcgccactgagagcgtccagcgtcacgattgcgtgccaatcgactatcaacatctccgccgaccgcgtccccatacatgtagaagaagaagctgatgaacctcctcctcctcggctccatatctcttgaccacaatcgtaatgttcgtcccctacggaggcttcttcgtgactg

SEQ ID NO: 70451 - DNA, 370 bp, Zea mays
  Clone ID: MRT4577_164240C.1
attcggctcgagcggtccacgtcctcggaggctgttctacctggtgctgaactgcatacgatagaggccttacttagaaccaacgaccatggcatgataagtgtcaaggaccaggagactcatttactgagagcagcacctgtaggtgctaccgcttgtgcacgagcatacccacagcgacaatgctcatatttccacggtatgatacttgcagttgatgctcgggatgcccgacactttatgggcagacctgctatccgagatgatcggcaggtatggcatgacagccttcatccttcttctgtattgtcacaactgcgttaggcagggatggagcatgttaattgtgatgcacgactggtcaagcttc

SEQ ID NO: 70452 - DNA, 300 bp, Zea mays
  Clone ID: MRT4577_164241C.1
atgatgtcgtacgtctttttctccacgaagaaccctataactcgccactgggagagatcccatcgagggaaagagttccattgcgttgcttcgggtcggctggccgcccgatgcgtctccaatcggtgcagagttgaaaagagattatcgtgtaagactaaactagatctaaacctaaggctagagtactccttctcctaagaattgaaaaaacgatataaatagggtaaaattataagtaattttgattggatagattatgaggggtttttattggtcgtaacccttcgtctatataaa

SEQ ID NO: 70453 - DNA, 240 bp, Zea mays
  Clone ID: MRT4577_164242C.1
ttatgggcgggcccgacgggcaggttcttgtagatgtgacactggaggagcgagatgcggctgactctgggaactgctgcttggcagcacagctgactgacctgcccactgggagggacgctgtcttgctagcttctgccacagcaatcccctggaacgggcaacattggccttctcgcggagatgaccgtgcctgcggcaggcggctcgactctgttctggcgtggcatgggcccccgt

SEQ ID NO: 70454 - DNA, 363 bp, Zea mays
  Clone ID: MRT4577_164243C.1
gggttggcaggcccctggtttttttttggtcaaacccatcggagttcccttttttttgtggggggggaacatcatgggcatattcggtgggctactttttattatttctccactaataacaaactggggcaaaaaacatacttttttttcgcaaacaaaaaagtggggtggacccgtggggcctgctttggattttggaacattggccggccacactggcgcctggcttggacgcgcgattttacgggcagaaggggacccggtagttgctgttgccgctgcaggcatgggtcttggggttgtcgctgggaaaccggggggcggcggggccgctgggccccccgcagttgagggtcaccccgg

SEQ ID NO: 70455 - DNA, 186 bp, Zea mays
  Clone ID: MRT4577_164244C.1
cgtaataaggaacaatactttcttcttttcatttcaattgggcattcaagtcattgctcacactgacactgccacccatggggttggcgcgacacatttactacttactcattgccgataaatgattgagcatgctagcttgctcagcggctatactcccccccatacaccctttattgggggacc

SEQ ID NO: 70456 - DNA, 443 bp, Zea mays
  Clone ID: MRT4577_164245C.1
ttctatcgttcctgtcactgtcagccatctgacgagggaaaaaaaaaaacagggaacgtatgactgccgctgccgttcgatttgagagccaccgattaacccatccatccaccttgccgccgtctgagagtatggttgagctgtcttacactttttgtttttttttatctatattttatatttctttgcttttatattttacttatttttctttttattttttttctttctttttttcttacttttattttatttcttattaatatttttcttattctcttctttcgtcttttttttttattttttttacttttctcttctcctttctcattattttcttctttaatattttttctttatttttttattttttctatctttcttcttattttctttccttctttttattttttacatcttattctctatcctcttcttttttt

SEQ ID NO: 70457 - DNA, 186 bp, Zea mays
  Clone ID: MRT4577_164246C.1
acgcgaggggatttatgatgagaagcgactggcctaggacacggggattgctaaaaggggagcttcccatatgggataatttggaaattcgagaactggctaatctatagtttgtcgaattccagaaaagctccattacatggttggaattctttatactgacaaagtatctgaagttcagcataa

SEQ ID NO: 70458 - DNA, 1058 bp, Zea mays
  Clone ID: MRT4577_164247C.1
tttttttttttttttttttttttttttttttttttaaatattagatagatggaaatattggcattcaatagctgttaatgctttggacaaacaacatgtccgtcactgatgctgcttgtagaccattcaacagtgacaataattagcatgaaaccatgcacaacacgagagtggcctaaccccttttacacaaaatccagtctatcgcctagctacttctgttctactatgcagatgccaatactgattattcctccatgacaatgttggttattccaccatgctggcctggcagtaatatgcagttcctgttgtgtttgggcagtgatggtttaacaatagcaagaggatgtgaacacgccctgggtacatcctgacgtggcacagttaacttttgaccacagcatcttgatgccctggtgtacggcaacacgaaataccaagcgagtcaaggctttcacacaaacttctggttgcctggttagaccttccagatgccacacttttgactagacgtcttgtactacgtctacaagtataccaggaatatatcagaaaaaaaagggcctttgcataatcttctgattactccatagactaactgtgaatctaaatcagcttatctttgattctccctctctctaagaatcttattcgtccacccttgcttgtcatccagaccagcaaaatgaatcataaagtctccgtctgaataaacccctttccatgtagtgggcaggtggaagatcaggcggtgcaccgatttcaatgtgaggatccacgggtaggaattgaagaggcactgcatttttacgatccgaacatgctcttgcatttcttcagctgacaagtgatctatgagatgcttgagtgctgcattatctccacttctagtagaaccaaactgtataaatgatgtctggttccaccatgtatccaaaaacttctcactccattttgacctccttacgaagaaaactccggcattcacaccaccgaaatcctctgtcagaacaagatcaggtgactcaacccggccggcctcgaggtacccaatg

SEQ ID NO: 70459 - DNA, 809 bp, Zea mays
  unsure (1)..(809): unsure at all n locations
  Clone ID: MRT4577_164248C.1
ggtgtaaaatcctgcccttctatgcaggagttttcttataaggaggtcaaaatggagtgagaagtttttggatacatggtggaaccagacatcatttatacagtttggttctacgagaagtggagataatgcagcactcaagcatctcatagatcacttatcagctgaagaaatgcaagagcatgttcggattgtaaaaatgcagtgcctcttcaattcctacccgtggatcctcacattgaaatcggtgcaccgcctgatcttccacctgcccactacgtggaaaggttccactttctctcgttcactctactagtctacattgcatatgtaatgagggtttacatttgaatgttatggctcattgcattgatcttgacttcttgaggggaacaacttcctaggagctttccagatttatctgctttggaaaattggttttttatatatcacatgcaaattgttagtgcaaccatggtgaaggatggtatcacattaaactaaatcagtacttgaaaacaagaaagatgatatctctccagcattcattcgcacattgttgcctatccctgcattgatttccaatagactgagattataaactgaactgagtttgcttggagtgccgtataccaacagcaagtctccacgttcctccagaatgaagtttttactattacgtatggcctctttagtatccatgttntgttcacagcatattgcatttccaggggtttattcagacggagactttatgattcattttgctggtctggatgacaagcaaggttggacgaataagattctta

SEQ ID NO: 70460 - DNA, 550 bp, Zea mays
  Clone ID: MRT4577_16424C.1
gaacatccacacggtaaaaaatattcaagatagaataaatgcagacaagttgagcttaatgagtatttatggtgacaggagtattagctgattactaaaaaccacacaacgggagggggacacagaaacaagcactgaggtggaccattcatattaatagttcagcataatactttgaaacgtctttatctaatagggcagtggtgtatactagaaacaaggaaagatgttgtatacgcgagagacatactaagctggattccagctcaatgagagagagaaaaagagagacaagggtgacagccagcccagcatgtgttggtggtactagaaaagcgggcggcggcactggggatatgctagcggcagcacctggtcctagagcggcgaattcaacacctgcaggtacagcggaagggacatgtccccatgccaaccgccgctgtacatagccctgtagctgtgcctgtggaggaacgtgtggatcatcctcacatggtgcctacacaggtgcgcgtacaggttgctaaggtgcttgtacggcaagggt

SEQ ID NO: 70461 - DNA, 851 bp, Zea mays
  Clone ID: MRT4577_164250C.1
tccaccgcggtggcggccgcccttttttttttttttttaaacacaattctatcatcataaatacaattttgtcgcgggatagtaccgtgaacacaggcgcgcgcgcatatatatatatacacacacttcgttcacaactttttgttttttttttgccccattttgcatatagtaatattcaacggcacaattacaatcccagtttccaatccagtgactaattctaatccaatttttagcgatcgcggaaaaaaaagatgtggggggaagttcagaagccccagaaggaggccgcctcggggtccattatgtggtgccgcgtcgaggagatctcggcggggttcacgttcacctccgaggtgacgccggtgtcctgcgacgcgccgccgctcagccgctccccctcgcccagcttgctgtaccacccgccggcctcctgcaggagctggagcaccatgcccgcgtcgccgtcgtactgcgcctgcgcctgcgcctgcaccatgctcgccaggcggagcggcgacgtggaggggtggaggcagggtgggttcaggaagaactggccctccagcgcgttggagaagcaggtcacgtgtggtgccggtggcgccagcagctcgatggacgccgccgccatgttggcgccgccaccgccggacacgtccatcagcggaggcagcgcgcacgcggcgaggtcgtcctccatggacatggacggcggtcccacgacgtcctccaccaccatcatccccgtacacgcgaccgacgacctcttgcccactgacggcggcggctcgatgctcttcttgaaccccgtgcacagcacccactcgtcctggaatcccggccgg

SEQ ID NO: 70462 - DNA, 200 bp, Zea mays
  Clone ID: MRT4577_164251C.1
aatacagcctctattggattcgtcttccctttccctcgatctccagtgtggtcgtgcagtgttctctttcttgcctgagatacgaagatcagcccctgagccgatcccatggctgcttcttccctctcccgtccagcaacgccggccgcgctccggcacggggcgtgccacgggctggggctggcgctaccgaggagttt

SEQ ID NO: 70463 - DNA, 488 bp, Zea mays
  unsure (1)..(488): unsure at all n locations
  Clone ID: MRT4577_164252C.1
gttcgtggctgtcctcgtcacgggagattcgtcctcattattcacagctcatggtactacagtgtgcgtgtttgctgactataccactcctgctggttctgtcggnccctcggnnnccttttttttttttttntttttntttttttttnnttttttnttttttttnntttttttttttttttttttttttttntttttttttttttnttttttttttttttttttttttttttttttttttttttctctttttcctntnntttnnttttttttnttttttnntttttgtttttntnnnntntnntnnnnnnnnnttttttccctttttttttttttttttttttttttctttttttttttttttttttttttttnttttttttttttttttttttttttccctctttttttttttttttttttttttcttttttttttttctctttttcattctttctcctctttttttttttttttttttttttttt

SEQ ID NO: 70464 - DNA, 423 bp, Zea mays
  Clone ID: MRT4577_164253C.1
cggacgcgtgggttcatacatcctgccattcaaaggtcatcctgagaggctaacgcatagcgctgaaactatactgtagcaagtagcctttcgtgactgcagagacctagccatccagatctaaatggctgcctgttcatagctaaaatgcatagcaccattattcatttgcaacactatcattcgatttctacgagctattcatgtactgctcggatgccagtcttcttgactctaatgctatctccatcagtgtactcatcctgatcatcttatttcaaactacactatgcgaacaatgcagtctatagtacaaacagcgttctgcacagtcacatgcacgtttagctggctataccctaacagtaaggatccatgcagaaaacttagtttctaatactacagtaggtcaaatttacacac

SEQ ID NO: 70465 - DNA, 308 bp, Zea mays
  Clone ID: MRT4577_164255C.1
gaaaaaaaaacagggggctactcttatgtggttttatttggtcttctttgcttttatcaataacagacttattttcctcgatgcagcacacccactgaagtgcaggagagagtgctgaagggaaggatggactgatgagtgctgccatgtagttattctaggagagattgtttcttcattcgccctgacatgctcgcccctgtcctacggcgtacagaattcagagaacctgtgcaccacgtttacttctcgttctgaaagaacattgattcagtaaaaaaaaaaaaaaaaaaaagagaacatagaaa

SEQ ID NO: 70466 - DNA, 289 bp, Zea mays
  Clone ID: MRT4577_164256C.1
tagactttctcaagagcaagccccacgacatcagtcgcattataaattttttggggcaccaaaccatcgatgccaccaaccaggtcaagtggtggctagagtgcgtcgccctactcgaggacaccgcctcgctgatcgtctactagtaccaagcgcgcctgcagctccctcccgaccagccccccggctacaaggccacctaccacctcagcaagaaggccgacgaggctcgcgaagaggccgtggacctcaaggacaaggccgacttccacaaggtcgcccacgaact

SEQ ID NO: 70467 - DNA, 868 bp, Zea mays
  Clone ID: MRT4577_164257C.1
ttggattgctcgcctcgggccggggaggggttattcccgttcctcctcgcccatcggcttctcgcggtctcgccccggcacctcgcactcccatcgcagtccaaaatcctcggcctcacaccctatgcctccgcctgttcttcgcctgttcgcggcagctccgccccgcgctctcggtggccgcgccagggcgcatcgtggcgatggcgggttcgcgcgcctgcgcctgcgcgtcagagcagcggctggggaggccgcgccggcgccttccagaacccagatgataatggataagatctctgctggcgaaggagtcggaggcgctggaggggcttactcatatagtgcgttgaaaagattggatcaaatatggtctagtatttgtgaagctcaagcagattccaaagtccctgaagttgttactcgggttgaagggctgttggctgattctgatcttggttctggttcagagatatttgatgtaattgtatgtggcggcacattaggtatatttgtagctactgctctcagttctaaaggccttcggattggaattatcgaaagaaacataatcaaagggagggaacatgagtggaatatttcaagaaaggagcttatggaaattgtagagattggtattctttcagaagcagaacttgaacaaataatttcaagtgatttcaatcctaatagatgtggatttgaagataaaggtgaaatttgggtggagaacattcttaatcttggtgtttcgcctgctaaacttgttgagaacatgaaagacgcttcatttcttcgggaggagcaatatttgaggagaaaagtctatcagcatttatgtctatgatgatctcgctgtactgaaact

SEQ ID NO: 70468 - DNA, 865 bp, Zea mays
  unsure (1)..(865): unsure at all n locations
  Clone ID: MRT4577_164258C.1
cgaggccggccgggatcccttccccgcggaagcggcagcccgtcagtaggtgtagtgtagctcgatagacgagaagaatatctggcgtggaagtttcagcaaagctcctggattaaattggcatcatagagggcgcaggatccaaatctgccggaaacctgtatcttcatccagtatcaaggggaagttctgttgttgtgagttcggtgatggatacatccaaaagcaagcaaggaccagaacatctccttgttcttgtccatggtatcatggcaagccccaaagactggacatatggggaagcagtgctgaagaggcggttgggtgatgattttttcatatatgcttctacagtgccggtttatgaactaaatggatgttgctggaagaaggttagcaaatgaagtacgtcctttgaagtttgtcctagaaaaaaggtttcaagcattctccttgttggagactgatatctcctgttcctggatcctaatgaactgctttagaagctctgataattgtgcctatggaaacaggtcttggatgtggttaacaagatgcccagcttgagaaatatttccttcctagcgcattctctggggtggtttgtttgctagatatgctattgcaatactccactcagtctcagtggaaacaaagaatgcaggacaaagtagtgcacttactgttcctacaacaagagggccagcaaaatcaagatgtgctttcaggattaggttctattgctggattgcagccaattaattttattaccttagcaaccccacaccttgnggttagagggagaaatcaggtgcatcaccaaaatggttncgggttacgtttgcaaaatatactgcacattatc

SEQ ID NO: 70469 - DNA, 221 bp, Zea mays
  Clone ID: MRT4577_164259C.1
acgccccggtaccgaaaccccaggtcgggctgcacccacgcgcacctacaattgtgagatcgaacaaatcaatcgtctcgtgtatttcacatgggctgggtaaccttgtggcgagaagacataaaacaagaaccatttaatcaggagcattttttgcgaaaaagaaacttaacacttggtgggaagagaataatggcttcttttatgaaaactacatcact

SEQ ID NO: 70470 - DNA, 388 bp, Zea mays
  Clone ID: MRT4577_16425C.1
ctcaaagcccttatttggaagccatgggggccatcgaaatgcaaactattcgcttggcttatcatccgcaaccgggtttggacctctgataggctcgcagctcgtggatggccgcacagtccttcttgtccgctttgcaagcggcaccctgagacagctcatcacattattgctggttgccgctactcgaggagaatttgggacgccctagcatcttggctctccattggccctttagctccagctacctggccggactctacttccatcaagcagtggtggtttatggtcggctcagtcgctgtgcccaaaaagggaacgcgctccctgctcctactggtggtctggcacatttggctggaaaggaacaaccgcaccttccaaaggc

SEQ ID NO: 70471 - DNA, 664 bp, Zea mays
  Clone ID: MRT4577_164260C.1
gccaaaaacgcagatccagttagggctcaaccctaactaaattaaccctaaaatccggatcagtcaaagtgcacagagcactgttcgtttaatccagtgactagatccacgcgtaaatcacagacaaaaacgcaaaaggaaccagacccacgttttagacctccgtactcgatcccatagattacaacaagacacatctcatacatacattcataagaagagagggaccgaatacatgagtttggatctgagtataagtgtaaccagaagtggccatgagcaccaaggtttttttttcggctgagtacaagtgatgcaaagaagaagcaaaaaaaaaacacacacaacagaaagtgacaccgtgaagcatatagccttcatgtggccatacgaccagtggtgtctccagggaactagcggccagatgctagaacaaagaaaaaaaaatcagagagaagaaatcgtgctcggtggtgaggctgggagacgactgatttttttttcagccgttggccgaggcaacaaggcagtagaaagcagtttggccgagccagaaaaacaaacaagaaaagagaagccgggcgccgtcggccaggcgtcggtgatccctgacggccgaagagctgtgtggcagaaggaagtaagctagggttttgccggccgg

SEQ ID NO: 70472 - DNA, 254 bp, Zea mays
  Clone ID: MRT4577_164261C.1
atattgaccccgctagcccttgccatacctaccacagacggctaataacacacctgtgacgtacgaatattaaccctctgaagcagggcaaaccacatggcagcaagaagtatcacaggccacgcctgaccaccacgaccaactggtcataatctgatcaaggcagaagcttccgaacccacggatgaagctgctgctagaactggaactgctgaaggacttggaatgaggccatgctaccggtcgagcttcga

SEQ ID NO: 70473 - DNA, 180 bp, Zea mays
  Clone ID: MRT4577_164262C.1
atggggttattttatttaatggttggcaattttatattggatcccagaggatttccaactttccttatagtgtgatggagaaacacgggcaggaacacaaataatgagcgtctacatgtgggaaaagagattccactgtataacccagattaaaataaattgcggacgcacaaacgctat

SEQ ID NO: 70474 - DNA, 231 bp, Zea mays
  Clone ID: MRT4577_164263C.1
gacccacataaaaacaacacgggctgggttaaatttccggtacatcaacaaaaaacacacacattgaatattcacttaccaaacccaaaggaccaaccataatactccgtaaatgataatatcaactcatatccacccaataccaataacaagataccacaagcttgctatgctatgttggaagcaaccactatgacactccaacaccccacttgcaattccacgacaaca

SEQ ID NO: 70475 - DNA, 244 bp, Zea mays
  Clone ID: MRT4577_164264C.1
tcgatatactagagagggacaaagaaaattctatgggctctaagatgggcttaacaagcgccactggctttgacctactttgctccttaagtcatgacttggtggtgtaactaaacatacccagtttacaactttgggcatgcctctaccgattttttgcatcagtctgacattgagcctaccttcagcttagggttttgggatcagatctttattgtttccacttagggggggtcttccacta

SEQ ID NO: 70476 - DNA, 648 bp, Zea mays
  unsure (1)..(648): unsure at all n locations
  Clone ID: MRT4577_164265C.1
cggggagtcccacctgtcagatctcggatttaccgatccccacggccacgagggccctccgcagtccgcaccgcagccactgggcagacgaggagaagcttcgcggacgccatgtcctcgccgtcgccgctgtgcgccgcctcctgctccaccgctctccgcgcgccgccgccgcctctccttcgcttccgccgctcttatgctccggtagccgcctccgtgccgcgcacggcgcctgccgtctccgatgacctcgtcctacgcatcgccgaacagctggaggactcggtgacctccacctccccgctcctggaccccctccgctccgcctctgcgctctccctcctctccacacgctggcccactcgccgttccagcgaggccttccgctccactgacatctcctacctccgctccctccccatctccctcccgtccagggagcccgacctcaagctgccgtcctcccctttctcttcccacgtgctcttttcggatggaatcctcgtctcttcctctggtgcccatgtcagcgccctcgccgatcttccccctggccgcgcccgggaccgcgccgccgccgcgctcgcgncgccgctgaattcgcccacaaggacctcttctatgacttcaacgccgtcggggcga

SEQ ID NO: 70477 - DNA, 334 bp, Zea mays
  Clone ID: MRT4577_164266C.1
ggtctagaaccaccgggtcgaccgcacgcgtgcgcatactcgtgggttgcagaatatttgggctttcagagctcgcaactggcaattcgcatctgcttatatttgatatgcagcaagcctgactatcacaaacatgtgaggaatgccgttgtaaatcagctgaaggagttcatgatacactataaaggttatgttccaatctaatataacgtacacttgcagaaaactaaaaggcctgaggaaatcggataccatgttaccttacatgcatgttcagacaggttagctgctaaaatctatttgttgactatctttcacatacacatgcctattt

SEQ ID NO: 70478 - DNA, 330 bp, Zea mays
  Clone ID: MRT4577_164267C.1
aaccgcgccgggatccccgcgtcggcccaaacgttcgatctttatgagcgggccttatatgacgttcctgtgaccaacccctggggttcatccgcgaaaactattgacacacagtcaggctacacaacttgcttccctgctcatcacaaggttgcactgcctctctttgatcttgtctgaggccaaattttggtagagggctgggctattacatgaccacctattggttactacctaccagcttggacagattttttctggactggagttatgctaccagaaatctatgataacaatagggtcgtccacatggggtaagaaatggtagcc

SEQ ID NO: 70479 - DNA, 622 bp, Zea mays
  unsure (1)..(622): unsure at all n locations
  Clone ID: MRT4577_164268C.1
tctttaaatattaatagagctccncagagatctgggggggggggggggggggggggggggcacctctaccctacagtagaacccctctccctcgactagggggtcccactgacacttgctcggccactccaacttcctgaagcgcctcaagaaagagacaaaccgcgttctgaactgcacgtgggaactggagatcaccgatacttttactttagccgagcgggtccgtctccgggaacccaagaaagccacggttcgtcgaacgactaccacgacggtctcatagacttcgtacgttacaatgagggggaccaacctatactcccagtaaggtttaacaacaagcagaaccctgccgtaggaggaaagtaacgtgcccaacacaaaaactttgctatacctacaggaggtcgtctaaggagtgcgacaacagttagtggggtgaggtagactacgaaaataccctgctgctaggcgaacgggacagaaccgacaactaccctcccaaccaccgattctcgtgcacgtggaaggagttttccgaaggtcccctcggtcaggggcacgggttgcgctgacctacaagcctacaagattacggtcccgaggttcccgtccgact

SEQ ID NO: 70480 - DNA, 459 bp, Zea mays
  Clone ID: MRT4577_164269C.1
tttttctactcagaagctatggggaagctagagtgggcttttgtgctggttataacattcagtcagcaattaagcaggctgtctttcactgtccatttcttcgtggtggcataaaggacttgaacaatgtggttttcctctcccttacaactgctcgggtgttgtctgaaagtgacttgatctctattctgcacatcttccgtcgagttactgggttcaccaaagatattatattttctagaaattctgaatctgatttagagccaaaactgatagtagtttctcttctaactatccgaaaccactatgacggaagtgtttccacagtacaagagggattcctttcaagtttggccttgcattttccttttatatcttctcttatgggaggagatacccctgagcagaaacaaattaggtcgaagcattccttaatcgactgcctgacaacaagattta

SEQ ID NO: 70481 - DNA, 297 bp, Zea mays
  Clone ID: MRT4577_16426C.1
ctcccaagggcatgctggcccgaggcacgtaccacaacaagtccttcttcaccgacgatgacaagcaagaccacctcagctgggagtggaacctgtcgattaagaaggagtggacagaatgaatgcatcaacccctttccccacccttgccacctggaagaattctctcaggcgtgttcagcaccctgtccctcctccctgtccacagctgggtctctcttcaacactgccacatttccttattgatgcatcttttcccaccctgtcactcaacgtggtccctagaacaagaggctt

SEQ ID NO: 70482 - DNA, 350 bp, Zea mays
  Clone ID: MRT4577_164270C.1
cgcttctgccggtccgcgcttgtgcggtgggcgaagtgctgttgttggtgcgggaagcgtcacacaacctagcgggtgctgaccttggtgggggagcgaggagtcgacacaagggtgagaaccatgagtgatacagggtacactgtgcacgtcactaacctatagagcagagtatgttacagggatctgtatgagtccttttcgtgctatggccctattgaacatgtataacttatcacatcatgagaatacggagctactgcttatgggacatatactgagcgctttgccttgtaaactgcggtattgctaagtgaggctactattgtggatcagacggtatgcataac

SEQ ID NO: 70483 - DNA, 258 bp, Zea mays
  Clone ID: MRT4577_164271C.1
aggggggaaaaaaaaccataaaattccaatagtaatgatccccggcaaattaacttatttgggcacagttttaccaaaaaaatcaactgccccttggatagactggagcagcccatcccgtagcacaaagtaaaatcacccataaatttctcaatagttcgggatacaagatggcaccaaagctttccagcccctgaacctttattttaaaagagcaactttggaggtgaaatgatctgaccggccctaatggaaccc

SEQ ID NO: 70484 - DNA, 282 bp, Zea mays
  Clone ID: MRT4577_164272C.1
acgacgcgtccgagacccaatcttatgtttgagaacactttctccttgtttcgagacacgcccccaccagcacccacgggggatgctattcggcgctaccaatccaacacacgcttagtctgagcatgccaccaccatagaaattttgacccatgacgtccacttcccgtcgtcccctgcaccgctggcgctcgaatgctcgtgcacatgcactggctgctgtaactccgtcgtgcgaggccgcagtccagctaaccaccgcgaaccgccgactactatagt

SEQ ID NO: 70485 - DNA, 249 bp, Zea mays
  Clone ID: MRT4577_164273C.1
gcgcatccatatttggggggggcaaaggatgagagagagagagagagagagagagaaagaaagttagagagttacacgctgtctcacaaactaatacaaatttgccgaaatttatggaacgcaccgaccttaacagatctatctggtatcaaaaaagtggctatgcacatacaatatatccatcgtatgcaaacttttctctcaatgttcataccattctgacatacatttacgcgagaaggcaaaaat

SEQ ID NO: 70486 - DNA, 304 bp, Zea mays
  Clone ID: MRT4577_164274C.1
ccacgcgtccgcctacttgtccgtgcaggttgctcaggctggaaatcatactattgaaaatttggctgcactcgttgtccactccgcgtttcgattgttcgtgaatacgcgtggttaacgaactttgaaaagaatcattctacttaaattcactgacgacgggacattctgtaacaccgtcaacatcaaagacgcctcagtgtatacatacgctggtgaaagcacacactcgtgtcagatgacaacaagttcatattgccttattttctcaggtggcactgaagcagcatcctgaccaagatga

SEQ ID NO: 70487 - DNA, 194 bp, Zea mays
  Clone ID: MRT4577_164275C.1
aggtacccccccaattcccgggggacccacactcccccacccttccccaacgtacttttttttctccccctccggttcagggggggttttgaggtctgcggggctcggtttcggttgatcgaatagacaagcggcttctgatgttgagtaccagtgctttgtcagtggactcttctgggccacggactaccact

SEQ ID NO: 70488 - DNA, 2429 bp, Zea mays
  Clone ID: MRT4577_164276C.1
tcgcacgcagcacggcctccgatcgatttcctcttgtccgcgtgtcccagcgaatcgccgtcatgccgcgcccgatggcctcctcctccgccaggggccgggcgaaggattccgacccctcatcatcctcggcagcggcggattcctccatggcatccctaatcgagcgcgccacctccaccacggcgcacgccgtcgacccggtgctcctccgcgccatcaaatcttcggcccgtgcctccgatgccgccatccgggacgcgttccgcctcatcctctccctcatgtccaagccccactcccacgtgcggctcctcgccttcagcatcgccgacgagctcttcatgcgctccaagctcttccgctccctccttgctgactcgctcgacggcttcctcccgctcgccgtcgggttccgccgagcaaaccccctcccgccgccgaccacgtccgctgccttactccggaaggccgccgtccaggcgctcgagcgctggcaccatctctttggtgcgcactaccgccagctccgcctggccgtcgagtacctcaaggagtccgcgcgcgtccagttctctggtctgcgggccaccgttgatgctcgtgcagctcgtgaggctcgcatgcaggagatctatgctggcaaggttgagcagttgcgtgaaaaccttgcgtcaatcaaggcggagattcggtccacgattgatgagattcgcaatggattggagatcatccgtgctgaacataagaaatttgagggttattatgtggatgacgaggaggagattgcatccttgtcaatgcggagcattagaacagcatcattgatggctggggagtgggtgcctgagactcaggagaatgaggcagtttttgatgcactgagggaagcacaccggttgcttgtgtcaaagcatttggtcacagtacaggagtggataactgtgcttgtgagggtcaaccttccagacaaccgtttccgagattctgcattgaaggatttcattgatgttaagaatgagataagggctgtgagagatcattgcagtgagcttggtcttgaccttgataattttcataggcggaagggtgaccaggaggaagaggacaatgagttctgggtggagggaaacatagaggcaccaaatcgtgctagagtccagagcagtttagatgttgcgagcactagcaaggacactgagaagggaaagtgggtggttggtggagtgtctcacattggcaaggcaccagttgcagctaatggaacgagaaatcttgatccagaaaaatcaaaactcctcgctgaagcccctgtgctgccatggagctctgtcttggatcgctggggctcaagtggggatgtacacgtaaaccagaggggacttgaggtcgagagtcattggggaagagtggataatgatgccactatacctgcagcaaagattgcagagttgaatgttcattgctcaatttatagagaagacccagttgagatcctaccatgccacgcccctctaaaaaaaggaggactttgccagagaagggatcttagggtatgtcctttccatggaccgattgtcccacgtgatgcagaaggaaatccaattgagcagaacagtggtagttctgatgcagaagtaaatcctgttgagcacttagacattggaggacattcaaatgagcttaatggaatcagtgatgatgattgtatggagggaacctcttcaagaatggcaggtgtcaataatgattatggtgacatagctggaacttgtgatctaggtaagattactgcagagcagttagcaagacaatcagttaaaaatgtccggaaaagagaaatggatcgcaaggcacaggaaagggcccaacgtgcaagaatccgtcagcacaatgaagatgtcctgcgaaatgcggctcttgcttcaacttcctattctgcagcagcctatgagcagcctacagaagcacatggtcggcgaggacgccgaggtaaggcaaaggcaccaacgctggcatcgatgctgaaaaagaaagttaccaccaaagacagaattgcagagaggcttctgaacgctcgagccacagatgccacagtaagggatgtttctcataatgaagatatgagctacagggaagcatttccaaatcagtggtagcagaagcagttgagttgttcttgtgtaggctccggctggataaacatgttaggaatgaaatcgatgttgtttattggttcatactgtcagctaaataatacatattctgttgctatctaaatcagcacagaactgtgagtatgtttcctgatattctgttcttgtacagttagtaggataggttccttgtacatttcccaatgttcagtcttactatgtgtttttgaacttacactgctattgcttgcatttcaaagtgaacttgtttgt

SEQ ID NO: 70489 - DNA, 193 bp, Zea mays
  Clone ID: MRT4577_164277C.1
gattctgtagaaatccataacactggggaggtccatcaaactggcatgtcgagggcccattttgccctatggccgagtggtattacatattgactggccattacatttacactcggccggacttgtaaaaaccctgggccttaccaaacctcatatcgtttgccaacataatacccctttgcgccagcatggc

SEQ ID NO: 70490 - DNA, 603 bp, Zea mays
  Clone ID: MRT4577_164278C.1
cttcctcccctcctcgccgccgctctcaaattcataccccgctcctcccgccgcaggttgggcatgacgcatatgtttccaaatggaggtgcctcgtccagctcaacctctatgagcagccagaggagcgagacagatgatgacaagatgattgcaatggttcttgaagaagaatatgcgaagctagatggtgctatggccaagcgccttacgaacttgacatctattcctcatgttccccggattaatacatacttcccgacatatagtgatgccaccatggatcatcatcgtcttcatgacaggttagatgcatacggcttgtttgaagtgagggtatcaggtgatggcaattgtcagttccgtgcactctcagaccagctatatcgatcacctgagtatcacaagcatgttcggaaagagatagtgaagcagctcaaggcgtgcaactctttgtatgaggggcatgtcccaatgaaatataaacactattgcaagaagatgaaaaaatctggggaatggggagaccatgtcacattgcaagcagctgctgataagtttgctgcgaagatatgccttctaacatctttcagagatacctgt

SEQ ID NO: 70491 - DNA, 289 bp, Zea mays
  Clone ID: MRT4577_164279C.1
gcagtgaaaaaacagagttaccaccaaattgcttggctccagacaccgatgaatatacatcaaacatgaacaagagggtgctgaaaagccattattgcaccccaaaaaaacagacatcatataccctactacagctttgtaggaatgtaagcatacaccacaaattctgaatggaatagtgttgagcaccaagcctaagaatttttgttatgagcataaagtatcactgtgagcaaagaaatgttgaggatttcctctactttttttttttggaggggagaaggggggg

SEQ ID NO: 70492 - DNA, 496 bp, Zea mays
  Clone ID: MRT4577_16427C.1
atcatgatagtgccagaggtgccagactatccaacgagcgtaatgaattgattacacacgccactcacgtaccaatggaccggcaaacggctcttgatgcaaccttgtgatcaatcctgcacacctcacgcttggatcatggtccttttactatgctcacaatcgtttggttagattgaatcaaacgaatagctcaatcctacatttgtgcacaaaatgggccatatttacgcttaatacatgacctaagaacatgtccacaagcacaagacccatggaccacctatcatgaattactacttataccacatattacatgcccactatttttatcctaggcacctatgctcgcttaagctgagaacacaaagttacgtaggatttggcaacatcttacttgcagctaacacatccttcatatgccagatggaacaaaggcgatattcaggtcaacaccatgaacaccgtccaatgattcagaggcacacgagactat

SEQ ID NO: 70493 - DNA, 419 bp, Zea mays
  Clone ID: MRT4577_164280C.1
aaatacatttttttttttttttttttttttttgttggtttttttttttttttttttttttttttttttttttttttttttttttggggggcccccaaaccaaaaacggaacatttgggtaaagaaaaaaccaagggggggggcccaattcacccaaaaaaaaaaacagggttcccgggatctaaaaaaacgggttccccaaaaggggaggatccaattgcttaaaaaagcttcacccgctcgggggtctatgggaaatctcccaccaccccggaatcaattaaaaacagggaaaatgcgggttaggggcccaaaaggaacgggatcagctgggttttttttgggcggggggggaaggaacccattggggggaaaaacaaacacttgggactggccacccttttaaattaaccaacctgg

SEQ ID NO: 70494 - DNA, 782 bp, Zea mays
  Clone ID: MRT4577_164281C.1
cccacgcgtccgcggccgcgtgggtggtgatatcctccagcagattgtgcgaagtggaggcagcaatgcagccatatggggtttgtatgcaagatggcataataccaagggtaacctcatagcatgttcttaagctttgttgaagcaagttcgatcccttcagggctcaggattattgcatgaccaaatgaagttcgcaaagtatgctcaagcttccttaaagctttgcaaggtgtacatggaaatttcttcctcaactggaagccgacgagaattattaacagctgagatgcaccttaaaagtaccttgaaacagacgatggacttctcagacactgaggagtacaaagctcttgataactgtcttgaagaaataaagaacctgattgccgctactgcctaggttgttgcatccaagttttggacgctggttatgataatgtattgtccgtttctaattaagcatttctattgttgtcttgttgggaatcaagatcacattatcggactctgttagcacacacaaggatgccaagacaagtgaacctgcgccagagactggaagcgaagatggtgtgctgctacagccaagattaaaaaggaagcttaagcccaatagcaaggtgtccggcctagagtgggttcgttgactgtaatagtgtggcccagtcgttgtgccatatgtatggcttcagtctgtaaactgggacatcgaaaaaaagaacagaaaacactactgcctatcttcttcccctcttccaagtcttctccttccctgccgc

SEQ ID NO: 70495 - DNA, 564 bp, Zea mays
  Clone ID: MRT4577_164282C.1
caaggaaaaaaaaaggacctaaagggccccctggggtccccccttccaaccccagtacaaatttattacaaaaaccccaccccaaacttctggatttggacaaccccctttattaataacgtgacctcaaaggccggggggggtgggggtttgtagtaaaaagccatcccagccggttcgccggcgttgaatgccggggggtttgacggggaaggggttaacggcccattggtaaggggaacctcctcgccctccgggggttggaggccctgaaggagaacaaaccccgggggggcacccttaacgggttggacccggtttttttcaagaaattttaaaaacttctccggggcggaaacaacccaacccggtttcgaaagaatcggaaacgaaggttttggctcgggggcttttttttttgaagaagccccagaagaaaaagcgttgcccacctgcttcaaataaaaacccctgaaaaagccctttgttttcgcctgggccttgctttttgggtctttctttgcctggaactggaactgggaataggacaacgggagggccgcc

SEQ ID NO: 70496 - DNA, 593 bp, Zea mays
  Clone ID: MRT4577_164283C.1
gttccactttttacgttaagtcgtagtgcagtacacagattaaacacactacaccacaccacactgagtcagtagcgcgtctaaaacttccttcacttcacttcacatcacatcacatcacattataaccacgagattgcaccggcggatggaaaaacaactgcaacaacagctccaccttacgtatgctcctcctcgttctactcgctctaccttacgtagcgtaacgttaaacgttacatattagtcagtgagtcagtcagatccaccccacaccacccatcacagtagctccgcggcgcgcagctcgactaggcggccggctagctctcgccctctgaaggaatcttcaaaacgacataaagtacttagtactcaaagtactatgacgataataatgatgagacaggtacttgtacttttgatacttgtactggttataatacaggtacaaataatggagactagaattattaataagatccaaataaaggttcattgtaccacaaacgtcgtctctgagtttgctgtttttgacaagtagactaacgtgaatttgcacgaggtacaaagaatactaattataatacagg

SEQ ID NO: 70497 - DNA, 903 bp, Zea mays
  Clone ID: MRT4577_164284C.1
gggaccctcgaggccggccgggccggtttttcaaacccgatcgcaaactccaacacccctcgaatcaccccgcaatggcgggctctctctttcccgctccgaaacattaaaccctagctccgcgcaccatttcccgaatccccaacccagcgatccgcctccagcgccgggccccaatcactgtgcgaccacgatgaggccgctgccgaagaaaccaaatgcagcgctgccggtgccgaagcaactcaaggtgcatcacccggaaaatgagtccctctctcgtttcttcctagagaagtggcgggcgatgatgcaggagccggatgggctctcgcagaacaactacctggccttcgccaacgccaaccgcagcctctgctcctccaaggagccaatccggaccctcaaggacttctcgaacgtcaagggtgtgggaacatagctcataaatcatatgaaaagtttctttgaaaagtcgagtcaggatttatctcctgccaaaggaaagaaagcaaaagggacaaaaagttatttgccaaggaagaacactgctgcttatgccatactaataacactccatagggcaaagactagcgggaaagattttatgatgaaacaagagcttattgatgctgctgaagccagtggactgtcacgagacgcgattggtccaaataaaagtaaagcaaaacagagttacgggaaggactggtacactggttggagctgcatgaagacacttctatccaatcgacttgtcaccaagtggagtaacccagcaaagtatatgctaacacaagaaggggaaggcactgcacgtgactgtctttcacggtctggattagatgattctgcacgggctctaacgataattggtgctcacacacatctgctatggatcct

SEQ ID NO: 70498 - DNA, 281 bp, Zea mays
  Clone ID: MRT4577_164285C.1
cggagccgagaaccgaggcaacgagggatcgcgcgagaaaaattcagaggacatcggcagcgatcgggaggcgcggcgatgttcttcttcttcgtaggcggcgtggagcagggcgcggcgcgggtgctcaaggaggcggccgggcggtgcgtgcgctgcggcggcgcggccgacctggtggagaccgagaaggtgctcaagctcttcttcgtccccgcgtggcggtggccgggcaaggaccccgcctacctctgccgcgactgcggcctcctcgcgccggg

SEQ ID NO: 70499 - DNA, 264 bp, Zea mays
  Clone ID: MRT4577_164286C.1
cagcaaagtgatcagtgtgatcgatcacacactgtcatggccgtcatgggcaaggaggaggaggagcagcagcatcttcacaaggaggaggaggtggtccaaggagatgttcgagtcgttgtccatcatgagacggttgtggacgagtaggccgattcggcgctggtgcgcaagatctccggcctgaccgacgccatcggcagtcttgtctacatgaacccgccatctgaggtgaacgcgctcttcatcgaccttttcacagtc

SEQ ID NO: 70500 - DNA, 319 bp, Zea mays
  unsure (1)..(319): unsure at all n locations
  Clone ID: MRT4577_164287C.1
aaccccaggcgagctcggctccgggcacccgncgaaccacgcaaccatgtttaggaggaagaccagggagcccaaggaggagaacgttacccttggacccactgtgcgtgaaggagagtttgactttggtgttgctcacatctttggatccttcaatgacaccttcattcatgccaccgatttgtctgcgaggcaaactttgtctcggatcactgctggcatgaccgctaaggctgatcgcgatgagcctcccccttatgccggcacgctcgctgctcaagatgctgcacagttttttttttttccccccccccccccc

SEQ ID NO: 70501 - DNA, 267 bp, Zea mays
  Clone ID: MRT4577_164288C.1
ggacaatctgcctgtaaattttgaactgtgtgaccccgactcccaattgcctcacagatttatttgtaaatgcaaaatcgggcagactacgtatggtactggtttcggtgctaacaaaaaggaggcaaagcagttggctgccaaaaatgcgtatcagaagctgtcagagaaaagcccatcgaaaactggctttgtcatatctttatccagtgacttttccagcagctcgtctataacaagtaactctgcttctcagtcataatctgg

SEQ ID NO: 70502 - DNA, 1541 bp, Zea mays
  Clone ID: MRT4577_164289C.1
agcccgcccatctccgtttggctcgggctctcctcccccccaatccccaattccccattgtcttcgtccgtccagcaccagctttcctccgcaccccgatccggacagcctcgccggaaccctaaccctagcgcgccatggcgggatacgcccagcccgcatccagggccgtcgtgctccgcctggacgacctggcgctgcccccgcggcacctcaccgtccccccccacctccccgtctccgacctcctccgctccatcccgctcccctcgccctcctgctactacctcaccgccgacgggcgcccgctgccggcctcctccccggtggcggcgctcccgccgtcggcctccgtccagctccgcctccgcgcgctccggggcggcggcggcgacggcggcgccacgggcgccgagtcccgcgactgctacctctccatgtacctcgccaagaagcccgacaaggcggaccccaacgaggcgcgcctctcgcgcttcacctgctgcgcgctctccggggagcccctcgccgcgcccgccgtcgccgaccgcctcgggaacctctacaacaaggagccgctcgttgaggcgctgctccacaagcgcctgcccagggcgctgtcccacatccggggcctgcgcgacatggtccccatccacctgcaccccaggccgggcgccgacgccgccggggacgaggtccggttccagtgccccgtcaccggcctcgagttcaacggcaagtaccagttcctcgcgctccgtgggtgcggccacgtgctcagcgtcaaggcgctcaaggaggtcaagacgtccgcgtgcttggtctgccacgaggagttcggcgaggccgacaagatgcccatcaacgggactgaggaggaggtggccgagctcaggaagaggatggaggaggagagggggaaggcgaaggagaggaaggacaagaaggttctcagtgggaataagcatgctgctactgtcgtggcgccggtggtggcggcggccggagctgagaatgggaagaagggcgaggctgcttcagcaaagcgcttcaaggctgcggaccatgcgccagcccatgccaataaggaagtgtatgcgtccatattcacatcgtccaggaagtcggatttcaaggagacatactcgtgccgctcgcttccgcggcgcgtgggtgatctcatgccaagagcgattgcattgcatggaggtggtgatcctattgtgctgatttgcctcgctcgtgtcaccaacttcaatgttggttcctttatctggtggtgttatttatgtttgattggtgaccctgagcgtattttggctgttagagcagcgttaaattcaacgtagcaacgatgggtggaatctgcgatagtttggtcttgtgtagagtttgaattaaaagttgttacttggctgattgttccaaaaaataattgacaaacgccatggtcttcattgttgttgttgccacagtacagttaatccaagtccatggaattcaacggtgaggatgtatggacagttgcggttttgtgg

SEQ ID NO: 70503 - DNA, 790 bp, Zea mays
  unsure (1)..(790): unsure at all n locations
  Clone ID: MRT4577_16428C.1
cactccatagggcgattgggttcctcgaggccggccggaaaaaaatacgaccgactgcgacctctgtcatatccccaaaccgacgttttccttgtctgcttctccgtcacctcgcccgcttcattcgaaaacgttcgcgagaaatggttccccgaggtccgccaccactgccctggtgtcccctgcttgattgtaggcactcaggtcgacttgagagatgatcccagcgtccgtgagaagctgtcaaagcagaagatgcaaccagtgcgacgagaggacggtgagcgaatggccaaagacctgggcgcggtcaagtatgtcgagtgcagtgcccttacccagtacaaacttaaggatgtgtttgacgaggctattgtggctgctctcgaaccccccgccccaaagaagaagtcgcacaagtgcctcgtcctataaaaggacagaggtaggccacagcctggccatgacaccgccttcttccactcccccgtggaaatggttgtcagccaggaacatgctcagttgagatgcacgaatcgaaccccttaataaaggcacgacgagacgacattggaatgacttgagcgggtggaaacggaacgcgaggtgtttcgcggagactggtcgtcctattctcagtatgggctagatggcggaacgagacctgnggaaagatgtgtcttgtttcatgaaggaaagacggacgatcgaaaaaaacggcaacgcggatcaaagagctgctaagggacgctgagcgtagccctaggcggcaaccggagcctctcttgac

SEQ ID NO: 70504 - DNA, 277 bp, Zea mays
  Clone ID: MRT4577_164290C.1
gagagactattatggggacaggacaatttgcaaaggaagggtacaagggcttcaattgggcgatatccaaagctcgagataaacatgacaattaaaacaacgaaactaaacatgggtgaaaactactactacaaatgtttggagactggcacataggcctacaaacaataaataagggctaactggaggttttcaacctacaaagcgacaaacatagcacgggttttttatctgatcggtacaaacttatttgtgccatgcttagcccaaaacgttt

SEQ ID NO: 70505 - DNA, 333 bp, Zea mays
  Clone ID: MRT4577_164291C.1
gggcacaatgcacacatccatacagttctcaagttcgaaatatacaaagtccccaagttctgataaatgcaaatcccgcgcattttttataaccccctaagacaacacaccctgcaaaaaaaggtgagccctccctggacacaaacctggagtacaaaccggggcttataaaggggttttcccttgaaagaaaacctttgccaaaaatttttttacccgaggggtcccttttacccccttttttaagaaaaaaacctggtgatctctccgattcttaggaatgagctccccagaaaccttcttggggggaaaaaacgcaccaaaaggcccccc

SEQ ID NO: 70506 - DNA, 897 bp, Zea mays
  unsure (1)..(897): unsure at all n locations
  Clone ID: MRT4577_164292C.1
gctattggggctaagaaaatgagatgaggctgctgataagggtagtgaaactttcgagcaggcagacaatgcacatgcagctagtggcaatgacacctttgttgacaatgacactcttggtgcagccatccttgttaatgatgacataccaggggagagggtggtggtgcatgatccggataatccttgtatggatattggaactgtgtacccaagcatgcgtgaatttaggttggctatgagacagtttgctataaatgaagagtttgagctgcaaatcgtgaaaactgacccgagtcgatttattggtgattgcaaaggggaggattgcccgtggcatatcgtgggccgtaggcaacccgatgggaagactgttatggtgacagtgttacttgatgaacacaattgtacctccagcgctagaagaaagaccactacacctactagtgcatgtgtggcatcaaaggctattcatctgttaaagaattcagccatgggaactaaagatgctgatatgtgaaatcagctagtatttattagtagcatgtatctgagatgtgaactgaccccctattagtagcatgtatctgagatgtgaactcgccccctattagtagcatgtatctgagatgtgaactcaccccctattatgtatctaagaaagtttgagatggctacttgccttttccaaaaaaaaaaaaaaaaaagcggccggggggggggggcatncacccaancttataggcctccactagtgcatggggggaggagccttcaacaaccaattgcccaattgcaacaacaatccttggcacatataaccctacaaaccatggcaacgcaacaacaacaacatgtttatgccatcactgagccacctagcaggggggaaccctg

SEQ ID NO: 70507 - DNA, 427 bp, Zea mays
  Clone ID: MRT4577_164293C.1
gacggattcggatttcatgggctgagcctcgaggacaggcccacttggacaccagatgattgcaattcatatatgaacatgctggcctgggcatttcttgcaaatgcggaattgaaattccccggggaattccgatctcattcaacatcgcctctcaggataggcctaatcagaaaccacatgatcgcaatcgatatatgaacatttttgcctacatagtcgttgtaactgtggaattggaattgcccgaggaatgatcatctgatttacttgggctctaggatccgcctccgtcgaaaacacgtcgtacaaactgatatatgagcacgccatgcctcttattgagcgacaaggtctgatggaccatacgcctgggatcctgtatcactgacctgagcgcatgcaggcatagctctctctctagcgc

SEQ ID NO: 70508 - DNA, 380 bp, Zea mays
  Clone ID: MRT4577_164294C.1
gggacgcgtgggcggacgcttggcctaggtctagatcgggaggggtcgacctaatttttatataaaaactttttaggttttttaggatattggtttgatgtgaacttgttatacacatgaaacagccaatttttatgggcgagaacctgatggcagatagagttatcattggggtcacttgtaagggacaccaaataagaacatgtgagccgacaaaaccgggaggcggggggtaatggaaaacctttgactctgatttggtcaaaaaagagtgatctattatgcttatcggagggttagccttggaatagtttcatggggaggttgggtacagcaggggaaagagtaccgtacataggactttgtccggtgtgaaaaag

SEQ ID NO: 70509 - DNA, 336 bp, Zea mays
  Clone ID: MRT4577_164295C.1
gggcttgttatttttgtttccaacttcatttcattctagaacattcctacacgatatcattgctgtcatacctaaaactaggcattgaacgtctactggatctacataaaaagaaatatatcatctacaatgctaaaaaaacattatacactgagggctgtggaaacatggctgaatgatcaaattttggagtaatctaaaacacaaataatggcccgtggtggagcacatgaatctttggacgtaagcaacaatgccccacccattcattaatcttatctggacaattgaacgggatatagctcaaagcacaagttgctggacactttagatctc

SEQ ID NO: 70510 - DNA, 425 bp, Zea mays
  Clone ID: MRT4577_164296C.1
ggctaggcaaacggagttatcaattcatttctgcaaaggaaacaaccaaaatacaactgggggggggaaccctttggactaccacacgacatcacatgggccaccaaacaccggatcgaaacaaaaatctaggaaaccgggcccctcccacaaaatggaaagcacaaaacagggaacccaaaggaaaaacccccccagtaccaggcccacccccaaaaggacagggcccccttaaccccccaaccccaacaaggggcggccctggcgcttgagggcgtaaaccacctccaagggggggaccggttttcgaccggcgtgcccaatgtaagggaccgcgtcccggatgaccttctcaagaaaaaacttgagcaccccccgggtctcctcgtaaaagaaccccgaaaagccctttacgccccccctcc

SEQ ID NO: 70511 - DNA, 601 bp, Zea mays
  Clone ID: MRT4577_164297C.1
cgctcctgtcgaacatattctctcagctgaggatgcagtttttttttcttttttattaagttttaatgacatcattgtgttatgattctccttctgtagatacatttggctggcgctgaatgtgttagaaataccatttcatttgaacaattgtggaacattagaataatcgcagcagaaccgtttacaccatgccaccatgttaatttttacattccttgaggtctaaagtctagaatagttaacaatttcctacactggagcttgcattacaaatttgaaattgttgataggatattccctagatttgcaaaaggttagtttgcatggacattggaggagttttattttggaagttgtttccttctttagccagagttcttccttggttcagttgtgtttacatggcgatacattactccctctgtttcggtatggagtagaattatggcattattttgtcccttaattccataaatggacatacatggtagaacggtttctcccaaggcctacacaatagtgaaacggagggactagtatctttaagtttttgtataatgccaatttgcttattctttttatttgccttatgggatgt

SEQ ID NO: 70512 - DNA, 202 bp, Zea mays
  Clone ID: MRT4577_164298C.1
cgcacgcgtaccaccacaacttcaattttcccttgtcaccccaactaacaaacggggaggtgtccatggttaacagatcatatcacccaccaccgtgcccaaaaccataaaccatccacgtcaacaaccaccggaacaactacatgaacatgaagaggatcctcaacatcgtcctcaacgacaaaacaccctctgtcaccgc

SEQ ID NO: 70513 - DNA, 397 bp, Zea mays
  Clone ID: MRT4577_164299C.1
cctctatacggccgccctttttttttttttttggaacaatacttttttcttttcatttcaaatgcacaatcaggtaattgatcacactgacactggcacccatggggatgcgggacacattatgactcaatcatcgccggtaaatgactcaactagctagctagccaccggctatactacaggacatagtttattcagtgggggacacctcacccagcagcgcaggggcatggaatcgggtgctgcaggccgcacatcgccgtaagatgctgcgctatttgcgccgacaacagccccaggaactggccgctttgcggctgatgctgcaagatggactggaggaccaagccgaaaaacggctgataacggggctgcgggtccacctgcctgagctgct

SEQ ID NO: 70514 - DNA, 309 bp, Zea mays
  Clone ID: MRT4577_16429C.1
aatatttcccccatcattgtttgatgttatgctccacttgtcggtacatttacctgatgaggcaatacttagaggaccagtccaatatggatggatgtaccctgtagaaagaaggttatacactttgaaacattctgtgaggaacatggcacgacctgagggttcaattgcagaagcatatgttgctaatgaatgtttgcatacatgttcgaggtattttgacgatcttgagacaagacacaattacgagggaaggaatagagagcatgttgatatgagtaagggtgacttatctgttttccagcatgg

SEQ ID NO: 70515 - DNA, 435 bp, Zea mays
  Clone ID: MRT4577_1642C.1
cctcctttttttattttttttttttttttttgggggtttttttttttttttgggggtttttctcctttccttgccattacaaaaggcgacccaggaaatgggtgacacggacaccgccccccatggggaggcgggacacaaaattactcaacaatcgccgctaaaaaaccaaactagccaccttggaagcaagtcaacggctccattacatcattaccacagcccatattttcctcaaaaaaaaacacccccggccgttgcttttcaaggggagggacccgcctgttgcaactgaaggccccacaacgcccccaagttgcttggcccccctggggcccccccaaagccccaagctgcccccccggttgttgctaccggaaggaccccaggaccacaccctttgttcccctggcccggtgcagaggccccccctcc

SEQ ID NO: 70516 - DNA, 1039 bp, Zea mays
  Clone ID: MRT4577_164300C.1
ctttttatggtaagacgtttggttttgatacagctgtagaagaagctcagcgtgctatcaattctgcctatatagaggcacgtagtgcataccacggaattgggttagtaaaattaatgggaagaagtagtggattcatagccatgcatgcttctctttccagtggacagattgatgtttgcctgatacctgaggtatccttcacacttgatggagaacatggtgtcttgcgacaccttgagcatttacttaatacaaagggattttgtgtggtttgtgttgctgaaggtgcagggcaggatttactgcaaaaatcaaatgcaactgacgcttcaggaaatgtgatacttagtgactttggtgtccacatgcagcagaagatcaagaagcatttcaaggacatcggtgttcccgctgatctaaaatacattgatccaacatatatggttcgggcctgccgggcaaatgcatctgatgctattctctgcaccgtacttgggcaaaatgctgtccatggagcatttgctgggttcagtggcatcacgtcaggtgtttgcaacacacattatgtctaccttcccatcacagaggtcattacaacaccaaagcacgtcaaccccaacagcagaatgtggcaccgctgcctcacatccactggccagccagacttccattgactacttcattaacacctgagagcaaggcgccaggagaatatttaatcccacaagggactgctaacaggaaacttgaataaatctggctaacccaaaattttgtgaggctggaggagctcataacgaaattgccagagccaccccctggtcatccagacgttgtaagcatgcataccctttctattggtttgcaatcccaagtgaaattaaaagttagaagttgtttgtgctgcaaacaattcaccataatcccaccagtacaaaactggctccagccttgtgagatgttttattgatgatgtactatgcataataggcaattggatattcttactgggaaaaaaaaaaaaaaaaaagcggcc

SEQ ID NO: 70517 - DNA, 481 bp, Zea mays
  unsure (1)..(481): unsure at all n locations
  Clone ID: MRT4577_164301C.1
ccgcggncgcgtgggcatgccctgtgcgaccggcggcgtatatagcaccacatggaggtggggaggttcgggttctgagcgacacgtcggagtgcagatcaagctatggagcttttgcgttgtgtagtgtgttagtggtgatgtgctcacgtgtactactgacctgatctctgatggggatgagggggcaaaatcgctcgcttgtgtgtttgttgcacgacgaagtgtttctggtaaaaaggtcttgatgccttaaaagcggaatgaaagtgcgacccctgcaactgctgatcacatcgatcgacgaccatggatatgattattatatatataggttgtgctgtttggaggatcaatgataagctacgcgggcctgcctgccataaattgttatttgggtggaccttaatttgaaagaaagggccgcagttttatacagtttggtatgtgtaaaatccctgcgtgacccaagttaatgggc

SEQ ID NO: 70518 - DNA, 282 bp, Zea mays
  unsure (1)..(282): unsure at all n locations
  Clone ID: MRT4577_164302C.1
taccggtccggaattaattcccgggtcgacgagctcactagtcggcggccgcccttnntttttttttttttttttttttttttttttttttttttnnggaaaaaaaaacccacttggatgaaaaagggagggtccgggttccgtacaaagttctacactccgggtatgaaaactcttcttatgacaaggtcagagtttaccgaaaagcgaagttcccctctcacttaaacataactgacttgctcacaaacgactggaacttaacacaaacacacagggggg

SEQ ID NO: 70519 - DNA, 202 bp, Zea mays
  unsure (1)..(202): unsure at all n locations
  Clone ID: MRT4577_164303C.1
ccggggcgaaaaaattttccccccttttttttaaaacaggaacgaagggggccctttgcctttgaagttggttttggtgcgtacaaaaataaggggtcccccgcttccagcctataaaaaaagtgcttgcctatttttttaggattacatccccggggccccttccnatttccctaaagctcctgaattcgtgggcccttta

SEQ ID NO: 70520 - DNA, 268 bp, Zea mays
  Clone ID: MRT4577_164304C.1
agcagcaggcagcagccgagcaggtccaagaagatgctcgatccgtctcctcttttagagccaggaaccaagaaccttgtgtaaagagaggatctttctttctttttctcctgctttgtgctcttgttcttttagccgttgcaggagcagagagagagctatgcaggctagatgatcacggcgccgcgctgttccgatgtaatgcgagcatttagtttctagtatacaggaacctgaactgtttatctcttattaacatttattttca

SEQ ID NO: 70521 - DNA, 340 bp, Zea mays
  Clone ID: MRT4577_164305C.1
gggaccccccgaccaaaattaaaatgccccaggtttgttccccaaaaaagtagggaaggcttgccagggtttcacccctcttaaatttgctgttttaaaaaaaccaccatcccctaccttggaaaagttaaaaaatttttggggggaataaccttgggggccaaaggggggacaacccaacactttttttttaacatttttggggcccctacagttcccttcacccatatttaaccctaaaacgaggggccgggctttttgggagactttggtttttcaaaattaaaaaggttttcccttggaagaaaaccttaacggggtttttgtttaaccaacgggg

SEQ ID NO: 70522 - DNA, 266 bp, Zea mays
  Clone ID: MRT4577_164306C.1
caccgtcgtcacctactttatctcactactcaattgaaacggcgccataagtatgtagagccttgctctctgactcctggacgtctactcaaacagccaagcacgctcccagacctaccgatcattacactacctcatattccacttcgactattccccaaaagcaacgatcatcaataaccataaccaatgaataagctgacaccatgataatcctcagccatcacatagactatcgtactgaacattctgagacctgatgcacc

SEQ ID NO: 70523 - DNA, 429 bp, Zea mays
  Clone ID: MRT4577_164307C.1
ccagcgtttttttatctggcgattggtaatctccctggggctcgagaaaaaccattagaagcttgtggtgtgtgctaccccacctgcgacaccggtctcccccagggaaggctttgttcttcccctgtctttttagcgctcgacgcccaatactattgtgtgtgttcttgagggacttaaccgtggggggggcgaggaccctgcgacttttgcccagtgttggcttgaaggtccgaaacatgaacctcgtctttctcgcggatcttcaggatcggttgtgaattggtgcgttcagtgatcacttcctctggtagacgatcggaattgatctcctagtgatgctggtggatgaagcttaaatgggtgaataaaccaattgcctcccttgaagaaggtcccccagaggtcttccattaacaacactaactt

SEQ ID NO: 70524 - DNA, 1093 bp, Zea mays
  Clone ID: MRT4577_164308C.1
gcacgagggggactcttgttagaatctacaatgcagctgaaggcaatctcctgcaggaagtaaggagaggtgctgatagagcagaaatatatagcttggctttctcgaatgatttgcagtatttggctgtctccggtgataaaggaacaatacatgtcttcaacttaaagataaatgtgggatcaactgcaaatgacaagcctatgccttctccggatcctgaagttcctcacataaggccctctctttcattcattaagggtgtgctgccaaaatattttcactctgaatggtcagtagcccaattcaggctgcaggagggtgaacactatattgttgcatttggacatgagaagaataccgtggcagttgttggcatggatggaagcttctacagatgccggtttgatccagtcaacggaggagaaatgctgcagctggattgctacagtttcctgaaaccgtcgggtcaaccgtagtccctagtccgtagcaacgcaacatactgttagcatcaccctcaatctattcatgcccaccaccgcggtaccaggattgtacattatctttgtgtgccttcgttgactcgtgggcttagcaataataataatattttatttgtaaatatatatatatatcttgttggctctgctgtttgttctgcggaagggctaaatcacccgtctgcagacgaacgtagtagaatgcatcgttatttatttcatgaataaataaagtaggctagcgttgtatttaaaaaaaaaaaaaaaaaaaaaaaaaaaaaaaaaaaaaaaaaaaaaaaaaaaaaaaaaaaaaaaaaaaaaaaaaaaaaaaaaaaaaaaaaaaaaaaaaaaggaagggggcgtccggttttaaaaaatcaaagtttacgtccccgggcatgcaaagtcttttctttttttttagggtaacccaaatttaatttcctgggcctttaattttacaacgtctggaaaagaaaaaaccttggcctacccaaattaattcgcctagaagaacattcccttttcgcgagttggtgaaaaaaaaaaaaggcccgaacggatttcccttccaaaaatttgcccaactt

SEQ ID NO: 70525 - DNA, 1827 bp, Zea mays
  Clone ID: MRT4577_164309C.1
cggccgcgtgggtacatttttacctttccctatttcatagtcaccctttgcaattaagggagtacaataatgtcattttactgcgtagacgtgtcgcacacatcttctcttcgtagaagcttcttatgtctcctctccttcgaagtcctctttatcgacgacaaagctttgctttcaatgccttcggcttcatgcacctttggctcattcagatctaccgaagctttttcaaggagagcggtgatcttcctttggccttcattagctttctggacctgaaaaaccatctaaatattgatttcatcattttggaccttcgactagagacctccccaacaacaaccaaatagaaacaattgctggtttacaaatgccattaaaccctggttagagaagtgcaaatataattctaatgcagtcttagacatacttcacgcgagtgtgaaatgtaacgttatatacttgtatactgaccttgttacttaatcattgtgatgttttataatttttttgttatgatttcatgtttaatagctctgtacagcatgtgtgatgataacattgttacttcctgtgatgttatatcctctctatgtgagtggtgatggcctcatggtaagtctacttctagttctatgtgtttacattattttaattttggcaatcttcacaatctaaaagtctgtcagaacaggtcatggaagtccctgaaatatctcctatgtcagaatacttgtccactcatgatgttattctttctgtggatggtctgaaaataaccagaactgatgattggatcaagattctgaaccaaggtactacagcgaaatctagggatcctgaattccttgaaggctctcatagatatgttgccactagttctaccaagggttattgcgtgcccgattcatggatagatgcaagcaaaaatctctggcagataagagacaagctgccttgcccagatgaactgatagccttcgaaaaagttatctgtaacgtctcaaccattttgacagagaagactagcataggtagtgaccagaaggaagttgagggaaaatattgtttgattgcgaaagatgtagtaaagcttagaagatgtggaaacggatggcacatgactgaagatgatgaaagtagctgtgcatgttttgaggatgagcactgtttggtacctgttctgaacccaggcttttcatggattgaggtctcctatgccaggccatactctttgagatgtttacaaaaaggaggaaatttgttatcatcacatactgcaaatagtaactttggacagagtccttgtgaaggatcttttgtttatgtgggtgatctgtcatcagcagcacgttcggttaggttatcccgctaccgacctcgatgggcacttctacttttcattgcagacatcccatatatcttggaaaatggtttaagtagcttgcttcatgcatctgcagcattggctgtaatcaattgcctaccggtgtattttctggatggtgaagcgattctggagactaccttaagctatgtagcttggtttaccccaagactgcaacgcagaattctaaaagtatgcagcgtggtgtggacgggtttattagtcattactttctcaagtatttgttattccacagtgctacattatggcgtatagcaaataacccatgtaattttgtcttgaacaaagagaagatcattttaatggaacatgccaactgtactctgtccattgtaaattataagttgttttgacttttatataaaaagaaaaaaaaagaaaaaaaaaaaaaaaaaaactcgaggaagggcgccggtacc

SEQ ID NO: 70526 - DNA, 670 bp, Zea mays
  Clone ID: MRT4577_16430C.1
aatcaccttctccaggaggatcttcagctcaaggactatccccacaatgatgcaatggtcatatcttgtgtcatcaagggatttctggtccacaatatcctggtggacacaggtagtgcaacagatatcattttctcgaaggcttttagacaaatgcaagagccggatgacaagatacatgatgcaacacaccctctttatggtttcggaggaagacagattgtggcactcggcaagataaccatgccggtcaccttcggctacgttcacaacacaaggacagagcaggttgtcttcgacattgttggtatggaataaccatacaatgcaatcgttggtcgaggaacactcaatgcttttgaagcaatacttcacccaacatatctatgcatgaagataccttcggaacaagggcccattgctattcatggaagtcaagaagctgccagaaaggccgaaggaaattggacatactcaaaagcgatccccaatatagatagagccgaggcttgtgaacagtccaagtacagaagagagaaggctgcttcggctgatcagccgaagcccatgcttctatgcgaagatatagcagagcagaaggtattgctggggtttcaactatctgaggagcaggagaaaactttgataatgtttttattcagcagcaaag

SEQ ID NO: 70527 - DNA, 767 bp, Zea mays
  Clone ID: MRT4577_164310C.1
ctcccacgatcaacagcagtccgcatcacgcaccccactccaccgcccgcaaccgcaagctcagattccctcccaccccaccccaccgtcccgctcactccagcccagcccgcgtccccacagcccagcgacagcgagcaccggctgcatccagccgccgcggcgggtcacggcgggccacctctggcccgagagcaagaagccgaggagggctgcagccggcaggaggagagcccccgtggagcaggagcaggaggaggatttcgaggccgacttcgaggagttcgaggtggagtccggcgagtcggagctcgagtccgaggacgagcccaagcccaagtccttcgccgcccccagcagcgcgctcgccagaggtggactaaacactggtgcagctggtgtcgatggccctgctgcaaattcagttaaaaggaagaggaagaaccagttcaggggtatccgccggcgcccgtggggcaaatgggctgctgagatcagagatcctcgcaagggcgtgcgcgtctggctcggtacattcaactctcccgaagaagctgccagagcttacgacgccgaggcacgcaggatccgcggcaagaaggctaaagtcaacttcccggatgaggttcctacggcggtttctcagaagcgccgtgctgctgagcttgcctctctgaaagcgcctaagatggacgttgaggaggagaagccgatcatcaagccggcagtgaacaatatgaccaactcaaacgcatatctctaccctg

SEQ ID NO: 70528 - DNA, 648 bp, Zea mays
  Clone ID: MRT4577_164311C.1
ccggccgggcccttccgcactttccctccccctcctcctcctcccctttccagtccccaccccagcgaagcttccaaagccgacccaaccccaacgtgcgcccggcgcgatcgagcagacagctgaccgggccctccccgccccggaggcgaactcggagtcatggcagacagacgagctcgttgatggacatcttctgccccccaacttcagagtggggtggctcatgaggaacatggagaccaaggagctggtctccatgtagtacatcccccggctacaccagatgaacaataatgtgtcgggggagatcatccaccagcggtcggtgcgacatgccccacatgatccggtttgagggggtgtggatgacgtacgacgcacctggtgagggggctggataacttcgacggagtggagttgctggaccgattatgcgaggtcatgatggtcatggacgaggaagtgaattacttctctcctatacgtgatgtgtggaggaatcttactggcactacaagcattcggacaccgaaaattactcatggagaacacgctgctgaacctgagacagacgtctcaactattaatgtgcggctccgactactcgatatagaggttgtggaaaacaaacttgaggaccttgat

SEQ ID NO: 70529 - DNA, 1503 bp, Zea mays
  unsure (1)..(1503): unsure at all n locations
  Clone ID: MRT4577_164312C.1
ttggggtacccctcgagggcancggcacaagggggaactcgaggccggccgggctctcccacgcactccgcaattccgcatcacgcaccccaccccaccgcccgcaaccgcaagctcagattccctcccaccccaccccaccgtcccgctcactccagcccagcccgcgtccccacagcccagcgacagcgagcaccggcggcatccagccatgtgcggcggcgccatcctgtcggacatcatcccgccgccgccgccgcggcgggtcacggcgggccacctctggcccgagagcaagaagccgaggagggctgcagccggcaggaggagagcccccgtggagcaggagcaggaggaggatttcgaggccgacttcgaggagttcgaggtggagtccggcgagtcggagctcgagtccgaggacgagcccaagcccaagcccttcgccgcccccagcagcgcgctcgccagaggtggactaaacactggtgcagctggtgtcgatggccctgctgcaaattcagttaaaaggaagaggaagaaccagttcaggggtatccgccggcgcccgtggggcaaatgggctgctgagatcagagatcctcgcaagggcgtgcgcgtctggctcggtacattcaactctcccgaagaagctgccagagcttacgacgccgaggcacgcaggatccgcggcaagaaggctaaagtcaacttcccggatgaggttcctacggcggtttctcagaagcgccgtgctgctgggcttgcctctctgaaagcgcctaagatggacgttgaggaggagaagccgatcatcaagccggcagtgaacaatatgaccaactcaaacgcatatcactaccctgccgtcgtcggccacaacatcatacccgagccattcatgcagactcagaacatgccattcgctcctctggtgaattatgctgccctcgtgaacctgtcttcagaccaaggcagcaactcgttcggttgctcggacttcagcctcgagaacgactccaggacccctgacataacttcggtgcctgcacccgttgctaccttggccgccgttggtgagtctgcgttcgtccagaacaccgccggccatgctgtggcgcctcctgcgacggggaacgctggtgttgatctcgccgagttggagccgtatatgaatttcctgatggacggtggttcagacggctcgatcagcactctcttgagctgtgatggatcccaggacgtggtcagcaacatggacctttggagcttcgacgacatgcccatgtctgctggtttctactgaggctgaggcccagcgactggtgcttgtgtacatagggggggacaaagggtaagagcctgcagtaacagagattggctctttctggtacttgcaatttctatcccttcaactctttcttccgcccccgtgtttcaggaataatgttctggagatgaagaaacgcttgcgtgggcgtgcctgcaggcacgcgtgtagtt

SEQ ID NO: 70530 - DNA, 456 bp, Zea mays
  Clone ID: MRT4577_164313C.1
agaagcgtgctccttggtaagctcaactcaatgccgcagctaaagtgcggatacagatggtttacaaaaaactttagacaatcctaattaacgggcgagaacatgaataacaagatgaaagaaggaataacaatgccaaaagtaaacttaaccaaataataacaaaacaaaaaaaaagtataaaaaaaaattaaataaataatgtaagaaaacttaaaaaaaaaagaaataaaaaataatataaatacaaataataatgataaatataataaaaaaaaagaaaatataaataaaaaaataaaataaaacaataataaaaataattaaaaaataatatatataaacataaaaataaataaaaaaataaaacaaaaataaaaaatataataatatatataaaataataataatataaaaaaaaaaaataaaaaaaataagaaatacaataaataataa

SEQ ID NO: 70531 - DNA, 3025 bp, Zea mays
  Clone ID: MRT4577_164314C.1
cggacgcgtgggttcttacacaccaatgcaaacaaacaaacacacacacacagcacgcgatcccgctgtcccagcagctggagtacttcagggagtaccagacgaagctggcggcggtggccggcgccgggcaggcgcgctccatcctcagcggcgcgctgtacatcgtcagtgccggcgccagcgacttcgtgcagaactactacataaacccgctgctgttcaagacgcagacggccgaccagttctccgaccgcctcgtggccatcttcggccgcaccgtgcaggagctctacggcatgggggccgattgggtacctcgccggccgggactacttcgcgcccgtgccatccgcccactcctctcccacgcagtccgcaattccgcatcacgcagaggcagagcgaccaacccagaaccccaccccaccgcccgcaaccgcaagctcagattccctccccaccccaccccaccccaccgtcccgctcactccagcccagcccgcgtccccacagcccagcgacagcgggcaccggcggcatccagccatgtgcggcggcgccatcctgtcggacatcatcccgccgccgccaccgcggcgggtcacggctggccacctctggcccgagagcaagaagccgaggagggctgcatccggcaggaggggagcccccgtggagcagcatgagcaggaggaggatttcgaggccgacttcgaggagttcgaggtggagtccggcgagtcggagctcgagtccgaggccgagcccaagcccttcgccgcccccaggagcgcgctcgccagaggtggactaaacactggtgcagctggtgtcgatggccctgctgcaaattcagttaaaaggaagaggaagaaccagttcaggggtatccgccggcgcccgtggggcaaatgggctgctgagatcagagatcctcgcaagggcgtgcgcgtctggctcggtactttcaactcccccgaagaagctgccagagcttacgacgccgaggcacgcaggatccgcggcaagaaggctaaagtcaacttcccggatgaggttcctacggcggtttctcagaagcgccgtgctgctgggcctgcctctctgaaagcgcctaagatggacgttgaggaggagaagccgatcatcaagctcgcagtgaacaatatgaccaactcaaacgcatatcactaccctgccgtcgtcggccacaacatcatacccgagccattcatgcagactcagaacatgccattcgctcctctggtgaattatgctgccctagtgaacctgtcttcagaccaaggcagcaactcgttcggttgctcggacttcagcctcgagaacgactccaggacccctgacataacttcggtgcctgcgcccgttgccaccttggccgccgttggcgagtctgtgttcgtccagaacaccgccggccatgctgtggcgtctcctgcgacggggaacactggtgttgatctcgccgagttggagccgtatatgaatttcctgatggacggtggttcagacgactcgatcagcactctcttgagctgtgatggatcccaggacgtggtcagcaacatggacctttggagcttcgaggacatgcccatgtctgctggtttctactgaggctgaggcccagcgactggtgcttgtgtacatagggggggacaaagggtaagagcctgcagtaacagagattggctctttctggtacttgcaatttctatcccttcaactctttcttccgcccccgtgtttcaggaataatgttctggagatgaagaaacgcttgcgtgggcgtgcctgcaggcacgcgtgtagtagctgcggtattagtatatatgcttagatgttcagtcacttcctttaagtacaatttggcgctggacatgtaccttattttactatgtatccgtgacaacagctatgtgtctgcgtccgcccggtctgggtactaccaccacacggcacttatgtatcacgcgatcccgctgtcccagcagctggagtacttcagggagtaccagacgaagctggcggcggtggccggcgccgggcaggcgcgctccatcctcagcggcgcgctgtacatcgtcagtgccggcgccagcgacttcgtgcagaactactacataaacccgctgctgttcaagacgcagacggccgaccagttctccgaccgcctcgtggccatcttcggccgcaccgtgcaggagctctacggcatgggggcgcgccgcgtcggcgtcacgtcgctgccgccgctgggctgcctgccggcgtccatcacgctgttcgggcacggcgccgccgggtgcgtgtccaggctcaacagcgacgcgcagagcttcaaccggaagatgaacggcaccgtggacgcgctggcgcggcggtacccggacctcaagatcgccgtcttcgacatctacacgccgctgtacgacctggccacggacccccagtcgcagggcttcgcggaggcccggcggggatgctgcgggacgggcacggtggagaccaccgtgctcctctgcaaccccaagtccgtcgggacgtgccccaacgccacgtcctacgtcttctgggacgccgtccacccgtccgaggcggccaaccaggtcatcgctgactcgctcatcaccgagggcctcatcctcgtcacgtaatcatgcttttgttttggcttcaaatcgatcagactacacaaaagtcgtcgttcctaaacgtatactatgcctgtaaatttattcctcttgtttttcttatttgcgttgattaatgttttcggaagtataagcaacaacatgaatgaatgaatgaatgaatgaatggactcctattgttgtcaagttcaacgtcacataaaaaaaaaaaaaaagcccgacgcaacacacgtacaagaggcagattttactcaagtcaaatgtagaaaaagttcatcgactgatgttttggtatcatccgagaaaagtaagacaggtttgtcgtggtcatctcaccacaccgtatt

SEQ ID NO: 70532 - DNA, 1420 bp, Zea mays
  Clone ID: MRT4577_164315C.1
aggccggccgggcctcgggagaggtggtacttcctctcctccggataaaagataaggagtgtctctcctctctttcagctaagtccctgccccctctctttttcttacattcaggtcctcgcagctcctctcttttttcttgtttctttctttcgatctgcgagccgtccaggtccagtactctcctttccgtgaaggaactcttgcagccggcccctctggtttcctcgaattcttgttccccggtccctcctcctgtccccgcgtagatccgtccgtccgaggagcacaccgtccccacccccatgtttacccaccagttcctctgacggccgccgtgctccgatgaagctgagcgtgctccgtatccgccgctcccactccttctccgtcgccttcctctactggttctacgtcttctcatgaacgcatcgcccctctccacctgctgatccttcgccgtctctccctctctctttctctctctctagatagtctttcgaatccatctctagggctcttgtttctccccatcctccccccaccccaccccccaccaaacagattcaatccgacaagacaagcatccatgtcgtcgtcacgccggagctcgagccccgacagcaacgacacgacggacgagcgcaagcggaagcggatgctgtccaacagggagtcggcgcggcggtcgcgcgcgcggaagcagcagcggctggaggagctggtggcggaggtggcccgcctgcaggcggagaacgcggcgacgcaggcccgcaccgcggcgctggagcgcgacctgggcagggtggacggcgacaacgcggtgctgcgcgcccgccacgccgagctggccggccgcctgcagtcgctgggcggcgtcctcgaggtgctccagatggccggcgccgccgtcgacatcccggagatggtcaccgacgaccccatgctccgcccctggcagccgtccttccccccgatgcagcccatcgggttctgagaatctgagcctcagccggcgggagagagccaatttctgtcgtcgtgccgctgtctatctcgtattggtatatctattcataaatcatccttgtcatggtttgctcttcttgtcagtgttataaatttgcttcttgttagtgttataaatttggccatcggaaaggatgtgtttgtagttgtaatatcttgtttggagttgtaatatcttatcttgcttatgaaatcgaatatgcctatatatatatgttatgctgtacgagtatgtggctccaaatttgtgagccttctgtctgttatggtgaggcgatgaatccaatttgtgagcacacatgaaccaaaaaaaaaaaaaaaaaagcggccttctaactaccgggctcgtttctatataaaaaaaaaaaaaaaaaaaaaaaaaacccccccc

SEQ ID NO: 70533 - DNA, 1877 bp, Zea mays
  Clone ID: MRT4577_164316C.1
ccggccgggggacaggctccgccacgctccatcgcccacccaatcatccacgagcccgttgtcggcttgtcgccgcgcccgcacctcagcgtctactctactacttaacacgcgcccgtgccatccgcccactcctctcccacgcactccgcaattccgcccacgcaccccaccccaccgcccgcaaccgcaagctcagattccctcccaccccaccgtcccgctcactccagcccagcccgcgtccccacagcccagcgacagcgagcaccggcggcatccagccatgtgcggcggcgccatcctgtcggacatcatcccgccgccgccgccgcggcgggtcacggcgggccacctctggcccgagagcaagaagccgaggagggctgcagccggcaggaggagagcccccgtggagcaggagcaggaggaggatttcgaggccgacttcgaggagttcgaggtggagtccggcgagtcggagctcgagtccgaggacgagcccaaacccaagcccttcgccgcccccagcagcgcgctcgccagaggtggactaaacactggtgcagctggtgtcgatggccctgctgcaaattcagttaaaaggaagaggaagaaccagttcaggggtatccgccggcgcccgtggggcaaatgggctgctgagatcagagatcctcgcaagggcgtgcgcgtctggctcggtactttcaactcccccgaagaagctgccagagcttacgacgccgaggcacgcaggatccgcggcaagaaggctaaagtcaacttcccggatgaggttcctacggcggtttctcagaagcgccgtgctgctgggcttgcctctctgaaagcgcctaagatggacgttgaggaggagaagccgatcatcaagctcgcagtgaacaatatgaccaactcaaacgcatatcactaccctgccgtcgtcggccaccacaacatcatacccgagccattcatgcagactcagaacatgccattcgctcctctggtgaattatgctgccctcgtgaacctgtcttcagaccaaggcagcaactcgttcggttgctcggacttcagcctcgagaacgactccaggacccctgacataacttcggtgcctgcgcccgttgccaccttggccgccgttggagagtctgcgttcgtccagaacacggccggccatgctgtggcgcctcctgcgacggggaacactggtgttgatctcgctgagttggagccgtatatggatttcctgatggacggtggttcagacgactcgatcagcactctcttgagctgtgatggatcccaggacgtggtcagcaacatggacctttggagcttcgacgacatgcccatgtctgctggtttctactgaggctgaggcccagcgactggtgcttgactgcttgtgtacatagggggggacaaagggaataatgttctggagatgaagaatcgcttgcgtgggcgtgcctgcaggcacgcgtgtagtagctgcggtattagtatatatgcttagatgttcagtcactttctttaagtacaatttggcgctggacatgtaccttattttactatgtatccgtgacaacagctatgtgtctgctccttttattttcttgtctttgcttcaaaaaaatggctctgaacattgcgagtttgtactttgtagacaatatatatatatgtgtgtgtatgtgcttggtttgcttcatccttcgatgcaatgtgagtagtgttctgtatgcaggcttgcatgtgctgatatgcgtgcagcacacgtctatgaaaaagcattcatgcgaagtagatggataatagcaaacaaattttcttcataatggatgcataatccacttctttttgag

SEQ ID NO: 70534 - DNA, 267 bp, Zea mays
  Clone ID: MRT4577_164317C.1
ctcctccgctccctcccttactcgcgctcggcacgcaggccacgccggcggtggtcaggctcgggctccgcgcgacggcgtcagtgtcgtcccctcccacctctcggcagtcgcctcgcgccctcgcctccggtcctccatgcaccagccggctactctgcgctgagctgattctcccattcaatagagacagcgacgggcatagctaccatacgcaacactgagcccatcttgcttggcattctctctgctgttggaacaattaca

SEQ ID NO: 70535 - DNA, 1345 bp, Zea mays
  unsure (1)..(1345): unsure at all n locations
  Clone ID: MRT4577_164318C.1
gccggccgggccgggttccccatctccggataaaagataaggagtgtctctcctctctttcagctaagtccctgccccctctctttttcttacattcaggtcctcgcagccgcagctcctctcttttttcttgtttctttcgatctgcgagcagtccgtccaggtccagatccagtactcttctttccgtgaaggaactcttgcagccggcccctctggtttcctcgaattcttgttccccggtccctcctcctgtccccgcgtagatccgtccgtccgaggagcacaccgtccccacccccatgtttacccaccagttcctctgacggccgccgtgctccgatgaagctgagcgtgctccgtatccgccgctcccactccttctccgtcgccttcctctactggttctacgtcttctcatgaacgcatcgcccctctccacctgctgatccttcgctgtctctctctctctctctcttagatagtcttttgaatccatctctagggctcttgtttctccccaccccaccccccaccaaacacaagtccccttgttcaatccgacaagacaagcatccatgtcgtcgtcacgccggagctcgagccccgacagcaacgacacgacggacgagcgcaagcggaagcggatgctgtccaacagggagtcggcgcggcggtcgcgcgcgcggaagcagcagcggttggaggagctggtggcggaggtggcccgcctgcaggcggagaacgcggcgacgcaggcccgcaccgcggcgctggagcgcgacctgggcagggtggacggcgacaacgcggtgctgcgcgcccgccacgccgagctggccggccgcctgcagtcgctgggcggcgtcctcgaggtgctccagatggccggcgccgccgtcgacatcccgggcggggtcaccgacgaccccatgctccgcccctggcagccgtccttccccccgatgcagcccatcgggttctgagaatctgagcctcagccggcgggagggagccaatttctgtcgtcgtgccgctgtctatctcgtattggtatctattcataaatcatcgttgtcatggtttgctcttcttgtcagtgttataaatttgcttcttgttagtgttataaacttggccatcggaaagtagtaataatgatcagttcgtcgtggttctcaactttgtgtggtgaatgtgaatgtcaaaaaagatgtgtttgtagttgtaatatcttgtttggagttgtaatatcttatcttgcttgtgaaatcgaataggcctannnaaaaaaaaaaaaaaaaaaaaaaaaaaaaaagtaccttcggccggcgaccaccgctaa

SEQ ID NO: 70536 - DNA, 2594 bp, Zea mays
  Clone ID: MRT4577_164319C.1
aggatatgatgaccctttccccagatgatcgacatgaacatactgagcgctataatttcgcatggagacagtggggccctcgcgtcgggccgggcgggacaccagggcacgacgtgcgttgcgtcgtgagtgtttgtgtttcagagctgagagtctgagactgagagagatagaggtgatgatggctctgcaggcgcaggggacgcgggtgccgctggtcctggcgctcttcctcctcctggccggttgcggcagcgaggcgcagccgctggtgccggcgctgtttacgttcggtgactcgtcggtggacgtcgggaacaacgactacctccacaccatcatcaaggccaacttcccgccatacggcagggacttcgccaaccacgtcgccaccgggaggttctgcaatggcaagctggcgaccgacatcaccgccgacacgctggggttcactacctaccctgccgcgtacctcagcccacaggcgtcggggcagaacctcctcatcggcgccaacttcgcgtccgcggggtctgggtactacgaccacacggcacttatgtatcacgcgatcccgctgtcccagcagctggagtacttcagggagtaccagacgaagctggcgggcggtggccggcgccgggcaggcgcgctccatcctcagcggcgcgctgtacatcgtcagtgccggcgccagcgacttcgtgcagaactactacataaacccgctgctgttcaagacgcagacggccgaccagttctccgaccgcctcgtggccatcttcggccgcaccgtgcaggagctctacggcatggggggcgcccccgcggacgggcgggctctcccacgcactccgcaattccgcatcacgcagaggcagagcgaccaacccagaaccccaccccaccgcccgcaaccgcaagctcagattccctccccaccccaccccaccccaccgtcccgctcactccagcccagcccgcgtccccacagcccagcgacagcgggcaccggcggcatccagccatgtgcggcggcgccatcctgtcggacatcatcccgccgccgccaccgcggcgggtcacggctggccacctctggcccgagagcaagaagccgaggagggctgcatccggcaggaggggagcccccgtggagcagcatgagcaggaggaggatttcgaggccgacttcgaggagttcgaggtggagtccggcgagtcggagctcgagtccgaggacgagcccaagcccttcgccgcccccaggagcgcgctcgccagaggtggactaaacactggtgcagctggtgtcgatggccctgctgcaaattcagttaaaaggaagaggaagaaccagttcaggggtatccgccggcgcccgtggggcaaatgggctgctgagatcagagatcctcgcaagggcgtgcgcgtctggctcggtactttcaactcccccgaagaagctgccagagcttacgacgccgaggcacgcaggatccgcggcaagaaggctaaagtcaacttcccggatgaggttcctacggcggtttctcagaagcgccgtgctgctgggcctgcctctctgaaagcgcctaagatggacgttgaggaggagaagccgatcatcaagctcgcagtgaacaatatgaccaactcaaacgcatatcactaccctgccgtcgtcggccacaacatcatacccgagccattcatgcagactcagaacatgccattcgctcctctggtgaattatgctgccctagtgaacctgtcttcagaccaaggcagcaactcgttcggttgctcggacttcagcctcgagaacgactccaggacccctgacataacttcggtgcctgcgcccgttgccaccttggccgccgttggcgagtctgtgttcgtccagaacaccgccggccatgctgtggcgcctcctgcgacggggaacactggtgttgatctcgccgagttggagccgtatatgaatttcctgatggacggtggttcagacgactcgatcagcactctcttgagctgtgatggatcccaggacgtggtcagcaacatggacctttggagcttcgaggacatgcccatgtctgctggtttctactgaggctgaggcccagcgactggtgcttgtgtacatagggggggacaaagggtaagagcctgcagtaacagagattggctctttctggtacttgcaatttctatcccttcaactctttcttccgcccccgtgtttcaggaataatgttctggagatgaagaaacgcttgcgtgggcgtgcctgcaggcacgcgtgtagtagctgcggtattagtatatatgcttagatgttcagtcactttctttaagtacaatttggcgctggacatgtaccttattttactatgtatccgtgacaacagctatgtgtctgctccttttattttcttgtctttgcttcaaaaaaatggctctgaacattgcgagtttgtactttgtagacaatatatatatatgattgtgtgtatgtgcttggtttgcttcaaaaaaaaaaaaaaaaaagcggcctcatccttctatgcaaaaaacccacgcgtccg

SEQ ID NO: 70537 - DNA, 851 bp, Zea mays
  unsure (1)..(851): unsure at all n locations
  Clone ID: MRT4577_16431C.1
ccctatcctctccagacgagatctgaagccgccgggcagcagggctcccccaagtaccaggagaaaaatgtttgcagcctgtgctcatctattaaagcttgataccagctttcatagatccggatggttttgaagtgatagctggcttgactttgcttttcttcaaagcatcttgacagaccaaaatccgtaatttttggcaccatgttttcgtctagcaatatatttgcaggttttaggtctaagtgaaaagtatcgatctctgtgaatatattgtaaaccttcacaaattcccttgattatttcatagcgctattttaaaataaatgatttgtattggaaaaaccaagttgtccaatatacatattcatgacttgaaaaagtaaaaaaatacagtcattgtatattgtgtttgacttagaaagaaagatgaaaaagttaaacaaaaagatgtgaaggcagatgaatgctttgcttatgcatgaattcatattgataaagcgctattgaatgatcaaggaatttgtgaggtttacattatctttgcaagagttgtattgttcagttagacctagacatgcaagtatatttctaggcgaaaatatattgttaaaaattgcggatttttgtctctcaagttgcttggaggaaaaacaaagccaggctatcgcttcaaaacagtttggatctatgtatgaaagaagggacattgatgaactgngttggatttactttgacttgcaaacttgtttgcatgttaacatcagctagtgtacatctttaggtactttgagctgntggnaggggagtcagtgtcatcagttggtcaagagaaatggtccaatgagcta

SEQ ID NO: 70538 - DNA, 178 bp, Zea mays
  unsure (1)..(178): unsure at all n locations
  Clone ID: MRT4577_164320C.1
ccgggnaaacaaaaaccctagccgccgcgccgccccgctccctagtggtgctccctcccccaccactgcagcttcnncgtcccggcggcccccaagagtttgcggcgagtgatgaacgtngaagtggcggcagnccggatttccggtatcccccgccggngggccatgcgcgcttggt

SEQ ID NO: 70539 - DNA, 447 bp, Zea mays
  Clone ID: MRT4577_164321C.1
gcaaaatttcccgttaggatattgatttgaaagtaattgtgtttttaggttttgacatagaaactttaattaggccttgaagaaaatgtcgtctgtttttttacaaatggacacatgaaagatgatattgatgtctgtactgtatgccttactcttcaatgtgggggcaaaactgcttgtgataagaccattgtgttgcagaatgctgactctaaagagttgatgaccatttttttgcattgatttttacgcccgtattgacactggagacttttgagcaccttggattgctagttcagttttcagaaggaacttacttaagccaggctgctacattttttgcaaactcagacccagacatgcctgctgtgcctgtccctgctgctcaggttcttgattggatgtcacagaacatagctttttcgctggaatattcttctgagaggt

SEQ ID NO: 70540 - DNA, 379 bp, Zea mays
  Clone ID: MRT4577_164322C.1
gccggccggtccgcgccttccccccgatgcagcccatcgggttctgagaatctgagcctcagccggcgggagagggccaatttcggtcctcgtgccgctgtctatctcgtattggtatatctattcataaatcatccttgtcatggtttgctcttcttgtcagtgttataaatttgcttcttgttagtgttataaatttggccatcggaaaggatgtgtttgtagttgtaatatcttgtttggagttgtaatatcttatcttgcttatgaaatcgaatatgcctatatataaaaaaaaaaaaaaaaaaaaagaacctaaaaaaaaaaaaaataacagggaatcttggtcacgaacaaaaaaaaaaaaaaaaaagcggcc

SEQ ID NO: 70541 - DNA, 1437 bp, Zea mays
  Clone ID: MRT4577_164323C.1
ggcggcgagaatggcagcagcgtcttccgaaggagtgcgcagggaggagatgatggcggacggctgactgtagacagtggtcggcagggggcagccacgaacggggcccccgccagtcgtggtgacatgtggaaaaccgggcgctcgcagctcctctcttttttcttgtttctttctttcgatctgcgagccgtccaggtccagtactctcctttccgtgaaggaactcttgcagccggcccctctggtttcctcgaattcttgttccccggtccctcctcctgtccccgcgtagatccgtccgtccgaggagcacaccgtccccacccccatgtttacccaccagttcctctgacggccgccgtgctccgatgaagctgagcgtgctccgtatccgccgctcccactccttctccgtcgccttcctctactggttctacgtcttctcatgaacgcatcgcccctctccacctgctgatccttcgccgtctctctctctctctctctctctctctctctcttagatagtcttttgaatccatctctagggctcttgtttctccccatcctccccccaccccaccccccaccaaacagattcaatccgacaagacaagcatccatgtcgtcgtcacgccggagctcgagccccgacagcaacgacacgacggacgagcgcaagcggaagcggatgctgtccaacagggagtcggcgcggcggtcgcgcgcgcggaagcagcagcggctggaggagctggtggcggaggtggcccgcctgcaggcggagaacgcggcgacgcaggcccgcaccgcggcgctggagcgcgacctgggcagggtggacggcgacaacgcggtgctgcgcgcccgccacgccgagctggccggccgcctgcagtcgctgggcggcgtcctcgaggtgctccagatggccggcgccgccgtcgacatcccggagatggtcaccgacgaccccatgctccgcccctggcagccgtccttccccccgatgcagcccatcgggttctgagaatctgagcctcagccggcgggagagagccaatttctgtcgtcgtgccgctgtctatctcgtattggtatatctattcataaatcatccttgtcatggtttgctcttcttgtcagtgttataaatttgcttcttgttagtgttataaacttggccatcggaaagtagtaataatgatcagttcgtcgtggttctcaactttgtgtggtgaatgtgaatgtcaaaaaagatgtgtttgtagttgtaatatcttgtttggagttgtaatatcttatcttgcttgtgaaatcgaataggcctatatatgttatgctgtacgagtatgtggctccaaatttgtgagccttctgtctgttatgaatccaatttgtgagcacacatgaatcaatttcgagattcgacatgtc

SEQ ID NO: 70542 - DNA, 1426 bp, Zea mays
  Clone ID: MRT4577_164324C.1
gggttgatgctattctgcaaaaggaggtccaagtaatctactcaaaattgcaagacatcattggcactcccagtggcaacgctctaaaaaagtatctggatggatttcaatgggtttatgtaggagataggttcgtggcaccacaggcacttgcttttgattcacctgtaaagtatcatccctatctttacacagttccatccgaactgtcagaatttaaaaagttactctccgagttgggtgtaaggcagacatttgatgcaatggattatctgaatgcgcttcgccgtttagaaggaaatgtcaaaggagagccgttgtccacagatcaactcagttttgttcactgtgtattggaagcatttgttgactgttaccctgacagtcaagcacctgatgtgttactgaactcattggcgattccggattcacttggggttctgacacctgctagaaaccttgtctataatgatgcaccctggatgaatgctaatcccacttcaaagaattttattcatctcagcattggcaatgaactggctaataggcttggtgtacgatctctccgtggatcatcattgttggatgatgagttaatgaggaatttgccctgcatggaatatgctaaaataagtgagttgttggctttgtatggtgagagtgactttcttttgtttgatcttatagagctagcagactattgcaatgcaaagaaagtgcatctgatttatgacaaaagagaacatccgaaacagtccttactgcagcagagtctaggtgacctccagggttcttcgttgacagtggtctttgaaggaaccataatgaatcgcgaagaagtttgcagcttccaacttcctcctccctggaaactgagagggaacatccttaattatggcttgggacttcttagtagttactttgtttgtgatgcattgactattctttctggaggttacttttacatttttgatcccttgggcttgactggtggtacgacttccactgctacctcatcagcaagatacttctctttgttaggtgcggaatataatcactcaatttatttgcatatcaaatagaatcacaagttctactgtgaacacatgacacaaactttagattctcttttactgtaaaagaaataagaatatctttcttatgttgcaatttttttcttctgtcaggttgaaattatatatgttgattagttataacatagtgtactcaaaatctgtgtattacttctccctaaatcaaagtacagacttggttaattgaaattctttatgtttgaaatatccactaagtgtggtcaaaactacgtgatattaatgtaattactagatagtcttgaagaaagaagctccttatcaatggcaagaccatgtcacactgcaatatgaagattttaccatgccctttt

SEQ ID NO: 70543 - DNA, 270 bp, Zea mays
  Clone ID: MRT4577_164325C.1
gtgccatcaaggtgtagtcaggacaatctgtctacgcggaagaagaatcgaggggaatcagcatcgtgggaagggttgaagaacgtggtggatcggtagtcgggtctctggtgccctttctaatgtatctgctggttctctgtagcaatggaggggggaaaaaacaattgggtggttgtatctatcttgtctgaatggatttccttttccctgcgttgtaattctctcttatatattatcatgaaatagattcagctgaatttgcactgc

SEQ ID NO: 70544 - DNA, 442 bp, Zea mays
  Clone ID: MRT4577_164326C.1
gttccttcctttctttttttcttgtttgtatttacttcattttttttttttcgttgttcatagtttaaaacaaaacataaaaagttttatgcgaaatcgccggccgtaaccccacccgtaaaagtaagactaaaacgtacaggcagatttgagaagaaaaagctgatgagacggggcagcagaagcagcaggtctccaccaggacgcaaaaagaaatggcggcaaggcgagctgggggccagccaaaccggcacgagaacaaccaacccgtgaagaacaactttaaaccgcgcaccccgcacgcctgctcgtcgagacacgcacatgacatgatccacgaggagctgcagctgtgaaaaaaggccggcgtggtccacggtaagaaagaaaaagcacgccgccccagcggaggggtagaaaaacaacaccagcagcagccatt

SEQ ID NO: 70545 - DNA, 906 bp, Zea mays
  Clone ID: MRT4577_164327C.1
ggtctccataaggagtcccctgtattgggtctgacctctttcagacctttgtttccttccttcttaatataatgagacgcagctctcctgcgtgttcgagaaaaaaacgtaatgctgatggagataatatccatgccggcaggacagactggtgcttgaaacatgcacagttacaacgtcttcgtcacacctggacttcaaccaaagaaatgtaaagacactggtctctggtgatgcaactggtctctggtgatgcaactggtgcatcacaagttcacaatagaatactagaaagctaagtagataattgtttttttctgtgatgaactgcatgaagctttattatgttgttattgactggtccttcatcccaagcttgctgtgtctgtgtatcacattcttattttaaagagacatgtactgttgaggttaaccaacataatctgggaaaataaagggattacaattaagcatgtgtatcactaaaaagatagtttcttttctggaaatcacactctggtcaggtctattttggttgttagctgaaacaagttttcttgttgaaaagaacacaatatgactagactgggtcatgacttcaataccttatcgttgttttgtttaggctgtgtttgtttatgcagtggccggaaatgagttcgtaattattgtatcaactcgatgtaatgattgtgaattaataaaatcctccgcttagcaaaaaaggacaggcctgacgcagtggtgtaaaagtcttcccactatgccaaaagggtttctgaattcgacgcagcctctctgcaattggctgcggtaggtcttaccccgtccttgctccccttcccccccactctcctgggtcctgcctgcagtgctctccttcatttatcaaaaaaataccgtatt

SEQ ID NO: 70546 - DNA, 223 bp, Zea mays
  Clone ID: MRT4577_164328C.1
tgccctttttcctttggagcttcttcatggaaaactcaagctttttaccctcaaggatggacccatcagctcggccacactggccagggcgggaagaaatgcatgccagcaaccggccactgccaaattgctcctcaatggggggggcaagggtacgtccctccttgggcttctcaagcttcctcgggacatgggtgctctttttcgtttcctcagctgctgc

SEQ ID NO: 70547 - DNA, 433 bp, Zea mays
  unsure (1)..(433): unsure at all n locations
  Clone ID: MRT4577_164329C.1
aaattccnagaaacctgcacggatctgaggtatgccatgcccgtctacacgcggcctgtggagcctggcgcaatcatgaagctgctccggtccttccaagcccagccgccgtacgtgtcgccgatgccggcgctgaatgcgtccagcgtgtaggagccgcctcttcctcctgccgcgtcaagaaccgtgccgcccggaggagctctctcaagaccagcgcacacctgcagaactcctgctgctggagctccctcctcctctgccgcatgtactggtctgctgctcgaggtggcttccctactttgcttcttgtccataccacgtcagactgcggctaatttataaacaccggaatggacacagaattaatgtgcgtgtagcctatatatacctctcctacccaaaaaaaaaaaaaaaaaagggccctaggacc

SEQ ID NO: 70548 - DNA, 377 bp, Zea mays
  Clone ID: MRT4577_16432C.1
ggccaaattcacgggataaaggaccgttttttttttcacctttatgggttccccagggaaaatttaaaactgtaaaaccccccctccaaacaatttttaaatgctttgggggaaaaatgcaaactcccaaatttttctttttgggccccatgcccttttcaaaaattgttcctttcccccatgggattgggtgttttggggaaaaatgcatttttagggcctaattttttaggggaaactccaggaaggtttttaaaaaaattgtaaaaagaaactggaatcctttatagcttgggccactggaaaaatgggaaaacattttccatgatttttaccccttcccacttttttaaggtttccaaaattttacctgtttt

SEQ ID NO: 70549 - DNA, 412 bp, Zea mays
  Clone ID: MRT4577_164330C.1
attcggctcgagtgagaacctagtgttcttcctaaacggagagtatgttgatcagagggggccttatgtagggtgattggagacaatgatggtgcatcgcaggaccgtgctaaattgaagggctatgctgggctatttgacgacataccaccagggtcagctggttaggccaaagagagtgctcgtcacggtaagaatgaatcacgagagtaactacctttgtgccggccattgagtgttttttgagctagcgggttggtatgggccagaagaccgcaggtggaccaggccttggctagaacacggaccagatgtagcataacggcgccagtttcatgttgatgcatgctatagttgggatgcccaagctgaagagaatgctggacttagggagttagctagaagagacata

SEQ ID NO: 70550 - DNA, 2234 bp, Zea mays
  Clone ID: MRT4577_164331C.1
gaacttaccaaatatgatgttgtgcttactacatattctatagtaagcatggaagtaccaaaacaatcaaatcctgatagtgatggagaagagaaagggaagcctgacccgtatggtgcacctgtgtcctcttcagggagcaaaaagagaaaggcatcctcttctaagaaaacaaaaaataaaagtgttgcagagagttgcttgcctgaaaaacctcttgcgaaagttgcttggtttagggttattcttgatgaagcacaaagcattaagaactaccgaactcaggttgccagggcttgctggggtttgcgagccaaaagaagatggtgtttgtctgggacacctatacagaatgctgttgaggatctctatagctacttcagatttctcagatacaatccttacgctgtatataagcagttttgcactctgataaagattccaatcagtaggaacccaaataacggttacaagaagcttcaagctgttttaaagccggtaatgctacgccggactaaagcaaccatgcttgatggggaaccgatcatatccttaccacccaagactgtttcacttaagacggtggacttcactagcgaggagcgtggtttttataacactttagaagttgaatcacgagaacagttcaaggaatatgcagctgctggtactgtaaagcaaaattatgtcaacattctattgatgcttttgcggctaagacaggcatgcgatcaccctcacctagttagaggctatgactcctgttctagttggatgtcttcgttggagatggtgaagaaacttcccatggaacggcagcacaaattacttatttgcttgcaatcttgttctgcgttttgtgctctatgcaatgatgcgccagaagatcctgttgtcactctatgtggtcatgttttttgcaaccagtgcatactggagcaactcactggtgacgacagtgtatgcccagtgtctaattgcagagtccgactaaacacatcctcactcttctccagaggcactcttgaatgctctctgagtaaattagcctctgatttcaagtctgatgatacatgtatggaaatgatacatgctgaaaagcgccctgggatggattcatcctacgcatcttcaaaattgagagctgcattagatattcttctctcattgcctaaaatagatcccactattgatagcaaatgttcaatcgggattgaatctgagaagtttgatggaaagggtatttcagaacaaactgacaccaagttgacagagaaggccattgttttctctcaatggactagaatgctagacttgcttgaagtccatttgaaagcttctcatgtgacatatcgaaggcttgatggaacaatgtctgttgctgcacgggataaagctgtgaacgacttcaatatggttccagaggttactgttatgatcatgtcactcaaagctgcaagtcttggcttgaatatggttgctgcctgccacgtacttatgctagatctttggtggaacccaaccaccgaggaccaagctgtggatagggcacaccgtattggtcaaaaacggcctgtcacggtatcaagattaactataaaagacaccgtggaagatcgtattcttgctctccaggagaaaaagcgggagatggttgcttctgcgtttggagaagacaaatctggttcccgacagactcgattgaccgttgaagacctgaattatctgtttatggtgtagaatcgctcctgagagtgaacagttttgctcattggattggtgttagacgtggtagataaaaatgttctctgaaaaaataacaaaatgctttcatttagggattattagttcttgtagcttgtacagttgcagagatttaggggttgctagcgacgtgtcttccaattctttttgcacgggaagcagtaagatgctgaactaggtgaattcttcagatagctgctatagtgcctgttaacttggggggtgttttctatgtactaatttctagttcctccattttattttcttttacttcctaaattgtcaaacacagatactaaaatagagataatctctcttttagtctatgtgtttagcaatttaggggctaaaagggactaaaatagagagactaaagacaccccttaatgtaatgaagataacgacaatgaagctcagatgatatatatgtacatattcttctcgtataaaaaaaaaaaaaaaaaaggggg

SEQ ID NO: 70551 - DNA, 342 bp, Zea mays
  Clone ID: MRT4577_164332C.1
ctagtgtcatatggactggatgagctttgttgttgaaaacaacaagtcgatgatgaaggaagggggcacatttcgggtcacagcaagagaaattgagggctggggcgcttggggagataatcaatagggcaggcttgattgaaaaatgtaataatcgcaatccttcaggggcgtcaaaaaagggatgttcggcttgtggaaaatgagattcctgaaggaaaggtgcccgcttataatgccaagcacacttttagtttgctcccccgtgattatttttggccacccgcagggcatggctcgccttagttttcctgggaacgggcaggccctcacggaaatttt

SEQ ID NO: 70552 - DNA, 255 bp, Zea mays
  Clone ID: MRT4577_164333C.1
cctcttcacacgccacacaggccaccggcagaggcaccctcgggcccgcatgcgccggcacgggctctcctccggctgccgacgcggagccacgggccggccaattcgaaccgccccaggcgcgaaagcgaccggcgtccgcaaggtccggctgatggacaggagaccgaatggctgctaccacagccgccatcaagacaattttccgagagagcaccgacaacaacgacaccgctgtgccctggcagccgatta

SEQ ID NO: 70553 - DNA, 514 bp, Zea mays
  Clone ID: MRT4577_164334C.1
agatgatgaacgacatcatcgtctatatatcatctgtgctcgagatccaaatcgaacagatcagaactagaatcgctgtcccagctgtcactgtgactgtgagcagggtcgtcaacattaccactaccgtcgtcgtcgacatcatcaacatctcctgcttgttcaacttcaacctcaacaaccacgtccttgatgttttgttcagcctgctcagcctcaacgacgaccagctgctcgtcctgcttgatgctctgctcacttgatgactctgcgtcgaccgccttctcgcggcgctcctcgtcgtcccaggcgctgccgccgccgccgccgggcacgcagcaccttaccacccacctttcctcgccgccgccgccgtcgcgctgccatcaatattactagcaggctctggctcttcgccgtcgccgtcgccgccgccgcgtgcggcctccgcctgccgcagcatcctagccgacgacggcgacggcagggcctcctgcctattattctccttgcg

SEQ ID NO: 70554 - DNA, 298 bp, Zea mays
  Clone ID: MRT4577_164335C.1
actcgctgcaacgtagccctctgttctgcacacagcacgggggccaaggatgccccgtccccctctggctccagctggccgggagcctgatcacctgccctgctgagtcccaggctgagcctcaatctccatcaatttcggcctatgcagaggtccacaacacacagatttgagctcagccctggtgggcagagaggtagggatagggctgtggggatagtgaggcatcgcaatgtaagactcgggattagtacacattgttgattaatggaatgtttacagtccccaacctggcaag

SEQ ID NO: 70555 - DNA, 653 bp, Zea mays
  unsure (1)..(653): unsure at all n locations
  Clone ID: MRT4577_164336C.1
cctcgaggccggccgggccgggaattctaacgcgcagcgccaccaactgtccaccaattattggcgacacccgtgaggtgaataacatcacggttgaaatccaggccaccagtctcaccgaccgagcggaagctcggccaagcaaccaacccctctcctcgacagccgacgcctacccggacaatggacttccgcacctcgctgaaggatatgatgtatgctgactctcctgaataggatgaaagatgtgtgtgattcaacaaccgtggcgattactgaatatgccccgcatccctgggccgaccttgctgccgcggacctatccaaaatctggcctccgtgtatcccaatgtatacacaccttctggctctagctcgcagacgtgtgcaattgagagcacagaacatatctgattcaccacgcgcctccaagagctgtcttgcaacatgaccatgaaactgaagtgacttcggctgccagtgagggacatacaaggtccactcatgaagagagagatcacatctatgagaggtctgagctcacacaattctatgagagactcaattcgcatcatggactgcatgacaagtactcngaaatactcgctaataaggcaaccacttggagaaatctccactgctctatctgagga

SEQ ID NO: 70556 - DNA, 336 bp, Zea mays
  Clone ID: MRT4577_164337C.1
gggggggcaaaaactttagggttcgacttttgcaatgaaccgctaaaagtttaattgtttgggtcaaaaaaaagggggattcaaattttcagggggatcttgggtaccctgtaagactgggaacaaaaccttaaaaaattctttattaatataactttgcagcatttttttctttgggtgactaaaccaggccttgatgaaggactttgaccattcaaacggatgtccaagctatcttactcgttgggggatggggactcccaccggcgtttaccggtgagggggtggttgcaacaaaactgttcgtttttagcccaggtccattggttgagagcc

SEQ ID NO: 70557 - DNA, 144 bp, Zea mays
  Clone ID: MRT4577_164338C.1
gcctctcattgacgggatacgccgccacacatgtgttctaagaccggagagcgcgttttcctttgggctatgttcctcgccgtatgtgtgcgctatggctataaacagaaccgacagacgcagtcttcctaagaacaaagaaaa

SEQ ID NO: 70558 - DNA, 573 bp, Zea mays
  Clone ID: MRT4577_164339C.1
ccgtgcgaatgtcactgtaccgcataatctatgagctctctccattttctttttcaggacttttctcaaacttctggggtgggcacttgggagacttgagtgatcctgaaactttcgactaccttcagcatgctcaagctcgtcacggaggccagcaggcggcaacatcctggtttcttcttgttcacccgtctcatacatcactgtttttatttcttatcttagttgtatgtttaccaaaaaaggaatcgattcaacagtgaactaaccatggttgttttttcccctacttttcgcactcgcgcagttcgactacctcatcccgccgatagggatggacaagtgcagcacgaatagacaagtgcagcacgaacaacgtgggccgtgacaacatacacaaggcgggcatggtgatgaacagattgcccatcagtgtgtacacattggagatgttgcgtgtgcggcagccacgtccacagacggttgatgagcaagatgctcgggcgcatcgaggattcaccgctgatcagggttcacacatacacatgctgcctgtgccccggtcgtgcatgt

SEQ ID NO: 70559 - DNA, 1886 bp, Zea mays
  Clone ID: MRT4577_16433C.1
cccggggcggcgctagctgtcctcttcctctgctttcggcccccggcagccggtgcgaggggcgccgccaacagctcgctaccggcgccgtgtcatgggcggggcgctggtagacaaggtggtactacgtcttcaaggtggtgctgatacggcgactcggcggttggcaagtctcagatccttcctcacttccccctcaaccagttcagtcattggggacctcgaggccggccccacgacggtggtctccgagtgggcgctcaagtgcgccggcccggcgctcgtctcgctcccggcgtcgtccttcttcgccggctgcctggcgggcgggttcctgctcaccacgctcgcggactcgctcctcgggcgcaggaagatgctgctcacgtccctggtgtccatgtccgtcgccggcgtgctcaccgcgttcgcgcccaacgtgtgggcgtacgccgcgctgcggttcgtgtgcgggttcggccggtccatggtgggcacctgcacgctggtcctgtccacggagctcgtcgggaagaggtggcgcgagacggtgagcatggccggcttcatcttcttcaccgtcggcttcctgtccctcccggcgctcggctacacgttacgcgaggcgtcgtggcggaacatgtacctctggacgtccgtgccttcgctctgctactccgtcctgctctacttcctcgcccaggagtcgccgcggtggctgctggtgcgcggcaggaagcaggacgccatggagacgctgcggcagatcgcctcgctcaatggcaacagcatcacgtccagcttctccatgctgcacgcgtgcaacatgcaggaggacgacggggccgccggcggggccgccggcgtgttctccacgatgcgggcgatgtgggagcggccgtgggcgctgcggaggctggcggcgatcatgaccgccagcttcggcgtcggcatggtctactacggcatgccgctcaacgtcggcagcctgggaaccaacctgtacctgagcgtcacgtacaacgctttagccgagctgccgtcggccatcctgtcgttgatcttcatcggcagggtcaaccggcggagctctgtcgtcgcgcttactgtggcggcaggtgccttcagtctcgcgtgcgtcgtcatcccagagggctcggcggcgcgaatggcggccgagttgctctccttcttctcgaccatcacggcgttcaacctcatcctgatctactccatcgagctgttcccgacgtccgtgcgcaactctgcggtggggctggtgcggcaggcgctggtgctgggcggcgtggtggcacctgtgctcgtcgcgctcggccgcgaacggagcttctggtccttcggcgtgttcgggctctgcatcggatgtttggggctctttgccgcctgcctccccgagacgagggggcggagcatgtcggacaccatggaggaggaggagcacaaggaggccgccgccgcggcttgcaccggcgcaaccgacattgccacgaaggatgataccgacctgctcgtgtagcggtgagatgctggttcggcggcgctgctagatatgcctaggctaggcgctgtacaggtacagctagcaggtcaatcacgaagctgtcagcctccatctatccggtcttgtaccgctgccgccaagttgatgcatataattcagaaccagctgtggagtccgactgtccgagtgtctgcatatagttcaaagtctagggccacattcactgaagcagatctcgatgcatatcggcgaacattaactgctgaagtgctgaagcacatgtacattgacgaagcaatacgccaatacggaagtgtcgttggcggcaaaaaaacaaaaaaacagacagtacaccaaccccaaa

SEQ ID NO: 70560 - DNA, 339 bp, Zea mays
  Clone ID: MRT4577_164340C.1
ggggggtggggttaccacttataaacaaacaccacccaactttggggaacaaatcgaaaaccaattgaaaaaacccaccccaccgctgggatgcccaacttaagaaaaaaaacaaaaacccactcaaaaaaaagggatcccactctagagcaagaaaaccaaaggttcccaaaaaaaaaggtgaatgcaaccgggcaggcatatcaagagcctcaaaaaaaaaaataaaatccgccatctttgcctttaaatcgttccacaataggaaaaaaaaatgatctaatatccctacttgaaaattgaaagcaaaacgtttttatgaaaacaaaaaaccccttt

SEQ ID NO: 70561 - DNA, 253 bp, Zea mays
  Clone ID: MRT4577_164341C.1
cccacgcgtccgatttgagcattcatatacacaccacgcgaagcacattagcaacgggctaggtacaatggctacgatgatattatccctccttgcgcttcttgcgctttttgctagcgcaacacatgcgatcattattccacattgctcactagcttcaatttacggtattccgcagacggtttgactatgcacagtcacggtcgacctatagcatgataggcgagccgattgtctacggcgagcactcgtt

SEQ ID NO: 70562 - DNA, 648 bp, Zea mays
  unsure (1)..(648): unsure at all n locations
  Clone ID: MRT4577_164342C.1
cccacgcgtccgcccacgcgtccgcggacgcgtgggttttttcctacttttcgcactcgcgcagttcgactaccttatcccgccgatggggatggacaagtgcagcacgaatggacaagtgcagcgcgaacaatgtgggcagtggcaacgtacacaaggcggacatggtgatgaacgggttgcccatcagtgtgtacgcattggagacgttggggtgtgcggcggccacgtccacagacagttgatgagcaagatgctcgagcgcattggggattcaccgctgatcaggttcgacacatacacatgcggcgtatgcgccgtgtcgtgcacgctcaagtgggacgtggccactgttatggagtacaagggtctacctctgcagcaggtcgtcgactactatgtcaggggcacgatggagaatatccgaagacaactattatcaataattagccaatataaactatttacaaatctttactaatatttacaatatatgagtttagacaatatatgagtttgatatatgaacatgtatggtgtttagttgcttctactttgttctaattgatgaataaaataaataaatgggtcacatctcatgaagtgatccanaattaattactaaaaaaaaaaaaaaaaaaagggcgg

SEQ ID NO: 70563 - DNA, 1229 bp, Zea mays
  Clone ID: MRT4577_164343C.1
tgtaggttcagttgggtatggtttgctttttattgacaaggaaacccatgtttcaattattccgtgtgttttattatttatattctatatactactgacttatatttgatcattgtgctgatgtaccatatagttatatcttacacgttgtttggttttgacttatggggtgtttgggagtgctccagttttttttttcatagtggagctgtggtttataatataaatttaaatagtttaaagatattttaaatgttaataataaacaaaatgacttatctaaatgtcctttataggttcatagctccaactccatggtttcctggagcactaatgacctgctccaccaactctaccaaattttctggagctgtagcagtccctaacacccctttaatgagtctacactgcaaaagtttcttggagtctatattgtgccatagttatttatttttctttcaatatcttatggttttatggattttcatccttttgctagaggtattgtttttgtattaactattaaagcaaacacatgtattgtctcactgaggacgcttatttatgataatatcttattgttaaaatgaggtcaggactaacatgctcatgcttgtcttagatggtaaggaagtcagtagaactcgaagacaacatttcttttgatagcatatgatattatcagattatttttattgagaatgcctggattttttgggggatctgatatatgatgcactttctcaggcactgcggtttatacagaattgttttttagactatgtgctttatgctcccaccccctctcttttccatacaaaatgcttggtatacttattatacctcaccttttctatgttgtcttgacttcttgacaggcttgatctttcttggagcttataccaacctgatttatttcttgttggaagtttcggactcacatcttaaccttgctgtgtgctgttgtgaaccattgcagaggttgcatgcttaagaaggcatcaagtattactggctcagctggcatcagaatatttgcttatgtccttggaactattttaaggaaccttttactaatgcttttgttgtgatatctattcttgttattatttgagattatcctgttatgtcactttaatgctctgttcttcgtgacatgtgttaacccacactattattcatatatattgttcttcatcttgatttggtagtgctagcagtccttttga

SEQ ID NO: 70564 - DNA, 1598 bp, Zea mays
  Clone ID: MRT4577_164344C.1
cattgggtacctcgaggccggccgggatccagtcatctccgcttagatccccctcgcgctttcgtcgaccgtcgtgatcccactatcgcaaaagccgaggacctccctcaacggcgctagaaccaccccgactcccaaatccacatccgtgtccgccttaaatccctccggcgtccctccagcgcgatgcggccaaccgcgcagcctccgcattctcatcgcctagccccaacgcacccccgcgtcatccacccctcccctcaccaagcctttttctcggccgcgatagcgaagatgacaagcacgacccctctccgcctcgccacgtgtggcctcctccaccgcctggtttggagttttcccatccttcacggcccggttcgaaccccggtcaactatcctccggatcggatcatggcgacgacgcaagagcgagatgtggcgcagccctaacgacggaggaggcgacgtgaagtaactatgtggtggcggagcgcaaagtcgacgaagactctctctgccgccttctcacggaagcttgattacgttgatggagtttgtcccaccaatgtcactgtaccacataatctatgagctctctccaccttcatcatcagaacctttctcaaacttcttcggtgtacacttgggagacttgagtgatcctaaaactttcgactaccttcaacatgctcaagctcgtcaaggaaaccagcaggcagcaacatcctgttcgactaccttatcccgccgatggggatggacaagtgcagcacgaatggacaagtgcagcgcgaacaatgtgggcagtggcaacgtacacaaggcggacatggtgatgaacgggttgcccatcagtgtgtacgcattggagatgttgggtgtgcggcggccacgtccacagacagttgatgagcaagatgctcgagcgcattggggattcaccgctgatcaggttcgacacatacacatgcggcgtgtgcgccgtgtcgtgcatgttcaagtgggacgtgtccactatcatggagtacaagggcctacccctgcagcaggccgtcgactgctatgtcagagacacgctgcaaaatatccgaagacaactattatcaataattagccaatataaactatttataaatctttactaatgtttacaatatatgggtttagacaatatatgagtttgatatatgagtttgaaacatgctgcatgttccaattggattaattctggagtaaaagagcgaaagagtcggatgcactaaatctaggcttgaaatttcctggcttgactgttcctatgctgcatggggccgagcaatttccaaatatatattatctattgctacttccttcacatatcattactttatatgttcttattggttacatttggcgccattgtggtaagataccgttttataaggcttttagtttgcacaaattataaaactacacaatttttcttcttcttcttgattagttcctatgctgccgaatggggccgagcaatttccaaatatatattatctattgctacttccttcacatatcattactttatatgttcttattggttacatttggcgccattgttg

SEQ ID NO: 70565 - DNA, 1393 bp, Zea mays
  Clone ID: MRT4577_164345C.1
ccgaggacctccctcacggcgctagaaccaccccgactcccaaatccacatccgtgtccgccttaaatccctccggcgtccctccagcgcgatgcggccaaccgcgcagcctccgcattctcatcgcctagccccaacgcacccccgcgtcatccacccctcccctcaccaagcctttttctcggccgcgatagcgaagatgacaagcacgacccctctccgcctcgccacgtgtggcctcctccaccgcctggtttggagttttcccatccttcacggcccagttcgaaccccggtcaactatcctccggatcggatcatggcgacgatgcaagagcgagatgtggcgcaaccctaacgacggaagaggcgacgtgaagtaactatgtggcggcggagcgcaaagttgacggagactctctctaccgccttcccacggctgctgaacaaggagaagaagcgttccagacaaaagtgttccaattggattaattctggagtagaaagagcgaaagagtcggatgcactaaatctaggcttgaaatagttcctggcttgggactgttcctatgctgccgaatggggccgagcaatttccaaatatatattatctattgctacttccttcacatatcattactttatatgttcttattggttacatttggcgccattgttggtaagacggtaccacccacagttttattgagaaaggcttttaagatggttgtggttgcacaaattggaaaataaaactacactaacttaattttccttttctttttgtgcttcaggaagcttgattacgttgatggagtttgtcccactaatgtcactgtaccgcataatctatgagctctctccaccttcatcaccaggacttttctcaaacttctctggtgtacacttgggagacttgagtgatcctgaaactttcgactaccttcagcatgctcaagctcgtcacggaggccagcaggcggcaacatcctgttcgactacctcatcccgccgatagggatggacaagtgcagcacgaatagacaagtgcagcacgaacaacgtgggcagtgacaacatacacaaggcgggcatggtgatgaacagattgcccatcagtgtgtacacattggagatgttgggtgtgcggcaaccacgtccacagacggttgatgagcaagatgctcgggcgcatcgaggattcaccgctgatcaggttcgacacatacacatgcggcgtgtgcgccgtgtcgtgcatgttcaagtgggacgtgtccactatcatggagtacaagggcctacccctgcagcaagccgtcgactgctatgtcagagacacgctgcaaatatccgagacactattatcaatattagccatataacttttataatc

SEQ ID NO: 70566 - DNA, 313 bp, Zea mays
  Clone ID: MRT4577_164346C.1
cttccccccacacactgtctctgaactcctcccaccaaggcaagggtcactttgtccatcagagcctccagagatgaggacttggctattcctctttctcacagacacttggcttctttgggagggaccataaggatgggcttctgtggaactgagttgtgacagggtaaagaaactccattttgtgctaggcatccatcttgctaccggcagtaattgtgtgacttcagttcctgagtgtgacttcagtggcccactcagatatgtgcagctgtgacgatggctgacctacagctcagtaacctgtctatgc

SEQ ID NO: 70567 - DNA, 385 bp, Zea mays
  Clone ID: MRT4577_164347C.1
tttttttttttttttttttttaatttttgttgtttttttttttttttttgttggtttttttttttttttttgcccccaaaacaaaaattccggggccaaatattaaaaggccccaaggcaccataaacagaggcattataacaccaccaaaacaaaactgcccccccaacaggggaaaaaaacaaattttttcccacgcaaactacaggggggcaaccaggaaaacccccggggggggcacctaaaacaatggggggggggaatcagggtttataccacgaaaggggggaaccaaacccaatttaacaggacaaacagaaccgggtatggaacatggaagaaggggacaagacttaaagccaaaaccgggcagggtagacctccc

SEQ ID NO: 70568 - DNA, 156 bp, Zea mays
  Clone ID: MRT4577_164348C.1
tgagatttctaaaattaccttggtagcacgatcaatactccctgaggtcacagtccctgcctacttcaatgactcacagaggcaggccacaaatgatgctcggagtcgatcgctcgcccttaatagtgctcgaaaatcatcaatcgagccaacagc

SEQ ID NO: 70569 - DNA, 531 bp, Zea mays
  Clone ID: MRT4577_164349C.1
ctctgttgatagccatgggcatggagaagaagaaatcgagttcactggcatatctgcacgtctgcaggagcgcacgccatgctcgtccaaggtctgctggcgactgcgaacgtggagagggtggcggaggcgcacgtccgcgtgtacgaggagctgagcggcacggccgggggccggtacatctgctacgaccacgtggtgcgacgaggcgaggagttcgcggagctgcagcggcagctggggctcagggtccccgcgaccgcgacgcccgacggctatggcggcgacgacgacgacggccgggcgccgcggttccagctctgtaaccggaagctggcggcgctcatgtccgcgcggaggcggtgcacctacgacgcctacttccccatgccgcaggagtgagaccggaagaggagagagagctgctgatgctggacaacgactggagcgtgcgtgacaagtgacctcgtgtacatagcaatagtggtgatcggctcgcatcaatataataaatcggcctcaagtatcccc

SEQ ID NO: 70570 - DNA, 1868 bp, Zea mays
  unsure (1)..(1868): unsure at all n locations
  Clone ID: MRT4577_16434C.1
tgagcttcctcaccagcctactntggaagaattagcaacaaaacgaagcttgtgttccgctttcttgacgagagcagtctcgagccatctacgaaccagacatatggttccatgttgaaaaatcttacatttgtcagtacatttgcatctggtatacttgccccaaagggctatatttggcctcattcaccagacaattatctgcaacaatacacttcagttgtcgatgatgctcataaagcggggttggaaatttatgctgctgattttgcgaatgattttgtggtcagttacaaccacagctacgatcccttggcagaatatctctcgttcattgataatgatgtcttctcagttgatggtgtattgactgatttccctatcacagcatcagaggcaattgggtgttttaccaatttaaacaaaagcaacactgatcatggaaagcctttaattatttcccacaatggtgctagtggggattaccctgggtgcactgatctagcttatcagaaagcagttgatgatggcgcagatgtcattgattgccccgttcaagtgaccaaagacggaataccaatatgcatgagttccattgacctgatgaacgatactactgttgcaagatcacaatttatctctcagactgccacgataaaggatattcagattgcacaaggggtttttacttttaatctcacctgggatgacattgtaaacaacctgcagcccaaaatatccaccccatggtactccttcagattggaccgaaatccgagatataggaatgcaggaaagttcatgaggctatcagactttctggacttcacaaaagacaaagatttgtatggaatcatgatcagtgtagagcatgctgcgttcatggcaggggaacttgggttcgacatggtggataaagttatcaaagcccttgacgactggttaccatgaccaaactgcccagaaagttatggtccagtcaaccgacagttcggttctggagaagttcaaggagcaaacgaagtacgaccttgtgtacatggtcaacaaaaaggtcggggacgctgcgtcgtcctcgcttgtggacattaaaaggttcgctagcgccgtgtccgttgataccggctccgtcttccctgaaacccactacttcacagtgtacgaaaccaaccttgtccagacactgcagacggctggcctctcggtctacgtctacactcttatgaacgagtttctgtctcagccatacgacttcttctcggatgctactgcgcagatcaatgcctatgttaagggtgctctggtggatgggctaatcacagatttccctgctacggctcgaaggtacaaggtgaacagctgcatgaacatggggaacagcacaccgaatttcatggcccctgctcgtccgggtgatctcatgcaaagcatcagcaagagcgcgcagccaccagctttggctcccgttccacccttgactggttccgacgtggcggagccgcctttacctcctgcgagatcgaacagcagcacagctccgacgcaatcactcgcgagcaggacgcgtgcttgcgctgctcacatcccagccctggcctcactggcaatgctttgcgcctggctttccctggtatgagcttgcagtgcaggccgccctagctccgtcgctcgactgctcgagctggaccgccgatccactcatcggatgttcttctccacccatagcagtagctcatttgttcagtgaatttgcatctacgggcttgtgcggaatgcgtacgacacttctgtgtgagctatcactattcactactgacgtttcagtacatatatgttggattggatgggtaatatattgcctacttctc

SEQ ID NO: 70571 - DNA, 129 bp, Zea mays
  unsure (1)..(129): unsure at all n locations
  Clone ID: MRT4577_164350C.1
cctcgcctgacgtcgtgagggagagaggntgtgtgcgtattncgctgttacatttgataatgtgcgcactgcacttgatctggctatgctggtctgctagggtggagatagcggcgttgtgcttcgtag

SEQ ID NO: 70572 - DNA, 353 bp, Zea mays
  Clone ID: MRT4577_164351C.1
gttgtgatggctaaaacttatgactttgattataactcgagcttctacatgcaaagggcagagttatatttggaagggtgatagaccatgacataaggtaactgctaacaaatttgcaatatatcacaagcatcgctcttcaatggcagacactgttcaattaagaaggccagctgctacaacttccaatataaatgctgatattgtgagaacatccactctgcaatctgcatctctaccgaaacaagaatacttaacaattacattcaagatctatactttaagaaaacgtgactagagtgcattatgtgtgtccagctcaaatatcctcattgtcacaaaatctactatcc

SEQ ID NO: 70573 - DNA, 441 bp, Zea mays
  Clone ID: MRT4577_164352C.1
acatcgtgttcttcacttttaattcgtagcttggggcttggtcgtctatcgaactctaaatggctagtagtagttctgcgggagaaggtgcacgccagaacactgccgccgacaaggacaagctggtcaccgttctgagcatcgatggcggcggcgtcagggggatcattccggccaccatcctcgccttccttggagaggagttcaagaaacttgatgggccagaagctaggatcgcagactactttgacgtgatcgccggcacgagcaccggtggcctcttgacggtgatgctaacggcgccggacaaggatggccggccgctgttcgacgccaaggagttggcgcagttctacatcgacgagtcgcccaagatcttcccacagaagaactcgttcttcggcaagatcgccacagctctgagtatggtgcgagggccca

SEQ ID NO: 70574 - DNA, 110 bp, Zea mays
  unsure (1)..(110): unsure at all n locations
  Clone ID: MRT4577_164354C.1
cgcaggggctggcgtacctccacaacgactgcaactgaagcatcgtgcaccgggacgtcaagtcctccaacatcctgttngaaggnagcttcgaagcgcanctgtccgac

SEQ ID NO: 70575 - DNA, 626 bp, Zea mays
  Clone ID: MRT4577_164355C.1
aagatttcccccttccattcctcctcccctcctcgtccccaccctctctctctctctctccctccgtctgtccgtccgcgcgcgctctgcgttcttggggagggaggaaatggcggcaaagcgcgagctggtggtcagcttcggggagatgctgatagacttcgtgccgacggtggcgggggtgtcgctggcggaggcgccggccttcgtcaaggcgcccgggggcgccccggccaacgtcgccatcgccgtcgcgcgcctcggcggcggggccgccttcgtcggcaagctcggcgacgacgagttcggccgcatgctcgccaaaatcctccgcgacaacggcgtcgacgccggcggcgtcgtcttcgactcgggcgcgcgcaccgcgctcgccttcgtcacgctccgcgccgacggggagcgcgagttcatgttctaccgcaaccccagcgccgacatgctcctcaccgccgacgagctcaaggtcgacgtcatcaagagggctgcagtcttccactatggatcaataagcttgatcgccgagccttgccggacagcgcatctgcacgccatgaaggttgccaaagaacgccgccgcgccttctctcgtatgaaccgaacctgag

SEQ ID NO: 70576 - DNA, 460 bp, Zea mays
  unsure (1)..(460): unsure at all n locations
  Clone ID: MRT4577_164356C.1
cctccccactcgncgncgncttctgcggcttcgcgntacgcctccatttggcctctctcccttgcaagnttaagcttcatcttccgccacggcnaacgagaagtcccacatcancattgcggncattggccacgncgactctggcaagncgaccaccaccggccacctgatctacnagctcggacgcatcgacnagcgcgnaatanagaggntcgagaaggaggctgctgagatgaacaagcgnnccttcacgtatgctcgggcgctcgacaagctcacgcgccgagcgcgagagcgngtatcaccatcgatatcgctccgcgnaagttcgagaccaccacgtattactgcaccgtcatcgacgcccccggacaccgcgacttcatcaagaacacgatcaccggtacctcccaggccgactgcgccgaccttatcatcgactccaccaccggcggctttg

SEQ ID NO: 70577 - DNA, 1793 bp, Zea mays
  Clone ID: MRT4577_164357C.1
ccggccgggactcgcgcaacggcacaagcgcacaccaccgccatctccgccttcaccccctacccacccctctgtccttctatataacgatggcgcccctcgggccgggcggggaattccccacacgcgcccacctcctctgctctctcctctcccccacctctgcgtccgtgcgttgtgtttgtttaggcggcaaccgcgaggcgcaatggcggccgggcgagagctggtggtgagtttcggcgagatgttgatagacttcgtgcccaccgtggcgggggtctcgctggcggaggcgccggccttcctcaaggcgcccgggggcgcgcccgccaacgtcgccatcgcggtctcgcgcctcggcggcggggccgcctttgtcggcaagctcggcgacgacgagttcggccgcatgctcgccgccatcctccgcgacaacggcgtcgacgacggcggcgtcgtcttcgactccggcgcgcgcaccgcgctcgccttcgtcaccctgcgcgccgacggggagcgcgagttcatgttctaccgcaaccccagcgctgacatgctcctcaccgccgacgagctcaacgtcgagctcatcaagagggtaagttaagccacgccacgccacgccacggtaacccatccttggtgatcctcgcccccgtgccttcacgccccgcgatctgcggacagccttattgctgtgattggtctcgtcgagtgcagtatcaatctttccgctcatttcttgattcgatcccgggcgggatctggaggcgaccgctaggtttcttgcgctgatttcgcgtgcggtttaggttgcggcaccgtctaatttggccctgtttggatccacctagtttaaactggtttttagacgctggaaggtctccaaacatgttatttttttttatccggtttctaaaaattagtttctcagttttcttaaaaactaagaagttggtctccccagctaaaactagtttctaagaaactaggaggatccaaacacctcctctttttttcttctaaaagccagtttctagaaaccaaatctaaaaaccaggttttaaaaaactagtgtggattcaaacacagcctttatcgggccatgttttattacgtccgataaagtcacccctctttcccgtcgtctaattcgggtccttgatgttgaatcttcccgtggaatccaaagattccggggcgaaagtgggcgcctttccttgctggttttggttggatcttgttgtgcgttctagttggcgaattgttctttttctggatctggtcatgtggcttctgtgattcatcctaaaaatttggggagacaaacaagcagtaatccaatccaaaggagagccgttatcagaccccgtgcttcttggatccatcggcgtgagctggtcttgtagaaatcattagccacgtcgtgtattaatggagtccacggaggaattttgtttctttgtggtgggtcaataattgcaactgacgtgacctacttcagtttctccccagttccattgaagctttagagaaactctgatttacccatctgatccttctataaatgcataactatataatgacaaacagcatttgtcggatctgtgaatttggattagcactattccattttctttacgccaagaactttgaattaaatctaaaattagcacgtatcaggtgatgctaagaggggtattttttttcatgctttctgtaacgttttaaaaaagctgtcatttgtagagttcacagaaatatgtgaactaatgcatgactaaaaatga

SEQ ID NO: 70578 - DNA, 2188 bp, Zea mays
  unsure (1)..(2188): unsure at all n locations
  Clone ID: MRT4577_164358C.1
agggttttgttacggtgagtgataagtgtgtctgtcgatctgtcggtgcattgcattgcattacattacagcaagctaggttggcctttaaatagagatccatatacaccgtctcctatacccacgcgtccccggaggatttcttcttcttcttgtcagtaggtgtggcctgcacagctagcgccactgcccactgtaccgccattattttgttagcatggccccgagtaacatcgtcgttcagagcagcagcactccgccggttgccggcggcgacgaggagttcgcgccgtctgtatggggagatttcttcgtcacctatgcccctcccgtctcacaggcatcagagcagcggatgagtgagagagcggagctgctcaaggcgcaagtacgtcaggcgttcgatgctgccagcatggatgttgcaggtctgatcacgtacgtcgacaccctcgaacgcctcggcttagacaaccacttccgcgacctcatcggagctgccctggaacgaatcggagctgaggagctgccggagcacggcggcggcctgcacatcgtcgcgcttcggtttcgcctgctccggcagcatgggatatgggtatctacagatgtgttcgacgcgttcagagaggacgcgggcggtttctgctcgagcctctgcagtgacgaccctaggggtctcctgagcttgtacaatgcggctcacatggcagtacccggcgaggtggtcctcgacgacgccatcgccttcgcgaggggccgcctcctggacatcatcagcaaaggcgaggtcaggtcaccggtgtcagagcagatcacacgagccctcgacatccccctcccacgatttacgaggcggctggaaaccatgcactatattgccgagtatgagcatgaagaggcacacgacggcctgctgcttgagctcgctaggctcaactttgtccttgtgagagcgcttcacctcagggagctgaaggacctgtcactatggtggagggagctctacaacactgtgaagctcccgtacgctcgggaccgtatggtggagatctacttttggacctgtggtatgcttcatgaggaggagtactccctggcacggatgttcttcgccaagacgttcgggatggtgtcactgatggacgacactttcgatgtccatgctactctagacgagtgtcacaagctcaaagaagctatgcagagatgggatgaaagtgaggtctccattctacccgagtatctacgcttgctgtatatcaaaacacttagcaacttcaaagagtttgaggagatcttggaaccgaacaagaagtaccgcatggcttacacaaaagaggcatacaagttgtgctccaaaaactacctaaaggaagccatctggtctaaccagaaataccagccaagcttcaaggagcatgaggagctatcaatcatgacctcaggcttgccgatgctcacgatcctaacactaatgggcttcggtgacgaggcaaccccggaggcgttcgaatgggtaagcagtgttcctgaaatggtccgcgctggttcgcaggtcactcgcttcctcaacgatttgtcttcttacaagttgggaaagaacaagaaagatatgcctggctctgtggagacctacatggtagagaatggcttaacaggagatgaggctgcagcggcaatcgcggcacttctagagaacaggtggagaatactaaaccaaacaaggatggagatagatcacacgctactgccagcggcgcaggtggtgctcaacatggcgagggcaaatgagatcatttacctccacggcagagacgcctacaccttcggtgctgacctcaaggaccttgtcaccacactcttcctcaagcaagtgctccctctctagacaatactctgatcacacaactagattggctataaacgattctcgtgttgtattacgctttgtgtttcattatgcacgctatatatatgatcaatgtacctgtttctatcatattgatggtaatataatactccctccgtttctttttattagtcgttggaatatgcaattttgtactatccagcgnctaataaaaagaaacagaggaagtattctaaatggatatagttaacttactgtgctcaatgtatccttgccagcatgcatatcatcatattaatattaatattgttggcg

SEQ ID NO: 70579 - DNA, 469 bp, Zea mays
  unsure (1)..(469): unsure at all n locations
  Clone ID: MRT4577_164359C.1
aaaaaaggaaaagggaactttttttttgggggggggcaaaaaaaaaaaaaaaaaggggggttttggaaaaaaaaaaaaaaaaaaaaaaaaaaagggggcccccaaaaggggggttgggggaggggggggggggggggggaaaaaaaagggggaaaaaaggaaaaaaattttgttatctaaaaaaaggagggggggggaccacaaaaactttttaaaaaaagaaaaaaaccttatctcctaaaaaaaaaaaaaatattcttcatacaacccactagctctgccaaacatattctcataccaacaacaacaacactttcaacantttctaccaccnctcaatcaactaaccatgaataaaccctaccccctacctacaacancaacaacaaatctcatcaacccctatcnctcccctttaatgcacctaccttcctacaacaacaaccacttcaacataatatacaaactc

SEQ ID NO: 70580 - DNA, 361 bp, Zea mays
  unsure (1)..(361): unsure at all n locations
  Clone ID: MRT4577_16435C.1
ccaccaccaaaaaacaaacaacatgttgaaacccaaatttttcggttaccaancaaacactcantaaaattaaaaaagactcattaaaaaccgactccttctctctaactaatcatcaattctcaactgaatcaaataatcaaaacacctatctaaactacccccaaaaaataaaaaaaaaaccaaaaaaacccgcctccgaaataaaaaacccctccaccctgcaattaaatccagaaccaaacctgcaaacgcaccaacttatcaaaaaaaaacactcataacaccaaacccacaaaaaaaaatcaaaaccaaacttccctaaaaacaaaatttaaaacccactcacaaatccaacaac

SEQ ID NO: 70581 - DNA, 841 bp, Zea mays
  Clone ID: MRT4577_164360C.1
aaaaaaaaaaaaaggaggaaaacagcacgcccgaaccctactgctgctacggacacgcaccactagcacacctcgcatcgtcgccggatcggaggaggaggggggagagccgaggaggaagaaggccgaggatgttccgcaaccagtacgacaccgatgtcaccacctggagcccgcaggggcggctgttccaggtggagtacgccatggaggcggtgaagcagggctcggcctgcgtcggcctccgctccgccacccacgccgtcctcgccgccgccaacaagtccgccaacgagctctcctcccaccagcgcaaggtcttccgcgtcgccgaccacgccggggtcgcgctcgccggcctcaccgccgacggccgcgtcctctcccgcttcctccgcaacgagtgcatcaaccacgccttcgtctacgacgcgccgctccccgtctccaggctcgcgctccgcctcgccgacaaggcgcaggtttgcacacagcgttcatggaagaggccctatggtgtcggtctccttgttgcgggtctagatgagtctggagcccatctctactacaactgccccagtgggaactactttgagtaccaggcattcgccattggctcccgctcccaggcagcgaagacttacctcgaacgcagattcgagaaattcaacgcctacaccccggacgagctcatcaaggatgcgctctcagccataaaggagaccctccaaggtgagaagctgaccagctccaactgcaccattgccattgtcggcagaaacggaggatggcaccgtcgagcccttctccatgattgactccaagaggatccaggaaatct

SEQ ID NO: 70582 - DNA, 531 bp, Zea mays
  Clone ID: MRT4577_164361C.1
aaaaaaagggggggagaatccctcttgaaaaagcagccccagttcagggggggaggaaaaacaaccccaaccccccgctcaacccggacttcgacgaccctaactaaaaacgacgacccgaccctaacttaaaacgaccaccctaacttaattataaaaaaccaggaccttgacgacaatagaaaacaacccccccccccccgtttgggaaagcgggggcctcagtgggaccgggggggcccaaaaaaaacccccgaggcgaccccctgggagcggaacagcttccccctccccggagggggggaaaaggacccccgcaacccccccggggagagggccttccacaccgaggtttccccccccgggggggtgaaccccgggttcgggggggggggagatgggaaacccaccccctcccggacgcgggggggacttgggcccccaccgggaaacggggcccgaagaaaaaggaccccccctcgagggggggccccaacacccccccccggggggcccgacccccggccccgg

SEQ ID NO: 70583 - DNA, 671 bp, Zea mays
  Clone ID: MRT4577_164362C.1
ccgaccccgcggcgaggacccggcccccacgcccgcgccccgtttttaacaaaaggtccactggtcgtttcatatgctcgtttgttgtgcacagtacaatccccgctgcattgcaacaacagttgctttttcatgcggaagcacacagaaatacagaatggttgtacatagcgattttacagtgttgccgataagctgacagcaatacagcattgcagtgtccgtgaaagtactggaacgaataaactagtgcgaatttgatttgtcattgccattgccatctctagatccgatcggaacaaagccaacagtcccaaacgtggatttgctactcgacgacccatgaagcagatgttatcttgcggtctttcccaattgggctccgcatgacccacctaatgggcagcattgagccagcgcctgtctttgggccatgtatcgccggaacccgggcaggcgacctagcgagcaccttgtctccaagctgcgacggcatgaagccctgcagaggcggtgcggccccggcaccgcagcctactccagcgcactggagcagctcaagtccggcaagaacaccggcgtgtcccccgcggatccggagtgcaggtacctggtgtccatctcgtatcgcgggcttgggaaccggatcctcgccgcggcgtccgcgtttc

SEQ ID NO: 70584 - DNA, 207 bp, Zea mays
  Clone ID: MRT4577_164363C.1
ccaaaacggatgattaaatggacaaggggtgcttaaaagaatcaaatcaaatatacacctaacccattagccctaacatactaaacccatactagtcagtcctcacccaaaatcacattatttttgtctcgattcttgaccaaacaaataaatcacactacaccctttaattaaataaatatactttctacatcatttactaaataa

SEQ ID NO: 70585 - DNA, 308 bp, Zea mays
  Clone ID: MRT4577_164364C.1
ttggggggagtttttgactcttttcactgcagacccagccacacagcggctcaagagaataaagttttaaagaaaggaaaataataaactccgaaagactgatactgataagaacaactgatgcgcgatcgccctagaaaaccgattgacggatagagagagtatgaaaatggcctcatgcacacccaggagcgtactgcatcacggccgacccgattcagtggcggcagcgcatgacccccctccacaagcagtggtatgcagaggaccgccccgccaggcggcagcgcaccccgcgggcacgccca

SEQ ID NO: 70586 - DNA, 210 bp, Zea mays
  Clone ID: MRT4577_164365C.1
ggggtggtgccttttatgtttcttttttttttttttttttttctttttcttggttccgtcttttgtggcgtcggtttcctattctatggctgatcctgtggcttgctcgcgttggtctcctggtttcgtccggggcctggccctcgtgttgtcggacgaaatctggggtgcccctgttagcttcccagtctttcccttgcgccccctgtt

SEQ ID NO: 70587 - DNA, 757 bp, Zea mays
  unsure (1)..(757): unsure at all n locations
  Clone ID: MRT4577_164366C.1
agcataaataaaaaaagtgaaatgagatgtaaatggcgtggaactataaagtatggcttcaccttcgaacctgtatacggcctgtttggattctcttctaccgtcgcttcagccaccaggcttcccaccgaagccacccccgcaacggtccgatagaagcgggcttccgtagaaagctgggctagctgggcatctgtccagtccttggctctcgccacgctagggtttctttggtccccgctgcctcgcatcgctcctgtctcgccttctaggcggagctgggattcttctcaatgacgacaacgagattctaagttcttcacgacgattctgatcccttcaaacttcatcgatagttagcatttgttatccatgatttgtcgtagtgaattgaagttttcggatcgagttcatcggattccagccgatgtacaccgagagatcccctttcatactttccagcataggtacttctccaaagatccagttcaagttggtgtccctccacaaccgagttaaccaagacgaattcgcctatgaaagaagctgataaagccattggcttaatgcaagacacttccaacaggattcttgctttagcaagggaaaactccgccccgaatgtggtctgacttattttaaaangtagcagctccgcattgcattggatgaactagctgaaatccctagaccagactctctggagtgtcatatgctttggactgcatncaccctgaaaccaacctgaacccgacga

SEQ ID NO: 70588 - DNA, 1397 bp, Zea mays
  Clone ID: MRT4577_164367C.1
ggcaagggagagtgtgaagattgagcatgagaaaaagctttctactctgcagagcctggaatacaaagggagggatagtgcaaagctggataagaccaaggcctccataaacaagctgcaatcactgattgttgttacctctcaggctgccacaactacatcatcagccatcgttagagtccgtgacaatgagcttgcaccacagcttgttcagctctgttttgcgctattgggcatgtggaggtcaatgaaccatttccatgagatacagaatgagattgttcagcaagtccgtggtctggtggacagctccatggctgagtcaacatctgacctccacaggcttgcaactcgtgaccttgaggctgctgttgcggcgtggcactccaacttcgaccgcctcatcaagtatcagcgcgactacatccgctctctgtatggctggctgaagctcacactctgccaggtggatagctgtgtgccacagggagcccatgcctcgatgatctcgcgcgaactcaccagcttctgtgacgagtggaagcaagcactagaccgtcttccagacgctgttgcttcggaggcgatcaagagctttgtgaacgttgtccatgtcatctacgccaagcaggcagaggagatgaaggtgaagaagcgggcagaggcatactcgaaggagctagaaaagaaaaccaactcgctcaggtccgtcgagaagaagtactaccagtcctactcgatggtcggccttggccttcctggcagcggcgggcacggtggcattgacagccacgcgtacgacgcccgtgatcctcttgcggagaagaaaaccgagatcgcccagtgccgtcggaaggtggaggacgagatggcgaggcacgctaaggccatcgaggtcacgcggtcaatgacgctgaacaacatccagacaggcctgccgggtatattccaagccatagctggtttctcagggacagtggttgaagctcttgacgtggtgtgccgccgagctgggtcagtgcggtaggacctcttgccccaccagaattaccaagagaccatcctttctctctctgggtgattcagtagtttacttatatagggaaactgcaaaatataatataatataatatatagctcaaagtagagtgatggaatataggagaaggctcctggatgtttttccctgtcaggatggtttcggttgtagataatgtgattttgcccatgatttgttgatctcatctggccctttctctgggaagtgggaagggagatacataatgtacatacattaaggtcaccttgcactctagcgttgatcaagcctgtgcttctgcctaacaaaagcgttaactttctttaaaaaaaaaaaaaaaaagtgtaaaaaaaaatag

SEQ ID NO: 70589 - DNA, 291 bp, Zea mays
  Clone ID: MRT4577_164368C.1
tgttttacataccctggtcggatggtggagcaatctgcatctcaatgcccacgagcgtgagccccgaggaccctggctggtgccacagacgtgcctcaacacctgcgctgtgctgcagccttggctgtcgatgatacagatatcgtggtgatccagctggtgctcctgaggaactgtgcactggatatatacacctcaccgaatgcagacgactgttcatcatgagcattgacaccagcacagagacggcatgttggccactagttattccaaggaaggttactgtactgc

SEQ ID NO: 70590 - DNA, 305 bp, Zea mays
  Clone ID: MRT4577_164369C.1
aaaaaaaaaaggctttcaaaaaggctaaaaaacatcggacagaaaaaggcaaactttgaaagggggggggggggctggtggcgaaaccccggagggccttttcgcacgggcatgcataaagcaattgcactaggaggaggctaaaaaaacccaaaaaaatgggccccgttaagttaaaaaaaggacattgatagggggggaaaaaaaaagggggggagggccaaaaaccgggggccaccactacacgagaaaaaacggggggggataatacccaaaaacaaagagcctaaaaaaaaacaaggggg

SEQ ID NO: 70591 - DNA, 234 bp, Zea mays
  Clone ID: MRT4577_16436C.1
gtgttagggttttttttgttttttttttttttttttttgaaccatttgccactgggcttcattcagtttgaacaaggttacccaacttaaaaacctggttccaaacagttttttgggggtaattaccccggttgacatacaaaaccccccattggattttaaaaatacccttactaaaatttttctggaaaaagattttttttatttttaaacccacccaaacagggagggggc

SEQ ID NO: 70592 - DNA, 644 bp, Zea mays
  Clone ID: MRT4577_164370C.1
gagtggatatgtaattgggtgatgggcgaaccacatcacagcacaccacaccaaccgcgcgccactgatccatcaactccactccactagctacgtaccttccgaccgagcagccagagagatggagaggatggtgatgaggctggtgaggaacaagcagtccctccgccagctgcaaggggccgccgccggcggcctagcgtcgtcgtcctccgcctcctcgaccgccggcgccgccgcgtcctccttctccaccctgcagcagcagcaggaggaccaccccggagtgctcaacatcagggacaccgccgcccacctcatcggccggacgccgctggtgtacctgaacaaggtgacggaggggtgcggcacccgcgtcgccgccaagctcgagttcctccagccttccttcagcgtcaaggacaggccagcaatctccatgatcgaagacgcggagaagaaggggctgataaccccaggcaagacgacgctgatcgagcccacatccgggaacatgggcatcggcctggcgttcatggcagcactcaaagggtacgagctcgtgctgacgatgccatcatacaccagcctcgagaggagggtggtcatgaaggccttcggtgcgcagctcgtgctcactgacc

SEQ ID NO: 70593 - DNA, 667 bp, Zea mays
  Clone ID: MRT4577_164371C.1
ttttatttcttttttttttttttttttttttttttttttttttttttttttttttttttttttttttttttttttttttgccacttggccaaaggggggctttaaaaaaggggggtctttccttatcccttccccttgggggggcccattttttaatgagttgcccccaacagtttttcatgggctgtccccaaattgaaaataaaaattttggccaggggggcttttcggggcatacaaagtcacattgtttttaaacctcatggtttttgctttttttttttaacaagatgagggacccctcaacttcacaaatgtagttgtatacttggttgggtgacccaataacaaactgacaggttccccttgggtaaactttttttgggaccctggagtactaaaaattttttgttaccctcatcccatgacccactgttttagggggggtcctcaccaaaatcatcacatacaattttttttttggcaactacatttccatttttgctttaaaaaagccaaacctttttaacaaagggggggtttgcccttttacttaagaaaaaaaaaaccgggggaaattgcggcacaatttcgtttttatgggccacatggattgtttttgggacttgttagccaaggcttacaacaaatgcaggtttgcctaacc

SEQ ID NO: 70594 - DNA, 529 bp, Zea mays
  Clone ID: MRT4577_164372C.1
catttaaaactgtgaaaccatatcggaagtgcatatcatctgttcatcgtatatatgagaatggctgtgtttgcccacaccacgacagtgccaaatttgtgttgggaagtgccttgaattgtgctaacatattctgtacatgctgccgtgcctaatatggatcctatggtcgccaattgccacaatggtacaacactgctcattgcaatacaagcttgccactgttggatacaggttactgatagagctgaaggctctgattgtgcacatatgtaatagattcaaaacattaggggagcttctgtgtgtgttgtacatatgtaattgattcactaatatttgagctgagttactgacttcatgttctactgtttatagattgcgaactgtgcttaaatcaggcattcagtattggtctctacagagtaagctctgccaagcattactaagaactgagaaggtctggacacacatatgtttgtgagcaattttgaacaaataggtctcccgataatagcgatgttttggg

SEQ ID NO: 70595 - DNA, 223 bp, Zea mays
  Clone ID: MRT4577_164373C.1
cccacgcgtccgcggacgcgttggctgtctcgcaccagctcatcccagctgggcccgcacccttgccttgccctgctgccaccggctctcccccaatccctcccaccaccaccagattcgcctcgccttctcgacgcccctccctcacccttgatgccacgccctccttccatggcgccacgcccgcgccccttaccacccgtccgagccgcgacgctgaccc

SEQ ID NO: 70596 - DNA, 375 bp, Zea mays
  Clone ID: MRT4577_164374C.1
gaattttcgggtcgacccacccgtccggaaagtggattagtacataaagggtgtctagggtgcaatcaattttttccttagcaagctgaaggacctccagggttctgttggtgagctcatgaaggatgatgcgtctgtggtattcgcctattacatggatggtgccacttaatccgacatttcctctattacttctcatggtcttaattgagatcaagttctaggcgtgctgcgaaattaggtacccatgttgggtactatctatgtactattactatatccaaaactataggtgccctggctgaattgaactcaaaagggtttgtttgagaaaaaattgtcccaagattggtttgcttgttaaagctcaatctt

SEQ ID NO: 70597 - DNA, 321 bp, Zea mays
  Clone ID: MRT4577_164375C.1
aattcggcacgggggagagaactagtctcagtttttttttttttttttttttttttttttttttttttttttttttttttttttttttttttggacggggatcgggttttatttctcccaaaaaaaaggaaaaggcccggcatcatcgggatccgggggccaaaaatactactattttacccctcaggcccattaagttagaccctactcatcagggaagaacaggccccgaccctatctatagaggcgggcgctgatatccaaaatctacaagggcccttaatctagggggaagacttttcttcatgggctccaaaaaca

SEQ ID NO: 70598 - DNA, 1322 bp, Zea mays
  Clone ID: MRT4577_164376C.1
cctcgaggcggcgggaaaaataaaaaaaaaaaaatacagcgttgtgctgctaggcgaagcggttgagtgccgcaccctagatggctaaagtccagtagccgaaagcatcactagagcacccgcggagacgcggagcctccactcccgtatcgcttcctcctctggatctagccgacgccgccctcatcctgtcacccaccgacgtcgccgtcgccgtcgccacctatatcacccaccgcctctgaagaagaagacgcggatccgagggtagttaactgctgaagaagaagagccggtacggagaagacgcggagcagtacttctccgatctggatgttggtaaggttcatcctgatttgaacggcaatctcactgataacgagttcctgggaggaggaagctagacaatttctgttagaggaggaagaagaggatgatgaactcttattagtacttgtccctgctattctctcggccatgcaagaagagaaaagagccatagtagcatctgctgttgaaccggtgcaacatgtaccaagagcgggcagcgagatcaatgttgctgggccaagtgtgggcagtgagactaatgttgatggactaatgttggatcaagaggcttgtgaagttcagtctccaccttctgttacgtcagtatatagaagtgggaaaaagcggaagaaaagtcaagttgcaagtgttctggatgactatttggagcacaagaagaagcaaacacagaagattatggaggtgttacttgagaagaagagtcgtgaagaggagtactctatcgagaggtgtctcgacacagttgatgttatggaggagttgacggatgaggagaaggcccttgcagcagaggtgttcaagaatgaattgaatcgggagatgtttgtgatgcaaaaaaatgtaaacgtgcgactgatttggcttcggaggaagataagtaggattgcatctacctgagagatggacaatgtgcggctgatggttctgtgcaaacataggtatgcctcatttcagtaggtatggctttgttacagctgttctgtattcttaataataactgacggcatatgtgttggccttgtttaaccataccagatataccttgctctccatctatagtatttatctacttgatgttgtcgcctttgctctccaagtactatttgattctatgtaaaagacagttaatgacatctgttgtagctacataaggtctattatgtgcaacattaatatccattagcagaattatttgtatatgcataaaaaaaaaaaaaaaaaaaactcctagcagtgtatttgagattaga

SEQ ID NO: 70599 - DNA, 829 bp, Zea mays
  Clone ID: MRT4577_164377C.1
tatctcatccgtggattggcacctcctgtatctcgagagactgaactgaacgtgctcttaccgtgtttgcagtgacgctgggctccggttcggaccggttttcacgcctccgaaggccgggcaggcagggagcacccgcgaagacgcggagcctccactccccgtctcgcttcctcctctggatctagccgacgccgccctcaccctgtcacccaccgacgtcgccgtcgccgtcgccgtcgccacctatatcacccaccgcctctgaagaagaagacgcggatccgagggtagttaactgctgaggaagaagagccggtacggagaagacgcggagcagtacgtctccgatctgagagagagatcttcattttctggattcgaacatctgaaggtgttccccatccatctggatgaacattaatggatgttggtaaggttcatcctgatttgaacggcaagctcactgataacgagttcctgggaggaggaagctagacgatttctgttagaggaggaagaagaggatgatgaactcttcttagcacttgtccctgctattctctcggccatgcaagaagagaaaagagccatagtagcatctgctgttgaaccggtgcaacatgtaccaagagcgggcagcgagatcaatgttgctgggccaagtgtgggcagtgagactaatgttgatggactaatgttggatcaagaggcttgtgaagttcagtctccaccttctgttacgtcagtatatagaaagtgggaaaaagcgggagaaaagtcaagttgccagtgttcttggatgactatttggagcacaagaagaagc

SEQ ID NO: 70600 - DNA, 267 bp, Zea mays
  Clone ID: MRT4577_164378C.1
gagctgctccgagccacctgagctctagccaacgcgcgagcctcaagctttttttccagcccctatttgtacttttgccaaatattgaaaagcagcttcagttgggagatcgttaatggataagattgaattagcatatgaagattcattgcttgaagaattggatggaagtaaatttactccctaacagtggtactttatttgttttcttttttttaaaagcactgctcaatgcttgaagaactggatggtataattttactgttt

SEQ ID NO: 70601 - DNA, 2570 bp, Zea mays
  Clone ID: MRT4577_164379C.1
cctcgaggccggccgggccgggacctccctccggttcggcgttacgactacggcacgagagcgaaaccctcacggcgccggaaccccaccagtcctccaccacttcccaattccggaagcgaataaacgccactagattccggccgcggtccctcctccagcgccggcgtcccctcgattggctgcgaaccttgcggcttcgttcgcgcgaccgcagatcggggctggtttgtctagatagaggtgctctgttgcgtaggagagggtgggggcgtcagagttgccggcgttttattttggtcctttttcagccggtgagctgcggctttctcgctaattactcggcgcggcagcagacttggactgcacaagcttgctatctctggttcaattggcccaacttgcgctctgattgccccccaaaactgcgtgcgtgtctcgcagcgtgctggaattgctcatctgttcgtctggcgaagcaattggctagccgattacatctccggctcaccttgatctcactgcagtctgctgaaatcgcccgtctctgcgggccattgccgctcgcttcattcgtgggttgctgagggcgccttgggggcctggggcctgaatttgcgtggggcagtcttgggaaagcgcaagggaacctttcctcgtgaccatgaatctactggaggagttgatccgggcgatagagctctggctccggattgttaaggagcaggtccccttgatcgatcccacccttgacccagtgttacttgttcctggtattgctggctccatccttgaagcagttgatgatgaaggaaacaaggagagagtttgggtgcgcatccttgctgctgagcatgagttccgggagaagctctggtccaaatttgatgcctccactggtaaaactgtttctgttaacgagaaaacaagaattactgtccctgaggacagatatggtttgtatgccattgacacattagacccagacatgatcattggtgatgacactgtgtactactatcatgacatgatagtggaaatgattaaatggggatatcaagaaggaaaaactctctttggatttggttatgatttccgtcaaagcaacaggctctcagagacacttgacagattttctaaaaagctggagtcagtgtacacagcttctggtggaaagaagatcaatctcattactcattcaatggggggattacttgtgaaatgtttcatctcactgcacagtgatatatttgaaaaatatgtcaagagttggatcgcaattgctgcaccattccaaggtgcccctgggtacataactaccagtctgctgaatggaatgtcttttgtcgaaggatgggaatcaagattctttatttccaaatggtgtatgcagcaattgctacttgagtgcccatcaatctatgagttgctggcaaaccctaacttccagtggaaagacatcccactgctacagatttggagagagaatttggataacagtggcaagaaaagtgccctgttagagtcgtatgagcctgaggaagcaataaagatgattaaagaggctctttccagtaatgagatcattgctgatggcatgcatattccggtgccccttaatttggatatattgaattgggcaaaggaaacttatgatcttttatgcagtacaaagcttccggaatcagtgaaattctacaacatttatgggattgattatgatactccacatactgtctgctatggcagtgaacagcagccggtttcaagtcttagtagcctcttatatgctcagggaaaatacgtctatgttgatggcgacggatctgttcccgcagaatcagcaaaggctgacggatttaatgcagtggcaagggttggggttgctgctgaccaccggggaatcgtgtgcagtcgccgcgtgttccggatcgtccagcactggctgcacgccggagaacctgacccgttctacgacccgctgagcgactatgtcatactcccaacactctacgaaatcgagaagcatcgtgagaaacacggggatgtcacgtcagtagcggaggactgggagatcatctcccctaacgacggcaagaccatgaggccaggcgagcttcctcctatggtcagcacactgaccacgagccgggaaggcaaggagggtgcactggaagaggcgcaggccaccgtggtcgttcacccggagaagaaggggcggcagcatgtgcaagttagggctgtgggtgtcagccatggtggctaaagccgtaggagccacctttggttgtctactctatctagcagtagcagctatacctgtctctgtgcacgcactgtaaaattggatgtacatatatggctatgacctctgtagggactctggttttagaactataaatgggcaccctgcctgcttgtaaatgttcagaaccgaaaacacaggccctgttcttttttttcctttttaaaaaaaataaaaagatggtaaaggattccattacttggaaaaaaaaaaaaaaaaaaaaaaaaaaaaaaaaaaaaaaaaaaaaaaaaactcgaggaagggc

SEQ ID NO: 70602 - DNA, 135 bp, Zea mays
  Clone ID: MRT4577_16437C.1
ttgtttgcgacgtaatagcttttttatggggggagggtgaattaaattaattggccgtggttttacaactttgaaattagaaaaaccctggctttacccaatttaatcgtctgggaggaaattcccctttcgcca

SEQ ID NO: 70603 - DNA, 244 bp, Zea mays
  unsure (1)..(244): unsure at all n locations
  Clone ID: MRT4577_164380C.1
atttagatactcaacactgttgaaaacagtaatttaaatgaacacaatgttcgtctgattataattgcagaaaatcagaaaaaatggtaaaggattcagcccaattttttttgcccattcaggccgattccagccaggcagttggctaggcaacctcctcaaccggcccactagacgacccagacatntagaggagtgctggcagttagggttgcaaccactccatctcctggcggcggccggc

SEQ ID NO: 70604 - DNA, 364 bp, Zea mays
  Clone ID: MRT4577_164381C.1
cgccgccgctgctgctgccgcgttcacagtaatggggggtttcgtggatactcatatgacccctgcgtatttcaaacgttttcgagcgaaattcaagtagaaggcgggctggctctgcccactacagggccctggtcccgcttattgaccaatacaaaagcaggttcatctgttccccactcccgattctctgtgcgatgtagcaagttgggacatcactgcccaatgcctctctggtttgctcgcgggtggtatgcgttttgcttctggcttctgccgtgatggggcctttgtcgtcttggagctggtctccccgtctctgcacctggctactgcactgggcttttgtttgctgtccgctcgc

SEQ ID NO: 70605 - DNA, 1092 bp, Zea mays
  unsure (1)..(1092): unsure at all n locations
  Clone ID: MRT4577_164382C.1
actgtcccttgagacagatatggtttgtatgccattgacacattagacccagacatgatcattggtgatgacactgtgtactactatcatgacatgatagtggaaatgattaaatggggatatcaagaaggaaaaactctctttggatttggttatgatttccgtcaaagcaacaggctctcagagacacttgacagattttctaaaaagctggagtcagtgtacacagcttctggtggaaagaagatcaatctcattactcattcaatggggggattacttgtgaaatgtttcatctcactgcacagtgatatatttgaaaaatatgtcaagagttggatcgcaattgctgcaccattccaaggtgcccctgggtacataactaccagtctgctgaatggaatgtcttttgtcgaaggatgggaatcaagattctttatttccaaatgggagagagaatttggataacagtggcaagaaaagtgccctgttagagtcgtatgagcctgaggaagcaataaagatgattatttctgttcataaatggctcaataaactgatgccatgaatgtcttgataaacatgtgttttcctttatactccatagtccatacaggaattgaaaatatggtaaaaccataccttgtgaattactaatatatgtttgtctttggcagctatggcagtgaacagcatccggtttcaagtcttagtagcctcttatatgctcagggaaaatacgtctatgttgatggcgacggatctgttcccgcagaatcagcaaaggtctgatatcattggcgttttacttttattaccatttgggcatttgaagcaaagctctgtagagaagaagtcagggaaatgttttccttctccttttcgcaggctgacggatttaatgcagtggcaagggttggggtggctgctgaccaccggggaatcgtgtgcagtcgccgcgtgttccggatcgttcagcactggctgcacgctggagaacctgacccgttctacgacccgctgagcgactatgtcatactcccaacactctacgaaatcgagaagcatcgtgagaaacacggngatgtcacg

SEQ ID NO: 70606 - DNA, 670 bp, Zea mays
  unsure (1)..(670): unsure at all n locations
  Clone ID: MRT4577_164383C.1
ggccgcttcgaggcnncggccgggcttcgggaaaaaaaaaaaaaaaaaaaaaaaaaaaaaaaaaaaaaaaaaaaaaaaaaaaaaaaaaaaaaaaaaaaaaaaaaaaaaaaaaaaaaaaaaaaaaaaaaaaaaaaaaaaaaaaaaaaaacggggggaacaaaaaggggggacccccaaaaggggtttaattaaaaggttacggggggcggggggggggggggggggggcccttaacaaggggaagcaaaagcactccccccagaggggggcccaatttggccactttgggcgcgtggggggggaaccccgggaaaaattttcggttgccggggcccgaaacttcggggtcggggtcggggtcggggtcttcttccccggggggggggcgcaagaaccccccccacggccacggaaaaagggccagggggaggccccggttgtttggggaacccaaggaaacggggggaaaaaggcccccgaaccgcggggttcccccgcgggggtggttcgttttgctcggccggaaaccccccccgaagggatggaacggaccctatacccctatttattacaaggggccccggtataacaaggggcggttgaacaaaataaatacaagggcgtggtggccccctggctttttggttggcacaacccactcccctttttt

SEQ ID NO: 70607 - DNA, 740 bp, Zea mays
  Clone ID: MRT4577_164384C.1
cccttgtccccatctctctcccgcatggctctccttgccgccgccacagccccgcactccgatctcggcgaccttcggcgggaatcgacagtgccaagcatacaacaaggatcccctccctccgctcctccctcctgtccggcgagatccggcgcgcgcgtcctccagcgccacccgcgctcgtctcccgtcgctagggtttcggccggcgtggtccggcgactcagatccaggatgccatgggcaggatggcctcttcctcccctgcccagacatcatggagttgcggttggccgtgagcccagccacctccttgcggccacatcatctggatctggccagcggcagaggaggagttggcggttgaagaggtcccggcgagatcggacccgcccaagggcacgtggacgaacgcggacggctgacgcgtccatccaggcgacgtcgaccccaccgtaccccagcgcggcccggatcaccgactcctcctgcttcccccagtacaccgtctccctcaagtgcctggagaccaaccaggacaagagcaagtgacagcagcagttcgacgactacaaggagtgcaagaagagagaggcgccacaacacgggaatcctccggctcctagtcccatcaagcacccccagcgacgctgggcgcgacgcccggtggcgagtgcgctgcagcgagctaggagggcgtcatgcagtccagcacttcgatctggacatcagggaagcgc

SEQ ID NO: 70608 - DNA, 258 bp, Zea mays
  unsure (1)..(258): unsure at all n locations
  Clone ID: MRT4577_164385C.1
aaagctgtagtttttttggacggttacctggggaagtgccgggggtcggaagacgacccccccagggctgaggcagccgcgtcgagggagaccccaggtagatttgccctttcttgggccccattctgcccggaaaggtcctgtttgtggcggacacgcaaaccgtnggtccattcatccgtgcatattgatcacgagggccccccaaacaagccccacaatttggagttggtggggggtgacaaccagccctctcaa

SEQ ID NO: 70609 - DNA, 606 bp, Zea mays
  Clone ID: MRT4577_164386C.1
ctcaacggcttaacctcaccgtgctcccattctagtctcctctccacttcattacacatccccgcgaaatcccggaccgacgcgaccaaccaccttgttcagtcaccccctcccccccgcgatccaccgccggcgcgcgtgtaccctaaccaccgtgcggatctgggagcagctggcggcgctccctcaaatggtccccggcggcgagggggcccccggaaggcagaacagctgagatgcgacgcgacgcggtgccgccacccaccgccccctcagcctcctcctcgtcatccctcttcagcggcggcggcggcggcgagcggctgttcgagtctgggcccagcccgctcgtcttccttcccctgctcctgatccagggcggtggcatggacctctcccgcgtcggcgagaaactcctcagctctgttcgctcggcccgctccctcggcctcccaccgatccccacggcgccccctccccgccctgaggttccagaacgagctgcggcggcagcagcagctgcacgtgcgatcgccgggttgccacctcacgagaggatcaacctgccatccaattcggaggacttggtctccatctatgggagca

SEQ ID NO: 70610 - DNA, 460 bp, Zea mays
  Clone ID: MRT4577_164387C.1
gggaaaaggccccaaattaaattttttttttgtttttatccaacccgggggttttttttccccccccccccccgtggttttttaccctttttttagggccccaaataaaaattggataaggaaaagggtttttttttatcccctgttcccaaaaaaaaaaaggggaaggatttttttccaacccccattggggggaaacttttccaattaaagcttgggggggggcaacttgattttttaacccccggaatttggttttttttggaggcccctatttttttgggggggcttttaaaaaattttttttaaaaaggaagggtcccggggggtttcctaagctctacaaaatttaatggggggccgggtttaaaaccctgggggaaaacaaaaaatggtggggggttccgggaaaactttttttttttaaaaacctttgtgttgcgcgcccccctttgggttt

SEQ ID NO: 70611 - DNA, 212 bp, Zea mays
  Clone ID: MRT4577_164388C.1
cccacgcattcgtcgaaccatctagtaactgtttccttccgaagtctccctgaagatatcatggggcacgtacaaattataatcgggtaaagtcaatgattagaggcatctggagcgcaacgccctcgacctattctcaaactttaactacgtatgacggctcggctgcttcggagagccgtgccacggaatatggagcttcaagtagtcca

SEQ ID NO: 70612 - DNA, 324 bp, Zea mays
  Clone ID: MRT4577_164389C.1
ggggggaaataagggggcatttaaaatcccctcctagattaaatttcaagggatttttctttccttgttgccaaacttgtcctagggaaggagagatcgaggcccattcccatttccggctttaataacttatgacaaacatttaggcctttgaaacacgggactccctaactgaattgccctaatcaggcttgttttttgggccaaaaacaacatagagaccacctctttatcgtttatgaacatttcacacagggccaacaaacagacaaactaaaacctttttctggcaacatgtggtccacaggaaaacgggtccctttt

SEQ ID NO: 70613 - DNA, 788 bp, Zea mays
  Clone ID: MRT4577_16438C.1
cagcgcgcatcctggaggaagccgacctgccaaaccttccctacctcggctgcatcatcaaggaaaccctgcgcctccaccccgtcggaccgctcctagcgccgcacgaatcggcctccgactgctcggtcggcggctacgacatccccgcagggacgatgctcctcgtcaatgtgcacgccatgcacagggatgcgcgcgtgtgggaggaaccggaaaggttctccccggagaggttcgagggcgggaatagcgacggcaaatggatgcttccgttcggcatgggccggcggcggtgccccggcgaaggccttgccgtgaagatggtcggtctcgcgctgggtacgcttctgcagtgcttcgagtggagaaggaccggagatgaggaggtcgacatgacggaagcgtccgggctgaccatgcccaagtctgtgccgttggaggcgttctattggccgcgtacggagatgatgtcaccgctaacggcacttcacggatgttgagattttgaatttttttaggcacgccaaatgcaaagacaatttagttagagaggtccttatccctccatcttaaattaaattaagacttcatttggtacagctcagtttcatcagtgaagcagcttttttcaacttcataccctatgactatgactatgattatgagcagccccacccgcagaattgaagcattcatgctgcgttaccctatgactgtgagcaaccccacccgcagaattgaagtcgttcatactgcattttctctacaccggcagttgagcaaaa

SEQ ID NO: 70614 - DNA, 413 bp, Zea mays
  Clone ID: MRT4577_164390C.1
attcggctcgatgctcagccgcgcagtcaggaggtggcatatctgactgatgatgagtgggtcgagcacagcaccatatttggccgtctaatccgaggattcgtcgttgggaaactgagtatggtttggaagacgggcagattccgccgattgatacatgtacatttgatgcttttcattgaccgggttatgggactgatagtggttcgagtgtgccccctaggactggtaatgaaacaggggcatcaggagcgagaggatggatgtgtggtgtaaggcgacatagacgattctgtaggtgagcgtgctactacacctgtaatttctttttgaaaagaatcttatgaaccacttcctaaagaacagtggctgcatttaaaaggtatgaatagcaaatttggtgcacaaaattg

SEQ ID NO: 70615 - DNA, 632 bp, Zea mays
  Clone ID: MRT4577_164391C.1
tggaaaaggacacatggcttggcaaatggaagcttctagaactcagatgattcaagtggatgttggcactcctgaaggagagatgatttttcattcagctgcatcaaagctagacttcaagggataccaatctgtttatgaggacactgagggagattctgtgcatgaggataactttgaggccttgtcaaaattaatggttaaggacttggtgtcccctgttaacgtgcatcttggacagcactttactaagccaccatcacgttattctgagggtgcattgattaaaaagctagaagaacttggaattggaaggccatctacttatgcatctataatgaaagtattacaggataggaagtacgtgacagcaaaaagtcgagttctacaccctgagttccgtggtcgaatggtctgattttgtcttcagcgccttagaggggatccatgggatacactctatagtgccccgcctggtagtccggcgccctctatgggccatggctctcgcaccacgtcgatcgttccccctacctactcggaacccaccacctcggctggtcctcgttcggcctatacctctgacggtggctgtcgccctcgcaggggcggacgtgggggtagcagctcta

SEQ ID NO: 70616 - DNA, 763 bp, Zea mays
  Clone ID: MRT4577_164392C.1
ggtccgtgattacgcaaaatcggcttcgtcgtgaagtaggcggcttctccatccagcccagaccccagagtcgcagtcggggatcggcataataagcgacaggagacgccatggctgcgctgcgccggcgacgccaaggtcgtcgctgatcctcccgcgtgcatcctcgcactcccagcccagcgctgttggcctcacctccgattgcgtcgccgcctcccgccgccggcgcgtcgatttcgttttcgtcgtcaacccctccggcgccaatggccgcacgggaaagcagtggaagcagttgctgtcgctcctccgaatccgtctcgctgaccagtgcaacatttgcgagtgcatcacaagggatattcacaagggaggtgcgcgcgttttcccttgtcacaagggaggctataaaggatgaggctgatgctgtgatcgctgttggaggtgatggtacgcttcatgaggtgcctatggtttcttttggaaaggaactctagtgcgtgctctcgatcgagggcctgaccattcagcggcacttggtctcattccacttggaactggctcagattttgcttggacatttggctggacaaatgatcctcgtgacgcaattgatcgaattgtgacagagtgatgtatttggagctttaagagccttttggggacataatgaagcaagatatgagaataaaggtatttggcattccctatgcacagggctgtgaagttataaacagttctccattctcccccatttacc

SEQ ID NO: 70617 - DNA, 1092 bp, Zea mays
  Clone ID: MRT4577_164393C.1
ccttggcacaagtggtttgtgacttgtcaagtgttcttccggaaaaaaaaaaagaaacacaaatggacgctcctgcggcggcggcccagggttgcggcggcaagcacatcgtgctcgtccacggcgcgtgcctgggcggctggtcctggttcaaggtggccccggcgctgcgggaggtgcccacgttccgggactacacggggccgctgctggagctcctggcgtcgctgccggacggggatcgcgtggtgctcgtgggccacagcctcggcggcttgagcgtcgcgctggccgccgagacgttcccggacaaggtcgccgccgtggtgttcctctgcgccttcatgcccgactgcgcggcgcggccgtcgcacgtgctggagaagttcgtggaggggaagtggctggagtggatggacacagagttgaaaccccaggacggcgaaggcaagctccccacctctatgctgttcgggccccggatcatccgagagaagttcacccagctctgctcgcccgaggacgtgaccctcatgacatctctgcttcggccgagttccatgttcgtggaggacctggtgctccagcaaccctacaccaaggaaaggtacggctcggcgcgcaaggtctacgtcgtgtgcacggaggaccacgccatcgcggaggggttccagcgctggatggtggagaacagccccgtggacgaggtcagggagatcgtggcggaccacctcgtgatgctctccaggcccagcgacctggtgcgctgcctcgctgacatcgccgacaagtacgcttgacgacgctacgctcttcagcgcaattcgcccgcgtgctgttctcattttgccgcatttcagtttaatatttccccgctgtttccgaatcgagattggccagaattctcgacgcacggtgtgaaatcgtgtataataataataataatgctattgatgttttctaatatatagcaggtattttgtaacacttggttttaaggataaaactgaatccattagtacgtgtgctcaaaaaacggaccgagggggggcccggtccccaattcgccctatgtagttttatttaaaaaaa

SEQ ID NO: 70618 - DNA, 921 bp, Zea mays
  unsure (1)..(921): unsure at all n locations
  Clone ID: MRT4577_164394C.1
gggcggncgcgtggggcacaagtggtttgtgacttgtcaagtgttcttccggaagaaaaaaacacaaatggacgctcctgcggcggcggcccagggttgcggcggcaagcacatcgtgctcgtccacggcgcgtgcctgggcggctggtcctggttcaaggtggccccggcgctccgcgcggcggggtaccgcacggacacgccggacctggcggcgtcgggcgtggacccgcgggcgctgcgggaggtgccgacgttccgggactacacggggccgctgctggagctcctggcgtcgctgccggacggggagcgcgtggtgctcgtgggccacagcctcggcggcgtgagcgtcgcgctggccgccgagacgttcccggacaaggtcgccgccgtggtgttcctctgcgccttcatgcccgactgcgcggcgcggccgtcgcacgtgctggagaaggacgtgaccctcatgacatctctgcttcggccgagctccatgttcgtggaggacctggtgctccagcaaccctacaccaaggaaaggtacggctcggcgcgcaaggtctacgtcgtgtgcacggaggaccacgccatcgcggaggggttccagcgctggatggtggagaacagccccgtggacgaggtgagggagatcgtggcggaccacctcgtgatgctctccaggcccagcgacctggtgccctgcctcgcggacatcgccgacaagtacgcttgacgacgctacgctgttcagcgcagttcgcccgcgtgctgttctcatttgccgcatttcttcggtttaataatatttccctgctgtttccgaatcgggattggccagaattctcgacgcacggtgtgaaatcgtgtataataataataatgctattgttgcttgctaatatttagcaggtattttat

SEQ ID NO: 70619 - DNA, 687 bp, Zea mays
  Clone ID: MRT4577_164395C.1
ggtaccctccgggttcggccgggccgggttcttatgagttatagttcaataataaagttttttgtctgatgtttgtggcttcccagaaataagaaagtacatttctaggaaaaactaaagaggaagaccctgaaagaacagaaaaaaaaaaaccaagcccaaaaaaaccgaaggaggaaggacggaggaatgacacgaagctgaagcaaaaaagcagaaaactgaggaggaaaagacgttccggatgttgttgcactacccgcggcacaagaaggcggactacgaggccatgccgggggggcgcgaaaactggttgctccgagagtacgggctcctcgtgggcggggaccttcgcggcaagtgttagctcggcatgggcgccttcctatggcccggtttttcctgacgaactgtacgaaggggggagtcccagattgaaaaaacatatgcataacgagccgagattctccccggcggattcaccatggtacctacactattaataggatccagtgatacggcatgcatgagcttgatctcgatcgttccatgggactattatgggggacaaaaaatctggtgctcacctcgcgagcatcgttgtggaaacaataattgatcactatctgaacaacaccatgtggctgggcaaaccaagtattgtgagtacgagttagttattttatc

SEQ ID NO: 70620 - DNA, 260 bp, Zea mays
  unsure (1)..(260): unsure at all n locations
  Clone ID: MRT4577_164396C.1
gcaagatcatcctcacaagccggtcagacaagatcgtcaagttcggaacaaggccagctctgcgtctcagctacgtgtccagcgaagtntctggtatttcttcaagactatcacatttggcagcacggatcccaaggtgcacccaaggctcctgcaccttgccatggacatagccaagatgctggacaggtctctcatcggagcaaacatcaccgcttgtttgctgagggagaacttcgacgtccactactggtccaaag

SEQ ID NO: 70621 - DNA, 803 bp, Zea mays
  Clone ID: MRT4577_164397C.1
gccggccgggtcggggcagaagacacctcattgccatcatctctccacacaactaagaagccagcggcagtaacaggagtgaagcaaaaaaatggcatcatcaacgggatcagagatgagcgaggaaatcgatgtccagcttagtccagaggagaaagaaagtttagatgagatcatcaaggaagctgagagcgacttggagtctgaggaagtcctggatcaatcccttgccattgttgccgagaatgaaggtctggacaaggacgcagctgcaaaactcacaatttacactgtaggtggtgttttgaagaatctgacagagggccccttgagtgttatggataagcacatatatgcaggacacactgtcaaaccatttcccagcctgattggagctggaaagtctggttgtttcgtcatctcaaatatatttgctaaaggtgttgaggctggagtggtgtacaccggcaacaacaaaaataaagttccatgtgcatggctactttgcttcatcgaaaacaaggctaacgtgaggatttatggggagtgtggaaataaaaataaattcattaatgtcgactggaaattagttgaaaagaaattgcttactgctggtaagactgtgaagttccatgacaacgtgactggaacctcgcttatagccaccattcgggtcatcacagctggcaaagctgttgttgctgctgccttctttggttaaactacattgttattatactacccataatgtatgtactagatcccagggatcgatacggtcttttgtgtgtgtcagcgactat

SEQ ID NO: 70622 - DNA, 749 bp, Zea mays
  Clone ID: MRT4577_164398C.1
tccgaccgacccgagccgagcgacgagtagggtttgcctcgccgccgccgctcgacgacacgcgatggcggcgctggtggagacgagcatgggggtggtgcgggaggtgctgggcgactcggtggtggacgaggtggacgagcccatcgtctcctacatcgccaacgtcctcgccgaccaggacttcgacttcgggccccccgacggccacggcatcttcgacgccctcggcgacctcctcatcgacgcccgctgcgtctacgaccgagagcactgcctcgaggtctgcactaagctctgtgagaagttggggagccatggcattgtcaaacctaaggcagccgtgcggagcctcgccacgcctctgcgcatgaacgcggggatggaggagcaggtcgctcccaagaagccagagaatatcttcgacgcgcccttgctgtcctcgcgcgacaaggccaagctcgaacggaacaagagaaaagaggacaggcaaagagaggcccagtaccaaatgcatgttgccgaaatggaggcgctcagggctggaatgcctccagtttatgtaaatcacagtaatgttggtggcacaaccattagggatatccatatggagaacttcagtgttactggttggaggtcgtgatcttattcaagatgtcaccttaacgctcgcttttggaaggcactatggtcttgttggaagaaatggtactggaaagacttctcttctcagagctatggctcaacat

SEQ ID NO: 70623 - DNA, 427 bp, Zea mays
  Clone ID: MRT4577_164399C.1
atatgtttttgctaattttatggatctgcgcaaaacggtgcatacggaatctgtgcatggtatgatggtcccacagggtaagcaaggacaccgttcctctagcgagctccgttataggttggtgatcaagggaagatatgtttttaaaaactagggacaaatgatagaggagatacatcaatgattatgtaatggtgcaatgttatagaaacaggctcttgatagctaattttgctgcaatggaaaaatgatattgagtgatgccttaacctgcgaacagtgaggatcttcacgtgtttcgcaatgccaaggatgatctgattcgttgcgcaagctggatgccacctggtcaaagatattacatgggaggctgctctgttttgaccgtgtatgtgtcgccatcttattctcatgatcctactgcagc

SEQ ID NO: 70624 - DNA, 231 bp, Zea mays
  Clone ID: MRT4577_16439C.1
gtcgagtttctgaggcatcagtgcagaccgactgcgacgccctactgctcgactaagtggcagtcgttgccgcagcagtgtttccagcagatcaggcacgtggagccgaagcaccggtaccaggcgatcttctgcttggtcctgcagtccatcctgcatcagcagccgcaaagcgtccaagtcgcagcgctgttggcggcacaaatagcgcatcaactgacggcgatgtgc

SEQ ID NO: 70625 - DNA, 383 bp, Zea mays
  Clone ID: MRT4577_1643C.1
cccacgcgtccgtccacgggtccgtccaggcgtacgaccgcgcgtccggagttctgatcgagaatggctcagcgcctgcttatgaacatctgttgctgtgaccatggaaggccctggatcacatgctgataagcctgggcttcatactggatacatcatgaaaaaggcgtattctattgccgtatacctaatgctcgaacgctacaagtcccatgcagcggtgtcgcttgccatgataccttgatcagacccgtgaggagacagtcttgaggatgtatcacagaaaaggctttgcactctagaatggtgacagcacagcgggactgaacgtctacaacatgttgggctagcaggcgtgcttgatttctgtaagaatgagaacc

SEQ ID NO: 70626 - DNA, 268 bp, Zea mays
  Clone ID: MRT4577_164400C.1
gggaaagagaaactgtaaaggacctctctgttgcccggtgagactcttagagatcatccacaaaggttaaagatttctttaaagcctttataatgactatcttactgaaactgggttcttcacaagcaaagccacactaaatctttgggtgcgtaggagaacaatcggagccaccactttagaaagggttgcgtgagacctcactattgggggccacactagagactgtaacgacttggatgaagaagccaaatgttccatggtggtg

SEQ ID NO: 70627 - DNA, 948 bp, Zea mays
  unsure (1)..(948): unsure at all n locations
  Clone ID: MRT4577_164401C.1
aactgaangccacactatcgcagacaaagatcactcgcgttcggccagttcttggccccgtgcggccatgtccatcccatccatgtcgagctcgagcccctccgtggggagccctttgccgccggcgcacgacggcgggccgggcccgctcgtgtggcggcagaaggagcagccgcatccgcagccgcagcatccggactacagcttcaccggccgcgtcctgctcacggccgtcgtcatcctcgccatactcaccgtcgtcttcgtcctcatccgcctgctcctgtaccagttcgtggcgcgcggacggggccgcctggccgtgggcgtccgccgctccttcggctccttcggcatgaggagcgcccgccacgggctcgccgcgtccgcgctcgccgcgctgccggtcaccacgtaccgcgtccgcggggcggacgacgacgggcctagctccgcctccggcggcgccgggaccgggacggcggactgcgcggtgtgtctgtcggagctcgcggacggcgagaaggtgcgcgcgctcccgggctgcagccacgtcttccacgtcgattgcatcgacgcgtggctgcggtcccggaccacgtgcccggtgtgccgggccgaggtgcggcccaaggcgacggcggacacgcgcccctcgccgcctccggcgttgatcgatgccgctgggggcacgttggtcgtgaccgtggtaggcggcgccgcggagaccggggacgcacaccgcacgtccgtgctgggctccggtcaaccggccggtgccgttgggtaggtaggcaaaaacgacgttgcgactccttagcacatagtgtattatactatacatcataatacatgtaattagaaacattgtgtactactttatcttctgtaattctgtgaagatgacaccttagcatctccaacaaaaataattatccttcgcctcag

SEQ ID NO: 70628 - DNA, 436 bp, Zea mays
  Clone ID: MRT4577_164402C.1
aacccgaaaaaaaacccaccaaaacacaaaccaaatgggtaaacaaaaggggttccaaaccttcctgcccgggcggccccccaggggggacttccaaggcccaggcccccccccctgggggcccccacctggggacccagcctggggaccaaatgggcaaaactgctgcccgggggaaattcctgtgcgaaaacatttccccccaccatacccccccaaaacaaaaaggggaaaccctggggggccaaccgggggggccaactgaaagaaatagcgtagagcaaacgggccgctttccaggccggaaacccggggggccaaccggtttagccaaccggccaaagcacggggacagccccctgggaaaaggggccctcttacggggcccccttcactgaccccgtgcactgggccgttgggctggggcgagcgggtt

SEQ ID NO: 70629 - DNA, 326 bp, Zea mays
  unsure (1)..(326): unsure at all n locations
  Clone ID: MRT4577_164403C.1
ttnttttttttttttttttttttttggatgttatggaactaaagagcacaagcgcataaattaaattgaactacaatatgtccgcaaacatcaaataataccagagtaattacaacacacacattcaaaactagacagaaaaacttaacagtgtatcaaagaattattacaacaccacacagacaagctacttcttattaatatgatttcattggaacctaatccaacagaggcatccctctttacttgtcagttgaagaaaaaacttcctatttatatcgcttttgcaaagaatatttgccatgcattacaaatcagagtctttt

SEQ ID NO: 70630 - DNA, 361 bp, Zea mays
  Clone ID: MRT4577_164404C.1
gggaaacaccctcaatggaaccaaaacactaactttgaagggcctttcgaagggtgggcattaaaacccagggggtccttaacataaactgggaccacaggtcgttgcttggaaaaagctgcatttatcataccgatttttacatattcggccggagaaccctgctataaagaaataaccacccccggtttaggctgacggcacaaggtaatcccatatgccatggtcgggggtaactaccgggccaaaagacccactcacttttttggggccgaacttgggatccccaatgcttggactacggaggatcaaaggcccgggacttcggaattttgagcaaatgtattcaggtggaggcatt

SEQ ID NO: 70631 - DNA, 355 bp, Zea mays
  Clone ID: MRT4577_164405C.1
gctgggctgcctttgggggcccccccccttgggtaggcctaacgggcgggtcctttcacctaacgggggcttaaagggtctccaaactcccggtagggggggggggcccccgcgcttggccgtgcgagccccgaagttagtgtgagataaaccatggcgatgggcggacacccgtgttcgcctgctggatccccctttccttgttccggggtgggcttccccttcttccggatggttaatcggcgccttgggccggcttggccccccccggcgggccccctgtcttggtccccgcggtgttggccactccttggggcccctttgtgcatagctaccgcgcggggggcccttttcc

SEQ ID NO: 70632 - DNA, 635 bp, Zea mays
  unsure (1)..(635): unsure at all n locations
  Clone ID: MRT4577_164406C.1
tatggtcgacattcgttcaaatggataagcagccagccggtaaggggaagggtgccatnncttcatcttctatgnnttactgtatatttttaatgggagcagctagatagcttcatgccttctctggtgtgtagaagttagntgcattgtgaattcctgtgcgtatcttgtnnttgtgtgggccttaaatacccacaacacatagtatggagtgtgaggaaacatttattttttntgcctttcntggtnntgtttgaatatatgatctagtgttgaatgttcattttcaagcaaatttccctttatcgcatggagaaactacatgtgtgtatggtgttgtaatatgttaattataatattttttattatggccccaattactctactagatattgacaatgggtttgataaaccaaaatacatattgggtaggttgcactttcaaacaaaaagggccatatggaattatggatttgtgcactctccctaggcctatgtgcgatcacaacttaattgaaatatgttattgctcatttgctaattgagatgtcatatgctctgtaaaatgtattaattttgtaaggttattgtcactgaatgctgcactgcagcatacagcacattacaccataata

SEQ ID NO: 70633 - DNA, 2800 bp, Zea mays
  Clone ID: MRT4577_164407C.1
ggggcttagagttatcatgttcacagctgtgcaatactacagtcaaagatgcacgacacatgacactggttgtacacacagcaggagaagaaacaaaactcgtgccctttcttttattttagccgagatcagggacgatgaggtggtcctcgtcgtcggtgacctcggtccgggccttcttgctctggcgcaccccggtgccggcagtggcagtggctttggccggcctgtagtacgccgcgccgttcgcggcctcggttccgaaaagcgacggtagcgttactaacctcctgccggctttccgaagtactcccgccatggcagttatagctggcaaccaggccagcaacaggtcgatgtcctcgaaccactccagctccttgagcccaagagacgagtctttctggaacagcaaacacaaaacagatggaaaaggaaaactgagataagaataagaacctgaaaagcttgtggttgatctcatcatcatcaccgccgacaaaaaaaaagaggttttggatggttaggtccttgccttgtcgctggattcgtagtccgacagctcgaggaggtcctcgacggcccaaccggacggtggcaggaacggcgaggacggcacctcctgcggcagcgcgtccttgaccgtccttgttttggtggtcgtcccggcagctggcgcgctgacgacggccgcgggcttggagctgcccttgggcggcgccggcgggaggccctcggcgctggcgccgcagacggagctgaagccgacgcggatgccggtggcgaggtagcgctggtggttgccggagagcgtgccggggacgtggatgggctcgtcgcagtcgcggcagaggagcgccctgtcctcgacgcagaagatgaaggccggcctctcctggcacacgtcgcaacgcgggaggctggcacctcgaggccggccgggcgttaggtcgttcgcgccggagggcccgtgccattggctcagcccgcccggccgacgcgccgcggcgggccgcctcgaagctcccttcccacgggcggcgtgctgaatcctttgcagacgacttaaaacgcgacggggcattgtaagtggcagagtggccttgctgccacgatccactgagatccagccccgcgtcgcacggattcgttcgcaccaccgccgcgccgcccaaatcacagccaccgccgccatggcagcctccagccgccctctcgtctccgtgaaagccctggagggcgacatggtcacggacgcccccggcatcgccttgccgcccgtcttcggtgcgccgatccgcccggacgtggtccgcttcacccacaagctgctgtcctgcaacaagcgccagccttacgcagtctcccgccgcgctggccaccagacgtcggccgagtcctggggtacgggccgcgctgtgtcccgtatcccccgcgtccccggcggcggcacccaccgcgccggccagggagcattcggcaacatgtgccgcggcggacgcatgttcgcgcccaccaagatctggcgcaagtggcaccgccgcgtcaacgtcaacctccgccgcgtcgccgtcgcctcggcgctcgccgccaccgccgtcccggccctcgtccaggcgcgcggccaccgcatcgagaccgtcccagagatgcccctggtcatctccgactcggcggagtccatcgagaagacctcccaggcgctcaagatcctcaagcaggtcggcgcctacgccgacgccgagaaggccaaggactccgtcggcatccgccccggcaagggtaagatgcgcaaccgccgctacattaaccgcaagggcccgctcgtcgtctacggcacagaaggctccaaggtcgtcaaggccttccgcaacctccccggcgtggacgtcgccaacgtcgagcgcctcaacctgctcgacctcgcccccggtggccacctcgggcgctttgtgatctggaccgagagcgcgttcaagaagctcgaggaggtgtatgggagctttgacgcgccgtcgcagaagaagaagggctttgttctgccgaggcccaagatggccaacgctgacctgggcaggattatcaactctgacgaggtgcagtctgtggttaagccactcaacaaggaggtgaagcgcagggagaagaggaagaacccgctcacgaacatggctgctgtgctcaagctgaacccctacctcggcactgcccggaagatggccacccttgctgaggctgcccgagtcaaggcccggaaggagaagcttgattccaagaggaccaagcttacctcggaggagactgccaaggtcaaggctgccggcaaggcgtggtacaagaccatgatctcggacagtgactacaccgagtttgagaacttcaccaagtggctcggagtgacgcagtgaagcggcctttgagacctagttaagttttgattagttgtgtcgctgaacttgtattgagacgaaatagtattttatcaatctgtcttatcctgcatcttcacaacaagttacctatctgtggactttaagcctgcatgttcgttttatttctccattgccgtgggagcatagtatttgcatgttcgaaccaattatctggattatggtatggatttgtgcacataatgtctgttcatgatgcttgtggtctagtgccgtttggccttgtagtattagtactacttccgtatccgtctcagagataattgatgttttagaaagtaagtgatgttttaggtttgttgaacaatcgactaaatttataagtttttttttgactatttgactatgtg

SEQ ID NO: 70634 - DNA, 1446 bp, Zea mays
  unsure (1)..(1446): unsure at all n locations
  Clone ID: MRT4577_164408C.1
tgacactatagaagagctatgacgtcgcatgcacgcgtacgtaagctcggaattcggctcgaggtgcaatcccctgattcaactcctgttgttccggttactatagtaaattgtggggagctcactgaccgtaaagatattggatctatgagaataggaattgataaaaagagggccgccaaatcaaagttgtcaaagggcccatcttctgggccgggaagtaatgaaggacagcacaagggcccgccgtaacaaatcttcaaaaaggagaaggaagaagagatatttttattcggagtcagatagctcttctgagtcggagactgaatcatctgattctgagagcgattctgacacttactcaagtgactcatctgatgtcagcagttcaagtgatgacaggcgaaggcgcagaaagagacattcgaagaaaaataaacgcaagcgttcaagaagaaagcatgaccaaaggcgtgaaagaaggcgtaggaagcgtgataggaaatcaaaacagaagtcaaaaaggataaagggtgacagtgaagctgaaagttcgagtgatagcagctctgaagatgctagaagcaagagacaccgccnacgggcggaagtccaaggcatcatctcaagtttttgaggaaaatattgctgcagtgtctgctttgaaggatgccacgtcacctcaacaaaagagtggcataccaaacagtccagcacaagatgtctccccgctgcaaaatggggaaaactatacaaatggtgttaatgaatcaaaaattgaaaggaatgcagctgtcatgcctgttctaactggcaaccaaagcaaatctaggtttcctatacttcttcatacatcattctttgtgcttactgcttctggaagcggtgtttcatctgacattgataagcaggagccagagcatgagtgttaatcactcaatgagcaagagtatgagcatcagcccaagaagaagcccaatgaaaaggtcaattaccaccacaaagaggtcagttagcaggagccctgttcaccataatcgcagtggaagtcctgtcggtgctccccaaaaaagcgtgagcaggagttcagccagaaggcagagcatcagcaggagccctgctaggagcctcagcaagagcccacccagagatgcaagcagaagcccccacataagcaggactcctgttaaagctcacagaagaagcattagcaggagctcagctaggtccatggaacaggtccaagcaggagcctggagagaaatgtacgaaaaagtgtcagcccaagaaccattggcaaatgtgagcagaagcccagtaagaggtggtcgacctcgcagggaacattatcatatgtcccagtccacatcgcatggttgttaccaccaccaaacaatggaaagatgcccattcaggaagtggttctcctggtgggtcaccaaaacg

SEQ ID NO: 70635 - DNA, 401 bp, Zea mays
  unsure (1)..(401): unsure at all n locations
  Clone ID: MRT4577_164409C.1
ttgttcgctgtggtaaanatcggtggctacagctngaanaaatattcaggcaccgttggtcatcttcattctgggatcaatgtttcctgatttctcatttgagagaagattgaatgttaggctccttgttagtatggattgattgcatcagttccgatccaccatcgttattatgcaactatcttcaaggtttccagacacttctagatggttttgaagctgtgctaattcaaaatattgaactacttggtgtcggcatcctttctgcgacaaactcgtctatagaatcttctgattccttgggcattgatggcactatgctactagagaagaaggcacaagataatgaagaacaaacactaatgaaatccgtaacatactgtgagaacgatggaaatcat

SEQ ID NO: 70636 - DNA, 335 bp, Zea mays
  Clone ID: MRT4577_16440C.1
gggtcaactcggtccaattttaatattataaaagtaaatattcagaactccagctccaaactaacagaaacaactttgttcgcatcgacaaacttaaacaaaaatgcatgttgcacgactacaggtagcgataaatgccatagcacaaatactgatcgccgcataagatagcactacttcgatgggaccaaaacttactcgtcatcctcatcgtcgtcatctgggcccccccgaggggtggggttggtgggccctttaaaggaaacgggcctcccttggttggatgcaagttcctgggggtggaccctttgggcctccttggggggtggttgggt

SEQ ID NO: 70637 - DNA, 513 bp, Zea mays
  Clone ID: MRT4577_164410C.1
gcattttgtttaaaaaaaaaaaaaaaaaaaaaaaaaaaaaaaaaaaaaaaaaaaaaaaaagaaaaaaaaaaaaaaaaaaaaaaaaaaaaaaagggggggggccgtctgaaaggatctctatcttactttccgcgtcgcctgccaatgtgatgccttgtttttttgtgtcccctcatgttaaattccgtgggccgggggtttataccgccttgtgctgggatgaaccctgttcgtgccctctccttaatttgactggaggggcgatccctctttcgccttgttggctttttagcaaaggaggccaggccggatggcccttgccttccgccgggcagccaaggctggaaagggggaggggccctgcgccgcgccattaattccggcgggagtggtgtttccctctcacgcgaccgtttcacttgcctgcccctcaccccccgccccttttcttctctttccttcctttcttggcaggcccggggggtttcccgggcaagctttaaatggggggct

SEQ ID NO: 70638 - DNA, 1536 bp, Zea mays
  Clone ID: MRT4577_164411C.1
cactcctatgggcgattgggaccctcgaggccggccggggtgccggaccggacggcagtctggccatctataactgtacaccatatagcaccaatcactccgcagtgcagacgcagcgcatgcaggtagcaatggcgggggagacgaagaagggcctggtgctgctggacttctgggtgagcccgttcgggcagcgctgccgcatcgcgctggcggagaagggcatcgcctacgagtactcggagcaggagctgctgggcggcgccaagagcgacatcctcctccgctccaacccggtgcacaagaagatccccgtgctcctccacgacggccgccccgtctgcgagtccctcgtcatcctcgagtacctcgaggaggccttcccggaggcttcctcccccaggctgctccccgacgccgcctacgcgcgcgcgcaggcccgcttctgggcggcctactccgacaaggtctacgaggccggcacgcggctgtggaagctcaggggcgacgcgcgggcgcaggcgcgcgccgagatcgtgcaggtggtccggaacctcgacggcgagctaggggacaaggccttcttcggcggcgaggcgttcgggttcgtggacgtggcgctcgtgcccttcgtgccgtggctccccagctacgagcggtacggggacttcagcgtggcggagatcgcgcccaggctggcggcgtgggcgcgccggtgcgcgcagcgggagagcgtggccaggacccttcacccgccggaaaaggtggacgagttcatcaacctgctcaagaagacctacggcatcgagtagtagagcggactactactagcagcggagatggtaccggccgtacgtacgtggctgccatgcagtttttgtttcggtttgtttaaacgggactccatgaatggatggaactcttcttgggctccgtgtgctacatacacatctgtaaaggtgaactaaaatcacggtaaaaactcggaaattagtttgtaaagggtccagcccccctcctttataaatagagaggtatacggctgatttgtaatcatcaatcgaatcaatacaacatctatttcgcattttatcctaggagtagttctagtctagtttaggtttagctatccaatccccaaattcttcgtctttcttcggctctacgtcgattagaggagtctaggtcggccaggccgagcctagacacaacctaggatctctactccccgacagggtccctcccgggagcgagatccaggcgccgtcggcgatcttccgccgcctctgcgcacgcgcggaccgtccggccgtcaggcagggaactcggattcctgcaccaggtcgcggaccgtccggccctgcgccgcggaccgaccgcggctgaccagagagcaccgccgtctcgtgtcaggtcgcgaaccgtccggccctgtgccgcggaccgtccgcgcctgaccaaagtgcaccgccgctggttcttttgaagtgattggcgcctccaaaaaggcgtcaacacaggtgatgaggaggaaac

SEQ ID NO: 70639 - DNA, 358 bp, Zea mays
  Clone ID: MRT4577_164412C.1
agcaattctttaaggactggcctatggcttcataagatatatttgtcaatccacttcctgtgaacgatgctttatattgacatttgaaggcctgagcaatgcttttgtattgctggtcccttggcgaaagatgtacgttctgctaaaggagttatcttagagaaagcactcggaaacgccgatgactgacgatataacgatccagttatgaaatacaggtcgtgcatgaaatgtacaaacagagtaacttggtcttcggtttgacgcccatgactcagctcgcggtggcggctgcagattctgcaggatgccatcgtgacgcactactcgcgtggtcatacttcaacttgtctagcca

SEQ ID NO: 70640 - DNA, 345 bp, Zea mays
  Clone ID: MRT4577_164413C.1
ggggcgggggaaccaccttttaatttttttggacaaaaataggtgggaacaaaaaccttgcttattttttttttgtctcgtttcatagggggggcaaacaaagggaacaacgggggtccccacccctaatccaaggggggaacggccccttacccggggacaaaagcgaacgggcaccccattcttttgatagataaaataccccggccgaagccaggatgggcccacacattatttccttcagccgccgccgccggcgtcgtatccgacaccaccacccttgggccgaccgggggaaccgccaccgtttctgtaggcggcggcaccacccttgggccgaccggt

SEQ ID NO: 70641 - DNA, 479 bp, Zea mays
  Clone ID: MRT4577_164414C.1
tcgagttttttttttttttttttttttttttttttttttttttttttttttttttttttttttttttttttttttttaaaacaaaaagtttgattccctgaaaaaacggggggactgaaacaaaagattttaaccttttaaccacatttttgcccacccccttttaaaaaccccgtataaaacaaaaggttgccttggcccttggaaaaaaagcagatgacagaacccggttaaatccccgacccaccacctttgttccgggttaaaaacccgcccaaggtggatctttataacctaaaaagggtttttttcccgcacgaggtttgtttttgattaaggtttgtaataaccgaccaccccccttggggggacccgcgaaagtaaagcgtaacactggagggttgttttgatttttttgagggggcaaaatatgaggttgttaacggcctttactgactccacggggagtttggcggccg

SEQ ID NO: 70642 - DNA, 917 bp, Zea mays
  unsure (1)..(917): unsure at all n locations
  Clone ID: MRT4577_164415C.1
cgggtagacctcgatccctgacgccgacccaagcgaacccaacgccgccacccccactccgtctgctctcaccgaccagcacagcgccgcttcgccggccgcgcgaccctcgtcctcgccctcgtcctcgtcctcgtcctcgtccgcgcacccgcccgaccaccacgacgcaaagccctcgggccccgccatgggctaccccgtccccatcgggaaccccgccgctgccgccgtcgctaacggctctgctccggcggccttcggcatcgcgtacccctaccccgccccgcctcatcacccgccgccgcaccaccactacccgtaccctccaccgccgccgcaccaccaccaccactacgcagcccacccgccgccgccgcccagctgcctgcgccacctcctcgcggccatcgtcggcgccttcctcttccttggcgccgccaccttcatcgtctggctcctgctccgcccacgcgccccggccttcgccgtcacctccctcgccctgtcccgtgtcgcctactcccctgccaactccctctccgcctccttcgacgccgccttcctcgccgcaaaccccaacagcaagctctccgtcgcctacttctcgcccctcgcctccgtcttcctcgcgccctcctccccgctcgccgtcgcctcgctcgcgcccttcggccagggccccggcaatgccaccacgctcgccttccgtctcgtcgtcgaggacgcctacgtcgggcccgacgccgccgccgctctcaagaggggcgcggttcgacgtccaggtcaggctcatggncgntcgccgtcttcgatagagggggntggcggacgagccggagggtcatgaggagttatgtgcgatggcgtcaaggtcgttttccgcgggaagaaatccactgaagcagccttccatg

SEQ ID NO: 70643 - DNA, 561 bp, Zea mays
  Clone ID: MRT4577_164416C.1
ccggccgggatgacagaagatcacgagccatactagcatagctctatctctttctactagctgacaactcttgcgaccgctgtatgactgtttggtgagacgtgtagagctagaaccctgactggcgatcgagaggcttcgcgaagcgttactaccccttctccaaggatctccgcgagcccttggacgccatggtaccactcacgacctccctgttcaccttctacggccatacgatactggcccctccgccattgcccgcatcctctgatatctcacttctccaggcctgcgagcatcagatcgacctcgccgactgccagacatcagagccccagggagaggtgctcgacttcaacatcgcgtggccatccgcgcccagcgcaacgagcacaacgtcgacgacgaccacgagtgccatctgctgacgcgcagctgcggccatctcctcgggcaatgccgtgtgccgccatgacctctgggtggatacagccgaggctgttctcaagaacgaagtgatcacgggcaccgtgcccaaagcataagtaaataatgctgacg

SEQ ID NO: 70644 - DNA, 808 bp, Zea mays
  Clone ID: MRT4577_164417C.1
cctcgaggccggccgggacgaccttttcaatagagatcactaaccagcagccattgcccctatcaagtcttccaagacctacaaggtcccgcgtcgtcccttcgagtcggctcgtctcgacgctgagttgaagaccgttggcgagttcggtctccgcaacaagcgtgaggtctggcgcgtccagctcaccctctccaagatccgtcgtgctgcccgtgagctccttactctcgacgagaaggaccccaagcgtctcttcgagggcaatgctctcattcgccgtctggtccgtgtcggtgtccttgacgagtcccgcatgaagctcgattacgttcttgccctcaaggtcgaggacttcttggagcgtcgtctccagacttgcgtctacaagcttggccttgccaagtccatccaccacgcccgtgtcctcatccgtcagcgtcacatccgcgtcggcaagcagatcgttaacgttccctcgttcattgtccgtcttgactcccagaagcacatcgacttcgcccttacctcgcccttcggtggtggacgccccggtcgcgtgcgcagaaagaaggccaaggctgctgaggccaaggagggtggtgacgaggaggaggaggaggagtaaatcatgcgcccctaggccatgtctgactatccaatcccctcaaaaatttcggtacgcgggtcatgttacccgctggcgtcaagcctatcacggctgggaaggcgttcagtttagggtcgcatgcaatgaagatctgagatcacgcgttgcctcctcaaaaaaaaaaaaaaaaaagcggcc

SEQ ID NO: 70645 - DNA, 199 bp, Zea mays
  Clone ID: MRT4577_164418C.1
tgtccacgcgcccggggcctctcgaaaagggtgacctgcgggcgcacaggcgcatcaccacatgccaagtgccagagtcacaacatccaccgaggatgggagacacagcacgaacgccacctctacgaggaggaacactccgagcaaactagggggggctggctaacaaggcaaaacaaccatgggtgctgagaaacct

SEQ ID NO: 70646 - DNA, 413 bp, Zea mays
  Clone ID: MRT4577_164419C.1
ccacctctgggcctgacccgatgttgacatacataccgagatcacccggagatgctcttgttaggctatatatggagtatatagcgggggggggggtgagaactctttcataccttatgcatgccattgcaacagcacaggtattgaaaaggtaacggaaagaatattctgcgaatttcctccttactggtacattaattgtatgcatctgatatgcatataacacatccagaaaacagctgtgcaaatgggcaggctacgaacaatctaagatctattagagatgcattggttgggctttcactggcgatactgcgcctacctttggcttccctatggatacaattgggacatacatgggagcaactggcagggaagctcaatgggggggcattggcgttgacccacacatg

SEQ ID NO: 70647 - DNA, 340 bp, Zea mays
  unsure (1)..(340): unsure at all n locations
  Clone ID: MRT4577_16441C.1
ggcggccangccgagcggagcgagagcccaagccggagcngagcggccggcagccngaacaggagaggcgagagagagagggngcaggnaccagaagaangggnccgccgccggagaagcggcggacgcnggngcnggngaaccnggcgnccancanggagcgcgccgaggaggcgcngcngccggcggngnaccgggaggggggcgccgngcngcacgccacgcccacggggcncggcgcccncacgcngnaccgcnccancgngcaggccgccggcnacccggnggcggccnacgccgngnngcgccacaaccgcgcccacgncaacgcgcngggggc

SEQ ID NO: 70648 - DNA, 1374 bp, Zea mays
  Clone ID: MRT4577_164420C.1
tttaaaaccgcccgcccctttttttttttttttttttttttttttttttttttttttttttttttttttttttttttttttttttttttttttttggcagcaacaacagtgacaattttgcattcaaaaccattccagcgttgcacaacataaataaataagctaaaagcctgatcactgctcaggttagtgaacctgaaacctctactaaactgattaggagaaattactctgaaaatttatctcttaactgaagtacaacagtttctccaacaaaggggaccagaggggaaaagctaacctcaaagtatagaacatacatcactatattagagctctactatcagtgaagaggcacccagctgctgcttgatgctccggttcatctttacatcatgtctgaagttcctgtacagttggaccggtatacatgccagtgtgcatgttgatattcactggagtgtttatggcctccagccatgcataattatctgggttaccagctaccttcgtgcgtccagctgctgagagacttgaaaatggatagtcatgaaaataagtgcaaatccgaccagcgtcatcgttatatggtggggcaaggacatcaagaacagcacaagaagatactgaagtgaagcagtgcaggttcccaccactttggggatacaaaatggaggttggacatggagcagtacgaacatcatctgtatgtaatttggccaaccttgctggctggctacttgctaggacagtaggctctatccaatcatatgatttcacatgcatggaaccataaaggattttgctcagtacagtcattcctggatgatcatgaagaggaatgactgatgaagttggcaagcagaatattccaatagagaatgcatcacagctgtagatatgaaggtacttgatgggccgcgcccaccgaggaagccttcctgaacccttgaggaggttggagtcaaaaaatccatgccccctgtcgtcctcaagattataatctctgagcccaacatccgcaggagtgattgtatccatgagcgaggagatgctgcggacgacatcagcgggcgggggagacgatgaggcggcggaaggggaggggaaggagcgcttgcagagctcgtagagggcctgcaccgggaacgacggctgccgccgcggggatacgccccacgccatttgaatagtttcagagagaggggggcttttcccccacacggattagcgtcttggatgtatggccagtggcgcggcgagaccgacaagccggcgaggggaggagaggggatggggaaggggaagcgaaaacacaagtctactcagcgagggggttctcgtttatcccggccggcctcgaggtacccaatg

SEQ ID NO: 70649 - DNA, 241 bp, Zea mays
  Clone ID: MRT4577_164421C.1
cttccaaaagggttttgttaccttgtaaaccaactatggttttatttaacaatggtaaactgaccggggccaaagtgctccggaattaaaattaaaaccgtcctcctttaaaaaaaaaaaaaaaaaaaaaaaaataataataattattaaaataaatataaaatatattaattataaaaaataaaaatattaatattttataatataatatttgggggggggcccttttaaaggaataaag

SEQ ID NO: 70650 - DNA, 384 bp, Zea mays
  Clone ID: MRT4577_164422C.1
gaacccgaaaaaacaaattttgttgataaacaaaaggggttcacaaatttttttccatacccccctgctcattgggggaaaccccactgcccccctaaagctggattcttacttatttaaactgatcccacatggggcaacgtcggaagttcacatgcttaccaaccacaaatttttataacaatagcttggcttgggtggttcccagaattacccaacgcccccccccaaattgggaccattttaaataaacaacttaaaagcaaattgcccccaaaagcccggtttacttataaagcactcccgcctttttctccatgggatccggtttctcctcccaacataaaaaaatagcccggttggagtcctttttcataggagggg

SEQ ID NO: 70651 - DNA, 684 bp, Zea mays
  Clone ID: MRT4577_164423C.1
tcatgctggaggtggcctgcgggaggaagcccgtggtgcaggacgagcgcgacacccgcctggtgctggtggactgggtgctggaccgctggcgcgctggctccgtcacggacaccgtggacccgcgcctgcagggcgacttcctcgagcgcgaggccagcctcgtgctgaggctcggcttgctgtgctcgcacccggccgggtccgcgcgcccggccatgcgccagatcgtccagtacctcgacggcgatgcgccgctgccggagctgtcgccgacgtaccagggcttcaacatgctgtcgctcatgcaggaccagggtttcgacccctacatcatgtcgttcccgatgtcgtcgacggggatcagcaccatatctgatctgtccggagggagatgaagttttgttgatcgtccatcatcgtgtcagtttagttaccgtactcagtgtctaactggagttcactcttgttctgcacttagcaattcagaattaagacgttttttctctcccttctttttagaacgcaaagttcagaaatgcagaagtgactagtcaacctgattgtagtgtggatgacttgaatgtaaagttatggtcgggcaacttaatgttcagattataaatttctaatcacacctggagaatggggtttgataaaaaaaaaaaaaaaaaaggggcggcc

SEQ ID NO: 70652 - DNA, 547 bp, Zea mays
  Clone ID: MRT4577_164424C.1
gtggaggcccagggtactcgccacgatgagcagcaccttagctaagatcgcggagatagaagcagagatggctcggactcaaaagaacaaggccacagcacaccacttagggctgcttaaggctcgtcttgctaagcttcgtcgagaactcattactccaaagggtggtggtggtggaggtccaggagaaggttttgatgtggccaagacaggtgatgctcgaattggatttgttggttttccatctgtggggaagtcaacactgcttagtaacctggcaggggtatattctgaggtggcagcctatgaattcactactctgaccactgtgcctggtgtcatcagatacaaaggtgccaagatccagctcctggatctcccaggtatcattgaaggtgccaaggatgggaaaggtagaggtcgtcaagtcattgcagtggcccgaacctgtaacttgatcttgattgttctggatgtcctgaaacctttgggacataagaagataattgaaaatgagctggaagggcttggcattcgcttgaacagc

SEQ ID NO: 70653 - DNA, 2853 bp, Zea mays
  Clone ID: MRT4577_164425C.1
gtgcggcgctcgccggccgggcttcgattgaccaatctgctccgggcaccatggagaggatcagtggcccgcgcctcgctgtcctgctcgctctcgccgtcctcaccgccgtcgccgcagcgaccacggacgaggtgcgcgcgcagtccacctacatcatccacgtcgccccaggccacccggcgctgtccgcagcgcgcgacaacggcggcggcgaggcggccctccgccgcctcctcccgcgccgcctgcgcgcgccgaggccgcgcgtgctctactcctaccagcacgctgccactggcatcgccgcgcggctcacgccccagcaggcggcgcacgccgcggccggggagggcgtcctggccgtgtaccccgaccaggtgcggcagctgcacaccacccacaccccggcgttcctccgcctaacggaggccgcggggctcctcccggctgcgacggggggcgcgtcgtcgtctgccgtcgtcggcgtgctcgacaccgggctctaccccatcggccggtcctcgttcgcggcagcggatggtctcggcccggcgcccgcgtccttctgtggtggatgcgtctccgcgggctccttcaacgcgtccgcctactgcaacagcaagctcatcggtgccaagttcttctaccaggggtacgaagctgctctcggccaccccatcgatgagaccaaggagtcgaagtcgccgctggacactgagggccatggcacgcacaccgcctccactgcggctggctcgccggtggccggagccgggttctttgactacgccgaggggcaggccgtgggcatggaccccggtgcgcgcatcgcggcgtacaagatctgctggacgtctggatgctacgactccgatatcctcgctgccatggacgaggccgtcgctgacggcgtcgacgtcatctcgctctccgtcggcgccaacgggtacgcccccagcttcttcaccgattccatcgccatcggcgctttccacgcggtaagcaagggcatcgtcgtctcctgctccgccggcaactccggccccggcgagtacaccgccgtcaacattgcgccgtggatcctgaccgtcggcgcgtccaccatcgaccgcgagttccccgccgatgtagttctcggcgacggccgcgtctttggtggcgtctctctgtatgccggtgaccccctggactccactcagttgcctctggtgttcgccggggactgtggttcccctctgtgcctaatgggcgagctcgactcgaagaaggtggccggcaagatggtgctctgtctgcgtggtaacaacgctcgtgtcgagaaaggagcagcggtcaagctcgccggtggggtcggaatgatcctcgccaacaccgaggagagcggcgaggagctcatcgccgactcccacctcgtgccggcgactatggtcgggcagaagttcggcgacaagatcaggtactacgtccagacggacccgtcgccaacggcgaccatcgtgttccgcggcacagtcatcggcaagtcgccgtccgcgcctcgagtggcggcgttctcgagccgaggccccaactaccgcgcaccggagatcctcaagcccgacgtcatcgccccgggcgtcaacatactcgcggcgtggaccggcgccgcctcccccaccgacctggacatcgactcgaggcgcgtggagttcaacatcatctccggcacgtccatgtcctgcccgcacgtgagcggcctcgccgcgctgctccgccaggcgcacccggagtggagccccgcggcgatcaagtcggcgctcatgaccacggcgtacaacctggacaactccggggaaaccatcaaggacctcgcgacgggcgtggagtcgacgccgttcgtccgtggcgccggtcacgtcgaccccaacgccgccctcgacccagggctggtgtacgacgccggctccgacgactatgtcgccttcctctgcacgctcgggtactctccgtcgttgatctccatcttcacgcaggacgcatcggtcgccgactgctcgacgaaattcgctcgccccggcgaccttaactaccctgccttcgccgccgtcttctcctcctaccaagactcggtcacctaccgccgggtggtgcgcaacgtcggcagcaactccagcgcggtgtaccagccgacgatcgccagcccgtacggcgtggatgtcacggtgaccccgagcaagctcgcgttcgacgggaagcagcagagcctgggatacgaaatcaccatcgcagtgtcaggcaacccggtgatcgtggattccagctactcgttcggatccatcacctggagcgacggcgcgcacgacgtcacgagccccattgccgtgacctggccgtccaacggtggagcagcagccatgtagtagactgatgctgttgctactgtctaccgctgtgggaagaaggacagggccatgagcccatgagatccgaaatctccacgcctcctgcctgccataggaataatttcctcgactgaaccacgcaataattcagctgcccctatcgtggttgtggtggaccaatggaccatgcctgcagctctctcttttcatttaggggtaggttggttggagcagcgtatgtgattggctgcttgcaaggccgtgagggcgccatccattatggctcattggcgattgaacgtgtatgaacaagtttgtaatgactagaaataatcattgtaccatgttttttctatgctggcgcgtttatagcaccatgctttgtgtatgtcccttgtgtacgcatactaaagagaaaagcatggatatggaccacctgagtgttcctaaaaaaaaaaaaaaaaaaaaa

SEQ ID NO: 70654 - DNA, 500 bp, Zea mays
  Clone ID: MRT4577_164426C.1
ggaacacgggcgcatgagcggatgaggagggactcgtgcaggccgacgccgcacgcggacgacgtctgacgcgggctgcatcaccagcgggagcgggaggcgtggctgcggcgggcgtcgaggcccgtggtggtggtctccggctaggatgggttgcccttccggagcggtccgacggctcgggggacagcaggggagaggcgagggcgcggagtctgtccgacgacgacctggaagagctcaaggagtgcgtggatctggggttcggcttcagctaccgtgagatcctagagctgtgcggcacgctgcctgccctcgacctatgctacttcatgagccagctgctacctggacgagcaccaccaccgatctactgggcactgcggaggaggcgccaccgctcgctccggactcgtgggctcaaccgtgcgacacctccaactggaagagctacacccctggcgacagcccggacgaggagaaagcgaagttcaagtact

SEQ ID NO: 70655 - DNA, 358 bp, Zea mays
  Clone ID: MRT4577_164427C.1
ccccccaaaaaaaaaaaacctttttccttgttttaacggggggggccgtttccttttcctaagaaaacaggggccatccctgccacgtcgccaggggccaggctttcctgagggggaaaaaaagcccccaaccaacccccttttttggggggcgaaatggggaaaaaaaccccctccccccccctttttttttcaaaaaaaaacccaaccccaacccctttggaattaaaacccttatggcaaaacccccaattgttttgttaaaaacccctcccgagttccagaatttgttccaaaacccaacatcccgggttccctgggccatgatcgggattctttttcccggttttttcccggg

SEQ ID NO: 70656 - DNA, 1117 bp, Zea mays
  Clone ID: MRT4577_164428C.1
gtaccctccaggctcgtccgggatcttttaccagtgttctcgatcttagaacgagaaacttaaaggaaaaaaagaagtcatgatgaagagtacagatttataaggtaaaaaggttgattaaggttatacacttgcgtagtagttcagagattgttgcgtaaaaaaggtgtgacgtgtatcttgtggagggcatcatgttcttttgactacaaacgaaatttgtccttaagcgggacaagctgtttattcatcataggacaaagtgttgtctgaatgatatgccctatatggggtagctaataactattggcatgatttcaatgagactggatgcacaacctcatttatttgatgttacaagccaaaagtttgttgataggaactgagcactcatgtctcatataacaagcaaacaagggataccactatgttagaagttttcaactatcttcccttccgcttatttttaccaaattaaaaaaaaatgttgtttgtgtggactgttgcatgcaattgagcttagagtttcatactagctccatgactgctgaaactctttctgctgcaataagacttctcgagcgcgcaggagctaacgtggttgagtgtgcatgcctcattgggcttcccaagtttaaggatttctataagctcaacgggaaaccggtttacatcctggtggagtcccgcaaataggacgcagtaaatggtcagacaaaaaagctttctagcttcccgtccaaagaagctcacaacttcactcatttgcacgcgcaagcaaggtggtatgggggcaccgagaaactccgcagtaatctgtgttgaggccccgcccccaggtggcgctgtgtctcctcggggagggggtggggcgcggggtgacgcggtctctctgcccctgtggcgcgcctcgtaccaaaatctaagttcgttctaaaaaactacctttcatttttctcaaggtgcaccaatatgctccttacatgcacttcagttagctaaaggaaattgaggaagtattccatctcggtctgagggaggaaagacgcaatagaacaaggccagtgtaaaaaataaaactagtctgcctgtaactattcctgtacatgtgactgca

SEQ ID NO: 70657 - DNA, 3258 bp, Zea mays
  Clone ID: MRT4577_164429C.1
cgttctgtcagccccggctacgttaaaaggtccgcgggccacctccctacggaggagacgacccccatctcaaggtcgaggtcgagggctcctctctctctaccatctccgttcgatcccatcgccccgccgccgccatggcgtttctcgcgcgggcgctgcggcagtccaactggcgcctgtcgtcgcgctgccccgccgtggccgcgtcctgccgttggatctccccgaccgccgccgcgggatcgccggaggccggcgcggcggtggcgccggccgacccggagctgcctccgccgcgggagcccgttggcggcgcccgcgtggagcttcctcctaacccggaggacgcgctcgaggtattcgtggatggccatgcggtgcggatccccaaggggttcaccgtgctccaggcctgcgaggtcgccggcgtcgacatcccgcgcttctgctaccatagccgactctccatcgctggaaactgccgcatgtgtcctcgtcgaggtcgagaagtcgcccaagcccgtcgcttcctgtgccatgcccgcgctcccagggatgaagattaagacaaacaccccagtggcaaagaagtgcaagggagggtgtcatggagttcttgctgatgaaccatccactcgactgcccaatctgtgatcagggcggcgagtgcgacctccaggatcagtctatggcatttggtgctgaccgcggccggttcactgagatgaagcgttcagttgtggacaagaatttgggtcccttggttaagacagtgatgactcgttgcatccaatgtacaaggtgtgtcaggtttgctactgaggttgctggagttcaagaccttggtatgttaggtcgtggcagtggtgaagaaattggaacatatgttgagaaacttatgacaagtgagctatctggaaatgtcattgatatctgccctgttggtgctcttacatccaagccatttgcatttaaagctcggaactgggaacttaagggcacagagactattgatgttactgatgcagtgggatccaacataagaattgacagcagaggacctgaagttatgcgtgttgttccacgtctcaatgaggacattaatgaggaatggatatcggataaaacacggttttgttatgatggtttgaagaggcaaagactaaatgaccctatgatccgtggtcctgatggcaggtttaaggctgtgacgtggcgtgatgctcttgcagttgttgctgaggttttgcatcaagttaagccggaagaaataactggagttgctggaaaactttctgatgcagaatccatgatggcactgaaagattttgttaacagaatgggttctgataaggttctctgtgagggaaatggtcccaatcctccagcagatctgcgatctaactacctaatgaatacgagcattgctgggcttgaaaaggctgatgtgttccttttggttggcactcagccaagagtggaagctgctatggttaatgccaggattcggaagactgttaaagcaacacaagcaaaggtgggctacattggtcctccagctgacttcaactatgatcatgagcatcttggcacaggaccgcagacccttgttgagattgcagaaggtagtcaccctttctgttcagtactgcaatctgccaagaaccctgtcatcattgctggagctggattatttgaacgggaagaccaagttgccctattctcaacgattgagactgtagccaagaagttcaatgtgattagaccagactggaatggccttaatgtcctgttgctccatgctgcacaggctgcagctcttgatcttgggcttgttgctaatcctgccgagagcatcaagtcagcgaagttcctgtatctgatgggagctgatgatataagcctggacaagcttccagacgatgcatttgttgtttatcagggacaccatggagacaagggtgtctatagggccaacgttatcctgccatcttcagcattcagtgagaaggaaggcacctacgagaatactgaaggatgcacccagtggaccatcccagccgttcctacggttggtgatgctagggatgactggaagatcatccgcgctctttctgaggttgctggggctcagctgccttatgacagtctctcagctgtgagggaccggatcagtacggttgcaccaaatctagtacatgtagacgagagggagacacccacaatctctgcggaggttaagccgcctgtgaagcaacaagtcagctcgacaccattcaaagctgttgtggagaacttctacatgactgatgcaatcacccgagcttcaaagatcatggcccagtgcagtgcaaccttgctgaagaagtgaggttttgcacaccatcaagctaatcttctgcaaacagcttcttagtccccttttttcctttgctgagtttcagtgtttcaccacccgttgcttgttttcttgagtggtttgtgtataatttggactgcctctagatttccagagcagcaaaacttgttcagtacatttccgcgttgtgtgtgagaagcagagcatactcaataagcttgttgctcacattgaatcatacaagtgccacaagcaaatgatttttgccttttgaataaatccgccccaaatttagtacatgtagacgagagggagccatccccaatctccgtcgaggtgaaaccgcctgtaaagcaaaaggtcagctcgacgccattcaaaactatggtggagaacttttacatgactgatgcaatcactcgagcttcaaagattatggcccaatgcagtgcgacattgctgaaaaagtgagatttgcacccttcgagctaattttcagcaaacaactttttagccccccccccctttttttttacttgctacgagtttcgccaccgttgcttgttttcttgggaggttttggtgtataatttggactgcctctagatttttttcagagcagcaaaacctgatcagtacatttccgtgctgtgtatgagaagcagagcatactcaataaaaaaaaaaaaaaaaaaaaaaaaaaaaaaaaaaaaaaaaaaaaaaaaaaaaaaaaaaagcggcttgttgccccaacttgaggggggggggagggggaaaaacacatgattttgccttcaaaaattcgccccttatgttttttgtaatgtgcacctttccaaaaaaaaacaatctaaatcattgcttggttaggttgttaaaaaggaaaatgcttggtt

SEQ ID NO: 70658 - DNA, 270 bp, Zea mays
  Clone ID: MRT4577_164430C.1
cgtggcatcgccccgcgtacgtaatgcatcggaatattcggctcgagtttcaaatcttcgacttcaactttatgggcctcggtttgtgcattaagcttggcttcactggttttcagcctatccactaaggaaaacagtatcctatctttttcaagagcttcgttccttagcgtgatgacctctgatcgaagatttccaagagctatctggcagctctcgtcgtcttcttccttttgagcccttaaagatttacttagaattaatccctaa

SEQ ID NO: 70659 - DNA, 268 bp, Zea mays
  Clone ID: MRT4577_164431C.1
actagatagataaatggtaccggctgctattcgtcggctcatctcgggcatcatgattagatccgagtctggagagtatgcgactgcgatcgctcgtgacctgagcgctattccgtgtcggctgctcgagctgaacgctgcggcaggcttcacaacatgcacccgctccaactccgtgatctacctcgaagccgatggcaacacgtgccaccagcttctatccagatacatccacgctggcactgactactagcttgagctgtgcaag

SEQ ID NO: 70660 - DNA, 845 bp, Zea mays
  unsure (1)..(845): unsure at all n locations
  Clone ID: MRT4577_164432C.1
ntccggtcaggttntgctacctgacacatctntgtacattnggatgcnaacgagtcatcacttgtcttaaccaagggactccagatgtgtcaggtttgctactgaggttgctggtgttcaagaccttggtatgttaggtcgtggcagtggtgaagaaattggaacatatgttgagaaacttatgacaagtgaactatctggaaatgttattgatatctgccctgttggtgctcttacatccaagccatttgcatttaaagctaggaactgggaactgaaaggcaccgagaccattgatgttactgatgcagtgggatccaacataagagttgacagcagaggacctgaagttatgcgtgttgttccacgtctcaatgaggacattaatgaggaatggatttcggataaaacacggttttgttatgatggtttgaagaggcaaagactaaatgaccctatgatccgtggtcctgatggcaggtttaaggctgtgacgtggcgtgatgctcttgcagttgttgctgaggttttgcatcaagttaagccggaagaaataactggagttgctggaaaactttctgatgcagaatccatgatggcactgaaagattttgttaacagaatgggttctgataaggttctctgtgagggaaatggtcccaatcctccagctgacttcaactatgatcatgagcatcttggcacaggaccgcagacccttgttgagattgcagaaggtagtcaccctttctgctcagtattgcaatccgctaagaaccctgtcatcattgctggagctggattatttgaacgagaagaccaagttgccctattctcaacgattg

SEQ ID NO: 70661 - DNA, 1089 bp, Zea mays
  unsure (1)..(1089): unsure at all n locations
  Clone ID: MRT4577_164433C.1
taccctcgaggctggccgggttattattaccaaaaaaaaaaaaaaaaatactgcaatctgccaagaaccctgtcatattgctggagctggattatttgaacgggaagaccaagatgccctattctcattgattgagactgtagccaagacgttcaatgtgactagaccagactggaatggccttaatgtcctgttgctccatgctgcacaggctgcagctcttgatcttgggcttgttgctaatcctgccgagagcatcaagtcagcaaagttcttgtatctgatgggagctgatgatataagcctggacaagcttccagacgatgcatttgttgtttatcagggacaccatggagacaaggctgtctatagggccaacgttatcctgccatcttcagcattcagtgagaaggaaggcacctacgagaatactgaaggatgcacccagtggaccatcccagctgttcctacggttggtgatgctagggatgactggaagatcatccgcgctctttccgaagttgctggggctctactgccttatgacagtctcttggtgtggaccggatcagtgcgacctttccagccgtttctacggttggtgatgagggatgaggaagatccgtgtttttccgaggttgggggctactgccttacgacagtttttcagctgtgagggaccggatcagtacggttgcaccaaatctagtacatgtagacgagagggagccatccacaatctccgccgaggtgaagccgcctgtaaagcaaaaggtcagctcgacgccattcaaaactatggtggagaactttctacatgactgatgcaatcacccgagcttcaaagattatggcccaatgcagtgcgacattgctgaagaagtgagatttgcacaccatcgagctaatcttcagcaaacagcttcttagcccccccccccctttttttacttgctacgagtttcgccaccgttgcttgttttnttgggaggttttggtgtataatttggactgctntagattttcttncagagcagcaaaacctgatcagtactttnccgtgctgtgtatgagaagcagagcatatcc

SEQ ID NO: 70662 - DNA, 1353 bp, Zea mays
  Clone ID: MRT4577_164434C.1
cccacgcgtccgagaatgggttcagataaggtgctgtgtgagggaaatggtcctaatcctccagcagatctgcgatctaactacctaatgaatacgagcattgctgggcttgaaaaggctgatgtcttccttttggttggcactcagccaagggtggaagctgctatggttaacgccaggattcggaagactgttaaagcaacacaagcaaaggttgggtacattggtcctccagctgactttaactatgaccatgaacatcttggcacaggaccacagacccttgttgagattacagagggtcgtcatcctttctgttcagtactgcaatctgccaagaaccctgtcatcattgctggagctggattatttgaacgggaagaccaagatgccctattctcaatgattgagactgtagccaagaggttcaatgtgactagaccagactggaatggccttaatgtcctgttgctccatgctgcacaggctgcagctcttgatcttgggcttgttgctaatcctgccgagagcatcaagtcagcaaagttcttgtatctgatgggagctgatgatataagcctggacaagcttccagacgatgcatttgttgtttatcaaggacaccatggtgacaaggctgtctatagggccaacgttatcctgccatcttcagcattcagtgagaaggaaggcacctacgagaatactgaaggatgcacccagtggaccatcccagccgttcctacggttggtgatgctagggatgactggaagatcatccgtgctctttccgaggttgctggggctctactgccttacgacagtctctcagctgtgagggaccggatcagtacggtcgcacctaatttagtacatgtagacgagagggagccatccacaatctccgtcgaggtgaagccgcctgtaaagcaaaaggtcagctcgacgccattcaaaactgtggtggagaacttctacatgactgatgcaatcactcgagcttcgaagattatggcccaatgcagtgcgacattgctgaagaagtgagatttgcacccttcgagctaatcttcagcaaacaacttcttagttccctcccttttttttacattgctacgagtttcgccaccgttgcttgttttcttgggaggttttggtgtataatttggactgcctctagattttcttcagagcagcaaaacctgatcagtacatttccgtgctgtgtatgagaagcagagcatactcaataagcttgttgccccgactgaatcatcatacaagtgacaaacacatgattttgccttcaaaaaaaaaaaaaaaaaactcgagactagttctctctcctcgtgc

SEQ ID NO: 70663 - DNA, 646 bp, Zea mays
  unsure (1)..(646): unsure at all n locations
  Clone ID: MRT4577_164435C.1
tccactcggcggccacggggatgtgggagtgccccgacttctacccggtcggcgcgcccggccggcgcgcgggcgtcgagacggagacgtcggcggcgtccgacggcgacggcggctctcctcgtcgtcgtgagcagtccaagtacgtgctgaagaacagcctcgacctgcggcggtacgactactacaccgtcggcacgtacgaccgggcggccgagcggtacgtgccggacgaccccgcgggagacgagcgccacctgcggtacgactacggcaacttctacgcgtccaagacgttcttcgaccccgtgaagcggcggcgggtgctctggggctgggccaacgagtccgacaccgccgccgacgacgtggccaaagggtgggctgggatccaggcgattcctaggacggtgtggctagaccccagcgggaagcagctgctgcagtggccaatcgaggaggtggaggctctgagaggcaggtcggtcgctctcaagaacagggtgatcaagccaggacagcacgtcgaggtcaccgggatacaaacggcacaggccgacgtggaggtgagcttcgaggtgtcgagcctggcgggcgccgaggcgctgctggacccnngcgctgccagcgacgcgcagcggctgtg

SEQ ID NO: 70664 - DNA, 333 bp, Zea mays
  Clone ID: MRT4577_164436C.1
tctctacgcgtggcaaaggtctaagacagggggcctttacttagcatggggcatactctgcactcacatggagcatccaactctttagtgaaggctcaagagcaacatgagtgggaacatatacatagcttctcggctgtcctcgacaccttctaaagagcaaaagttcacatccaggagggaacaaagggcgcggagcaactaactaagggctaccacagtatttattagcaattcatccacaatttgaatcaataccccacagaagattttgaaaccagatgaaaaaaattcaaccctctttttaacgagggtatcaccagagaagaacca

SEQ ID NO: 70665 - DNA, 558 bp, Zea mays
  Clone ID: MRT4577_164437C.1
gccggccgggatgcagacccgatcggctgcttccccatctatttcaccctctacaggacctccaacgccgccgactacgaccgcaacggatgcctcagcgactacaaggggctctcctccgtaccacaacgactctgctgttgcggagcctgcccggcctgtccaagacgtacccggacgcccggatcatgtactcctacttctacacccacgtcaccgacatgatccgggtccctcacaacttccgactcaagtacggcctcaaggtctgctgtggtgccggcgggcagggtcagcacggatacaacaacaaagcgcggagcggtatggacgcagtcagcgactgcgtcgactcgcgaaactacctcatctgagatctaatccacctcacagaaggggtctaccgttccattgtcgacagctggctaaatggaccctactgaaagacatgcatacagcactgattaaactagatgtcgcgacagatgactgagatacatagttctgctacaagcatattatacgtgagtgacgtcatcgtgtgttgtgtgtgtacca

SEQ ID NO: 70666 - DNA, 297 bp, Zea mays
  Clone ID: MRT4577_164438C.1
atggcgccgtcacaccgtccagctcatcatcacctgaagctcaacctgcaatcaagcgtgtatggtggtgcgtacctgatgactgacaatgtacgagggaacttctaccggcaggtttgcagctcccgtcagccaaaggtggcgaagtggcagaacaagtcagagcaagcccccggcggcgccaacaggcatgccggtaggtgtggtgggctgcagctagccttgccggggacaagcaagggacctggtcaccggggcaccgaggtggtagtctggatggaggatgaggggaggtga

SEQ ID NO: 70667 - DNA, 342 bp, Zea mays
  Clone ID: MRT4577_164439C.1
tgtagtcgttccaacatcaatcaatttgttattactgctcgtaattcttcctcgcatacgggatacttcaataaggaccaatggactaccacatcatattcatttatgcacatttagaatatcatctaaactaacctctttcacttatcagattccaactttgctctcccactctgatgctccatcttcactatcatgaactaactcatattccttcactgtcgaacacattccatcttcttgccacataaatcctagtagatcgcttactatatctactgatcaagcatcatcctttttccaatcggcctaataactatcaatacttcatataaaacttta

SEQ ID NO: 70668 - DNA, 547 bp, Zea mays
  unsure (1)..(547): unsure at all n locations
  Clone ID: MRT4577_16443C.1
tgggtaccnctcgggccggccgggcacaccttcccctttactcttccatgcctccgcctgcgaactttgcaacccgtgccgctatgccttccgtacccgacctcgggcccgggtgcagacatgcatgatnccgttgctgagggattggagcaaccgctattccatgttaccgctgagacacccattaaatgggtagccgtacaataaggcgggggggaacatatggactggcgagcaggtgtacctctgcgcgggcgcgcaccactgtgacgcagccctgatgcacaactagcgccactgcatatgacatgtgctagccttcttcagcgactcagacgagatggtgctctaaaacctcccctgccgctttatgagatatgatcaagacgtcgaagggcacgcctttcacaggtctaacatcgacaagtggaacatccactgcaagatgtactcgctgctgctcagaacctacatccgagatggcaccaatacagaccgccttttacgagccattgaaactgtgcccgtcgtacaccgtaaggccgac

SEQ ID NO: 70669 - DNA, 235 bp, Zea mays
  Clone ID: MRT4577_164440C.1
tttacattttcggcggcccacaataaaactgacgatgggaaattttaaccacatgaggaggctcatacccaggccagaggactatgatctgcgccacgccgctacaggggtcgaagccgggccgctgatgacaccgccccagccggggggtaccctacctctctactaactcctgaaaacacaagacgcatcttacgagtaaaaaggacgcctatgatctgaatgcaacgcgaac

SEQ ID NO: 70670 - DNA, 259 bp, Zea mays
  Clone ID: MRT4577_164441C.1
gtcctaggggccaagggaaatgctgttggtgagaatcgacctcactgtcagcgtttctccacctgaagtgatgatggatgagaaaaaacaccaccaaatgacaagtcacaccctccccattagtatcctgttaggggaaaatagtagcagagtcattgttacaggtgtactatggctgtatttttagagattaatttgtgtagattgtgtaaattcctgttgtctgaccttggtggtgggagggggagactatgtgtca

SEQ ID NO: 70671 - DNA, 507 bp, Zea mays
  Clone ID: MRT4577_164442C.1
tatttactctacttacaaaccaaccaaacaaaaattacggttcgtgacgaatagaacagactatgatcgagccaacagcattataattactatggaaaaagatggataggcaaatacacaatacgaacatgtgcttaaagttatacgtaggtaactaccacatagttttaaacgaagctataccataacattgctctaaattaattgcaaaaaggtatccaaaattgatccaatatggagggaaacatgaataagcattggcttttagaataactaatatcaaacctgatatatatgtgagaaaattgtataaaagaaataagtatctataggagtaacactctgcaagagaacaatgtatttaaacccatttctatgataaaatgaaacatatgcgaaaaagagaataaaatacttaacttaagacttatttattattattattgaaatagcttttcaacagagaatcaggagattaatcctgaaagacaagatccactctttacc

SEQ ID NO: 70672 - DNA, 266 bp, Zea mays
  Clone ID: MRT4577_164443C.1
attgtctataagcatttggctccacaaatgtatttggattgttttctatgtgaagcaaaccaattataattaaccacatgttgtagtaactggtctttttatatttaagcagaatcctgtaagattgcttgtctttgcttaaaaacaatacctttgaacatttttgaatcacagaatagcggtaccatgatagaatactgcaattgtggtcagaattacagtatgcacaaagaattaattagcattattaaagagtcctcactaaa

SEQ ID NO: 70673 - DNA, 441 bp, Zea mays
  Clone ID: MRT4577_164444C.1
ggccgggccgggatcgcaccaccacacccttagttctgtgactgctgctcctacttcccacagtcgcagccctgtctgccgaactagacccgtcacaagagctgtacgtgttcctccgttgcgacccgaagggaggtcgtcccagcgaacgcgaatggacccaaatcaggccgtgttgcgcatttcccgccaaacagatcacagaggatctcagctctgatacttgccaagaatgcaacggcctctccggaacaggaaagatcaccggacagagaccgatgagggagggtatccactgtcacctccgccagggcgactgcgaataaaggcatgtcaaggcatcaaagacgtaacgtccgagggggtggaacatcaagcaaagcaggtgcctcacactcgataactgcatccagatcaggacgagcatcacgtacacgacca

SEQ ID NO: 70674 - DNA, 223 bp, Zea mays
  Clone ID: MRT4577_164445C.1
gctaaagaaaaaaacaattatttctcttactggatacagggggcgtttacgatgacatgctttacaagagcagcagacaggcaaggacaccagcattcaactacttatcaacagcagccgtccttgagccaatggaaacaacaagctacagcagtctagcgatcggcacacgctcaatcgaatgacctgtcaatccccctagtacaagagagacttcattgtt

SEQ ID NO: 70675 - DNA, 663 bp, Zea mays
  Clone ID: MRT4577_164446C.1
ggccgcttttttttttttttttttctttttttttttttttttttttttttttttttttttttttttttttttttttttttttttttttttttggcccagggaacaagtttgggagaacacaaaaggctgggccccgactacgacacgtacataaccagaaaagagttaaggggccacaaactcggaaggggggggggaggtttaaaaaccgggaacccaaatgccaggaccccggcgggtcacacgtccgaagggacacccctgtacagctcctccttgtccaggcgcgggggggggacggcctgcagggggggggccaagaaggggacgagcccgggggaccccataaggcccacgtcctcggggcaggccccgctcgggagggcccacgggaaggggggcaacatggggccgatcatggaccccacgagggtgatcccgagctgggcgccggggcacacccgggggccggggccaaacgggaacacgcggaagtcggcccccttgatgtcgatgttctcccggaggaaccgctccggccggaactcgagggggctggcccaacctggggggcgcgcgccaccgcccaacgttgacgacaacgttggcgcccttgggggatgtcgaaaccggcgatcttgaccctggccctggccctggggg

SEQ ID NO: 70676 - DNA, 923 bp, Zea mays
  Clone ID: MRT4577_164447C.1
ccggccgggaaccaggaaaccaccaccactccattcctctccgtcgacatggcggcttcctgccgccaccgccgccgccgtcacacgccgccgcagagctagctagctaccgacgaagacaaggcgtcaatggccaaggcgcctctgctgcctctgtcgctgctcgtgcacgtcgtcctcgccgcctcctttccggccccgtgcacggcgcagggtcgcaccgaaaacatctcggccgtcgaggccgcggtccgcgcccgcgcgtccgagctgctccgcgacaccaccaccaacgacacgacgcagcccgtcgacctgctgcccctcccgggcaacctcctccggcgcgggcgtccgggcctgggcgctgcgcgtgagcagcaacgcgctctgggccgacggcgtcaacgccgccggtttcgtcgtcccgccgcgcgtcgtgccggccccgttcgcgcgctgcctcaccatcgtcttcgagcgcttcaccggcggctcggcggccgcgttcgccgcgccgcgcctctacgcgctggccgcgcccgtggccggctttttcgcgtacgacgcggcggcggggcccgacgcccgggtctcgctccgggcgctcggcgcgccggtgcgcgtcgagttcgatgacgagctgtcggcggcggctctggacaaggggttcgacgcggccgccgcgctgtgcgtgacgttcgcggccagcggggaggtcgtggccacgtacgccgtcacgtcgggctccgcgtccacgtgcgcggtcaccggcacgggccacttcggtatagtggtgcggctgcccgagacgccgccgccagcctcagccgggtggtgggcgtggacggtgggtgtcggcgccggtggggtgctgggagccagcgtcttggcgctctcggtggccggcgcgatcagctgga

SEQ ID NO: 70677 - DNA, 310 bp, Zea mays
  unsure (1)..(310): unsure at all n locations
  Clone ID: MRT4577_164448C.1
acggaaaaccccgcgaacgnaagcaaggaacacatagagcggccgcaccccaaataatacacccggaacagaacgacaacctacagagggcaagacggaaaaatagaaccaaaaccccaccgccaacacaggaaaacggaaaaacccaagagacgaaaaccgaggaaaaaacaggagcacaacccaaagcccaaacccggccccaaaaacgcaagccgaacccgcaacaaaaagcccagagcaaaaaagaccgcaaccaaacaccgacgaaaagcccccccaaacacaaacacaaacagagaggaacaaa

SEQ ID NO: 70678 - DNA, 433 bp, Zea mays
  unsure (1)..(433): unsure at all n locations
  Clone ID: MRT4577_164449C.1
cagcgttctgttgcnaaaaaaaaaaaaaaaaaggggggggggggggaaaaaaaaaaaaaaaaaaaaaaagggggaaaaaaaaaaaaaaaaaaaaaaaaaaaaaaggggggacgttttaaaggatcaaagttaaaaaacacgtacttgacaagggttttttttttttttaggggcaacaaaaaattaaatggggggggggggggcgtataacaacntnctaaactgggaaaaaccttggggggggggggagtgaatcgtcttgcgggagatccccttttcaccagttggggaattagcaaaggggcccggacggatcgccttttccaacatttggcccccttgaatggggagtggaacgcgccgtgtnccggccaattaaccgcggtggggggggtggttccccccangttgaccgttccctttgccgggggct

SEQ ID NO: 70679 - DNA, 206 bp, Zea mays
  Clone ID: MRT4577_16444C.1
ttcactcgatcgcgctaagctatctgcggggggtttttacaaaatcttgggcgggagctacacctacataaaatgcattggacctgcccctcacaggagaatagccgttcgctcagctgagggggaaacaatgaactttgcaaaagagctacttattttgctggactcctctagctgcaactggcggcttcaaacttcagatgtgg

SEQ ID NO: 70680 - DNA, 305 bp, Zea mays
  Clone ID: MRT4577_164450C.1
tgcaatacatctaccagacttgcagaaaggaatcgaggaggcatagaagcaggagaagaaagttatgcactagatacattcagactctgtatgatcgctaatatacaacagaaatttggggtctccaaatcgcgtggagagtgtaccagtaccatagtgtttaattttctgtcgagtccgatcaacaacaactaagttaccaaggacctgtcaatgtactccggaagcatgggttcttatacgcatatggattgctgaccaattccagaacctggttttgctgcatatccattatttgttcctgc

SEQ ID NO: 70681 - DNA, 2088 bp, Zea mays
  Clone ID: MRT4577_164451C.1
attcggctcgaggaagtttgaatcgaagagcactatgctgaacattacaaattggagtaagtctcagccatgttatgtgaaccgtgaaattatctctcttctttcaacattggggataaaggatgaagtatttgaatcgatgcaacaagatgacatgcacgaatcagatggaatgctaacaaataaagaagctgctttgtctgtcctagggaaaattggtggcggtgataccaagacggcagctgatatgcttctgcaaggctatgaaccaagttcagagccttacctattaatgattcttaaagcccatcgggctaataggctgaccgacataagaactcggtgtaagattcatgtccagaaaggccgtgttcttattggttgtttggatgaaacttgcaaattagagtatggccaagtttacatcagaattacaaagaatcacaaggagcagaagtacagtgaacagccgttcttttgcaacgatgatggcaaaacagctgtaattgtaggaaaagttgcaatcacaaaaaacccttgtctccatcctggtgatgtcagagtacttgaagctgtatatgaccctggattggatgctaggggtcttattgattgtgttgtatttcctcagagaggggaaaggcctcatccgaatgaatgctccgggggcgatttggatggcgacctcttctttattacttgggatgacaaactgattccggagaaggttgatgcacctatggactacactgcaacgaggccacgcataatggaccatgctgttacacttgaggaaattcagaagcacttcgtcagttacatgataaacgataccctcggtgccatctccaccgcccacttgatccacgcagaccgtgatccgctgaaagctcgcagccccgagtgcgtccagctggccgctctgcactccatggcggtcgacttcgccaagacgggagctccagccgagatgcccctggcgctgaggccccgggagtttccggacttcatggaacggtgggagaggccaatgtacgtctccaacggcgtcctcggcaagctctaccgcgctgccctgcggcacgaggaggacgcagaagcgctcctgcctgcgggcccaccgagctgcgtgtacgacccggacctcgaggtcgccggtttcgacgagttcctggacgcagcggaggagcggtacgaggcgtacgccgagaggctgggcgccctgatgacctactactcggcggagcgcgaggacgagattctgacaggcaacatccggaacaagctggtgtacctgcggcgggacaacaagcgctacttcgagatgaaggaccgcatcatcgccgccgtcgacgcgctgcacgcggaggtgagggggtggctcagggcgtgcaaggaggacgacgcgtcgagggtggcgtcggcgtggtaccacgtgacctaccacccggaccgccgcggggagaagcggttctggagcttcccgtggatcatctgcgacaccctgctggccatcaaggcggcgcgcaggtgccggaagcgggtggaagacgccgccgtgcccatggactgcgacggttcctagacggaggtgccactgtggcagtgaagtgagcctgtgatgcgagtggaaactgtagtaataagatgcagtaccgctgagcgctgattgctgtaaaaagaagttagcgcgggttgtcttgagctcctcctaacaggcgtacgtatggtggaaccgtggaatcatgatttcgcccccttgctgatgactataagcaggtacggttagctaagccgttacgtatgggtcaccgagttccccggccctaaagttgttgagggcttggggtggctgcttgaccaccctcgagtcgtgacatgttctgtcccccctgcgatcgtctaccaaacctccaacagtccaacgctactactactcatgtgagttttgactttccacaaatacttgacgttttggttaacaaagtcgtggagcttagcagctatcaagagttaaatccagaaacataaacgtcaaaatatgtacagctttgtgttgtaaagtagttgcataagctcttataagtc

SEQ ID NO: 70682 - DNA, 1454 bp, Zea mays
  Clone ID: MRT4577_164452C.1
aagtaatgccgctctgggcagccagctagccatatatacggcggcattcttcttctcttcttcttccccaataacatatcgagctgcaagctgctctgcttcttttctagcatgggcatgagggtcttgttggtggtcgtgctcatctcgttcgccccccttattaccactaatgcagcagcaggtgtcaacgccacgagatctgctggtaggcagcagaagcagaagcagaagccgctggcgcctgccctcatcgtgttcggcgactccatcgtggaccccggcaacaacaacgacatccgcaccatcatcaaggccgacttcccgccctacggcaccgacttccagaaccacagagccacgggaaggttctgcaacggcaggatacccaccgacttcatcgcctcccgcctcggcatcaaggagcttctgccgccctacctctcctccgagccgctcgacaagcacgacctcgtcaccggcgtcagcttcgcgtccggcggcacgggcttcgacccgctcacgccgcagctcgcctccgtgatctcgctcccggaccagctcaccatgttccacgactacctgggcaaggtgcgcgacgccgccggggacgccagggtgtcggatatcctgtcccggggcgtcttcgccatctgcgccggcagcgacgacgtggccaacacctacttcaccctgcgagcgcgcagcagctacgaccacgcctcctacgcgcgcctcctggtgcagcacgccaccgccttcgtcgaggacctcatccgcgtcggtgcgcgccgcgtcgccttcatcggcatcccgcccatcggctgcgtcccgtcgcagcgcaccatgtccggcggtctcgaccggggctgctcgcagggccacaacgagatcgccgtcgcatacaacgccgggatggtgcagcagctggcggcgctgcgggccaagtaccccgacacgctgctcgtcttcatggacatctacggcttcctctacgacatgatgatgcacccgcgcagctacggcttcacgcagtccaccagaggatgctgcggcacgggcctcctcgaggtctccgtcctctgcaacggcgtcacctccgccgtctgccaagacgtcggcgactacctcttctgggacagctaccacccaacggagaaggcgtacaagatcctcgccgacttcgtcttcgacaactacgtcaagctcatcctcgtctagcttaccattattttcatttcatgagatggatttgatctgctggattatgcattaattgtttgctgctgtatttacatttgcttgtctgattaattgtttgctagctaatcttccggcctctacatctctctatctatctatatttacgtgcatttattacgactctattaattgaattattgtacgtccgtgtcataaattaattaattaatactataataatagttgtatct

SEQ ID NO: 70683 - DNA, 492 bp, Zea mays
  Clone ID: MRT4577_164453C.1
ggaaaaaaaaaaaacaaaaaaaaaaaaaaaaaaaaaaaaaaataaaaaaaaaaaaaaaaaaaaaaaaaaaaaaaaaaaaaaaaaaaaaaaccgggtgggctgcccggcaaaccgctgagagccccgagcggggaaactggataggggcgtcgagcgcgtcggggggtttaatgaccccgggaaaactgttgccggggtcgccgccgccggggccagcaagcaggatggttcgccacaggtttttttttatcgggtacttcctccacaaccgcgcttgttttgaaattgcgtcgccgttgttgttggcacaggtcccagcgccatgcagaagccccggaaactcgccgaccgacctggacgccgccacaaaccggttcacaagagccgccggcgtcgccagttctttgggcacggagagcagaaaacgcgtcctgcgacgctcgtggtggttcctgttcctgacgacccgcctgttaagcctggcgttgtcgg

SEQ ID NO: 70684 - DNA, 542 bp, Zea mays
  Clone ID: MRT4577_164454C.1
gtgcaggcgctcgatgccggccgggcctccataactttcatctgcgctctattttctgctctctctgttcctcacggtccggctggtccatcctggactgcttcgttatgaacaactgggtgtggcacctcttccgatcgatagccgactgtgcagggctcctcacccacccgcggcaggatgatcccggccgggatatcggctccatcgtcatgtataaacgtcactgctagcttgggttggtgtcgacctcctagactctgaactatcggcacaccaaatcgtcattttgtcgccgtagaggtattcaatagttacaaagcttgacggtattgttcctgcatcacactcctgtgattttccggatgagtgccgcactgtctacttcttgagtgatatttctgaggacggataccgtgagccgtcccactccagatggcaacgcgaaggacgtatcctacactcccaactgattacactcttgaggaccagatgtatggagtcatcttaaagcgggaaggatcttgctacgacggcccaat

SEQ ID NO: 70685 - DNA, 185 bp, Zea mays
  unsure (1)..(185): unsure at all n locations
  Clone ID: MRT4577_164455C.1
acttgaggaacgtcagcgcaagcactactctttcaaggataagtcctattctgaagaatgagaccgggggaaaagctcaagccagctactcctttattgttcaaagagagatgctcatgttatgatacttccacgagaaaccnanactgatgactcctatgtggagcctaaaagttatgatgaga

SEQ ID NO: 70686 - DNA, 263 bp, Zea mays
  Clone ID: MRT4577_164456C.1
ggcggccgccccccctttttttttggtttgcttttatcgactttggggggaaacacgggtgcataaaacaggtcccgatgttctaaaaatgcgcacacttgtactggccatccctggccaaaagtttctcctttcaaatgctgaaggtgggcgaccaaagacctttaaaattattgggacccttatttcggtacggaattgtgcccaacattattaagaagccagcctttcgccttggccgcccgaccgacagagatgcccaa

SEQ ID NO: 70687 - DNA, 462 bp, Zea mays
  Clone ID: MRT4577_164457C.1
cttggccctggacctttgggctgatttatgtgcttgggttcatcggcctagggatacgtcctacaagtaccgagactcttagagttgagttcgagtatggaaggcattaccccgcctagtcctgttcagcgcccgggacggtttaacggcctaaacttggtctagcgttcggtcattaaaacgggaataaaggatagtcattttgactaaccgcgacgccgcgcgcccgcgggcacgcctctctcggagcccgagtcgcggccaccccactgcgccggccgactgcgcccgaaacgtccaacctaggatcgcgatactctgagccgccccaaaaaaaaaaaaaaagggtggttgtctcagaggacttaagtccatgcatgtgcgtacgtgatgctacagtctcctcacagcgctattcaaacctaacctatcggttgctgccccataatgctgcgatcggga

SEQ ID NO: 70688 - DNA, 202 bp, Zea mays
  Clone ID: MRT4577_164458C.1
tgcatgcgtacgttcacgcattcgactgcgatcgcgctgctgctgctcatgatgcgtacgagggttgataagttattgagacaagctgctggcataatctggttggctgatgactatcttatggaccctattgattatcccatggaggggttatccaaccttggaaccttaccttaaccgttccattgattcttaccctttc

SEQ ID NO: 70689 - DNA, 1349 bp, Zea mays
  Clone ID: MRT4577_164459C.1
ctggccgggtgccccacaccatagatctctttcgcgtcagtcaatgccgtccgccgacgccggagatgctgacgcgatgcccgcgccgccgccgcaaacaagggccgccatctcgcatgtcatcttcgacatggacggcctcctcctcgatacggaggggttctacacaacggtacaggagaagatcctgatgaggttcggcaaggtgttcgactggtccgtgaaggccaagatgatgggcaagaccacggccgagtccacgcgcatcttgtttgaggagttcggcctcgccggcctgctcaccccggagcagttcctggaggaacgcgaaaccatgctcaagaagctcttgcccacttgcgttgccatgccaggtctgctacgtttgatcaatcttctccacacaaatggaataccgatagctgttgcaacaggaacccataaacatcactttgcactgaagacacaaaaccacgaggacatattttctctgatgcatcatattgtcacaggagatgatccagaagtgaaggcgggcaagccatctcctgatattttccttgctgctatgagaagatttgaggctaatgtagaacctagtaattgcttggtatttgaagatgcaccgttgggtgtggcagcagccaaaacttcaggaatggtttttttgcacgtggtgatggttccagatccaaggctagatgtttcacatcacaaaggagctgaccaagttctcacttcactattggaattcaatcctagcgaatggggcctgccaccttttgtggattagattattttcagagacatcaagcatgtttcacagacacacaagccctacaaccacacagtaaacgcccgtattcatattagggaaatttttttggttgcatatagttagaaatttcaacataaaaaaaggaacacacctgtttctgcctagtaatatactggtgtaactactactaaacatctgtgctgctactgcagtttacagtatttttaagaaacattcttcatatataaattttattttaatagaaatttcaattgattttggaattagtagcaaaattttcaattttctacctgcttgccacagaaaatattatgactccccataagtagaaatttcctttgttgaaatttaatacaaggttcaagaaaacaccgttggtatgcacgcgttaggctagcgcctagcgcccaggacgtttaaagatagattaatcgtgtttaaacgtaacacattgtacatgagcatagtaataaaaacaatatgtctattctcatgtcattttcagtccgttatcatacaatgaaagactcatctgaatctgtttgggagt

SEQ ID NO: 70690 - DNA, 304 bp, Zea mays
  Clone ID: MRT4577_16445C.1
agacaggattcagcacgccggctggtgtgtagggaggttggaagaatgccgcccaagagcgtcgtgcagatcggctgcgccaacgtgacgaactactggagcgactacgccctaacgtgggtcatcgcggacgtggagcaccagaacagggcgctagctgacactcttacttagaggcggtgacagattatcttgaaaacggtatctcttaccgacatgattattgacctaacacgctgaccaattaagtgaatcatcatgaacgctatggctgaagctgatgactatacgaagtgggaaatca

SEQ ID NO: 70691 - DNA, 237 bp, Zea mays
  unsure (1)..(237): unsure at all n locations
  Clone ID: MRT4577_164460C.1
gggatacggtaagtgctgaattaccgggctgatcaactggcgacataccaaacgccttaactggcacaagaggaattcagacgcaggaacgctttcgccattgactatgccactgcatatacacagatgttctaaccttaaaagagaatgagttncaccagaaaccatgctctgaatcccgacattgctcatgtactagctgaaccgggagcgactgagtttggggctgccgtatgc

SEQ ID NO: 70692 - DNA, 262 bp, Zea mays
  Clone ID: MRT4577_164461C.1
cacatctcacacaaaaaacctcctatcgctattacgctcctcttccaaacccgagcgagcgtagctcaatactttacaacctcatatcaatcccacatatccatcatccccaaatctttcaaaaagtcctttgccaataatcccatggcaattaacccatattctctaaactcctacaatgctacgacagttaacaaatctatatatcttttaaactccttctctatgacatcttcttccctcgctatcacaatatattcta

SEQ ID NO: 70693 - DNA, 692 bp, Zea mays
  Clone ID: MRT4577_164462C.1
gcagtagcagtggtaacaacgcatagtacgcggggtggctggttggcaaaggttggaatttgtgatgagaagaatgaagaaagtacattaatgccctaaaataccatttgtaaataacttatgtaaaaatagatgggtattattgtaaattagtacaaagtcagttcgtctctcctataaatagacgaacaatgccctacataaagtagctttttgctaggtgctacagcttcgtatcgcttagccttcgaaactccttcgtgctatcttgtgtctagaagacgaaggtatgactgcaaacttgtatcatatgaagagaaaaaaatgttaagacatataagatgaatttccatatcttatttcattgtgcgttgtttattccatctgattacactttaccttcgtccttaagtacttactctgaagggataacgattcaaggatgaaggtttctgcattttaactttgtgttgccttgtttttttattccatatagcaattgaaaacaagtgaccaacagggtatgttttatttatttaaataaaatgggtttcacacaaagaataattcaaataaaatgagaccttagtacattattgtcaaacaaaatcatgttctacaattaatgtattaaaacacttaattaaattttatactagtaaaatgcttgtgcattgcaacaacacataatc

SEQ ID NO: 70694 - DNA, 345 bp, Zea mays
  Clone ID: MRT4577_164463C.1
ccatcttcttcacgggcgcgctccaacatgggcctcgccgcgactacgggttcctcatggcgggccgcttcgtggggagcatcggcgtcggcttcggctcatgatcgcccccggctacaccgccgagggtcgcccactccgcgcgtggggggcctcacctccttcccggagttcttcaacaacttcggcatcctcccccccccccaccgggaacttcgccaaaaaaaatacccgtccacctcagctggcggccatgttcctgctcggagccgtgacgccgtcttcctcggcgtcgcacactcgccatacccgactcgccgcgatggctcatcatgcggggtcgca

SEQ ID NO: 70695 - DNA, 438 bp, Zea mays
  Clone ID: MRT4577_164464C.1
ttttatttctttttttttttttttttttttttttttttttttttttttttttttttttttttttttttttttttttttttttttttaaaaagggacaggggaatcccccccttgggacctttttttggggtaaataatccttgggcccccaaactacccctaaaaagtcaaaaccccatagcagttaaccctaaaaaaccccgccctacgggggaaaaaatgagccggggatcacctgactggtgttcaaagctggcccataatccaagggaaaaaacccctttccacaaatatagcttaaaaagccctattttaaaagaaaacccaggtttgccccctgaaaatgtacccacccactgcaccgccctgaaaaaaacccagtttttctaattgatcaccccccccagttttaacggggggcccatcgcccaaaaattt

SEQ ID NO: 70696 - DNA, 317 bp, Zea mays
  Clone ID: MRT4577_164465C.1
gcccgcctgcgggagctgggccggagtatagagctgggtcgacgagctttgttttcggcggacgccctttattattgtcggtggtgatacgtaaactagttggcgtgattatccatggcggacgaaaagatccaccagcacctcgtgctacaccattacacggacacgggcatacacgcgcatctacataccatagattacggagagtcccgcatgtacacattagacaagggcatccatgcggtcgctcccgcaccacagacgagcgctcgagaacactgtagacacgcacgcttagcacacggggaggtacgaca

SEQ ID NO: 70697 - DNA, 212 bp, Zea mays
  Clone ID: MRT4577_164466C.1
ctaacactatgaacgacttttagctggcttatctccacttatgctataggggtctttctgacttttggagccacctccagggaacaatattattgatgtttgctcttgcatccatgctctacgtaatgctcatatccagttgtatcattatatcatactgatacattatctagagcatattctataatatatcttaaatctttgtaaacttc

SEQ ID NO: 70698 - DNA, 452 bp, Zea mays
  Clone ID: MRT4577_164468C.1
gtgggggggggggtttttttataaattttttttttttttttttttttttttttttttatttttttttttttttttcttcttttttttcttgttttcccccccccgaaaaggttccggggcccgcccggtcataggttcaaaggtccaactggggggggggggggcggccttttaggccccccagccccccccaaaaaaccgggaatggggattccggaggcgacaacccaactccaacccagccttgtccaacaaaaacccctaggtttggacccccgggccctaaggaggcgaaaaacccccccccaaaagaaggggggggcccccaagcggctgcagaaggaaaaaccctggcccaaaaaccccccccccccccaagtgtcaagggcagaatcagaaccaaaccacccgcgctctaacttagggggcgacggggggcccccccccaaaaa

SEQ ID NO: 70699 - DNA, 817 bp, Zea mays
  unsure (1)..(817): unsure at all n locations
  Clone ID: MRT4577_164469C.1
agaagcttaccgcttatcatccgcgcctcgacatttcttctctctctgctcctccgcctccgcctgatcatccaagacagggatcgccatgacggactcgtaggagcaccacttcaaatcgaaggccgacgctggggtgtccgacacctacccgcagcaggctgccaccgtccgtaaaaacgggttcatcgccatcaagaaccgtccctgcaagggtgtgcaggtttctacctccaagactgataagcatgggcacgccaaatgccactttgtctcccactatacatattcatactggaaaaagcttgaagatattgttccttcatcacacgactgtgacattccgcatgtgaaccgtactgagtatcagctgattgatatttctgaggatggatctctgttgagccttcttacttcagatggcaacactaaggatgatcttagactcccaactgatgagactcttgtgtcccagattagcgaagggatcgaaagcgtgaaggatcttgctgtgactgtccagaactgcgatgggggaggagcacatctgcgcgatgaaggatgttgcccccaagaatacttccttggctttggagacggaaccctactctatctcaacttagatcggaaaagaagtgtatcaccaaaggattgctaccgagacattcacctggcttgagctggcttttgctatagcgtgcaaggngttgctgagtgtcgtacctacctgacttatcattatctgtggttacattctggaccctgtattttctatgctttcatgtctctctactttctaggattaattatcaataag

SEQ ID NO: 70700 - DNA, 686 bp, Zea mays
  Clone ID: MRT4577_16446C.1
cggctcgaggcggccctagagttgtatatatatagtactgcgataacaccatgagtgcatcagcaaacaataacgctaacaagacagcaaagcgcaatccgatcgtgttttttgatgtgaagatcggcagtcaagacattggtcgaattaaaatagaattatttgctaatgtagtgccaaagactaccgaaaatttcagacagttctgcacgggcgagcacaaagtgaacaacaagcccgtgggctacaaagagagtcagttccaccgcgtcatcaagggcttcatgatccagggcggagatttcatcaagggcgatggcacggggtcattgaccatatatggcaaagagagcttcgaggacgagtccttcacgctgagtcacaaccgtgctggtctggtgtcgatggcgaacagtggtccgaacacgaatggcagtcagttcttcgtgaccaccgatgcgtgcgagtggttggacggcaagcacgtggtgttcggacaggtggtcgagggcatgaagattgtgcgtgccattgagaacacccccgtgcatcccaacagcaacaagcccaagattcctgtcaccatcgcgcagtgcggtcagttctgttgagtcacgtgactgtctgtcattgccacatttgtacaaatcttccgtgtatctataaatagcattcttttttcactg

SEQ ID NO: 70701 - DNA, 513 bp, Zea mays
  unsure (1)..(513): unsure at all n locations
  Clone ID: MRT4577_164470C.1
ttctcatttctctttaactttccttttcaatttatttttttttctttttctttctttcnttttnntgnnnaatagaatctcagtaccttccttaattcccttttggaccgccgcttccttcctatctcccatcctaataaaataactttttcaacatcctttaatacttttattttcctagagaaaggttcaatacaagacaaacaattgctttctccctttctttcattctttgtatttccttatttaatcttacatataaaacgaaaagggtagttagctttctataacaataaaaacttcttaaaaaatgatcttaccattaacaggttgtgcttttctcaccttaaatccctaactaattgtattcctcattactgaaattaaaatcattgttcttatatctatcctcaccttaataactattttccataacatccctcaacccaaaaaattctgttgtccctttactttttccattcatcaacttattcaatttatctctaatctttc

SEQ ID NO: 70702 - DNA, 931 bp, Zea mays
  Clone ID: MRT4577_164471C.1
ccctactctcctgctcctcttcttcctcctcctctcgctctcaagcgcgtcttcactccggcctagctcggacggatcgacatcgaggggaaagggaataagtgggggcgccagcagatggatccatggatcagcagccagccttctctgagccttgacctgcgcgtcggcctgccgccgctcagcctccaccaggcgccggtggccgtcgccttggccaggcccaaggtgctcgtcgaggagaacttcctgctgcctcccaagaaagaacctgaggtggcggcgctcgagacggagctgcggcggatgagcgaggagaaccgacgcctggcggaggcgctggccgcggtggcctccaagtacgaggcgctgcgcagccagcacaaggagatggtgtccgcggcgcccgccggcgggaacgcgtcgtccgcgtcggagggcgggtccgtgtcgccgtcgcggaagcgcaagagcgagagcgcggacacggcgccggcgcctgcgcagcgcccgcacccggcggcggacctgtcggagtgcacctccggcggcgagccgccgtgcaagcgcgtcgtgcgtgaccgggcggaggaggtggaggaggaggaggagtgcaggcccagggtgacgaagctgtacgtgcgcgccgacccggccgacctgagcctggcggtgagggacgggtaccagtggcgcaagtacgggcagaaggtgaccaaggacaacccctgcccgcgggcctacttccgctgctccttcgccccggcctgccccgtcaagaagaaggtgcagcgcagcgcccacgacgcctccgtcctcgtggccacgtacgagggcgaccacacccacgccccgcccccctcgggctcgggcaagaacgccgcgaagccgccgtcgccggcgcgccgccaggaggctgctgtcgcggtga

SEQ ID NO: 70703 - DNA, 181 bp, Zea mays
  Clone ID: MRT4577_164473C.1
cagtacgtacatgtttattattgcacatcataaagcacaagcacacgtgggcgacaccccattagcacgtaaataaactaactagcaccaaaacgcacctactagtaagcaacacacatgacaaggtaacattagcacaggttcgcccacgcgtccgcccacgcgtccgcccacgcgtccg

SEQ ID NO: 70704 - DNA, 160 bp, Zea mays
  Clone ID: MRT4577_164474C.1
ccgctgcaaacctttttgcattatcatcttcagtccaagtaacaaccaagtgactccgctgaattggtgcgaatataaacagttgctagaaacgacgagttgctggtcgtaggctttgaagcaacaaaatgggaatcgtctttacaagcatacgttcccg

SEQ ID NO: 70705 - DNA, 1734 bp, Zea mays
  Clone ID: MRT4577_164475C.1
agcccggaattcggctcgagctcagctcaaacatccctactctcctgctcctcttcttcctcctcctctcgctctcaagcgcgtcttcactccggcctagctcggacggatcgacatcgaggggaaagggaataagtgggggcgccagcagatggatccatggatcagcagccagccttctctgagccttgacctgcgcgtcggcctgccgccgctcagcctccaccaggcgccggtggccgtcgccttggccaggcccaaggtgctcgtcgaggagaacttcctgctgcctcccaagaaagaaccagaggtggcggccgctctcgagtcggagctacggcggatgagcgaggagaaccggcgcctggcggaggcgctggccgcggtggtctccaagtacgaggcgctgcgcagccagcacacggagatggtggccgcgtcgtccgcgtcggagggcgggtccgtgtcgccgtcgcggaagcgcaagagcgagagcgcggacacggcgccggtgcagcgccttcaccagcagcacgcggcggcggacctgtcggagtgcacctccggcggcgagccgccgtgcaagcgcgtcgtgcgtgaccgggcggaggaggtggaggaggaggaggagtgcaggcccagggtgtcgaagctgtacgtgcgcgccgacccggccgacctgagcctggcggtgagggacgggtaccagtggcgcaagtacgggcagaaggtgaccaaggacaacccctgcccgcgggcctacttccgctgctccttcgccccggcctgccccgtcaagaagaaggtgcagcgcagcgcccacgacgcctccgtcctcgtggccacgtacgagggcgaccacacccacggcccgcccccctcgggctcgggctcgggttcgggcgccagcagcaagaacgccgcgaagccgccgtcgccgccgcgccgccaggaggctgctgtcgcggtgactgcggccgcggcggcgtcggagatggtccggcgccgaacctggcggagcagatggcggtgacgctggcgcgggaccccagcttcaaggcggcgctcgtgtccgcgctgtcaggccggatcctcgagctgtcgccgaccaaggactgacggaccgcagacggatcggatcgagcggcgtgacacgagattctcgcctcagggctcagggtgtcttcgcacgcacgcggcaatggtcggccgaacaggagacgaggatctgcagcccagcaccagggacgagcagaccggggctgctcgcgcggccggacatggcgtggaccggtgtccagactccggagatcgtcatgccgacgacgtaacatgcgaaacgctactagtacaagaaacaacatccaagtgtacaatcccctgtactttgtagtcttgtttaggcaaactgttctctgtccatccaatcgatgaaacgagaacgttacaaattttttttactccgttcgataagatggcaatgggtacccgctacccaaaacccggtgggtttttgctttattaggggataagtttggatcaatttctccacccctcggtttgttaatgggttcaaatagaaacccaacgggtacatgggcatgggtttgttcttcccctacccatacccgcaaaccatgggaaaaaaaaaaaaaaaaaaaaaaaaaaaaaaaaaaaaaaaaatttttttaaaacccccccaccccccccacggcggccgtcgcgattctagaa

SEQ ID NO: 70706 - DNA, 678 bp, Zea mays
  Clone ID: MRT4577_164478C.1
cctcgaggccggccgggatcgtttctaacagcgcctctagtttcttctctctctgctcctccgactccgcctgatccatccaagacaggggatcgccagtgtcgcgactctggaggaggaccacttcgaatcgaaggacgacgctggggcgtccaaaacctacccgcaataggctggtaccgcccgtaagaacggcttcatcgacatcaagaaccgtccctgcagaggctgtggaggtttctacctccaatactggtaagcatgggcacggcatatgccactttgtcgccataaacatattcaatgggaaaaatcttgaagatattgttccttcatcacacaactgtgacattccgcatgtgaaccacactgagtatcacctgactgatatttctgaggatggatttgtgagccctcttacttcagattggcacactaaggatgatcttacactccccactgatgatactcttgtggcccaaattaatgaagggttctaaagcgggaaagatcttgctgcgactgtcccatctgcgatgggggaggagcagatctgcgcgttgaaagaatgtggtcccaagtaacttccttggttttggagacggaaacctaccggatctcaacttacatctggaaagaagtgtatcacccaaaggattgctaccgagacaatcccct

SEQ ID NO: 70707 - DNA, 420 bp, Zea mays
  Clone ID: MRT4577_16447C.1
ggggggacttttttttttttaatttaaaaggggcattcaggggattggtaaaaatgaaactggcccccaggggggggggggaaaaattttttccaaaaaattgccggtaaaagaccaaaataggttggttgccaggggtttttctaaaaaaaaaattttttttaaggggggaaaccccccggaaaaacctaggggcatggaattggttttttcaagccccaaattcccccaaggtggtgggttttttgggcccccaaaaacccccgaacctgggcctttttggggttttttttaaagatggactgggggaccaaacccaaaatcccctggtaccgggggtgggggtccacccggctgaagtggtgggaaaaatgttgcccaaacaactgggacttgggggagccccggaatttcggaccg

SEQ ID NO: 70708 - DNA, 741 bp, Zea mays
  Clone ID: MRT4577_164480C.1
atcgcttatcccctgcgcctctcatttcttctctctctgctcctccgcctccgcctgatccatccaagacagggatcgccatgtcggactcggaggagcaccacttccaatcgaaggccgacgctggggcgcccaagacctacccgcagcatgctggcacctgcccgtaagaacggcttcgtcgtcatcaagaaccgtccctgcagagggtgtggaggtttctacctccaagactgacaaacatgggcacgccaaatgccactattgtcgccatagacatattcaatgggaaaaagcttgcatatattgtgcctgcatcacaccactgggacattccgcatgtgaaccgtactgagtatcatgtgattgatatttctgaggatggatttgctgagccttcttacttcacgatgggacactaaggatgatcttagactcccatctgatgagactcttgcggccctgattattgtagggatcgaaagcgtgaaggatcttgttgtgactgtccagtctgcgatggaggaggagcagatctgcacgttgaaggatgttggccccaagtagcttccttggctttggagacggaaccctactgcatctcaacttctgtcggaaaagaagtgtatccccatgggattgctaccgatacattcgcctggcttgagctgacttttgctactagcgtgccagcgttgctgcgtgtcggacctacctgacttatcattatctgtggttaca

SEQ ID NO: 70709 - DNA, 671 bp, Zea mays
  Clone ID: MRT4577_164481C.1
atccatccaagaagggtattgccatgtcggactcggatgttctccacttcgaatcgaaggccgacgctggggcgtccaagacctacccgcagcacgctggcaccgtccgtaagaacggcttcatcgtcatcaagaaccgcccctgcaaggttgtggaggtttctacctccaacactggtaagcatgtccacggcatatgccactttgtcgtcatagacatattcaatgggaaaatgcttgaagatattgttccttcatcacacaactgtgacattccgcatgtgaaccgcactgagtatcagctgattgatgttcctgcggatggatttgcgagccttctctcttcaaatggcaacactaaggttgatcttagactcccaattgatgagactcttgtggtccagattaaggaaaggatcgaaagcgtgaaagatcttgttgcgactgtaccatctgccatgaggcattgacggatctgtacgttgaaggatgtttgcacccagtaacttccttggctctggatacggaaccctactgtctctcaacttacatcggaaaagaactgtatcaccaaaggattgcgtaccgaacattcaccaggcttgagctggtttatgctatagcgtgcaaggggatgatgggtggcaaaccttcctgacttttcattatct

SEQ ID NO: 70710 - DNA, 944 bp, Zea mays
  unsure (1)..(944): unsure at all n locations
  Clone ID: MRT4577_164483C.1
cccgggctgaggtgtccgtgagcataccggagggtttttcaggagactgaagaactcagaaatcagctggttgagaaagagagcaacatccagaggaggtccagggaactaaatgaactagtcgctcaaactgacatggaaagaagaaaactggaggaagagaggaaaaagaatgctgaccaaaatgattccctcaacatggctagaattgagcaacagagagctgacgaacgggcgctacagcttcttgagaaacataagaaagagaaggaggacgctctcaacagaatcctgcagctagagaggcaggtggacgagaagcagaagctggagctggatatcgagcagcttaaaggcaaactggaggtggtgaaacacatggcgggagaaggcgtggatgtgaagaaacgttctgaggagctgacagcagaactgaacgaaaggatcgaagagatggaagacctggaagctctcaaccaaactcttgttgttaaacataggatgaccaacgatgagattcaagatgccaagaaagagttgatcacnggntttgacagatatgtttangtcctcgtagcaacattgggatcaagaggatggggtgagctgacgagaaccccttcgttctgtcctgcaggcagaggtacggacaagacgccgaaatgaaagccgctgaactcgtctccctggggcaggaccctcttgaagaccctaattggcatcctttcaaaaaggtgcccccgggcttcactaaagacccaatccttcttgcacaggtttgaaaacctggcggcttttgaaaaaccatctcgcgaaaaagggttccaagggccgggtatacccgcttgtgaaaaaaaaaaaattcccccctttaggccctccccgggggccccaccttgggaacaaaggggaaaccccagggcccctcttcggaaaacattaag

SEQ ID NO: 70711 - DNA, 235 bp, Zea mays
  Clone ID: MRT4577_164484C.1
gggggggtaaaaaaatatcgcccactatttatgggcccaggacacagctcatggggaattacaattatccccctcataaaagtttacaacaatgactcaaacctttatggactaaaaggtcattctatttttaagtgggtttgacccttcgtcttcggatatgctggagttccgaagcttcgggaacggtgtcttcggcatcatgttcaagcaattttagccgaagctgtttttt

SEQ ID NO: 70712 - DNA, 142 bp, Zea mays
  Clone ID: MRT4577_164485C.1
gctcttagcctgcctatccagagcgaaaatcactctgctgtgtctgctttggggaaacggtagccgtcgggcgccctgggcaagcccaccggaggacgccggaagccgaaggggagccagaaagcagaaaatccggctacaa

SEQ ID NO: 70713 - DNA, 842 bp, Zea mays
  Clone ID: MRT4577_164486C.1
caaaatcttgtctcatgggcacgtcctctgtttaacgacagaagaaagctccctaagatggctgacccgaggctggaagggcgataccccatgcgtgggctttaccaagcccttgcagtggcttcgatgtgcattcagtcgggggctgcttcacgcccactgattgcagatgtcgtgactgctctgtcctacttggcatcccagccatatgatcccaacgcagctcttgcttcaaggaagccaggcggcgatcagcgaagcaagcctggcgagaacggcagggcagtttccaggaatgatgaaactggaagctccggccacaaaacacctgccaaggaccgagaggactcacccagggacctcccagcgatcctgaacaaggaccttgaccgggagcgcatggtggccgaggcgaagatgtggggcgaccgggagcgcatggtggccgaggctaagatgtggggcgaccgagagcgcatggtggctgaggcgaagatgtggggtgaaaattggcgtgacaagcggcgtgcagagattgggcaggggagcctggattcggttactgggaacagctagggggcaattaagcgaacagaaacgtgacatccacccatgcatttcgtttgtttatttccaggtccattttcgttctggcggcggtcggcaggccccagggttgtacatttctaggtcagggaagagtgggaaagcggcagcgttgtactggacagtgaatgcatgtggttgtacatgtaaattctcagaaaagttttgtgagaatgaaaggacatatttgagttccacttgtaaaaaaaaaaaacctcgtgccgaattctcgagag

SEQ ID NO: 70714 - DNA, 627 bp, Zea mays
  Clone ID: MRT4577_164487C.1
gtccggaacgcctggcttcgatctcgatgggcattcttgcgaactgtctccggctccctgcttccgcatcctcgccgatatcaggtgcaggatgcaccagagcggacgttccgtctatggccgctcgcgcattttctcccgcatccgcgatcttcatcgaggtatgttcatcgcgcagccctccctcagtgatttcttactgatatcagcgcatgttttgctgactgacatagcgcgcgctgcggcctaccgtactgcacgacaatcggcgccgccgctggagctcctctctgcacataaagggcttgctgttagatgagggattggaagagcgtacatgtttaatatgattccaaagaacctcatcgcgtcatggggcatgatagcttgatactctccgcgccgctgatctcatctacgcttaacggcctgatggcctgcctttgctccctgcatatggaagatgctcggttagctactactatgacgttgccatacgacgcatctctggacatactcgcgtcgagatacgatactgctcttgctcgtagcgattcctctgtggtgcaatgttttttcatgagagtgttaacggtcactacaagactgatccttgatgctgctgat

SEQ ID NO: 70715 - DNA, 179 bp, Zea mays
  Clone ID: MRT4577_164488C.1
ctgagaccaccctcacaagtgcctccactgtttattgtacctttcagaactttgctgatctccaacataagatgaacaacaatgagcaaaacaaattatctagtgaggttgaactgcctcgtcagaaagtgcccatgacaaaccatgttaatggaagtggaggtgaaatgcattctgct

SEQ ID NO: 70716 - DNA, 242 bp, Zea mays
  Clone ID: MRT4577_164489C.1
cgaggccctcgttctacccaccgatggattcacccactatttcgacatgacgggaccacggcacctttgccccttggaagaaccagtgttaagagatgaatttgttgatagctcattgaggctggaccgctggagggttctctctagctaggtgatgccaagctgtacgtgctttctaatcagcttgcagtcgactgagacctcgactgtaatgcatgcgaacctgtttcatgtgactctga

SEQ ID NO: 70717 - DNA, 306 bp, Zea mays
  Clone ID: MRT4577_16448C.1
gggttaaacaatccaaaagccagcctatctaattctacaaggaacccaaaaaaaattccaatcactgaaacagcctaccccaataatgtgtaacacaagatggctttggtatactacaacatacacaatctatcggaaaccattgactttctatccgcattcacactcgttcttcaccaactgtgttaaaaacgttcagctcttttaagcttgcaaactgtccgcgagcatactttctcctcctttagggcttgggtcgtgatactcctacacgctatagcgggggattcgttaggcgaccctttt

SEQ ID NO: 70718 - DNA, 1628 bp, Zea mays
  Clone ID: MRT4577_164490C.1
aaaaaaacttttgctttgcttcctcttctccccctcctccgcgcccgcctcctctcccctaacgcttagggttagccaggcagcgacctccctcgcgaatcccccgttaaagagaatcccaaccggccgcttgtcatggaggaggtccggatcttgaagcgcggcgaggaaccgcccgctccagctcccgcgccagcccctacgccggtgatagcagcgccccccgctgcgcaagccgcggcggttgaccagcgcgccctctgctccactggtcggatcgggccgcaggcgcccgccgtggtgccgacgaagaagatggtgtcgctccccgctgcatctccagccaacgcgcccgtgttcgcgcgccgggtgttttctgccgcggtgcccgccgtggtgccgacgaagaagacggcgacggtccccgccccatcttcagccaaagcccccgtgtacgctggcctggcgttttctaccgcagcgcctgagcccagctccctcccgatgccctccttcgtactccttcccgcggagtccgaggccactcgtggccttcggtgcctcctccgcatcggcgacctcgcctgacacggctgccgtctctcagtcggcctctcttcaccattcggcctggtctctgctcccctctcttttctggttgttccctatggatggttggcgcctgaagggcggatggatccgatggaaagctagcttctccggatccggtcagatcatatctcccggtaacccgttccgatcaacctcttccggtattttttcagaggaaaggttgtccaacggcgttccggtggttggatttgtatttggtggcggtggactccggttatgtccactgattgcttgctgttcggttcgcttaagtggtaaagctgatgtctttaggttagaagaataactaagattgggtaggaaggaaggatggtggattgggtagctagctgctggctgcttggttcaggagttggggttaaattagcgtctgaaatacttgtttggtttaggtattcctatgtagacgacctgattatgattcagggtggtttatcgtagcagtaatctgaagtttggtgtggtgtttgatctgtgtgagtcttgtgttaggtgagtcatgaacaaatttatgtggtctttattagtaggtcaaggtgaagttcttctctttatgtatcgtcatgaacaaagttatgtggtctttattagtaggtcaaggtgaagttcttctctttatgtatctatatcagcttagctgtgatatgcgtgtgagtcgtaaatttcgatatatgaaagtctgttcttgcatccgatcaggaattgtgaacatctctttcttcatatgcctctctttcgtgaaattggggatatgtctttcgtctagatttacttctgttcggctgctccgctggcggctgctgctgttcatgctcatgcacttggatgtcatgaattataaaccaaagatttgggaattatttaactatggaagccatgaattctatcctcattagggacacatgtttatattagaattcatggatcaaaagaataactaactagctgatagatagctgatagatatatggattaaatgatagatttaataaaac

SEQ ID NO: 70719 - DNA, 821 bp, Zea mays
  Clone ID: MRT4577_164491C.1
aaaaaaaaaaaaaattccccattctctcctcccgtcccctcagccgccaccactccaccaatctccccccgcccgctccacgctggcgccgccgcagaacaggccttacctgtcccgatccatcgatgccctctcttctcccctctatatgcgtcgccccgtccccatctttcccatcgctatggccaccagcccgtacctcccaccccattccagatcacgccctcgagctgcggcgacagtggtggcagcgggtccaactgctgcggctggacgacggttgacgccgtctgcgcagatcagttcgccttcctgggtcgcagtcaagcagagcatgtgccacggcgatctacgctgcccatcttaaccagatcgacgctgatgagaggtctctaatgtcccttgcagtggccacgggtccatcttcggtccacggcaagctatggtgaggtacacatggcgctgatggatgcagtgtacaggggcgccaccgccacgcagctggccaccggcttctgcctgctgcggtaccgtgacgagcactgcttctcggctttgccagggccctcccgccccgtgtttatgtgctgatcctcgtcatcatcttcgtcggatggttttcttggaagttggtcttgtatcatttctacttcaaggaaatgaagccactggttatggtctctttggcacacaacttaatttgttatctctgaaactgtagccggctgtagccagtgctgatgtacttctcaagcgctccatcacgggctcaaagagtactccagccgaaccacactcccacggctctacgtcgatgacga

SEQ ID NO: 70720 - DNA, 209 bp, Zea mays
  unsure (1)..(209): unsure at all n locations
  Clone ID: MRT4577_164492C.1
cgggggacgcgtcctcnnactctccaagctgaataaggcgtccacggcttaagtcccttttggtggatggcaatgttagggggggggtttcatgtagcatgagggttttgtatttgagtgttgtcaaagccagaattagtaatatgtggcatgtgtacccttttaaaactagataaacaatgggtgtactctgcatattttggcgggaa

SEQ ID NO: 70721 - DNA, 732 bp, Zea mays
  Clone ID: MRT4577_164493C.1
cgcccgcctcctctcccctaacgcttagggttagccaggcagcgacctccctcgcgaatcctccatagccgccatggccacggcggttctcagatcccacgatgcgctcaacaaccgcctgcatctcgacgcgtacaccccgtccccgccgaagcctgctgcggcgcagaagacggcgacgcccgttaagggtcctgcagcgtctggacgccgttcgccgccggccaggccggctgcttcggcgcggaagcagctgtcccccgttaaggagaatcccaagcggcggcttgtcatggaggaggtccggatcttgaagcgcggcgaggaaccgcccgctccagctcccgcgccagcccctacgccggtgatagcagcgccccccgctgcgcaagccgcggcggttgaccagcgcgccctctgctccactggtcggatcgggccgcaggcgcccgccgtggtgccgacgaagaagatggtgtcgctccccgctgcatctccagccaacgcgcccgtgttcgcgcgccgggtgttttctgccgcggtgcccgccgtggtgccgacgaagaagacggcgacggtccccgccccatcttcagccaaagcccccgtgtacgctggcctggcgttttctaccgcagcgcctgagcccagctccctcccgatgccctccttcgtactccttcccgcggagtccgaggacactcgtggccttcggtgcctcctccgcatcgg

SEQ ID NO: 70722 - DNA, 465 bp, Zea mays
  Clone ID: MRT4577_164494C.1
aacctatcagaatagagacatatctgatcatgaatgctgcgaagaaggaagtggccggcgcagaggaggccatactggtgcctctgcaactcatgggaggtccaccgacgggcatgagtcgcccgctcgccgcgcgaaggcgcgccgcatgtttccctcgccacaacgcccaaagtgacaatgctgcctcacacgctgtgctacacacgggagacatgaaaatacactcgctgcttcactcctgattgctcctgtaggtttagcgatcgcctctgctacgacatatttactcctggtgcttgacgagaggatcgattccgcgaagccacaactcttagatgtatgcgccggacgatcacgacgacgatgcctctcgcgagcttctgatcaagtgatgcatgcttcaagggatacatggatgctttacgtatatgcctattaattatccgcgtcaggtaagcggac

SEQ ID NO: 70723 - DNA, 740 bp, Zea mays
  Clone ID: MRT4577_164495C.1
agctaaccaaagcttatataaattaggttttaagttgatcaatacttatacataaattatgcaaacaatccgctccggttacctcagatccgaacgggccgacttggaacctagaaccaagaaataaaacggggaaaaaataattaccaaaagaatgacgtcaaattcttttctctgtcagtttcccggttacaggcggcagaagatttgtttcagtcttcctgaagagtctcaggccggcatacggagtcaaattgactcagcaatgcacgggagcttcagcggtcaacaacaccggcggtcagagtaatccaaagaaggctcctagagtacgcacgttcaactgccgccaaggaagaatacttcagccttagcgataaaggcggcacagagttcgccgattcaagttaaatccacgcaaagtgttaggccttgctcggttaaggaaaacactgaattaaataaaaccatacctcacatccaatctgatggtttgattaaatctatcatttaatccatatatctatcagctagttagttattcttttgatccatgaattctaatataaacatgtgtccctaatgaggatagaattcatgacttccatagttaaaaaattcccaaatctttggtttataattcatgacatccatagtgcatgagcatgaacagcagcagccgccagcggagcagccgaacagaagtaaatctagacgaaagactatccccagtttcacga

SEQ ID NO: 70724 - DNA, 115 bp, Zea mays
  unsure (1)..(115): unsure at all n locations
  Clone ID: MRT4577_164496C.1
tcgtcgaccattgctgccagtgtcgccacctctggcgcgcctgggccgacgccactcgggaaacggggccgcttccttgccggacgccacttcgcnngcggtggnnnggcggagt

SEQ ID NO: 70725 - DNA, 1568 bp, Zea mays
  Clone ID: MRT4577_164497C.1
ccggccgggccggggtatttgctttgcttcctcttctccccctcctccgcgcccgcctcctctcccctaacgcttagggttagccaggcagcgacctccctcgcgaatcctccatagccgccatggccacggcggttctcagatcccacgatgcgctcaacaaccgcctgcatctcgacgcgtacaccccgtccccggcgaagccgcgccggcgccgtagccccaagccggcggccgcgtcttcgccgcccgcaagggccgcggcgcccatagcctcgacgtcgccgccgaagcctgctgcggcgcagaagacggcgacgcccgttaagggtcctgcagcgtctggacgccgttcgccggtggctaggccggctgcttcggcgcggaagcagctgtcccccgttaaggagaatcccaaccggcggcttgtcatggaggaggtccggatcttgaagcgcggcgaggaaccgcccgctccagctcccgcgccagcccctacgccggtgatagcagcgccccccgcggcgcaagccgccggccgcctctactggtcggattctcccacggatcgtgctccctccccatgccctccttcttactccttaccgcggagtccgaggccactcgtggccttcggtgcctcctccgcatcggcgacctcgcctgacacggctgccgtctctcagtcggcctctcttcacccttcggcctggtctctgctcccctctcttttctggttgttccctatggatggttggcgcctgaagggcggatggatccgatggaaagctagcttctccggatccggtcagatcatatctcccggtaacccgttccgatcaacctcctccggtattttttcagaggaaaggttggccaacggcgttccggtggttggatttgtatttggtggcggtggactccggttatgtccactgattgcttgctgttcggttcgcttaagtggtaaagctgatgtctttaggttagaagaataactaaggccgcgtttggttacaccagattatcagaatctgcatcattcacgtaatccaaaaaaatccaactcaagcttgatttttatggatagtctctggcagcacattatccaaggtaaaaaatctgctacgtttggttgagcctatagattctactagccagattctgactatccataggaaccaaacgctccctaagattgggtaggaaggaaggatggtggattgggtagctagctgctggctgcttggttcaggagttggggttaaattagcgtctgaaatacttgtttggtttaggtattcctatgtagacgacctgattatgattcagggtggtttatcgtagcagtaatctgaagtttggtgtggtgtttgatctgtgtgagtcttgtgttaggtgagtcatgaacaaatttatgtggtctttattagtaggtcaaggtgaagttcttctctttatgtatctatatcagcttagctgtgatacgcgtgtgagtcgtaaatttcgatatatgaaagtctgttcttgcatctgatcaggaattgtgaacatctctttctttacta

SEQ ID NO: 70726 - DNA, 503 bp, Zea mays
  Clone ID: MRT4577_164498C.1
ggaaaaagacctgggtggaataatccccgggggccagggggctaaaaaaaagcccaagggttaaccaattttcccaacaaacttgaaaaaaaccccaactttttgggactaaaggggggaaaaccaaccccccaaaattttctaaaccaaatctaatttttaagcctaacccaagccaatcaaaatctgggttttaaccctaaccccaaccgggggggggcccttcgccccctaagaggcccaagaaatccccccccccttgggggcccagctggcccccaggcggccaaaaacttaccggacccaaataaggggaaagcctttaacaacggggctaccctttttttttaaaaacgaaaaaccaaagatgggggggaacaaaaaaaaaaaattgaacgggagctaggccccccggccccccgggaccccaaggaaaaagctgaaccggggcccccacgtgggagaaaagggaaggggggaccccccccgctctaaaggggggt

SEQ ID NO: 70727 - DNA, 547 bp, Zea mays
  Clone ID: MRT4577_164499C.1
aaaaccaaggggcggtttaaagccccaaatttattgaattttttggaggcgggggcttttaacccgcccgcccgggggggatcctccttttaaaccgggggggggcgggaaaaaaactgggggggcccccttttaaattgttgggggggccccaaaaggccctttttttttccctccggggccggggggcctttaattaaggaaaccgacttacttgcttcccccggggggggggaggttaaaaaattatccccccccgggccaagggagttagcccatgtcaaaagcccgggccaggatttgagtaaccacccccaccgaaaccgggttaccttggaaccgaagaaacacccgggggagggctttaaggggaaaaaattcctccacccacctttttttgtccagcctcaccttaacaagggccgcttgccttggggggaaaaaacccgggttttttttaagggccctgccggttttttgggccagggacaaaagttttttaaccaaccttggggacaatttggggggccgtttgggcggctaaaac

SEQ ID NO: 70728 - DNA, 132 bp, Zea mays
  Clone ID: MRT4577_16449C.1
cgactataaacacctctactttgaatcggacgctgctaccgtcaatatgccagtaactacatcctggaatcgcgagctagcactgcccgggctgactactttgctcaaaaacaaagaaaactgaacagacgt

SEQ ID NO: 70729 - DNA, 963 bp, Zea mays
  Clone ID: MRT4577_1644C.1
ggcggagcaaacgcaggcgaaggcgagggtgtgagggaaggagcaccagccatggtgcacgtcaacttctaccgcaactatggtaagacgttcaagaaaccaaggcgtccttatgagaaggagcgtcttgatgctgaactgaagctggtcggcacttgctcacccttgacgagaagaacccccgtcgtatctttgagggtgaggcgcttcttcgccgcatgaaccgctatgggctgcttgctgagggtcagaacaagcttgattatgttcttgccctcaccgctgagaacttcctcgcaaggcggcttcaaacacttgtcttcaaggctggcatggccaagtccattcaccatgctcgtgtcttgatcaagcagcgtcacatcagggttggcaggcaaattgtcaacgtcccatcattcatggtgagggtggagtctgagaagcacattgacttttcactgtcaagcccattcggtggaggccccgcaggaagggtgaagagaaagaatcagaagaaggcaagcggtggcggcgatgctggcgatgaggatgaggagtgaggatggacaagtagcgttacccaatataataatattatctagttttcttgaacttgttcgaatgatgagtgcttagctgtgtgatctgacgcagagttccctgtgctgactctgtgtcatggatggtccattttatcttgtggtattatcagcctttacataactgctatgtttggatatgttcaattctgttgcaattttatgtggttgttttttgcgttttgttgctattaagctgttctttcaatcggctaatgatttgcttaaatgttatttataatctgcttcagcttgttgtactgattgggtataggatacgcttaaaattttgttgctgtgacagtattgacaactggtctgtgaacatttgatatcgcgatgtggctaagaatgttttttgttg

SEQ ID NO: 70730 - DNA, 531 bp, Zea mays
  Clone ID: MRT4577_164500C.1
cgcactaaaatcctatcacaactcatcccatcacagattgctgtgcgcccacatatgtatatggccctagtaccgactcaagaacagttccaatgctactttacacatcatgcggattgacatggctcatcactggcgagggactgtacatcaacccagctacttgatgcataacaacatcctaggattctactgtcggttcctaagatcaggctgacccacaattacattaacatggacatcgctaataggagaatagctcacggaggactacaggaaggcaactctttctgccaaccgtgtacgtttgggtccagtgatgccggaacaatgtcaggtatgaaggcagctccaagagacatgctccagacctgccaagacacgacagctactgagggcattgtaactgcccttacataggatggaatggaatactgatacagacccatgctggaatagatgttttccatgtccggcaatacacgcacgtacctgagtcccaaggctagcacctgctgataccccaatctt

SEQ ID NO: 70731 - DNA, 801 bp, Zea mays
  Clone ID: MRT4577_164501C.1
aaaaaaaaaaaaaaaaaaaaaaaaaaaaaaaaaaaaaaaaaaaaaatcaccaatcagttagtcacagctcacagcaaacacggcgaagccggccccactcccaaacccgaccgagcaaagcgcaaagccccccaacctcggatcaatccgcagcatcgatggcgcccaaggcggagaaaaagccggcggctaagaagcccgccgaggaggagcccgcgaccgagaaggcggagaaggctccggcagggaagaagccgaaggcggagaagcgtctccccgcgggcaagtccggcgccggcgagggcaagaagggcaagaagaaggccaagaagagcgtggagacctacaagatctacatcttcaaggtgctcaagcaggtgcaccccgacatcggcatctcgtccaaggccatgtccatcatgaattccttcatcaacgacatcttcgagaagctcgccgcggaggccgccaagctcgcccgctacaacaagaagcccaccatcacctcccgcgagatccagacctccgtccgcctcgtcctccccggcgagctcgccaagcacgccgtctctgaaggcacaaaggcggtcaccaagttcacttcgtcttagataggttgccttccctctcgtttgtactggtgtctggtagtagatctcgtctagttgggggtgctgttgctagtcggtcgtgggcccctttggtgtgataggccctgtttaattggtttgcaagtgattagtttgtatatgggtggagtagatctcgtttcagctgtgattctttattactgctatgcta

SEQ ID NO: 70732 - DNA, 763 bp, Zea mays
  Clone ID: MRT4577_164502C.1
cggattcctcgcgatgcccgagtccgagtgggaggtacgacggtggaggagctccgttatcggcgtcgaagcgcggtcccatgccgagtccaacccgcgccgctgcgacctctctctcgaccgcgagtacgccgcgcgccaagcgagagccagctgctctacgtcaagatccggtttcaggatggcaggagggtttttaactcaccatcattacattggaattattttcggtatattgcagctgtcaccttcttagtaccatggaatttctttagcaccacagagttaagacactatcctaaatttatgagggcccgtgcgttgcgacgggagtaaaccctaaacaataagaaccaattactagatatcttaatcactgcttacgtctgttgacattgtcttccacatggtaaataagctttcagataatgtaaacaagctctccctcgcccatgctgctgctagcacatcagtcaccgacaccacaactcaggcaacttcctcagctttccgggcacatcagtcacctactaatctccaattgtatgtttttcttatactaggtgtttctactgctgctgctagcacatcagtcaccggcaccacaactcagagacattgaagaagcaagatatttttctccaccccaaaaggatgacagatgtgagcaccatgaagattccattaacaactcacagtggcattatgtcaagtgagcacctgtttcatcaaactcaatggagcgatcctttgatttcgaacg

SEQ ID NO: 70733 - DNA, 266 bp, Zea mays
  Clone ID: MRT4577_164503C.1
ccaccgaactcttccccccactcttcctcgaggtctttgaggatcaggaactctacagtctcaggcggccagagggactgcggagcgtgtggggaggagcctggagacaatgggcacagctcaggggctgacggagatggccctatacacactctctccttcctctcgtgctttcatcgattcagcttccacacacatacccgcatcgcccaggtccctcctcaaacctccagccatgggagcagggccgattcctgcacttgcta

SEQ ID NO: 70734 - DNA, 499 bp, Zea mays
  Clone ID: MRT4577_164504C.1
ggttgtggaaattcttttttttgttttttttttttttttttttttttttttttttttttttgagaggaccctaaattttttcaagtttttaaatataaccgcttccctgaattaggggaacaatcagcaattgacactttttttacatatacatttaggaggccctttaaactggtaaaacccaaatttactgggccttaagggccaccttcaggcttaactttatggggtaagggttggagggaggaaaaatttttatgggggcaggcccccctgggttggtttcttaacctttgaaaagggttttttttaatttcttcccaagggcataggcaaaaggggggggcccggaattgccaatttgccggggcttgttttggatgttgcccgcaaattcatatttgttaggaaagccctgggaccgaacacattcccggactgggatgatcctgttttgaacaggggggaagcccatgcccaccttgcccattggctgggg

SEQ ID NO: 70735 - DNA, 778 bp, Zea mays
  Clone ID: MRT4577_164505C.1
atcaccaatcagttaatcacagctcacagcaaacaccgcgaagcgcgaagccggcccgctcccaaacccgaccgagcaaagcgcaaagccccccaacctcagatcaatccgcagcatcgatggcgcccaaggcggagaaaaagccggcggcgaagaagcccgtggaggaggagcccgcgacggagaaggcggagaaggctccggcagggaagaagccgaaggcggagaagcgcctccccgcgggcaagtccggcgccggcgagggcaagaagggcaagaagaaggccaagaagagcgtggagacctacaagatctacatcttcaaggtgctcaagcaggtgcaccccgacatcggcatctcgtccaaggccatgtccatcatgaattccttcatcaacgacatcttcgagaagctcgccgcggaggccgccaagctcgcccgctacaacaagaagcccaccatcacctcccgcgagatccagacctccgtccgcctcgtcctccccggcgagctcgccaagcacgccgtctctgaaggcacaaaggcggtcaccaagttcacttcgtcttagataggctgccttccctctcgtttgtactggtgtctggtagtagatctcgtctagttgggggtgctgttgctagtcggtcgtgggtccctttggtatgataggccctgttcaatgggtatgcaagtgatttgkttgtatatkgttktagtagatctcgtttcagctgttattctttattactgctattckatagtctcgaatacaac

SEQ ID NO: 70736 - DNA, 938 bp, Zea mays
  Clone ID: MRT4577_164506C.1
cattgggtacctcgaggccggccgggccgggatcaccaatcagtcagtcacagctcacagcaaacaccgcgaagccgcccccgctcccaaacccgaccgagcaaagcgcaaagccccccaaccgcggatcaatccgcagcatcgatggcgcccaaggcggagaaaaagccggcggcgaagaagcccgcggaggaggagcccgcgaccgagaaggcggagaaggctccggcagggaagaagccgaaggcggagaaacgcctccccgcgggcaagtccggcgccggcgagggcaagaagggcaagaagaaagccaagaagagcgtggagacctacaagatctacatcttcaaggtgctcaagcaggtgcaccccgacatcggcatctcgtccaaggccatgtccatcatgaattccttcatcaacgacatcttcgagaagctcgccgcggaggccgccaagctcgcccgctacaacaagaagcccaccatcacctcccgcgagatccagacctccgtccgcctcgtcctacccggcgagctcgccaagcacgccgtctctgaaggcacaaaggcggtcaccaagttcacttcgtcttagattggttgccttccctctcgtttgtactggtgtctggtagtagatctcatctagttgggggtgctgttgctagtcggtcgtgggtccctttggtatgattggccctgttcaatgggtttgcaagtgattagtttgtacatggttgtagtagatctcgtttcagctgtgattctttattactgctatgctatagttgtagtgttctcgttcccatttcttgatgcagtcctatcaactatatggttgttttaaaaaaaaaaaaaaaaaaaaaaaaaaaaaaaaaaaaaaaaaaaaaaaaaaaaaaaaaaaaaaaaaaaagggcggccctcgcgatctagaac

SEQ ID NO: 70737 - DNA, 332 bp, Zea mays
  Clone ID: MRT4577_164507C.1
atgacgggggacaaggaactgtttatgaacttactctactacatcatggtcaaaaggagaggaacatgtattatgcaaaattttccacctccaccacaccttaaagtaaaccccccaacccaaagggcagggcgttcacgttattcagttgagccccataattgggttaatgaacaacacatatttgttataggggaatttgtatctgaggcacttctattgaggatttgggggcccacagttggggggtgtaccccctagactacttgcgaaaacttgttttttgggggaccaatttggggctgtcccttcaatgaaaaaaacgaaatcct

SEQ ID NO: 70738 - DNA, 427 bp, Zea mays
  Clone ID: MRT4577_164508C.1
gcgatcccacccccctccactccactaccacggcggcacggcctgcctctgcagctctgccctgctccgcacccctcgctctccaaccccagcgcgcggcgttgctaaaattcacctcagcgcgtactccagtctggccacctcaccacccgccgccgctgtttaagaaggccccgcgcccgatcggggatcacgaaccttggccgccgctgccggagtggggcgtagatttccggcggccatggggggcgccgtgatggtcgctatcgccgcctctatcggcaacttgctgcagggctgggacaatgcgacaattgctggagccgtcctgtacataaagatgggcaaaaggaaggtggcttccagcgtatttacttgcatgaggaggggcgtacaaggcaacaggggttctatattggcattacca

SEQ ID NO: 70739 - DNA, 428 bp, Zea mays
  Clone ID: MRT4577_164509C.1
gacccacgcgtccgatcgaggataacctccttagcccacttatttctcgtcaggcaacaagtgtggaaggaaaggagcagtaagcagcatgggcattggcggaggatggcagttggcgtggaaatggaccgagagagagggcgaagatgggcaaaaggaaggtggcttccagcgtatttacttgcatgaggagggcgtacaaggcaacaggggttctatattgtcattaccaggcggggatgttcctactggtggtgagttcatccaggctgcagctcttgtgagccaaccagctctttactctaaggaactgctggagcaacgtgctgctggtcctgcgatgatgcatccatctgaagcagttactaaaggtccaagatgggccgacctatttgagcctggggtgaagcatgcactgtttggtggca

SEQ ID NO: 70740 - DNA, 269 bp, Zea mays
  Clone ID: MRT4577_16450C.1
aggggagactgcatattttgggaaaacgggagaattctaacaaaaatgaaaaaaaactttgttcccaaacaccccctaagtttccaaacatggcactcgatcaaaaattaaagcacatattcaaagggctaaacatccttagtccttgggcctaaaaccggatgcgtacacctcctcaagggtcggggggggcctgacctaggggaaccccgcgaagttggtgggcccgccaccagcggggggggttaccggagagaccaacacgggcg

SEQ ID NO: 70741 - DNA, 790 bp, Zea mays
  Clone ID: MRT4577_164512C.1
gatcgattatatctgctgctctacatttcttctctctctgctcctccgcctccgcctgatgcatccaagacaggaatcgccatgatcggactacggaggagcaccacttcgaatcgaaggtcgaagctgtcttgctcaagacctacccgcatcaagttgtgaccgcccgtaagaacggtttcgtcgtcatcaagaaccgtccctgcaaggctgtggaggttgctaccaccaagacatggtaagcatgacctctccaaatgccactttgtcgccatagacatattcaatgggaaaaagcttgaatatattgtgccttcatcacacaactgtgacattccgcatgagaaccgtactgagtatcagctgattgatatttctgaggatggatttgtgagccttcttacttcatatgtcaacactaacgatgatcttagactcccagctgatgagactcttgtggcccatattaaggaagggttcgaaagcgggaaggatcttgttgtgactgtccagtctgcgatgggggaggagcagatctgcgcggtgaaggatgttgaccccaagtaacttccttggctttggagacggaaccctactgtatctcaacttaagatcggaaaagaagtgtatcaccaaaggattgctaccgagacattcacctggcttgagctggctttggctatagcgtgcaacggggtttgctgggtgtcgtacctacctgacttatcattatctgtggttacattctggaccctgtattttctatgctttcatgtctctctactttctg

SEQ ID NO: 70742 - DNA, 4330 bp, Zea mays
  Clone ID: MRT4577_164513C.1
ggccggggtgtaaaaaaaaaaaaaaaaaaaaaaaaaaaaaaaaaaaaaaaaaaaaaaaaaaaaaaaaaaaaaaaaaaaaaaaaaaaaaaaaggatgcttccttctgaagcagttacataaaggtccaagatgggccgacctatttgagcctggggggaagcatgcactgtttgttggcataggaatacagatcctgcaacggtttgctggcataaacggggttctttactacactcctaaaattcttgagcaagcaggcgtcggtgttcttttgtcgaacctcggccttaacgctttttcggcatcaatcctcattagcgccctgacgaccttactgatgctcccaagcatcggcattgcgatacgactctcggcaacggatatctcggctctcgcatcgatgaagaacgtagcaaaatgcgatacctggtgtgaattgcagaatcccgcgaaccatcgagtttttgaacgcaagttgcgcccgaagccttctggcggagggcacgtctgcctgggcgtcacgcactaccacggcggcacggcctgcctctgcagctctgccctgctccgcacccctcgctctccaaccccaacgcgcggcgttgctaaaattcaccgcagcgcttactccagtttggccacctcaccacccgccgccgctgtttaagaaggccccgcgcccgatcggggatcacgaaccttggccgccgctgccggagtgggggtaagcgagagccctcctgcttggggcgtagatttccggcggccatggggggcgccgtgatggtcgccatcgcggcctctatcggcaacttgctgcagggctgggacaatgcgacaattgctggagccgtcctgtacataaagaaggaattcaacctgcagagcgagcctctgatcgagggcctcatcgtcgccatgtccctcattggggcaacagtcatcacgacgttctccggggcagcggccgactgcgttggtaggaggcccatgctggtcgcctcggctgtcctctacttcgtcagtgggctggtgatgctctgggcgccaagtgtgtacatcttgctcctcgcaaggctcattgatgggttcggtatcggtttggcggtcacacttgttcctctctacatctccgagactgcgccgacagacattcgtgggctgttgaacacgttgccgcagttcagtgggtcaggagggatgttcctctcctactgcatggtgtttgggatgtccctcatgcccaaacctgattggaggctcatgcttggagttctgtcgatcccgtcacttatttactttggactgactgtcttctacttgcctgaatcaccaaggtggcttgtgagcaaaggaaggatggcggaggcgaagagagtgttgcaaaggctgcggggaagagaagatgtctcaggggagatggctcttctagttgaaggtttgggggtcggtaaagatacacgtattgaagaatacataattggtcccgatgatgaacttgctgatgaagggctggctccagatccagagaagatcaaactatatggacctgaagaaggcctatcttgggttgcccgacctgttcggggacaaagtgctcttggaagcgcgttaggtctcatctctcgtcatgggagtatggcggctagtcagggtaagcccctcgtggatcctatggtcactcttttcggaagtgttcatgaaaagatgcctgagatcatggggagcatgaggagcacattgtttcccaactttggcagcatgtttagtgttgccgaccagcagcaggtgaaagctgactgggacgccgagagtcaaagggaaggtgaagattatgcttcggatcatggtggcgatgacattgaggataacctccaaagcccacttatttctcgtcaggcaacaagtgtggaaggaaaggagatcgctgcacctcatggtagcatattgggtgctgtgggaaggagcagtagcttgcagggaggggaggcagtaagcagcatgggcattggcggaggatggcagttggcgtggaaatggaccgagagagagggcgaagatgggcaaaaggaaggtggcttccagcgtatttacttgcatgaggagggcgtacaaggcaacaggggttctatattgtcattaccaggcggggatgttcctcctggtggtgagttcatccaggctgcagctcttgtgagccaaccagctctttactctaaggaactgctggagcaacgtgctgctggtcctgcgatgatgcatccatctgaagcagttactaaaggtccaagatgggccgacctatttgagcctggggtgaagcatgcactgtttgttggcataggaatacagatcctgcaacagtttgctggcatcaacggcgttctctactacactcctcaaattcttgagcaagcaggcgtcggtgttcttctgtcgaacctcggccttaacgcttcttcggcatcaatcctcattagcgccctgacgaccttactgatgctcccaagcatcggcattgcgatgaggctcatggatatgtccggaaggaggtttctcctcctcgcgacgatcccagtcctaatagtcgcgctactcgtcctggtggtgtccaacatcgtggacgtgggggacgtggcgcacgcggcgctctccacggccagcgtcatagtctacttctgcttcttcgtcatggggttcgggcccgtccccaacatcctctgcgcagagatcttccccaccacggtccgcggtgtctgcatcgccatctgcgccctggccttctgggtcggtgacatcatcgtgacgtacactctccccgtgatgctgaacgtcgtcgggctcgccggcgtctttggggtgtacgccgtcgtgtgcgtcctagccctcgcgttcgtgttcgtcaaggtgcccgagacgaagggcatgcctctcgaggtcatcaccgagttcttctccgttggggcaaagcaagccaaggaagaggaggaggaggaggccagggaaggttgatcacccggacggccggacccagttaccggcaccgcctgtggggatttttgtggtctgcacacttcaccgtggttggtcctgtgatgatgtatttgtgaaaaaaaaaactttgggtagggggcagagatgatttggctgtacaatgtgaggcttgattctgccaaaggctggccttcagaactaggaagggtgtctgttatcttcttttgttgcttggagaccttgtgcttgtgttggttggaattttgttgcctatgtaactagtggtgtatgacagttatgctattggtttctttaaaataaaaaaaaaaaaaccgctcgcgatctagaactagctaaaatttttcggcgttttttactacactccttaaattcttgagcaagcaagcgtcggagttcttttgtcgaacctcgggcttaacgcttcttcggcatcaatcctcattagcgccctggcgaccttactgatgctcccaagcatcgggattgcgatgaggctcatggatatgtccggaagggccgggctcctcctcgcgacgatcccagtcctaatagtcgcgctactcgtcctggtggtgtccaacatcgtggacgtgggggacgtggcgcacgcggcgctctccacggccagcgtcatagtctacttctgcttcttcgtcatggggttcgggcccgtccccaacatcctctgcgcagagatcttccccaccacggtccgcggtgtctgcatcgccatctgcgccctggccttctgggtcggcgacatcatcgtgacgtacacgctccccgtgatgctgaacgtcgtcgggctcgccggcgtgttcgggatatacgccgtcgtgtgcgtcctagccctcgcgttcgtgttcgtcaaggtgcccgagacgaagggcatgcctctcgaggtcatcaccgagttcttctccgttggggcaaagcaagccaaggaagaggaggaggaggaggaggaggccagggaaggttgatcacccggacggccggacccagttaccggcaccgcctgtggggatttttgtggtctgcacacttcaccgtggttggtcctgtgatgatgtatttgtgaaaaaaaaaactttgggtagggggcagagatgatttggctgtacaatgtgaggcttgattctgccaaaggctggccttcagaactaggaagggtgtctgttatcttcttttgttgcttggagaccttgtgcttgtgttggttggaattttgttgcctatgtaactagtggtgtatgacagttatgctattggtttctttgtaaaaaaaaccaaaaaaaaaaaaaaaaggtcggcc

SEQ ID NO: 70743 - DNA, 657 bp, Zea mays
  Clone ID: MRT4577_164514C.1
gctttgtcttggcatggtcatctaaactagacttgaacatcattttgttataatatattgttcatagctacagaaactaattagtgtgaaagcacttttgagatacgagtctagtcgtataattttcatacattaagcattacctataagttgactaattttttgttagaatatccaaagttttttttcccaaaaaatgccacaccctatacaactggatgggagtagacatctctgtgaattaaaatttgtgtagtctgtcaacaacttcattaccatgtagggttttttgggtgctagagttctgtgttagcttattttgtatttgaccgaaatataggtacaagaggaaaaacaagaaacagctacataagatactctatgactgtaatgagcagttgaagcagtttagtcatgtgaaccaaaaggctcttgaccaatatgtgaacttcacagaacaacgcgaacaactgcagagaaggcgagctgaacttgatgccggtgatgtgaaaatcatggaactcatatcggttttagaccaaaggaaggatgaatccattgagcgcacatttaaaggggttgcaaggcacttccgtgaagtgttttctgagctggtgcaaggtgggcatggatatttggttatgatgaagaaaaagc

SEQ ID NO: 70744 - DNA, 726 bp, Zea mays
  Clone ID: MRT4577_164515C.1
aaaatccggtaccaacaggtataaccccccagaactacgatttccttccacggaaggagaattttgtccggagctcgaatttgtgccacgtttcacttcgttttttggagttttctgctcaactgagggaaagcagagccaccagagcttggccgtttcagatctctgtctgctaggctgccctttgctcaagggcaatcctcccttttcattcaacgcaaaaaaaaagatctttttttgcgtctttctatgaaatctggtgacaaatgttcagttgaactcagattcttcagatgcaattgaagatctcaaatcatcacatcattttttctgtcgaaataatttatgtgtgtgtgtgtttttcttaaaaaaactgttttttatgcttctgaatgcttgctgcattttcccgtgcatttgaaacaggaaaaacgtactagcgaaagctatagctgtgatctgaactcaattgctccgtaccgttttactttgcttcatgatccgttaatgaaagcaaaaagtaagcgcacggtgcgcatggatctgggttagttatgtactttgcttacttctgacataaagggcgcatttcaattttcaacaacacaaaagttgacgtccaagtggcctttgccttttccgctttctaagcaacttcgcttactggtcacttcacgaaatttccttatgctttacttgttttgcaactgaatgtggagtagcaat

SEQ ID NO: 70745 - DNA, 669 bp, Zea mays
  unsure (1)..(669): unsure at all n locations
  Clone ID: MRT4577_164516C.1
aaaaaaaacatcctctaataaaaaaagaaaaaaattaaggaaaaaaaaaaaaaaaggaggcgggggggggatcatccgcgcctctacctttcttttttttctgctcctccgcctccgcctgatccatccaaaacagggatccccatgtcggactccgaggagcaccacttcaaatcaaggccatttttgggggtccaaaacctaccggcggggggggtggaccggccctaaaaacggggttattttcatcaaaaaccggccctgcaagggggggggggtgtctacctccaaaactggtaagcatggccaccccaaatgccactttgtggccatagacatattcaatgggaaaagggtggaagatattgttccttcatcacacaactgtgacattccgcatgtgaaccgcactgaggatcagctgattgatatttctgaggagggatttgtgagccttcttacttcacatggcaacactaaggaggagcttagactcccaactgatgagactcttgtggcccacattaaggaagggttcnaaagcgggaaggatcttgttgtgactgtccactctccgatggggggggagcagatctgcccccttaaggatgttggccccaaaaaacttccttggttttggggacggaaccctactctatctcaccttaa

SEQ ID NO: 70746 - DNA, 247 bp, Zea mays
  Clone ID: MRT4577_164517C.1
aaaaaaaaggcccccccggttaagaacaaaccggggggaaacggggttatttggaagaccaagggaggggccccaaactggaaccccccaaacccggggccctacccgccgggcccccccctgggggccacaaaaaaaattggggccagccggagggtctccccggggaaaaccccgggggggaaaaaccccgggggggcccggaaacggaacggggaacccttccggggaccccccggggaaaagg

SEQ ID NO: 70747 - DNA, 686 bp, Zea mays
  Clone ID: MRT4577_164519C.1
tgtgcaggcgctcgatgccggccggtttcccatactatctctgcgctctacatttcttctctctctgctcctccggctccgcctgatccatcctagacaggaatcgccatgtcggactcggaggagcacgacttcgaatcgaaggccgacgctggggcgtccaaaagctacccgcagcacgatgacaccggccgcaacaacggtttcatcgtcatcaataaccgtccctgcaagggtgtggaggtttctacctcccgactgctaagcatgcccacgccgaatgccactttgtccccatacagatattcaatgtaaaaaagcttgaatatattgttccttcatcacaccactgtgacattccgcatgtgaaccgcactgactatcagctgattgatatttctgaggatggatttgagagccttcttacttcagatggcaacactaatgatgatcgtagactcccaactgatgaaactcttgtggaccagattaaggaaggggtcaaaagcggtcaaggatcttagccgagactgcccagtctgcgatgtcccaggagcatatctgcgcgttgaaggatgttggccccaagtaacttccttgggtatggagacggcaccctactgtatctcgacttacatcggaaaagaagtgtatcaccgcatgtattgctaccgagacactacctg

SEQ ID NO: 70748 - DNA, 573 bp, Zea mays
  Clone ID: MRT4577_16451C.1
acgacccacgcgtccgcccaccctatcgcaggccttgatgttaccatgagcattgcatggacaggtgaaaggacatttaatcgccgctgcctacatgattgtgtacacgctccggacccctctgagcacgctatatatattattgtaaggacacttgcaaggtcagttgaagataacgaggatcactgcttgggatccggcgacgcatcagctgacgatcaggatgaagacaactatgacccaaagaaccgcccatgcaaccgatcatgcgaggcactagacaaagacctagacatagacccaactcttggatcaacacgacctacatcttgacctacgatgatcgatacagcgatcgaaacagctgacggcactggtggccaatatgatggtcttcagatagtcgcagatggacaggctacccgacaggtcaacacacaagctggacactgactgcacaggagcgggcaactgtacgtgcaactataagagcaagccagttacccctgccaattgccctggcaggggttggtgatggaccatgtgacatgacgcgccacatggaggaccata

SEQ ID NO: 70749 - DNA, 524 bp, Zea mays
  Clone ID: MRT4577_164520C.1
ttctgcttaactatatgcgacatatgaaggaacatcggctgaagatattgctgtagcacgtgcaaatgcacgtgcaattgaacttgggaaactcattggaaggcatacagtgagatctacgctaggggctcttgtatatgaactcagatacaaggaaatttgacaatgaatttaaacgctgcaaagaggtctccaaaaagaaaaagcgtgaaaactgatgaagacattgaagcgttacttgtcagatgagatattacatcctatagttcttcctaccgttgttgatgtacatgctacatgtcaaacactatgcttatctacaggatcatctacactgacagcaccacatggagaggaaagaatagcatgtacaattggaacaggaccaggagcagcagcttacaatgctattgaccaagttattcacatcctaactgatatcccagaatatggcatgaactaaggcaccacctgcatcaacgcagtcgtaacaaccctggtggctgccaccgtggatgtgacca

SEQ ID NO: 70750 - DNA, 470 bp, Zea mays
  Clone ID: MRT4577_164522C.1
gggtggtggttttttttttttttttttttttttttttttttttttttttttttttttttttttttttttttttttttttttttttttttttttttttttttcccaaggccgaagggtccaaaaaagggcaaacccccccaaaacccccgggggcgggggggggaaacaaatgggggtgaacccccgcctggccgcccggccccccaattaaccagaccctggggccccggcccgggccccccgggaaaccccagccggcccaaccccccaggcccccaaaggggggcccccccggcccccggcttgggcatgggctcccccggggaggccggcggtcccccggcctttcggggctgagggccctccccccggggcccaaacccctcctggcgggaaaacccccccccgcctagggaacccccccccggcccgctaaaaccggccatgggggggccggatttccagggaac

SEQ ID NO: 70751 - DNA, 372 bp, Zea mays
  Clone ID: MRT4577_164525C.1
ctctcacggtgttatgccttgtctcttattcgaatcacattctccatcttgttcattgccgggggccgcaggaaaaaggctacaatttccacatggaaagcgcgaatcaagccgcaacaggcagcacctacatcacaagacgcacggggcgcccccgttcgggagccgccctccagcgccagcctctggggtagaggaacaccccctggcaccagtcccgaccgctgaagcggggtgctggaccaccctcactagccagcgcacaggcttgctccccgcacgagggttgaccgcacccctgggcttgaccccgggggcggcagcggaaccggcgccggcggccccggaggccccggcaacaaaggaccgggg

SEQ ID NO: 70752 - DNA, 452 bp, Zea mays
  Clone ID: MRT4577_164526C.1
tccgaagccatctcaggtgactgaaaccgtctgactgcgctgtcctgctccactaccagagcatgtcgctcggacgcgacccgaaccgccggcgccgacgtcgatcaccctccgagcgccttcctgctactactagtacttctaggctgcgcgtccctcgcgagcggaggagcacccatggccggccacgttctaggcggagtgaaggagaacccagccacggccaacagcggcgagtacgacgggctcggccgtttctccggggacgagcacaacaggcgcgagaacgccctgctggagtccgagctcgtgatggaggccaacgagcaggtggaggtcggtacgctgcaccatctcactctcgaggaccttgaagccgggaggaagaagctctacgaggcgctggactgggtcaagccatggctcgacttccaggagctccaagaattcag

SEQ ID NO: 70753 - DNA, 684 bp, Zea mays
  Clone ID: MRT4577_164527C.1
atctgttatcatctgctcctctacatttcttctctctctgctcctccgtctccggctgatctatctcagataggaatcgtcatgccggactcccatgagcaccacttccaatccaacgccgacgctgttgcgatcaacacctacccgcaccacgctggcaccggccgtaaaaacgacttcatcttcatcgagaaccgtccctgcaaggttgtggaggtttctacctccaacactgtgaagcatggccacgccaaatgccactttgacgtcatacacatattcaatgcgaaaaagcttgaacatattgttccttcatcacacaactgtgacattccgcatgcgaaccgtactgagcatcagctgattgatattactgaggatggatttgtgagccttcttacttcagatggtaagactaatgatgatcttatactcccaactgatgagactcttgtggcccacattaaggaaggggtcgaaagcggtgaaggatcttgttgagactgtccactctgcgatggcagaggatcagatctgctgcgatgaacgatgctggtcccaagcaacttccttggctttggagacggaactctactgtatctcaacttaaatcggaaaagaagtgcatcaccatatgattgctaccgagacattcacctgacttgagctggattatgctatatc

SEQ ID NO: 70754 - DNA, 279 bp, Zea mays
  Clone ID: MRT4577_164529C.1
agacccttgaacaacctgcagcagccattgtatctgcactgcccaaagagcctgcaccgccaaaacagcctgaagagcccaagcagtctgcattgcgcgcccatgtgcctcctcagaagaacggggggttctgtgaggtgggcaagaagctggtcatctatttggagcataacctggagaaaaacagcaccaaggaggagatcctggctgcacttgagaagggctgcagcgtcctgccagacccttaccagaagcagtgtgatgaattggtggctgagt

SEQ ID NO: 70755 - DNA, 247 bp, Zea mays
  Clone ID: MRT4577_16452C.1
gcctgccgggtgttctggaccggccttgtggtcacgccgcagaaataaagtaataactgttcctcagcggcagcgcccaggcgaatgcgatcgcgcctgtgatatttttctactactatccttcaagtcgtgcgcgtaccgggccgacacgtatacgaactccgggcttgtaaagggtttggatggagggagagaaaagataaagagggatgtggtaagatcattttaacttgacatatgttaagtt

SEQ ID NO: 70756 - DNA, 498 bp, Zea mays
  Clone ID: MRT4577_164530C.1
agcgcagaagaacccgatcgacaccatgagggtgttgcttgctgacgttgctctcctggttctcgttgggagcgccacgctacactcatacaatcggagtctgaggctgccatccatcgccttcgtctcatataccgtcgatgaaggatcggtcaactatgggaaaactgacaccttcgatgctactggcaccgacgggccacctgacgacgccggttaacttgataacgcctgtccatgtgacagacggcgagtcatatgtcggcggcaccatgtaactaccataatcaagcgacacgagctgaggctaatccgcgctcacaccgatgacccgagccaacagtagcataccatttctgcgtacatctgaaaggaacatgcggtgtcattagaacaactgtcctgattcagcgctgctggttattgaggccaacaagtaccattgaggcaactagctactgcttacctcaaggagagtctttgatgcaaccaagtggc

SEQ ID NO: 70757 - DNA, 1137 bp, Zea mays
  unsure (1)..(1137): unsure at all n locations
  Clone ID: MRT4577_164531C.1
agctcaccaaccagcagtcttagtctgagtctgagatatgtttgcaaggcacggtggccgtacagttcattttatggtttattgtgtgtaacatgtacaggagatatatagaatcacgatgacgtatctgtttttttntaacaacaaacaatatgccaacacgaacacgaacacacacacgtatgatgatcctggtggtgagtgagtcccttctgacgattcttttttccatggggaaatccagtgcacatggatcaggagacctgcaccccggcgttgaggttgaggttgaggatgcgtgcggtggacctgatctctagggcggggctgatggagagcaggcccaccaagctctccggcggcacccgcatcccgcccacgttgatgcactccagccgccggcacttgttcaccagcgccaccagcccgccctccgtcacgtggcggcagctccacaggatgatgctcttaagatttgcgcagctgtttgcgactgcgtagagggattcatctgtgatgaacgttccaccgatattgaggtgctgcagagaataagccctcgaaaccagacggaccacgcccttatcggtgatcccggccaatccccagagcgatatggacgtcaggttgccgacgcaatccgcggacgaaatcttgatcaggccatcgtcggtgattcggcagccccagcagatgtcgaggtcgccgaggttgacggcggcgcggacgaggcgcgcggcggtgtcgtcgccggtgcgctggcccgcgaagctcagccgccgccgcgacgccagcgaccgctccaccgcccagcgccacctccggctcactccctccgccatggacaggtcgcggaagggcgacaggagggagaggatgtgcgcgaggaggtcgacggggagccgctcgatgtccgcctccaccgagccgccgtcttgctgcagctgcttctccgggtccatctctctcctccgcctcctccctatctcgccgcgcgcagaagctgggaaaggcgcggcgcggacgcctccttgtaggcgtcaggtcgccaccttggcaccaccgatgcgtgcagcgcgacgcgacaccagtggacgcgggcgctacggcatcccggccggcctcgaggtacccaat

SEQ ID NO: 70758 - DNA, 249 bp, Zea mays
  Clone ID: MRT4577_164532C.1
caccgcccgggccgaattccccttagagcgtgccagtaaagattgggttgggaccaccaacaaccttagaggcagcgcgctaaaacaatccgcccacgagcccatgagggcgagatgatgtcctaggaacgctaggtgggcccaaagggtgcacaaagggttttgatgattaccaggcagaatattagtcaggggtctgatacgattgccactggtggagagcaaacaataatatagtaatgagtgact

SEQ ID NO: 70759 - DNA, 291 bp, Zea mays
  Clone ID: MRT4577_164533C.1
cggggacctcaaaaaaatttttatttacctggctttaaaaccggggacctcataacagaatacttgtcccccttgggagggcggggggacagaccctcctgatggaactttgggggcataattttccggggggccccgggcttttgaggggggcataaaaaagcctttgaaacgacatgttcgaggacccgccctcctcaattgccttccggcacggggatttaatttccaggacctggccccaaaccttcctgggtgtttggccgtaacacataaaagttttaaccgttc

SEQ ID NO: 70760 - DNA, 255 bp, Zea mays
  Clone ID: MRT4577_164534C.1
caacaccaatgaaatccagtgtatcctctcaatggctatgagattgatatacatcatcatctatcaaggtaatgctcagttacctgaacctatgcctaatcaaacaaccatggtgttctacctacaagacataacaaaagggtctagagccacagtgaccccagtggctggcatcaagggaagcgataggacctacaccacatttggatccatatttgtggtggatgaccctgtcacgctgagcataagcccaac

SEQ ID NO: 70761 - DNA, 447 bp, Zea mays
  Clone ID: MRT4577_164535C.1
ggggacaaacccaaaccgggttttttgggggttaaaaaaaaacggggcccatcaggggctcaaagttccattacaggggaacagggactttgttttacggggagggtcaaccccggaaaaaaacgtttcagttgaacacaaacccccacaaaaagcttacatgggcctaaacccttggaagtcataggaaacaaagggggcttcacgaaattacatccagggggggggtgccttttgggcccgggcttggacccgttaaattggacccaaaaaaacccatgctgaaccccaacgaaaggcagcttaactccttgttggggcccccgacaatttttatgttaaaacgggtaggaaccccgggggaaagaaacctggcaacgtttgttggggggacaacacaaaatccccggtccctgggcaaaaaatctttccccaaagtggggggtc

SEQ ID NO: 70762 - DNA, 485 bp, Zea mays
  Clone ID: MRT4577_164536C.1
gccggccgggttcccgctacctcgacaaccgcacagacacgtctcttcgtaatcttctatctccccgacccatagcgcccccccttctcccattcattcactcatttctcaccaccaccgccgctaccccctctcgacgacgcatgagggagagcatctcgagccacatcggtcagaacgccatgcagcccccaaacgcgaggtggcagctggactgccccaaccacgccattcaggctgatggtcaaatgcccggtgacaacaccattgagacaggggatgatgctttcaacaacttcgtcaaggacacggacgctggtaaccacgccccccgggactgtgttgttgaccttgactccactgtcatcacacgaccggaagactgacacctatcgccaagtctgccatcctgaccaactcatcattgatgagaagaatgctaactgcaacctcgctcgcgttgactacaccatagctaaggatac

SEQ ID NO: 70763 - DNA, 278 bp, Zea mays
  Clone ID: MRT4577_164537C.1
aaaccgaagacaatttttttgcttaactggtgatttttaaaataaaacccccggagttcacccgcgttgaagccaaattttacaaaaccatggggcaaaaaaaagccttgcaatttctgtgagggtttaaagggaccctggggggaattggggttggccggtttatctttcttatttttggggaagaccggggcttttttttttcccccacattttaaaactggtcccctgggaaaaaaaaacctttggtccccccgggggggggaaatttttgggac

SEQ ID NO: 70764 - DNA, 326 bp, Zea mays
  Clone ID: MRT4577_164538C.1
tgtgcggacgctcgaggacggacggtccgaggctctcgctctcctattcgatctgctggtgagtctcgttcaagatcccctgctcgtagcgaaggaagtgctcccagagatgattaattaaatataaatatattcgttttcattttgtaagcctttttcttcttttgcttctctcttttgtatcttttttgtttatctctgccaaggctctttttttcttaaataaaaggagggacataaatgttgaactatttaaaaaaaaaaaaaaaaaaaaaaaaaaaaaaaaaaaaaaaaaaaaataaaaaaaaaaaaaaaaaaggccccta

SEQ ID NO: 70765 - DNA, 667 bp, Zea mays
  Clone ID: MRT4577_164539C.1
ttatcgcttatcgtgcgcgcctctacatttctgctctctctgctcctccgtgtccgcctccgcctgatccatccaagacaggaatcgccatggcagagtcggaggagcaccacttggaatcgaaggccgaggctgcggcgcccaagacctacccgcagcaggctgacaccgtccgtaagaacggattcatcgtcatcaacaaccggccctgcaaggatgtggaggtttctacctccaagactggcaaggatgggcacgccaaatgccactttgccatcatagacatattcaatgggaaaaagcgtgcagatattgttccttcatcgcacagactgtgacattccgcatgcgaaccgaactgactatcagctgattgatatttctgaggatggatttgtgagccttcttacttcacatggcaacactaacgatgatcttagactcccaactgatgagactcttggggcccagattaatgaagggatcaaaagcgggaaggatcttgttgtgactgtccagtctgcgatgggagaggagcatatctgcgcgctgaaagatgttggccccaagtaacttccttggctttggagacggaaccctactctatctcaacttacatcggaagagaagtgtatcaccacaggattgctaccgagacattcacctg

SEQ ID NO: 70766 - DNA, 160 bp, Zea mays
  Clone ID: MRT4577_16453C.1
taaatgctaatctacaaacttgtattatctattgtgcatctctagcttgggtatcacttgagaatgttcgcacttatgaccacactaacattcaactttaagcactccacttatacttttcttataaacattaacacttactatctacttaatacacttt

SEQ ID NO: 70767 - DNA, 758 bp, Zea mays
  Clone ID: MRT4577_164540C.1
agccgagcagcggaggaggccggcggctagagggtggcgatggcgcgtgcggaacaggaatcgctggctgcgccgccactggagtcgaccgcgacggcgagacagcgcgtcccgtccgtggaggtgcacttgtaccggcggggtgccggcccggtggccatcttccggtcggacctggcgggccctcggcgggaccgcctcgacgtgcgccgcatccaggcgagccacggcctccgggcgctgttcgccttcaggcccgagggatcccgccgcggccgtggcctccggatcaggtgcgacccggccgccggctactccgcgctgcccttccgcgacggcgccgccatcgccctcgacggcgagcccggggagtcgtggacgaagccggtgtcggtgatcgtcgccggcctgctggtgcccgctgtgatggcggcggttgcggccaacggggtgccggagccgctgcggtcgtcgaggctggccaatgggatctttgcgccgtggatcctcttcagcgccgtcatcatcttcgctcgtgccaggacgcggccaagggctccatgaatgaatctctctagagagcacgctaccgccagtttcttatgtacttactttcccatatcaaccatgttagaatgtaggaatttggtaacgattccaattatcaccggattttgtttgtgtttgctgacggcacgttatctgaaatgctattgattcagactgtcaccgtagttccttgctaacaggaacaagat

SEQ ID NO: 70768 - DNA, 700 bp, Zea mays
  Clone ID: MRT4577_164541C.1
tgtgcaggcgctcgatggcggccggacctacctcacttatcatctgcgcctctactttctgctctctctgctcctccggctccgcctgatccatcctagacagggatcgccatgtcagactcggaggagcaccacttcaaatctaacgccgacgctgggtgcgtccaagacctacccgcagcaggctgccaccggccgtaagaacggcttcatcgacatcaagaaccgtccctgcaaggttgtggaggtttctacctccaacactggaaagcatggccacgccacaatgccactttgccgccatagacgtattcaatgacaaaaagcttgaggatattgttccttcatcacacgactgtgacattccggatgtgaaccgaactgagcatcaggtgattgatatttctgacgatggatgtgtgagccttcttacttcacatggcaacactactgatgatcttatactcccaactgatgagactcgtgtggtccaaattaaagaatggtgcgaaagcgggaaggatcttgttgtgactgtccagcctgcgatgggcgaggagccgatctgcgcgatgaacgatgttggccccaagaaacttccttgactttggagacggaaccctactgtatctccacttaaatcctataagaagaggatcaccccaggattgctaccgagacattcacctgtcttggagct

SEQ ID NO: 70769 - DNA, 1486 bp, Zea mays
  Clone ID: MRT4577_164543C.1
tcctgtgtgtctgagcgaggggtaaccctgccctttggggcctgggctattcctcagctcgcgccgctgtcgcctcaccccccaatccaatcctccgcgatcgatcggcgggcgcggatggaggcgctgaagaagcaggccagcaagctccgcgagcacgtcgccaagcagcagcaggcggtcctcaagcagttcagtacgcggtatagtcaagatccttctcttgttgatgaagcggagcttgagtgccaccagaatctccaaaggctttacagtactacaagagcagctaagcatttccagcggaatattgtacgaggggtggaaggtttcattgcagttagcaccaaacagatggagattgtgaaaaaactagccggggattgttgtaaatatggagacgacaatcagcattttggttttgctcttgcaagggcgtctgaggagttcggtaaatctcataaacaaatagagaaagagcgggaggatcttcttaaaattcttggagagcagatttttgagcctctccgacgaatgataatgagtgctcctcttgaagatgctcgattgctaacttaccgttatcaacggatcagacaggacatggagtctcagatagctgatgtgatgagaaagcaacttaaatccaaggaaagtagtggtaacacagataactctgtgaaactgcaacatgcagaatcgaaattatcagatcttcgaactacactggcagcgttaggaagagaagcaactgcagctatggaggctgtagaggctcagcaacagcaagttacgtatgaacgtctccttgcaatggttgatgctgagaggacatatcatcaaaatgctgctgatattctgaataaactccatgatgagatgctctatgcaaagcatcataatgagtcagcaaaccactacgatgaacagtcttcagagcctgaatcagatgcaggcccagcacaagtgcactcacgtagcacatctgaagatccagtattgactaaacctagcgaatccacagggaacagtcaggaggtgcaatttctgggggaggttattcatccattcgatgctcaggctgatggtgagctcagtctcgcggtgggtgaatatgttgtggtccgccaggtggctgcaaatggttggtctgaaggtgaatgcaagggaaaggctggctggttcccatctgcctacgtagagcagagggacagagccccggcaagcaaggtgatagagcctggacttctgactacctgatccatcccgtagttatggctgctgacttgctgtcatggtccttttttttctacattattgtacatgacatgccccatgagtgattagcgtatggcagaaccttcaccttttctgtgcagattattgttcttctagccttttcgttggtcggtaactgtatgtaaaatgtagttctgtctgttaggatttccttccggtattataacattgtacagagctattggtg

SEQ ID NO: 70770 - DNA, 1252 bp, Zea mays
  Clone ID: MRT4577_164544C.1
cggacgcgtgggctgtggagctcctgttggctctctgtgcaactcggcagggcagtggcgtgcatcatcagcgcaactctgcacgccatcccgctggccaccctcagccgctggctagtggattaccaccaccgtctctgcgctacagaattttgtcatccggaatcagattcctcaggcagctcgcatgcaaaagtcaagcggctctacgttattccctcttcacttcattgtcagcaatcctaaaagctcgcagcagcagctagcagctcgttcttgttcgtcagctctagcctaccctgcgctggctcttctttaattctgcagggaagttccagtttcagctagagtgcaggcggagaaccaatgggggcggcgccgtcgtccgacgactcgtcacgcgccggagacggccgggctgtggcgagcagcgctgcctctggcactggcactggcagcaacagcaaccaggcccagtcgaagcgggcgccgccgcctcacaagttccacgagatagttgcgcaggaggcgacgacggccggcggcggcggcggcggcggcactgctgctgcagccgacctggaggatcaggcgtgcagcaccggggtgtacctggctgggaaaaccaagaagtactgggtggacgagaagaccaggtgcaactgcttcgtgctgttcgctagagcgctgtccatcacttggggcgacgatcccagatactggatctggcatcccgtcagagaaaccaatgacgccgagatcgtcgaggctgcgtcgctgcagaacgtgtgctggctggaggtgcacgggaggctggagctgtcgcacctcacgccggggtgcagctacgacgtggccttccaggtgatgctcacggagccggcgtacgggtggtcggtgccggtgaacctgcggctcaggttccccgacggcacggttcaggcgcggaaggagaagctgcaggggatgcccacgaagcagtggctggagctcagggccggggaggtgaaggcgccggcccagccggggggagcgggacgcagcggcgagctggagatctccctgttcgagtacgacggcgggctctggaagaaggggctcctcatcaagggcatcaagatcgtcccgaaggagagtgattattaattagtgtttgtaactttgtttcagggtgactgctcctgctcgcttttgcctgtcaggtgtgctaagaacttcgtctaagataattggaataattaatgtgtgtggc

SEQ ID NO: 70771 - DNA, 379 bp, Zea mays
  Clone ID: MRT4577_164546C.1
aagaagaaaacaccttaaattagcggccccaaaaaaacttaaccggtttccctatcaaccccatttaaacccggggaaaaaaggaaacaaccccctggcccatccggaccaaaagaggaagggccaaattttcccaaaaagcaaaaagacgatcagggggaccctttcagggacccaaaaccacggcccggagggagggacaaaacccggggggttaatgggcacaactgggtcccttcccttaaccaataacgggtcaaaaaaaacccccctatggtcatcaaaagggggaacttaaaacactacgggcggccccacggttaatttttggaggttttccacttccacggaaaaacatggaaacttgcccggcacccgg

SEQ ID NO: 70772 - DNA, 741 bp, Zea mays
  unsure (1)..(741): unsure at all n locations
  Clone ID: MRT4577_164547C.1
ttgggtccctcgaggccggccgggcttgttcgtcagctctagcctaccctgcgctagctggctcttctttaattctgcagggagttccagtttcaggtagagtgcaggcggagaaccaataatgggggcggcgccgtcgtccgacgactcgtcacgcgccggagacggccgggctgtggcgagcagcgctgcctctggcactggcagcaacagccaccaggcccagtcgaagcgggcgccgccgcctcacaagttccacgagatagttgcgcaggaggcgacgacggccggcggcggcggcggcactgctgctgcagccgagctggaggatcaggcgtgcagcaccggggtgtacctggctgggaaaaccaagaagtactgggtggacgagaagaccaggtgcaactgcttcgtgctgttcgctagagcgctgtccatcacttggggcgacgatcccagatactggatctggcatcccgtcagagaaaccaagtacgtgctatctatacgtagtgcttgctccagcaattacatatacatgcatgctcagttcagtgctcagctcgattcgagccatgtctgtacctgtactctctctccctctactctgtacagtgacgccgagatcgtcgaggctgcgtcgctgcagaacgtgtgcntggctggaggtgcacgggagggctggagctgtcgcacctcacgccgnnggtgcagctacgacgtggcccttccaggtgatgc

SEQ ID NO: 70773 - DNA, 1256 bp, Zea mays
  Clone ID: MRT4577_164548C.1
tctgtgtcttgtagccgccagccgcccccaccgctcactccatgccacggccgcccctgccgcgcccggccacccccggccccggccgcccttgccgcggacgcccctgtgtgagccgtcgtcgcgcactcgccgctccgcccctacatgcagtcaccacgggagctcgtatcgctcgatttcctctccagcggcagcaccctccacccctcatcaacccaacccgcaagaaaaacccgcagcagagaagaggagtcgccgtgaccgagagctccagagcatgcccccgccacagcctccgacgatggatccaaagatgacagaggtgacccagatgttcgcccgcttcaagaggccctacgcccgcaacgaccgtgcttgagattcagaacaccttatccggcttattgtgtgcgtaaacatgacactttgccatgaactgaagtacttgagattcagaagaagaaaaaaacaatagaggcacaccttaagatttgcgcagctgtttgcgactgcgtagagggattcatctgtgatgaacgttccaccgatattgaggtgctgcagagaataagccctcgaaaccagacggaccacgcccttatcggtgatcccggccaatccccagagcgatatggacgtcaggttgccgacgcaatccgcggacgaaatcttgatgaggccatcgtcggtgattcggcagccccagcagcttcgtgaaatgtcgaggtcgcggaggttgacggcggcgcggacgaggcgcgcggcggtgtcgtcgccggtgcgctggcccgcgaagctcagccgccgccgcgacgccagcgaccgctccaccgcccagcgccacctccggctcactccccccgccatggacaggtcgcggaagggcgacaggagggagaggatgtgcgcgaggaggtcgacggggagccgctcgatgtccgcctccaccgcgccgcgccgtcgtgctggcgctccttctccgcgtccatctctctcctccctccgcctcctccctagctcgccgcgcgcagaagctgggaaaggcgcggcgcggacgcctccttgtaggtaggcgtcaggtcgccaccttggcaccaccaggcagttcaaaaggttgacctatttgggaatctccggatctatgcttattttcaactccccgaagcatttcgtcgcttgctacgcccttcctcgtctctgggtgcctaggtatccaccgcaagccttcctctttgacccggccggcctcgagg

SEQ ID NO: 70774 - DNA, 345 bp, Zea mays
  unsure (1)..(345): unsure at all n locations
  Clone ID: MRT4577_16454C.1
gggttgggtttttttttttttttttttttttttttttttttttttttttttttttttttnaaccaaggggttggagtgggtcccatgaaaagttttacagcaatttaccaaatgagtgggggagggttttaaaaaaagtaaaataaaaatgggttttccaaggggcccccccaaattaatttttaaaccaggttttcaattaacctgtcctttattaaaaaaaccacttttttacgggtggtgccaaaccagggatttcgaaaatgtcctttttgtgtgggttcaaaattttaacaattttttttggtttgactccaacaacaattaaaaaaaagatggccatta

SEQ ID NO: 70775 - DNA, 363 bp, Zea mays
  Clone ID: MRT4577_164550C.1
ttcgactgcgcatgcagacggcgctgatgggggcgtgtcggatcggccactgggaggtggctcagacgctgctgctgttcagatgcacacgtgtacaaggtggacagcctgagcggtaggacggtgctgcacgtggcggcggcgggcggccacgtcaggtgcgcgcgcctgctgctcgcgggcgccggcagcggcaggagcaagctcgggaaccgggcggccagcggcggaggcggcggtgtgacggctctgcacctggcggcgctgcacgggcactcctgctgagtgcacctgctggtggactagcgcgccttcgttgtctcgcgcacgctgtcctgtgccgtgccgaccatggcgttcgtc

SEQ ID NO: 70776 - DNA, 887 bp, Zea mays
  Clone ID: MRT4577_164551C.1
gggtacacctcgaggctcggccgggataccttatcattccatacgcacctatatacatctacctgctcctacgtctacttgattgtgcaggcaagccagagatgggcatgggggactcggaggagcaccacttagaatcagaaggacgacgctcgggagcgaacatgaactacctgaagaaggctgggaccgggcggatgaacgggtggagtcggcatcaaaaaccagtctctggctgatgtggaggagactacctgaagactgagatcttggtcatgacaaagccgtgagccgcatactacatatagaacggaaaaagcatgaacatattggtcctgtacgacacatatgcgatattgcgcatgtgaaccgtactgaacaccatctgattgatatatgagatgatggatttgtgagccttgttacttgagatgggaacactaaagaagatcttaaactcccaactggagagactcttgtggcccagatcaaggaagggtttgaaagcggcaaggatcttgttgtgactgtccagtctgctatgggggaggagcagatctgcgcgctgaaggatgttggccccaagtaacttccctgccttggaatactggatctcaaaacctaaatcgaaaaaagaagtgtatcaaggattgctacagagacatccatctggcttgagctggcttttgctatggcaaacacaagtgcaggggatcgctgggtggttgcaccgtgtctgcattatgtggttacatttttggaccctggatttttctatgcttttatgcccctactgtttagtattaattatcaataaatttgtttgggacggtgcaaaaaaaaaaaaaaaaaaaaaaaaaaaagtactctgcgttgttaccactgct

SEQ ID NO: 70777 - DNA, 497 bp, Zea mays
  Clone ID: MRT4577_164552C.1
ggggggcggggggggtaattttttttttgaagcccaaagggggggaaaaaattaaatttgaggaaaagggaaccctttaaaaaaaaggggtaattggggggagcccccccccaaccaaacccaaggcaaaacccggggggaggggaaggaactaaaacccttaacttttaaaaaaaaaccccgggcccccccttaaaacccatctgggggaaggggaacacaaaaaaaaagcccaggggcccctttattttccaaaaccaaaaattggaagggaccggcgggggcccgggaaaaagggccacctcccggcccatgctggaaaaaaaaaaccccccaagggtgtttccctttatgggcgggaccctggaacgcccccttcaacccataaaccccaaacccaaaaaccttaaggccctccccaaccaagcccggggaaaccccatgcaggggaacccccccttcccttccagggtcccgctaaaaaagggggtcccccc

SEQ ID NO: 70778 - DNA, 803 bp, Zea mays
  unsure (1)..(803): unsure at all n locations
  Clone ID: MRT4577_164553C.1
tgggtacctcgaggccggccgggactcaccttaggatcaattccaccttgcctttggtttcctttctttacgatacccggagagctttgtctactccaccacatcgcgaactcgaagagagttacgcccgcacttgcttctggcactcaaggccacatacttagtctccgagagaccttactccacatacatccacaatggcgcgcagctcacggaatgcgagcaggcgctcgacatggtccattgccttctaccttctcctcgtcctcgtcggcggtctgatgctggctaagacagcacacgccaaggacaatgattccgcaaaggatgacggcaacgccgtctccggccccgtcattggtatcgatctgggaaccacgtnactcttgcgttggtgtcatgaagaacggtcaagttgaaatcatcgccaacgaccagggtaaccgtatcactccttcttgggtcgccttcacagatgaggagcgcctcgtcggagacgccgctaagaaccagtttgcctccaacccccatcgaaccattttcgatatcaaacgtctcattggtcaaaagttcaacgacaagtctgtccagagcgacatcaagcacttccccttcaaggttcttaacaagagtggccagcctcgcgttaagtgttgaggttcacggcgaggagaagaccttcaccccccgaggaggtctcccgctatggttcttggtaagatgaaagaggttgctgagagctacctcggtgagcccgttaagaacgccgttgtcactggtcccgnctacttcacggacgctca

SEQ ID NO: 70779 - DNA, 510 bp, Zea mays
  unsure (1)..(510): unsure at all n locations
  Clone ID: MRT4577_164555C.1
aattaatcctgcaaaatacttatatataataatagtacatttgatccctttcatttccaggccccaatcccacgctttacataccatacatacaaaccacttcccctctaaaaaaagagaactaaaaaacagtacacaggtcagtccacctggaccctacttggaaggacagagcccataaaccctggtgtctcccggctctcgccacagggccccaatccaagtactatcaccttccctttcccgccatttttgaccgttgccagcgccactgccggttcaagcacctccgacgtccaactctcaaactcgtcctcgaggaactgtccggacgccgctgcaagcatttgcaccgccgtctcctccacacgtgtccatccttggccgatggccctggcaagcctcgcgcggatggaggctgtggcgtcnccgtcgccgtcgtcattgtcgagggtgaccacgcgggccgcgaggggcctcgagaggccgtggggttgtccgtgctcactc

SEQ ID NO: 70780 - DNA, 407 bp, Zea mays
  Clone ID: MRT4577_164556C.1
gaacataaaccgcagtgccctctgtcttaaagaccatcaagacgaatgtacctttaatcattgctagcggcaggagagggaacaaaacctgcgctctaaagcgacatcgcactacaaacaattatgcctaaagcgtaaactctgcccagcgcacaaaatacctatcatgcttgtttaacgcatatcctttcatcaaaagcgatgacggacaagttttccgttcagattcaacaagattccggacctacgctctcgaccggttgatacaattccactacaccaaatctgatctcagggaacacagataaaaaaaatcaagacctggctttgaattcagcctctgctgctgtggcacgggtaacacctccccttgatgggagtccaaccatgacttttaatgcataaga

SEQ ID NO: 70781 - DNA, 536 bp, Zea mays
  Clone ID: MRT4577_164557C.1
tgggtacctcgaggccggccgggaagcttactcattatcatccgcgcctctacatttcttctctctctgctcctccgcctccgcctgatccatccaagacagggatcgccatgtcggactcggaggagcaccacttcgaatcgaaggccgacgctggggcgtccaagacctacccgcagcaggctggcaccgtccgtaagaacggcttcatcgtcatcaagaaccgtccctgcaaggttgtggaggtttctacctccaagactggtaagcgcggacacgccaaatgccactttgtcgccatagacatattcaatgccgaaaaagcttgacgagattgttccttcatcacacaactgtgacattccgtatgcgaaccgtactgagtatcaactgattgagatttctgaggacggatttatgaggctacttacttcagatggcatcactaaggacgatcttatactctcaactgatgacactcttgtggacctcactaatgaatggcacgaaagcgccaaggtacgtgttggggctgt

SEQ ID NO: 70782 - DNA, 1507 bp, Zea mays
  Clone ID: MRT4577_164558C.1
agtccagccatagcctagggatcggccagtgtgcggactcggagggagcccaccacttcgtaatcgaagggcctgacgccggagccgtccaagaacctacctcgcagcatgggctgtgcaccgtctcgtaatgaaccggggcttcatcgtcattcaatgaactcgctccctgcaaggggttgtggagggtttctactctcaaagacctggtaagcattggccatgccaaatgccacttttgttggccatagacatattcaactgggaaaaaagctcgaagatattggttccttcgtcacactaactgtgatattccacatgtgaaccgtactgagtaccagctgattgcatatatcagaggatggatttgatgagccttcttacttcagatggcaacactaaggatgatcttagactcccaactgatgagactcttgtggcccagatcaaagaagggtttgaaagcggcaaggatcttgttgtgactgtccagtctgctatgggggaggagcagatctgcgcgctgaaggatgttggccccaagtaacttacctgccttggaatactgtatctcaaaacctaaatcgaaaaaagaagtgtatcaaggattgctacagagacatccatctggcttgagctggcttttgctatggcaaacacaagtgcagggatcgctgggtgttgcaccgtgtctgcattatctgtggttacattctggaccctgtattttctatggttttatgccccctactgtttagtattaattatcaataaatttgtttgggacggttgaattgcatgcaaaaaaaaaaaaaaaaaaaaaaagacgaccaaacttcctacgaaggcagaaccgcattctcgcgtcggcttgcttttaactgaatccagcccaccgcttctcgccccgtcgccatggacgcggtcgattctgtggtggatcccctccgcgacttcgccaaggacagcgtccgcctcgtcaagcgctgccacaagcctgaccgcaaggagttcaccaaggtggcagcgcggacggcgatagggttcgtcgtcatgggcttcgtcggcttcttcgtcaagctcatcttcattcccatcaacaacattatcgtcggttccggctaggctcagggcgcgactagcatgggagtagtgcgatacttttgagagcaagggatagcgaggatcttggtctttggaatagtattgttaatgacatttttttttccggttgtgtttctggagtaaatcgttgaacgacaaggcttcaggatgtctggatgtggattctgagtagaccttgaatccttgatgaagcagccagtcttggaaagaaagttccattttgttgttccattaagctatttttgttgttgtctacagctctctcggcgatggtaagcgcgatttggtggtttaatgttttagtatatctgagccgaactgtagactgttgcttctgtgagaaacgaaaaaaaaatatagacgtttgggcggattgtcgctt

SEQ ID NO: 70783 - DNA, 594 bp, Zea mays
  unsure (1)..(594): unsure at all n locations
  Clone ID: MRT4577_164559C.1
ggcagaccaaaagttgcatctattttttatatatgtatagagatgcatccggcttccattaccctacctaaagggtcttcagaaaaggcagaactagaaacaacaaacatccctgatgacaattcagctgctatgactgatggagttgcctcatgtactggtaactgagttgtcctccctctagctttaaggcagcatatgtgtttcatgtttcaagaacttcgatctaaccatcatgaattggatggagaagctttgtgttgttcaagttttcagaaggagatccaatggcagtcgttcgagtgaagaaccaattatttgtttcaatgatagaattgagattctaacagtctagcatttaattccaactgagtgaaaactaattcagacaacaacaattgtcatctcaattggaattacaaatgcctgatgtccagatgctacctcataggctcagagtcagtaaacaggggatataagagggacctttaccttttatggacatggatggnggatgctcacacatagaggttaagcaacaatggggaatgtgaaggacgtggatagaatgcgtagagagatgcaggctattga

SEQ ID NO: 70784 - DNA, 561 bp, Zea mays
  Clone ID: MRT4577_16455C.1
attccagtggccctgcttccctcgtcgtcactctctctcgagagcagcaccggcacttcggacagggtaagcgggcatcacgaatctgcttcaattcccttcccctgctctcagatctcgccttttcttcctgggatttgagctcgctctcgcgcttcccctacgcatcgtgaactcgtttctttagtggtgacaatagcagcgatttgcccggagggttctcgaggtatttcagcagttgcgctgttgcgttgaatcgagtaggaaaggagtaggaggactcgccccccatccacagtctattcaagaagcttgtggaggtagtgtgcagttccggcgcactgtagtgaggatctgacgacagtttcacttcacctacttctcggatttcgagctaccccctcatcacaccgtcgctgaattccgtagaagaacttttgcgtggtttcgtctgatttgttgctttgcttcccctttgctgtggacgcagagttgaaaagcaaaggtgtgttcttgtcatggagcagccgcagcagaagggagtagcggtctctgcgcagg

SEQ ID NO: 70785 - DNA, 399 bp, Zea mays
  unsure (1)..(399): unsure at all n locations
  Clone ID: MRT4577_164560C.1
tctgtcgccagtcttccttctccgcgctgccgctgtcgctggggatcagctaagcaaagctagcgaagcgaagcccgacggatggagccgccccgtggcgcttcccgcgctcccctggccctcatcctcctcctcctcctcgcgctgacggcggcgctcgcccccggccgcgcggccgccaccggcgtcttcgaggtgcgccgcaagttcccgcgccaccacggaggcggcgccggcgggggcaagcacctggcggacctccgggagcacgacgctcgccgccacggccgctccctcgccgccgccgncgacctgcccctcggcggcaacggcctccccaccgagaccgggctctacttcacgcagattgggatcggcacgccggccaagagctactac

SEQ ID NO: 70786 - DNA, 533 bp, Zea mays
  Clone ID: MRT4577_164561C.1
tcgccagtcttcccccttcctcgctcgctgccgctgtcgctagcggtggatcagctaagcaagctagcgaagtcaagccaagcccgacggatggggccgccccgtggcgcttctcgcgctactctcgccctcctcctcctcgcgctgtcggcggcgctcgcccccgcccgcgcggccgccacgggcgtcttcgaggtgcgccgcaagttcccgcgccacgacgggagcggcaagcacctggcgggcctccgggagcacgacgcgcgccgccacggccgctccctcgccgccgccgtcgacctgcccctcggcggcaacggcctccccaccgagaccgggctctacttcacgcagattgggatcggcacgccggccaagagctactacgtgcaggtggacaccggcagcgacatactctgggtcaactgcgtctcctgcgacacctgcccccgcaagagcggtctcgggatagagctgacgctgtacgacccgagcggatcgtcgagcggcaccggggtcacgtgcggccagga

SEQ ID NO: 70787 - DNA, 702 bp, Zea mays
  Clone ID: MRT4577_164562C.1
cattgggtacctcgaggccggccgggatatccttcctgatctctcctctcctctctacggcactatgaagacattcatacggcactcgccctactgctggctactatctgatgttaactcgccacctagatatgtacaccggactcgacatctctcccatgcccgccgacatgctctcccagatccctgagaatccagctgtccgtccgctgaggtaccctgttattacctccatccgtgtgacgaccgctgatcgagctcctcaactctgtgcgctgcatgatccccctttgaataaacttctcacggtctacctgagcgccgatgacacctccaaactcgaatctcgcctgaacagataccctgatggcaaagacatccgactggacattcaatcactcaagctaacccctaccggacagaataactgcagctatgcgcgatcatggacttcgcgatatcctctccatcatgtgtaccaagaatatggacccaaacaggatcttccgattctgcgcatagccgtatctgacgaagcgtcacccagacatgttgcattcaagatgacgaccctgtcatcactcacggactgcttggtagcactccctcgtctctcgacgattgtatcactcaacctcactatagccttcctacatacatactttcctgaatacatggagctgatatcgatccctacctgga

SEQ ID NO: 70788 - DNA, 267 bp, Zea mays
  unsure (1)..(267): unsure at all n locations
  Clone ID: MRT4577_164563C.1
acttccagtcacctactccccggccctccacgcgaccgtccaccccgcgtcgtctccggccaccgccgcccgcggaaaccctacaccccgcccgccatggcggatccgccgtccgtggccgccatcgcctcgccgcagcccgaccagctcggcggctcagcctccgccccgcaaaactccaaccctaactccctcctgtccccccaaatccccccctcccccaccgnctccaaccnctcggccatctcctccccgcacctcgatcca

SEQ ID NO: 70789 - DNA, 170 bp, Zea mays
  Clone ID: MRT4577_164564C.1
gtgatggacatcggcatgatgaccatgacaaaaggacggacgcgcgatgcaaacgcatggagcgagctcatcaccaagcagggtgtcgcgaatacaagatcctgaaggactttggagctcgtgttgaccttagtcaatatccgtgagctctctatatatatttacataca

SEQ ID NO: 70790 - DNA, 322 bp, Zea mays
  Clone ID: MRT4577_164565C.1
atttattatttttatgtaatgtatactacagagcttgtcttttcaatttattttgtaaaatgttatttctgtgggcttgttgttttgtttatttttttaaaaaaaaaaaaccccccaaaaaaaaaattttttaaaatcctttttatcaaaatacccctggggatcaaaaccaaaaaaatttttttccttttttttttcgcagaccctgaattccacattcccggactttattttccgccctgtaccgttttttttagggtatccaaaattaaaaaccctgcccggtttttcacaacccgggaattggaaaacccccggggaa

SEQ ID NO: 70791 - DNA, 2098 bp, Zea mays
  Clone ID: MRT4577_164566C.1
ccggccgggactctcggtccaggtccatgcatgcatcggccggtcgatagatcgatccacgtacgcgcgtacacatgcaccacctctagctagtttcggtttgatttcattccatttcttctttccatccatccacccaatccaatcaaattagtaatgagcaaaggtgctatcatcggcgcgtcgaccgtccttgtggtggcggtggtcgcggccgtgtgcgtggtgtccttcaagggcaactccggcaagggcgatggcgacgagaacctgtccatgtcggtgaagtcggtgaaggccttctgccagcccgcggactacaaggagacgtgcgaggcggagctgtccaaggcggcgggcaacgccagctcgccgtcggacctggccaaggtcatcttcaaggtcaccaccgacaagatccacaaggccatcagcgagtcggcgacgctggaagagctcaagaacgacccgcgcacgtcgggcgcgctccacgactgcaaggagatgctggggtacgccatcgacgagctcaagtcgtccttcgacaagctgggcggcttcgagatgaccaacttcaacaaggccgtggacgacctcaagacgtggctcagcgccgcgctcacgtaccaggacacctgcctggacggcttcgcgaacgccaccaccaccgccaactgcgggctcatgtggaacggcgacttcggcctcgagacgctcttctacgcggaggtggacaaccgcggcgacggcgccgacatgagcaagcgcgccaagtggggaggcatcaagaccgtcacctacgaggaggcgcagaaggagttcaccgtggagaccttcatccaggggcagcagttcatccccaagttcggggtgccgttcatcccgggattgctgccgcaggagcaaaaaggcaggacacactgatcatcttccagcctgcttcactcactcactactaccacctaacatcagttggactggacctgcacttcagcgagtcacccccggcccagcccactaatatgtccactgtactctagtattcgatttcccaatcttttttctcttctcttttgtcaattattaattatatacatcttttattattagtcctatatatatatacgttggcccgattcatcaagcagaaaaagcgggtggagaacacggcggggcccgagaaccaccaggccgtggcgctgcgtgtgcagagcgacctggccgtgttctaccagtgcaccttcgacggctaccaggacacgctgtacacgcacgcgcagcggcagttcttccgcgactgccgggtgaccggcaccatcgacttcatcttcggcaactcccaggtggtgctgcagaactgcctgatccagccccggaagcccatggcgaaccaggccaacatcatcacggcgcaggggcggcgggacaagcgctccgtgggcggcaccgtgctgcacaactgcaccatcgagccccacccggacttcaaggaggaagccggcgggaagatccgcacgtacctggcgcggccctggaaggagtactcccggacgatctacatccagaacgacatcggcggcttcatcgaccccaagggctggctcgagtggaacggcgacttcggcctcgagacgctcttctacgcggaggtggacaaccgcggcgacggcgccgacatgagcaagcgcgccaagtggggaggcatcaagaccgtcacctacgaggaggcgcagaaggagttcaccgtggagaccttcatccaggggcagcagttcatccccaagttcggggtgccgttcatcccgggattgctgccgcaggagcaaaaaggcaggacacactgatcatccagccttcacttcccttcactcactcactagtcactactaccacctaacatcagttggactggacctgcactgcagcgagtcacccccggcccagcccactaatatgtccactgtactctagtattcgatttcccaatcttttttctcttctcttttgtcaattattaattatatacatcttttattattaatcctatatatatatacgttggcccaattcatcgactttatcacgtacgatacgatag

SEQ ID NO: 70792 - DNA, 1691 bp, Zea mays
  Clone ID: MRT4577_164567C.1
actcctaagggcgattgggttcatcgaggccggccggactctcggtctagctccatgcatgcatcggccggtcgatagatcgatccacgtacgcgcgtacacatgcaccacctctagctagtttcgttttgatttcattccatttcttctttccatccatccacccaatccaatcaaattagtaatgagcaaaggtgctatcatcggcgcgtcgaccgtccttgtggtggcggtggtcgcggccgtgtgcgtggtgtccttcaagggcaactccggcaagggcgatggcgacgagaacctgtccatgtcggtgaagtcggtgaaggccttctgccagcccgcggactacaaggagacgtgcgaggcggagctgtccaaggcggcgggcaacgccagctcgccgtcggacctggccaaggtcatcttcaaggtcacctccgacaagatccacaaggccatcagcgagtcggcgacgctggaagagctcaagaacgacccgcgcacgtcgggcgcgctccacgactgcaaggagatgctggggtacgccatcgacgagctcaagtcgtccttcgacaagctgggcggcttcgagatgaccaacttcaacaaggccgtgggccgtccccagacgaacgtggccttcatcggcgacggcgccgagaagaccatcatcacggggaacaagaacttcaagatgaacctgaccaccaaggacacggccaccatgcaggcgatcggcaacggcttcttcatgcgggacatccgggtggagaacacggcggggcccgagaaccaccaggccgtggcgctgcgtgtgcagagcgacctggccgtgttctaccagtgcaccttcgacggctaccaggacacgctgtacacgcacgcgcagcggcagttcttccgcgactgccgggtgaccggcaccatcgacttcatcttcggcaactcccaggtggtgctgcagaactgcctgatccagccccggaagcccatggcgaaccaggccaacatcatcacggcgcaggggcggcgggacaagcgctccgtgggcggcaccgtgctgcacaactgcaccatcgagccccacccggacttcaaggaggaagccggcgggaagatccgcacgtacctggcgcggccctggaaggagtactcccggacgatctacatccagaacgacatcggcggcttcatcgaccccaagggctggctcgagtggaacggcgacttcggcctcgagacgctcttctacgcggaggtggacaaccgcggcgacggcgccgacatgagcaagcgcgccaagtggggaggcatcaagaccgtcacctacgaggaggcgcagaaggagttcaccgtggagaccttcatccaggggcagcagttcatccccaagttcggggtgccgttcatcccgggattgctgccgcaggagcaaaaaggcaggacacactgatcatcttccagcctgcttcactcactcactactaccacctaacatcagttggactggacctgcacttcagcgagtcacccccggcccagcccactaatatgtccactgtactctagtattcgatttcccaatcttttttctcttctcttttgtcaattattaattatatacatcttttattattagtcctatatatatacgttggcccaattcgaaaaaaaaaaaaaaaaaagcggcc

SEQ ID NO: 70793 - DNA, 406 bp, Zea mays
  unsure (1)..(406): unsure at all n locations
  Clone ID: MRT4577_164568C.1
atgcgtgaaccctgttcagctaccgccgtcgncctttttttttttttttttgttgttttaagcaaatatcaaggcatatcattcttttaaactcaggggagaacagggccatcaatccattgctccatcatcaaaagggtcaatgacatttcataccaaacacaaataaagggtctcacaatggtcttactgcaaaaataaggtagccttggaacctcaggaagaatgatgcccccatccattggtggtttttatatatataaaccattgctaatgttatgttctgggattctggcctcttccttttccctttcgggtttcctctttttatttattcccacacatgaggaatgaaacaattctggagtttttacattgaagccagcttaaaatggaaccggggaaa

SEQ ID NO: 70794 - DNA, 412 bp, Zea mays
  Clone ID: MRT4577_164569C.1
tcgttgtggctttttgcgggcatacccgaccacctactggttctgagacatcgtgtggacctctctgttgactgacgctagcttccacaatgaggcagacacagcgcaagctggcacagagacgcttgacccatgtgattacaactagctcgggacattactgccgtcttcccttgccgtactgtaaggaagcttatattgcggcgaggcgtacactgggtgaacataagatgcacacacctaacctacaaggcagatgaaatgcctctgcggtcaggtgcactcgcctaggctacctgccgcacacagacccattctccttgtatcctctgcgtgtgcatctgactctcacacataccctaccttgccgcacttatataccgctcactagacctgcatggtacacaggcct

SEQ ID NO: 70795 - DNA, 541 bp, Zea mays
  Clone ID: MRT4577_16456C.1
gacgtggcaacgaatcgagagcgcgatgaccagtcgcgtgcttcgcggtgcctcactctgctgctacaccatcgccgccgccgcggtggctgagcagagccgcatcaaggcgcagaaccccatcatcgagatggacgaggatgagatgacagggtcatctagaagatgataaaggataaggtctatggattttataattgttttctggtggttttgatccatagtaacctctaatctgatcacttgatggtttgctgatgcgagtgggacataatgggattgaaatgtgtgtagctcatcttcccatacctggagttggatgtgaagtattacgaccttagcaacaagggcaagtcttcactatgcaaacatgtacttgtacttcgggatagtgctattgtttccctgttgtttttttacttcagctacaatgtctccttcagtccaaaacaagctggctagcatgctacatattatttgattttgcaagttgtatgatctaagaccctggagctttgaatttgccctgaatatttacttt

SEQ ID NO: 70796 - DNA, 829 bp, Zea mays
  Clone ID: MRT4577_164570C.1
atacaagaacggcgccgctacagcccgcatctcgtttcctctcccgtctccgagatggtacgccgcttctcctcgtcctcccattcttcccgttactaagtatctgtgtacggtgtatgcctagttgtggacgtttgttattatgtgtcgagcgagatcctagtgtttgacttggtagcccagcagcttcagttcgatatggattcgaaggctccatagtttaattttcttgataggggcgtgccagcaatcatgctttgtaccagtcgtgtttccatggaaatttgagatattagggtacccagataggcctatgtgaaatgtggtggtattgttagcatgacagaaacaatgtaattctaaactgcaatctattgctagcctgtttgtagggtcgtcatcgtagttggattttgctaggctgtcactaggctggattgtgcaatttagcattgcacaacgccttttgtgcagggtaggtttggagcagttgctacctcaggtttgcaatggtaaggtgcccaaaacctgctacacttaaggtagaaggcaaactatttccgtaaagcctgtttgcgctccgcatttgagtcctatataggcttagcctttcaaattctattggtgatcacatgttaaatggaaacatgttgaaggcagtggtgtactcactccgttccaaattgtaagctcaattacttgtcacttttgattttgcatggtttcaaagatttgaccatctgttttctacagcattgtatttgtgagattttttgataaatactattatcataaatcaatctggatgtgtcatataccatccccacct

SEQ ID NO: 70797 - DNA, 609 bp, Zea mays
  Clone ID: MRT4577_164572C.1
gcccatcatttatatttttagtttcatttttgtttttcatttttatttttttttttgatttacagactttttttttttttgcatgcgccatttggctttttgttccagagtattcagggtattgtgtaattggagataatagtacaaaccaggttggtcgtcggtgtcgctacaaaacttgacatatgaatcatcatggcgaagacacgattacctctgcaatttacaaatcaagttactctataggtaggtagcctatccattgtccaatcgaacttttcttcactgcctgcgatcctacatgagcatcgatcgtggcagctggacttgtcacaccccgatggcagaatgcttttgtgggcttgtgtagcctaacaataaaacgattctacttgtcggtcggagtctcagttttcggaggagccgtgtgcctctgggcctgggagcgacccagatctaagttttgcatctcactggcgagcaaggcccttctttctttcaaaagttgagtcgagtagtcagcttggctaatgcagaggacggtgcggctccagattcctcgttttagtacttgaataggcattggaacctttgaccctgctcataact

SEQ ID NO: 70798 - DNA, 457 bp, Zea mays
  Clone ID: MRT4577_164573C.1
attctctgttttaacatgcgttcagcacgcgattcggacaccggacaaacaaacaaaaacaaaccctttcggagcacccacgcaaaaaggccaaaacgtttccaccagccaaaaaaacagcccaagctcacccgggggggggcgggagcgaaaaaccaaaaaaacatgcagcgcagccgcagcagcaggccgggaggtaatcggaaagggcaggccggcgtgcggaaacacccacaggggacggatggaccccacgggcacggcctgggcgagggtgcaaaacaagagagggggggaccgggccaggaaaaaaaaggggggggggggcccaaccaccgggaaacaaaaagggggggggggggagcgccaaccaaaagggggggcaacaaaaacgggggggggggggggggcggaacaccaccgacacgggggggggaaaagttggggggggacgggg

SEQ ID NO: 70799 - DNA, 481 bp, Zea mays
  Clone ID: MRT4577_164574C.1
gcgttcgtttccgttggtggctcactcttgcagctccaccctgcacttatccttagtctcttattagctctaggctctagctagccgcgccactccttcacgaagccatcagccttctcatcgccaccaatggccactgcctaggtccagaccccgaccgtcgtggcggtcgaggaagcgcccgtggtggagaccccgccgtcggacgtcatgccctaggagtctgcccccgccgaggccgaggccaaggccgaggctgctgctcctgctgatcccgaggagcttaccgtggccaagcagcaggcagccgccgaggccgaggccgcggctcctgctggggccaaggaacccgtcacgaacgaaccggacttcataggcggaggctgctgctcctgctggtccagaggagactcctgcggtcgagcaggatgcacacgcccatgaggaggctgatgctgctcctgctgctggcgccgaggag

SEQ ID NO: 70800 - DNA, 636 bp, Zea mays
  Clone ID: MRT4577_164575C.1
atgtgctggaatccgcggtcgctgcatgctagggagaccttgcttgagcccgtcttccttcttcctcacctaggcatccgggtccattttcggtgcacctacccatggctacgacgatgcggggatggggggcagcgtctgctccatgctcgctctgtgcctctcggcatacgactgtcgcgggaggtcatgacgtctacaggaggtgtcatagggctgccagtgtctccgccagagcttccatgaagatcaacgtagctgggcgaaccagacgcagatcggagcacgcgcaagacagtacttcatcgacgaccatctccgatcgtcagtggtcaagtgaagagagagaggtgaaggccgactggtcgacgtatcggagagagtgggagctcccgccggttccgactcggggtgaggtgtgaggaggatgacgtgagagccaggcagcacgctcgtcgggagtacctcagcctcttcgctggtcgtatctgctgcctgtcattacgctcacgcgagtccttagagagaacactgcaagaactgtgccatcggacggacttgccaggtgtattactgacgtacagggcatcggcgaccacagataaatgtccgtcatctctactcgtctactcacaa

SEQ ID NO: 70801 - DNA, 1499 bp, Zea mays
  Clone ID: MRT4577_164576C.1
caatgggtacctcgagccggccgggaattatcccaaaccgagagagcttcctgccccagcaccctcaaaagacaagagcaagcacggaacacccatccccgaccgtagtttgcccggcaagcaaacatctccggcagccatggcgtccactgtaacagccgccaatagcagccatggaagcgccctgcgtacccgtaccgcctccccaaggccggtcgcgggctggagctgcagacgcacgctttccacgcctgcacaccaccaccacgcgcggtcgtcacccagagctcgggttgtcgccgtccgagccgccggcacccagcgggcgacctggttgcccggactggacccgcccccatacctcgacggcacactaccaggtgacttcggcttcgaccccctgagactcggtgaggagcccgaagccttgaagtggtacgttcaggccgagctcgtgcactgccggttcgccatggcaggggtcgccggcatccttttcactgacttgctccgcgtatcagggatcagggacctccccgtgtggttcgaagcaggcgcggcgaaattcgacttcgcgaacaccacggcgctcttcttcgtccagctcttcttgatggggttcgctgaaaccaagaggtacatggacttcaaaaatccaggatcgcaagcagaggaagggacattcatagggttagaggctgcactcgcaggtcaacagccaggctaccccgggggcccactgttcaatccactaggactcgcaaaggatatagagaatgctcatgacgagaagctcaaagaaatcaagaacgggaggttggcaatggtagccatgcttggcttcatggtgcaagcatccgtaactcatgccggccccatcgacaatctcttgacacacctttcggacccgttcaacaaaaatatcattcacacattctcctcttcctaagtactcgtcccaatgcccggatgctatggcacaaaaaggtcacaatgtttttgaacacaacagaacaacatgattattgatttacgtccttctccccaccgaataggggaaggaaggttagggaagcgttcaatcaattcaatgagatagtgtaatctatagcaaactcagatacgctatgatgtgagatgaagcgtacttcgtgcaatcaataagttccatttattcatatggacaacaaagttcctctctgatcattttgaaacaacaattcatattaatgaaatatatcaaagatttgtgtcgttatacagaaaaaaaaaaaaaaaaaaggggacactcccagcaggtgctaggtaaccaatggtcgatcccgggcgcgcaggcagtacctacttatttatacgactatgtcaatgtaaatttttggagggagttgtaagaatatccatcctattatacaactagatctaagcaaggcggcgtctctaggtcttgtacggtagagacattccatatattcttttcttcgaaaaaaaaaaaaaaaaaa

SEQ ID NO: 70802 - DNA, 763 bp, Zea mays
  Clone ID: MRT4577_164578C.1
ggggcccactgtcaatccactaggactcgcaaaggatatagagaatgctcatgacccggagctcaaagaaatcaagaacgggaggttggcaatggtagccatgcttggcttcatggtgcaagcatctgtaactcatgccggccccatcgacaatctcttgacacacctttcggacccgttcaacaaaaatatcattcacacattctcctcttcctaagtactcgtcccaatgcccggatgctatggcggcacaaaaaggtcacaatgtttttgaacacaacagaacaacatgattattgatttacgtccttctccccaccgaataggggaaggaaggttagggaagcgttcaatcaattcaatgagatagtgtaatctatagcaaactcagatacgctatgatgtgagatgaagcgtacttcgtgcaatcaataagttccatttattcatatggacaacaaagttcctctctgatcattttgaaacaacaattcatattaatgaaatatatcaaagatttgtgtcgttatacttatggaagctccgtccggagaagatgctacaagtgctaggttaccaatggtcgatccctgtagcgccggcactattcacctatttataggactatgtcaatgtaaatttttatatggagttataagaatatccatcctattatacaagtagctctatgtaagcgaagatgtttaattatgtcttttatggtagagacattccacaaaaaaaaaattaaaaaaggccccta

SEQ ID NO: 70803 - DNA, 3438 bp, Zea mays
  Clone ID: MRT4577_164579C.1
ctttttggatcaattggtggtggtaggattttactccgatcagggttcaacacaggcgtatgaggatccggacaggcaacaagccagccgccgccaacaggtatgttccagtctgccgttcacttattacagacaagtatttatgtgctacagtaatagacctagttcacccatgggcctccaacgtacttggcattgggcttcttggtgcgtttgcttctctgcgctttggctgcagcctggtcgtcgatctccagtggcactgtcttctgggccttgtgacagatcaggagacctgcaccccggcgttgaggttgaggttgaggatgcgtgcggtggacctgatctccagggcggggctgatggagagcaggcccaccaagctctccggcgggacccgcatcccgcccacgttgatgcactccagccgccggcacttgttcaccagcgccaccagcccgccctccgtcacgtggcggcagctccacaggatgatgctcttaagatttgcgcagctgtttgcgactgcgtagagggattcatctgtgatgaacgttccaccgatattgaggtgctgcagagaataagccctcgaaaccagacggaccacgcccttatcggtgatcccggccaatccccagagcgatatggacgtcaggttgccgacgcaatccgcggacgaaatcttgatgaggccatcgtcggtgattcggcagccccagcagcttcgtgatgtcgaggtcgcggaggttgacggcggcgcggacgaggcgcgcggcggtgtcgtcgccggtgcgctggcccgcgaagctcagccgccgccgcgacgccagcgaccgctccaccgcccagcgccacctccggctcactccccccgccatggacaggtcgcggaagggcgacaggagggagaggatgtgagcgaggaggtcgacggggagccgctcgatgtccgcctccaccgcgccgtcgtgctggcgctgcttctccgcgtccatctctctcctccgggctccgcctcctccctagctcgccgcgcgcagaacccacgaaaggccctctggctactaagatgtttcagttcgccaggttgtctcttgcctgctcatggattcagcaggcagttcaaaaggttgacctatttgggaatctccggatctatgcttattttcaactccccgaagcatttcgtcgcttgctacgcccttcctcgtctctgggtgcctaggtatccaccgcaagcctttcctcttttgacactacaaagctacatacaccttgatgtccttcctatcaacctgctctcctgttgctgtatggatatatctacggaaaaccaaaactaagcagcagcttcctctgtttttgccacggagatctggttctggatgtgctgtgggacgacgtcaaacttggcgagctgcatcgtgtaggacgctcgccccttggtcatgccccggagggtgctgacgtattggaacatctcagcaagtggcacaaaagaatcaaccaccttgagtccaccaggcttatccccgaagctgttgacctgtcctcttctagagttcaaatcaccaataacatcacccagatgctcttcaggagttatcacttcaactttcattataggctctagaagccttggaccagctttcctcattccctcacggaatgctcctctggctgcaatttggaatgctaagacacttgaatcgacatcgtgatatgagccatcaaccagcacagcccggaagtccacaactgggtaaccggcgaggacaccattgggtaagctttcttccaatcctttcatcacccctggtacatattctttgggcactgcccctcccttgatttcactcttgaactcatacccacttccagcttccaaaggttcaaaacgcacaataatgtctgcaaactgcccagatccaccagattgctttttgtggacatattgtatttccgcaactttggaaatactttcacggtagttgacttgtggagctccaacgtttgcttcaaccttgaactccctctttagtctgtctacaatgatatcaagatgcaattctcccattccttcaataacagtctggttggtttcctcgtctctagagaagtggaatgacgggtcttcttgagcaagcttgattaacccagtagccattttgtcggcatcagctttggtcttgggttcaatagcaaccttaatgacaggatcaggaaattccatacgttcaagcactacaggcttgtctgggtcacagagtgtttcaccagtaattgtgtctttcagaccagcaagcgctactatgtcacctgtcacagcaactggtatatcttccttactgttagcgtgcatctcaagaagtcttccaattctttctttcttatctttatttgcattgagaacatatgaaccagctatcagcttcccggagtatatgcgaacaaatgttagtgaccccacaaatggatcagtcatgatcttgaaagctaacccagaaaatggctcatcgtcacttggttgcctttcaaatattatttcagggtcttctgggtcagtacccttcattgaaggtagatcaagtggagatggcaagtaatcgacaacagcatcaagcaatggttggacacccttgtttttgaatgctgaaccacataaaactggtacaaagctggcagaaattgttccctttctgattagtttcttaacagtttcctcgtctggttcagttccttcaagatatttctccataacttcatcatccaattcaataatagtttccagcatttgaacacgatagtcttgagccatctcttggagatcagcaggtatgtctttgtattcaaattttgcacccagctcctcccctgtccatacaatagctttcattatgactagatcaacaactccttggaaattgtcctccgaaccaatcggcaactgaatcaccaatggtttggcacccaaatttgcaacgatcatgtctctagttctaaagaagttagctccaaggcggtccattttgttcacgaaacatattcttggaaccccatatttatctgcctggcgccacacagtttcagattgtggttctaccccagcaacactgtcaaagagacatatagcaccgtccagcaccctgagagcacgttcaacctcaagagtgaagtcgacgtgaccaggagtatcaataatgttgattctgtgtttgttccagaaggcagtcgttgctgcagatgtaatggttattcctctctcttgttcttgttccatccagtccattgtagctgttccctcatgaacctcgccaatcttgtagttccttccagtgtaatacagaatgcgctcagtagttgttgtctttcctgcaaaaaaaaaaaaaaaaaaaaaaaaaaaaaaaaaaaactcgagagggggccgcgggtacc

SEQ ID NO: 70804 - DNA, 357 bp, Zea mays
  Clone ID: MRT4577_16457C.1
cccgcgtccgcccagcgttcgcggagcgtgggcggacgcgtgggcggacgcgtgggcggagttcagagaggcgatgatgacttaacccattttcttgtgggaagctatgccttataaccgatcactttctgcaagtttgtcagcgttgaataatgttccatgaatccactatccaatctggattagtgtgacgaggtaataggttacttgtcggaagaggagggcgagcacggtgacgtactgaccagtggtgcatttccccagaatgttccttctatctccaatctgttctcattcatgaatgggctttgcttcatcgtgaaatcgaaaccctacccgacatgtggcttcctcaag

SEQ ID NO: 70805 - DNA, 1928 bp, Zea mays
  Clone ID: MRT4577_164580C.1
ctcgagctcgagagcaatttacggcaccatcgcatcgcgcactcgtgccaccccaccccccgattccttcgatcccctcgtggcggtggcgcgtcgtgcgggctctactggagctagatctcggaggagtggaagggagacagccagggtgggctgtgacgcttccgctgcgcgccatgggcagcgccgtcgccttcgcgaagctcgacggggagcgctaccccaaggcggctgccgccgtcggggtcaagggcttccccaccgtgctcctcttcgtcaatggcaccgagcacgcctaccatggcctccacaccaaggacgccatagttacttgggtaagaaagaagactggcgtgccaatcattaggcttcagtctaaggattcagctgaggagttcctcaaaaaggacatgacctttgttattggtctattcaagaatttttagggagcagaccatgaagaatttgtgaaggcagcaaccacagacaacgaggtacagtttgtagaaaccagtgatacaagtgttgccaaagttctatttccaggtattacgtccgaggagaaatttgtgggcctcgttaaaagcgagccagagaagtttgaaaagttcgatgggaaatttgaagaaaaggaaattttgcggtttgtggagctcaacaagtttcctctaattactgtattcactgagctcaattctggtaaagtatattcaagccctattaagctacaggtcttcacctttgcagaggcttatgattttgaagatctggaatctatggttgaagaaatagccagagcattcaagacaaagataatgtttatatatgttgacactgctgaagaaaaccttgcaaaaccattcctcactctttatggccttgaatcagaaaaaaagcctactgttacagcatttgatacaagcaatggagccaagtatctgatggaggcagatatcaatgcaaacaacctgagggagttctgcttaagtcttctggatggcacgctcccgccataccacaaatcagaaccattgcctcaagagaagggacttattgaaaaggttgttggtcgtacatttgattcttctgtgctggaaagtcatcaaaacgtcttccttgaggttcatacaccttggtgtgttgactgtgaagcgataagtaaaaatgttgagaagctggcgaagcattttagtggttcggacaatcttaaatttgcgcgcatagatgcttctgtgaatgaacatcccaaattgaaggtgaataattacccgacgctattcctttatcttgctgaagacaaaaacaacccgatcaagctttcaaagaaatcgagtgtcaaggacatggccaaactgatcaaggagaagctgcaaataccagacgtggagacagtagcggcccctgacaacgtcaaggatgagctataacctgtagtagacaaactaaggtccagtgaaggaaaaattgcagcatgtttgcgtgttttgcgccaacctgatcacagagctcagctttattcgcgtgccgtgttaagttgactaaagacaatggtatataatataggtacctaaatcaaagaggcttcggaccctagcattagggatggcaatgggtacccgaaacccgaaacccgatgggtaaaaaccctattagggcacgggtatggcggattttgatacccatgggtattttattgggtcatttgttatgcccatcgggtatggtgggcgtgggtatgttctctgttgccccatacccgctacccgatgggtaacccgctaatatatgacacgtgggtccggatttatgtatctcatataaaatgaatgctatgttttgtccatagttttgtagaatcaatgctatgttttgtgtgatttgaaagcatgatattgccatttaatgtttaatactgttgaatctgtgat

SEQ ID NO: 70806 - DNA, 595 bp, Zea mays
  Clone ID: MRT4577_164583C.1
gggggaaaaaaacattaaaaacccaccttcccagggatttggtcacaagggggacccgggcggaccattgaaggcccaccctttttttttaaaaacccatcccccaaaaatccccccaaaaccaaccccctgatttaaaggggggaaaccgggggaaatctccaataaaaatccccctatcccaaatttaaaaaaccattttaataacgggggggccgcccccggacccccgaaggtttttaaaaatggaaagggggccccctgggggggaacctataaaaccaaaggcaagggctaggccccaactgggcatggccagaaaacctttttttgggccttcggccacataaggaggcacaaagttggtataagaacaaaaacctttttgtttaaactaaactggaatggcccggagcttggaaaaaattggttcgaaaaaaggaggcaacttgcctaaaccaaaaaaaaaaggaactttgtttttgatcgaaaaccagggggacccagcttttttccaaaccttttaaggggccataagcttcccaacttaatccttttttttccacttccctggacccaaaaaaaggggggaaaa

SEQ ID NO: 70807 - DNA, 477 bp, Zea mays
  Clone ID: MRT4577_164584C.1
atcatgaagcaaaagactcaagtcttcacagatagatagatggatggataacactggtaaccagttacataaacaggtacatggtgcataaaccaggtgcatcatatagcagagagggatatcatcattagggccgtttattatacctgtactttaatatatgggtgcgcatgcctattaccgctttttgaaacaaaaaaaacttacataaacaggtacatggttcacacataccaaatggatcaacagatttacttttaatgatgaaaagggccaaaagtaatctgacagaactctgataactaacactattaaatacactttaaagacgtagcagcgctacctaatggaagctgtgttcacctatgaggatgtaactattgatcgactcatgctaacatctgccttaaacaggctgagagggataccattcgcacctggcgttttagcttaatatggccagcacaagggacttca

SEQ ID NO: 70808 - DNA, 266 bp, Zea mays
  Clone ID: MRT4577_164585C.1
ctcacgagagtcgatcgctcaggtatgcatgagtggatgcatgctagcgaatctctacagtgaatatgaatctcgtatgatatacacggagacgacagtatatgagggcagatcgtatagtcgacacggagctatacgcagtgagcgctcaggtgagtggtcacgcttacacttcaattctcacatcgtatgctcctaatctctcgaacgaggttatgagtacaggcgtcattgtgatacatattgatcagtcatgatgattcatg

SEQ ID NO: 70809 - DNA, 452 bp, Zea mays
  unsure (1)..(452): unsure at all n locations
  Clone ID: MRT4577_164586C.1
gaatttccccmgaaatccytagragaagccttccatcctaaattgctkgttggcccgcamaaagcagacggcgaggaagtccamccggcggcaaggcgccgrggaagcagttggcraataaggcagcccgaaaatctgcccctgcgaccggrggagtgaagaagccccaacmgcttccgccccggaamcsttgggctccgggagatccgcargttccaggggrgraaggggcktgttgatccgcargctgccgttccsgcgcctggtgcggggggtkggggargactttaagaccgacctaagcttccrgrgktctgctgtctccgggctgcgggaggcggktgargcctwccttktkgggtcttyggggacccccacctytgcgccatccacgccargsgcgtkcccctyatgccccvggncctcccgcttgcccgccgcgatccgcgggg

SEQ ID NO: 70810 - DNA, 797 bp, Zea mays
  Clone ID: MRT4577_164587C.1
ccggccacgagccggtcgtgtctcgggtcgaaacggttccatcactcagatccccattctgaccatgcccaacgacgatattactcacccaattcccgatttgacaggttacattactgaaggtcaggtctttattgaccgagctctcgataaccgtggtatctacccacccatcaacgtgctgccttcgctgtctcgtctgatgaagtctgctattggtgagggcatgacccgaaaggatcacggtgatgtttccaaccagctgtacgccaagtacgctattggtcgtgatgccgcagccatgaaggcagtcgtcggtgaggaggctttgtctgccgaagacaagttgtctctcgagtttctggagaagttcgaacgccagttcatcagccagggccagtacgagtctcgatccatttacgagtccctcgacctggcatggagcctgctccgtatctaccccaaggagcttctcaaccgtatccccgccaaggtcctcaacgagttctaccagcgagccgccaaggagtccaagtccaagggcaaggcccgagcagacaccgaggcccgcggccagcagcagacagaagagaacctgattgacgcatgaggggatgacttgtcagcattttgatagatagtataatgagcgcgcgcaagagggaagagcagacagagcaacttgttttttaagtggattgttttcatgccgtctttgaatggaagctgtagatcagagaaagagtaggcatgtgggtaaagatagggaggcgagctaatgcaattcaaacaaccct

SEQ ID NO: 70811 - DNA, 357 bp, Zea mays
  Clone ID: MRT4577_164588C.1
ggggggggaaattttattaccaaattttacaaattacaaaaattttacttcggccatggccaggggggttcctacattgattcaaagaaagaaactttgaacagttataaattttttatgggtgggaaatatatgctggctcaagggaccctcctcaataaaaagataaagggggggtttacttatataagaagggcgggcccaccggcccttaacaccatcaacaggggcccaaaactttaaccgggaataaacactttgttagggtgggttaaacaacgtccgtttgacaatcattttgagggttggccataagcattatcctggggaggaccccgggcttgggggcaacttggg

SEQ ID NO: 70812 - DNA, 495 bp, Zea mays
  Clone ID: MRT4577_164589C.1
gagttttgtatgctaaacacgccctaaacctagacgaaggaaaagtcccacttttacatgtactcgtggtttaggttgaggcctcctttggagttccaaaggaaaaaagaagaaattttaaaggtttttttcccttttttaaagtttcctatatggtcctttggaataaaggattgagttgctacaaattttatagaatttagcattgtagtgagattttggaggattttcaatatgaggtctaacctcttgaaaaatttcctatataattgaaggtgacatgcaactatattcttacattttttttatctcttgttttactaatactctattccaaaggaggtacgatgttttacccgttcctaaggaatgcccggtgttatccatgtttgtttataaggccttcgtgctaggtggcatgcatatcagcacgaggtgtcgacctccggattccattcaaatcggagagatacgcacttatttattctcgtgccg

SEQ ID NO: 70813 - DNA, 315 bp, Zea mays
  Clone ID: MRT4577_16458C.1
cccttcggggagagcacaaaaatatttgcattcgttcatgggccagatcacgacagaaacgagtggtgtccaacacaatgtcctggcacgcggggggggggtagctagcttaagaccctggtgcgaacttggtggcgtaaacccaggctttgttggcaacggggtcctcaaggtggtcaagcaggttctcgaggggccccttgccggtgacgatggcctggacaaaaaacccgaacatggaaaacatggcgaggcggccgttcttgatctccttgaccttgacctcggcaaaggtgacggggtcgtcggcaaggc

SEQ ID NO: 70814 - DNA, 3908 bp, Zea mays
  Clone ID: MRT4577_164590C.1
aacctcggaattcggctcgagcggctcgagcgtcatccacagcaagagagacaacctgcggaagtgatacctcagcagatgataggattttctgacaattcggcacgaggcctcctcgtccgttcggcgtccgcatctgtccgtcttcgccacccgtggtctccagaccaatccgaggcacgggacatatggcggcgctggcgggcgaggacaaggacgttgacgccttcctcgcggactgcacggcgtcgggagacgccgcgtatggcgccgccaaggccgtgctcgagcgcctccacgcccccgccacgcgccccgccgcacgacgcctccttggcgccgtccgccgacgcttcgccgcctcccgcgccgcgggggaggactgcttccgcaccttccactttcgcatccacgacgtcgtcctcgacccacacgtacaaggtttccaacaaatgaagaagttgacaatgatggagataccaagcatcttcattcctgaagattggtcattcactttctatgagggcctcaaccgtcatccagactccattttcagggataagacagtagctgagctgggatgtggcaacggttggatatctattgctcttgcagagaagtggtgcccttcaaaggtctatggcctggatataaacccaagagctgtgaagattgcatggataaacctgtacttgaacgcattagatgacgacggtctcccgatctatgacggggaggggaaaacattgctcgatagagttgaattctatgaatctgatctcctttcttactgtagagacaacaagatagagctcgatcgtattgttggatgcataccacagattctcaacccaaatccagaggcgatgtcaaagattgtaacagagaattcaagtgaggagttcttgtacgccttgagtaactactgtgctcttcagggttttgtcgaggaccaatttggccttgggttgattgctcgtgcggtggaagaagggatatctgtcataaagccttcaggtattatggtattcaacatgggaggtcgaccaggacagggtgtctgtgaacgtctatttcgacggcgtgggtttcgcattactaagctctggcaaaccaaaattatgcaggctgctgacacagatatttcagctttggttgaaattgagaaaaacagcagacatcgattcgagttcttcatggatcttgttggggatcagcctatctgtgctcgcacagcctgggcatacatgaaatctggtggtcacatttcacatgctttgtctgtgtatagctgtcaacttcgccagcccaaccaggtgaagaaaatatttgagtttcttaaagatggattccatgaagtcagcagttcccttgatttatcctttgacgatgattctgtagctgaggaaaaaattcccttcctagcttaccttgctagttttctgaaagagaacaagtcaaatccctgtgagccaccagctggatgtctaaactttaggaaacttgttgctggatttatgaagagctaccatcacattcctctaactcctgataatgtcgttgtgttcccttctcgctctgtggcaatagagaatgctcttcaattgttctcaccggcgcttgcaattgttgatgaacatttaaccagacacttgcccaagcaatggttaacatctttagcaattgagggaagagcagattgtaatcacgccgatggtacagttactgtaattgaggcaccacgccaatcagatttactgattgagttgatcaggaagctgcagcctcaggtggttgttactggcatggctcaatttgaggctatcaccagtgctgcttttgagaacctactaaacgtaacaaaagatgttggctcccggctgttcctggatatttctgagcatctggagttgtctagcctgccaagctctaatggtgtattgaaatatcttgctggaaagacattaccgtcacatgcagctatactgtgtggtttagtaaagaatcaggtgtactctgatctggaggttgcttttgccatttccgaagatgcagctgtatataaagcattatcacaaactattgagctattggaaggccacacttctctgatcagccagcactattatggttgccttttccacgagcttctggcatttcagattgctgaccgtcatccacagcaagagagacaacctgcggaagtgatacctcagcagatgataggattttctgacccagctgtgtctaccctaaaggctactgaatttttcgttcctggttcagctgaatccagcattattcatatggatttagatcgcagcttcctgccagtaccttcagcagtgaatgcgtctgtttttgaaagttttgtcaggcagaacatcactgattctgaaaccgatgtccgttccagcatccaacagctggtgaaagacagctatggtttatccgcagctggttgtgcagaaattatctacggaaacacctccgtagcactcttcaacaagctcgtcctttgttgcatgcaagaacagggcaccttgcttttccccttgggcaccaatggccactacgtctccgcagcaaagtttgtgaacgctagcaccgtgactataccgacaaatcccagttcagggttcaggatcgagcccaaggttctagctgacactcttaagaatgtatctcggccgtgggtgtatgtttgcggccccacgatcaaccctactggctttctgtacagtgacagtgacatccgagagctgctctccgtatgcgctgaatatggagccagggtagtgatagatacatccttctctggcctggagtacgagaccgatggatggaggcagtggaatctggcaggatgcctttcctctttgaagcgttcagagccatcgttctctgtggtcctgctcggagagctgtcctttgcgctgactgcaggtgggcatgactttgggtttgtgatattgggtgactcgtcgttggctgagacgttccatagtttttctagcttgagtcgaccgcacaccacattgaagtacactttcaagaagctgctggggcttaagaaccagaaggaccagcatttctcggatctgatagtggagcagaaggaggagctgaagaatcgcgccaaccagttgatacagacactggagagctgtggctgggaagctgccatcggttgcggtggcatctcgatgctggcgaagcccaccgcgtacatggggaaggccttcaaagctgctggcttcgacggcgagctggacgcgagcaacatccgggaagccatcctgagggccactgggctgtgcataaacagcagctcctggacggggatccctggctactgccggttcagctttgctctggagaggggggaattcgagcgtgcgatgggatgcatagctcggttcaaggagctggttctgggaggcgctcagatgaatggtgcctgatggagcaatccatgttatacgtaaccttggtgctgtgtagtagcgatgatattgttccaggtgatggagatatcaaggaataacaagagcctacctgctgtgaagtcaatgtactactaggatggatagggcgcttcgatgcgccctttctgtcttcgaattgctgtgctgtgcacggagaataaacatatactattatatatatacatacaatttgctaagataaaaaaaaaaaaaaaaaaaaaaaaaaaaaaaaaaaaaaaaaaaaaaaaaaaaaaaaaaaaaaaaaaaaaaaaaaaaaaaaaaaaaaaaaaaaaaaaaaaaaaaaaaaaaaaaaaaaaaaaaaaaaaaaaaaaaaaaggggggggccctttttaaaggatcaaattttattcccgggtgtttgggaggtaatagtttttttttggggcccccaaaaataaa

SEQ ID NO: 70815 - DNA, 219 bp, Zea mays
  unsure (1)..(219): unsure at all n locations
  Clone ID: MRT4577_164591C.1
caaacatgtatatagatcgagacaggtttctgagtttaggatgacatataaatcagtaaaactaacaaaggcagcacaaaaaaaattacatgcattgngttgccacatttatctccctacccgattcatattgtattgctaactgatgcagttcttaaaaaaaaaaaaaaaaaaaaaaaaaaaaaaaaaaaaaaataaaaaaaaaaaaaaaaannaaaa

SEQ ID NO: 70816 - DNA, 541 bp, Zea mays
  Clone ID: MRT4577_164592C.1
ccatggcagataatggcattctccgaagcgatacagatacacatgtagacagagacaccgtgccaagaattgaagcgagaggaatctaaaccctacaaaaatccgaagcgcgcaagctgcgcgagcgccatgcgctcatgccaatgccatccggctagctgctgccgttggcacatccccgtcaaccggccgcgcgtgaacctccaaagccaattaaagcgctcgatcggcctagtcatcagggtccgtcccttgccatgctaatgcgatcagccggccaggtcatggaggagctggaacccagtggcggcgccgaggccccggtggtagtgcgaggaggccacaccggcgccgtcgccttgcatgctggcggcgaactgaccgtggccgtgggacgacgacgggtgcacggcgccagccgcgaccatccgatgctcgccgccgcctgccatgaacaggaactcgtgcgcggccgacggagccgcggcgaacgcgatgttgacgccgccgtgggggtcgccgtcggcgtgctgctgcagcc

SEQ ID NO: 70817 - DNA, 407 bp, Zea mays
  Clone ID: MRT4577_164593C.1
tctagatcgcgagcggccccccttttttttttttttttttaaaagcacccatttttttttaagaaactggtttacagaaattgaggtacagtgactcatgtggaggagctgctcctacaaataaatgagccagagctacatccgttttcaaaggagccagagtcctaccaaacaagcccttagaattttcatccatgcaatacatgagaactgagattcaactttgcacttgtctttacattcaagatcgccgtacagactaagactagcataacaaaacattgaagtgcacttctattgcatcctaaaggcaaaggctgctcaaaataactccttttcctggtccatgtaattttcacaaactagatgaccaagagaaactttggctttttttgctcctgacaaac

SEQ ID NO: 70818 - DNA, 502 bp, Zea mays
  Clone ID: MRT4577_164594C.1
cgtccgtattcccggtcgagcacgcgtccggcatccggtccccctctcagatctcaacctccatttatcaacaaggtaaatctctgattcgttaccgttttctaggggtgtcccgaggtgtaacctgatggatcagagcccgccggagttcgattacttgttcaagctgctgatgatcggcgactccggggtcggtaagagcagcctccttctcaggttcacctccgactcgttcgaggatctctcccccacgatcggtgtggactttaaggtaaagatggttacaattggtggcaaaaaactgaagcttgctatttgggacacagctggacaggagaggttcaggactttaacaagctcatattacagaggagcgcaaggggtcataatggtttatgatgtaacacggagggagacattcaccaatctttctgatgtatgggcgaaagaagtcgacctctatgtaactaatcaggactgtatcaagattgctggtggtaac

SEQ ID NO: 70819 - DNA, 1219 bp, Zea mays
  Clone ID: MRT4577_164595C.1
gcacgagcgccgccgtccccatcaacatcaccgagacctatcgccgcagaaccaccgaatccacggcatcggagagtgtagaggttagtactaggcggaggtcaagatggtgtgcatccggcaggcgactatcgacgacctgctggcgatgcaggcgtgcaacttgatgtgcctgccggagaactaccagatgaagtactacctctaccacatgctgtcttggccgcagctcctcttcgtcgccgaggactacggcggccgcatcgtcggctacgtgctcgccaagatggaggaggacccctccgagccctgccacggccacatcacctccctcgcggtgctccgctcccaccgcaagctcgggctcgccaccaagctcatgtccgccgcgcaggcagccatggaccaggtcttcggcgccgagtacgtctccctccacgtccgccgatccaaccgcgccgccttcaacctctacacctccactctcgggtaccagatccacgacatcgaggccaagtactacgccgatggagaggacgcgttcgacatgcgcaagcctctccggcagccgcaacctaagaagcaccaccatcaccaccaccacggccccggtgggtgctgctcccacgacgcacctacggcgacgactggttcttctcctcagtcttttagttcgccggataagaaggctaacacttgacggatgaagcatatctacagagaggagtcaccaagcccattggacttccgatacgcagctttttctaatagaatgggaaacgaattgtactgtaattgtttgtgtactttactttggctcaatcgtccgaccgtatctttgtaatcagtgagaatggcaagcaaatgtccttgacatctattgttattgtaaaaacatgtgttataacgctgattctcagattacatttgaaaaaaaagaaaaaaacgtaaaaaaagctagacatagaacgatgtaagagacgataatgacataataaaaaaattttgaaaaagaaggagcaaaatgaagaccgaactaaaaaaaaaaaaaaatggtgcccctctcccgctctttttggtccctactttgggaaaagaaggcctccgggtgcttgttggtgcagacttaatccttggtgcggctgtcctaggcggaactgtcccccgaccaaccctcactgggaatgttacaggaaaaatttcggggggcctccccggg

SEQ ID NO: 70820 - DNA, 457 bp, Zea mays
  Clone ID: MRT4577_164596C.1
tgggtacctcgaggccggccgggaatcttgtttccgattcctttcactcctgagcactttctcctcgtcccagacaagtcaatcagagaacgagatacgaccatgaactccacctccaccggagcaaggtgtaaggcgaatattggagcggacggacatgcaggatcctcgtgcaaggaataaatcgctgccgaggaaccagcatgccctactccatctccctcgtcggacacatccaccgctacttgaacaatggccgttactggcaaaactggttgaacacgagaccctcactacctctgcgttgtactccaatacctcggcgctgatgatatgtatctcgacggatatgttgccaaacacaacaagaatactcttattattccacaccactggcttctgagcgatccggaacgacgcagaacttgctaaactgtttggtgaactgaccatcgct

SEQ ID NO: 70821 - DNA, 738 bp, Zea mays
  unsure (1)..(738): unsure at all n locations
  Clone ID: MRT4577_164597C.1
ggtcccatgacaggagggccctagccttgccaaatacactatcatcaatgtgagcacggaccagatgaagatccttcggccagcgcacgctaaaagatcagtttttcagccagggaggcagtcagctaccttatcaatgatgtgagacagtcaatttcttcaaagagaggggagggcccaaatattttcctaattaaatactgcagttcacatggtagctgttcttgtgtatttgtgaagtccgccttggtgcattagatgggaaaaacattactcttgtgcacccctgatgcatctccaaagaggtttaaaatatgaagggttagaccaatatcattagcagatggaccgaggaagatgatgatatcatccgcataagagaaaatctggtctgacaaagcacaaaaggctaatggctacaccgatccttcaaaccaagccatataaaccatatgactaagaatgtctattatgaggacgaacaatgtctgcgagcactccattaagaagcaccagtgttgatgaagagaggagcagcccgttaatattatcacaccaaaccatgtaaaaccncaactttttcatgaccgtaggaggaagggccttgtgatctcaagcttgaggatgattatagaatttaagccgtttgttgaacaagcatgaaataggcttgtatgaatctgccatttatgaatgcacttgaattgatagaaaccctttgatttaactgaactgttt

SEQ ID NO: 70822 - DNA, 388 bp, Zea mays
  Clone ID: MRT4577_164598C.1
cctactcctgccgagccggcgcgtgttccacgtgcgcctgcaagctcctggagggctccgttgtccaggacagaccattctttcgttgactaggctgcaggcatggtagccgggttcgcgctcacctgcgtagagtaccggacgtctgactgcgtgatccaaactcacatgcaggaagattcgaactagcccgtgccgtttcccgggcatggatcaaaccagggtcggccctgatggtcagcatggtgtgccacaaatcacggcccccactataattagggccccgtgtgtatatataatgttcaaatacatgtatgttacaggaaaatgtatattctggtcgttttgtcgagcaaaaaaaacccatgcgtgcggatctagatcgcca

SEQ ID NO: 70823 - DNA, 218 bp, Zea mays
  Clone ID: MRT4577_164599C.1
gcttttcttccggctcagctactggagcaggcaaggggggtctcaaaagagaggtgaggaaagaggggcgctgatggagacccagagtgagagcaagtcatactggttggcatacatggatcaccagtcggatccccggactaggccgcggaatagggtgctgtagaggggactcatgttaggccactttgaacagcattttctaacactgtttctga

SEQ ID NO: 70824 - DNA, 436 bp, Zea mays
  Clone ID: MRT4577_16459C.1
agctcggaattcggctcgagagcaaatgctctggacaagcttttgtgtataaagaaccccccgaacaacgccggggccggtatcaaggcgacacagatgatgaaccagcccacggatgtccctgccgagcgtggctttccaatggctgagctgaggacatgataaaaacaactcgaaaccaacgccccccctttcgtagcattaagcactcctggcgctgtattattcataaaaacatcatctttctgacgtatatatcatcacgggttctttccttacatctcttgtgagactctgcgtgtgggaatcgagtccatgacatctcaccctatatatgaactcttcacatatgaacactactcgcggaaggcaaattaaaccaaataatgaatcagcttttcccccacaaccgtgccaggagagccctgatggccaa

SEQ ID NO: 70825 - DNA, 1220 bp, Zea mays
  Clone ID: MRT4577_1645C.1
cactcctaccccacacagaagcggcggcggcggagcaaacgcaggcgaaggcgagggtgtgagggaaggagcaccagccatggtgcacgtcaacttctaccgcaactatggtaagacgttcaagaaaccaaggcgtccttatgagaaggagcgtcttgatgctgaactgaagctggtcggtgagtatgggctgaggtgcaagcgtgagctttggagggtccagtatgcactgagcaggatccgtaatgctgcaaggcacttgctcacccttgacgagaagaacccccgtcgtatctttgagggtgaggcgcttcttcgccgcatgaaccgctatgggctgcttgctgagggtggagtctgagaagcacattgacttttcactgtcaagcccattcggtggaggccccgcaggaagggtgaagagaaagaatcagaagaaggcaagcggtggcggcgatgctggcgatgaggatgaggagtgaggatggacaagtagcgttacccaatataataatattatctagttttcttgaacttgttcgaatgatgagtgcttagctgtgtgatctgacgcagagttccctgtgctgactctgtgtcatggatggtccattttatcttgtggtattatcagcctttacataactgctatgtttggatatgttcaattctgttgcaattttatgtggttgttttttgaaaaaaaaaaaaaaaaaaaaaaaaaaaaaaaaaaaaaaaaaaaaaaaaaaaaaaaaaaaaaaaaaaaaaaaaaaaaaacccgatgcccaaagaaacggcaacccaaaaagtgtgcaaaagccaagtttttttgtttttttttcccccaacaaaggcaaaaaaccccccccccaattgtttccaaaaaaagagggggaccaaaaaacttgggggggggggggtttggaaaatttccccaacattttaatgaaaaggggaaactggggcccggggcccaccccccccattttggaaaaaaaaaaaacccctgattgcaggaaaaaaaaaaaaaaaagcctgggtaggggcacaacaggaaacccgaaaaccccaagggtttaaaaaaaacccgagcgcacataaaataaagggggaaggggaatgcctcaaagtggggggtaacaatgaaaaaacaatgtttaacctcctcctcaaagggtttagccccaattaaaggacccccttgtaaatccccccccccc

SEQ ID NO: 70826 - DNA, 451 bp, Zea mays
  Clone ID: MRT4577_164600C.1
gggcccccaaaaaaaacaacccccaaaaaaaaaccggggggcccctgaataaaggaagggcccttgccaaaaaagggaaaaggggaataccccccctttaaacgggaaaaaaaaaaaagctcctttgctggcaaaacaaacccaaactaaaaaaggggcccccccccggacaaggggaaaattgggggggcattgcatagggggatggggttccgaaaaaaagcgggggggggcaggggctaataaaagggaaaggaaaactcctttcaaaaaagggccctttgccccaaaaactatgaaacattgggaaggggggatgaccaggctaaaaaaggggaaaagcaatttttagcccggtctgcttccacttggggaagctgggaaaaggcttcctttggcaccccaaacttttttttaaacccaaggaaaaataagaggggccccccccccg

SEQ ID NO: 70827 - DNA, 859 bp, Zea mays
  unsure (1)..(859): unsure at all n locations
  Clone ID: MRT4577_164601C.1
tgggtaccctcgaggccggccgggccggggaaagaccggccgccgccgcccaccgggtcatcgccattcgccacaaagccatttgaaccccccacgtctcctcgcctcgttccccatttgctgcgtctccttgcccgcgccgccgctcgccgtttgcccctcgtctccgcaccgcgcgctgttgtccatccttgtgcagcaaaaatgacggctggctacattgttggctcactggtcggatcctttgccattgcatacctgtgtgacacatttatctctgacaagaaggcatttggaggtagcacccccaagactgtttctgagaaggagtggtggcaagccacagacaccaagttccaggcctggcctcgcactgctgggccaccggttgtcatgaaccccatcagccgccagaacttcatcgtcaagtccactgagtaggtttgggctggagaagctggttctgcgacttggtgccgccatgaagccagagttccttttctaaggtcttaatcaattgtaataaaacgaaatacagtcaggatttttttgtgatttttacttgatctgtgagcgaacactgggtctttcaccttgtcatccaatgggttctgctccttggtgaaatctcccaccagccagtaaagaactgggttgttttcataatatatgcttttgctacgcaaaaaaaaaaaaaaaaaagggcccctagggccctcgattcggccttacaaagtagcagccgtcacaccaccggtgaaacgccgccggcggcaggaacacccncgaaccccgatctcgacggcagagcgagaaaacgatggcgctgaccaacttcatcgtaacggtggctgtggtc

SEQ ID NO: 70828 - DNA, 121 bp, Zea mays
  Clone ID: MRT4577_164602C.1
cagcgtggcacctcgatcgctccgagtccgcgactctttcactgcgatacatacacaccgactcgctagcgagcacgtaggcagattggcgcgccacgctgaaaagcagctcatcgtggtg

SEQ ID NO: 70829 - DNA, 518 bp, Zea mays
  Clone ID: MRT4577_164603C.1
agcctgcgtgcacaggcgcccatatatgctaggacgaaaaggacgtggacaccccagccgcactggctctacactcgcaatacccagaacaggctcctgggtggagataaaagggtaaaagccaggtttgggaaacaaaatgaaggaagaccaagggaggggggagcttcagaaacctaccgtgttccatggaatcggggtgcgggacctgttctgccaagctagactgactgaaagattaccgagtgggccacgccggcttcctcgaggggctgggccgcggtttcaagcggctttggggggaacccggcccgcaacggggaaacaccggctccgggccctggcggggctaaaaaagcccgcacgccactaattctgtggcttgggttgaaacgggcaaacaagcgactgccgcttgtgaacctgatttgggagggagggtgatgggaaagaatcgccactgggattggccgagaagcagttgcactactggaagcagcagcagcagcagcagcatt

SEQ ID NO: 70830 - DNA, 573 bp, Zea mays
  Clone ID: MRT4577_164604C.1
acctccgctcgaactgtcttgcgaaatttcacgcgcgctcagcacaagtagcagtttcagtttcagagctccgcttcagttagccaccatgcctgccctcgccaagcccgccgccgcggcaccgaagccgaagccctccgccgccaagccgaagaaggatgccgccggcccttcccacccggcctacttcgaggtgagcgcccgagcctctcctgttgaatcctctgcatctctgtgattcgttcgtttcggtttgccattggggctgattggattttgatttcgatcttggcagatgatcaaggaggcgatcgcggcgctcaaggacaggaccgggtccagctcggtcgccatcggcaagtacatcgaggagaagcacggcaagtccctcccggccaacttcaagtagatgctctccgtccagctccggtcgttcgcctccaagggcaagctcgtcaaggtcaaggcctcctacaagctctcagacgccgccaagaaggacgcgcccaagcccaagcccaaggccaagcccgccgcccccaagggccgcggcgaagcccgccaaggacgccg

SEQ ID NO: 70831 - DNA, 741 bp, Zea mays
  unsure (1)..(741): unsure at all n locations
  Clone ID: MRT4577_164605C.1
atcgagctccttctcgaatctcaagcgaccacaccgcgcaagtcgcagcttcagtttcagtttcagagctccgcttcagttagccaccatgcctgccctcgccaagcccgccgccgcggcgccgaagccgaagccagccgccgccaagcccaaggcggccgccgctggagccgcccacccgacctacttcgagatgatcaaggaggcgatcgcggcgctcaaggacaggaccgggtccagctcggtcgccatcgccaagtacatcgaggagaagcacggcaaggctctcccggccaacttcaagaagatgctctccgtccagctacgcgcctccgccgccaagggcaagctcgtcaaggtcaaggcctcctacaagctctccgacgccgccaagaaggacgcgcccaagcccaaagccgcggcgaagccctccaaggacgccgccaagcccaagaagaaggcggccgagaagcccaagaagaccgccgccgctggcaccaagcgcaaggcgcccgagaagaagaagctggtcaccaaggccaagaagtcgcccgctgccaaggccaaggcgaagccgaagaccgtccgctccccggccgccaagaaggcccgcaaggtcgccgccgcctgatctgatctgatccggtccgatagtgggtcttagnagtgcttgatgttccaagggtctgtacaaaaggatgctcatctcccttgggttttaagtttcggttctgcttggca

SEQ ID NO: 70832 - DNA, 188 bp, Zea mays
  unsure (1)..(188): unsure at all n locations
  Clone ID: MRT4577_164606C.1
agtgtcgtatcagtgggtgccaagacctcgttcttctttatggtcttctctctttatttatgtgtcccctgtcgtggacaggggggggtctgggcaaacccgtgcctntcccaancttatttttcttgtacctttgttctgttttcccttttggctgttttccggcgggtctacaactgtttacgctt

SEQ ID NO: 70833 - DNA, 315 bp, Zea mays
  Clone ID: MRT4577_164607C.1
tcgcagacgcgtgggtagacacatggactgacttgtgatcgaacccgctgggattggtaaacgagatcgggagtttattgcagtggaacaaactgtgatggcacaagatgtccaagaccaaagtgatcaggagcgcacacattgacacaaaggtgcgagcagggagaaccatcccacggaggatctacatgttcacagatccaggatccccgggcaggaaacatgttgcgagagcatcacatgagccgaaagcagagatcacaacatctgaaggaaaacatatccatgaaattcctgtttccaggaatgcaagcc

SEQ ID NO: 70834 - DNA, 264 bp, Zea mays
  Clone ID: MRT4577_164608C.1
ggcatccatatcctttcgcatcagtactgggagtggcacacgcaccgcacacatactactagtatgtagtggagtgcttgaaaggcataagcgaattttcttcttgtttggtctacgtccatttgcttgtccaggtaaccggctagtttactctgctttttgggttttccacgtctctctacaattgtgactgttgaccacctataattgtgactgttgaccacctatagatgcggttcagctagccctccgacccccctctcg

SEQ ID NO: 70835 - DNA, 751 bp, Zea mays
  unsure (1)..(751): unsure at all n locations
  Clone ID: MRT4577_164609C.1
attgggtacctcgaggccggccgggatcgcaatcagcaacacaaagccctgcgtcattaccagcaacaccgagagcgagagcgagagagagagagagagatagaaagatggcagcaccggtgcagacgacagccacgacgcctcaggtccctgctgctgcggtagtcacgtcggtgttccagccagggaagcttgcggtcgaggtgatcacagtggatcacgatgcacagccaacaccgccgatcccgatcctgatcgctgctcccaaggatgccggaacctaccccgtcgccatgctactgcacggcttcttcctccagaaccgctactacgagcagctcctcaagcatgttgcctcttttggcttcatcatggtcgcaccacagttccacaccagcctcatatccaatagcgacaacaacgacatcgcggcggcagccaaggcgacggactggctccccgagggcctgccatccgtcctcccgacaggcgtcgaggccgacctttccaagcttgtcttggcgggccacagccgaggtggccacacggccttctccctggccctggggtacgccaagatcagcagcagcctgagcttctccgcgctcatcgggctcgaccccgtcgccggcacgggcaagaactcgcaactcccgccggcgatcctcacctacgcgccctcgtctttcgacatcgccatgccggtgctggtcatcgngaccgggctgggcgacgagaaggagaacgtgct

SEQ ID NO: 70836 - DNA, 553 bp, Zea mays
  Clone ID: MRT4577_16460C.1
cgttgctgtcggcgtagtgagctggtggtggaggtgcatggtgtgcaggaggaggagatgcaaaatgaggtggaggtgcacggtgtggaggaggagacggaaaatgcggcggtggtgcatgataaggagggggcggtggagggtgttgagccggggaagggccttcatggtggtggtggcgatgatggccatggtggccatgatgtttgtggctaggcggtgagctatggtaggacggtggctcaacgggagctaatcgcccgcggcggtggtgctccccatgcttcgatccagggtgcccacccagtggcgcctcggcatatagcgtcggcgccggagccggcccttccaccgctgggaaggcatagcgagacgatgcagcgctgcagcaggaggagaaaacagcagtaagagcaacaaggagggcaacgcccttcatgttcgtgatgcccatgctttccgtcgccgtcgccccccccccttttttttttttttatttttatttttttttttttttttttttttttttttttttataaaaaaaaaaaaaaaa

SEQ ID NO: 70837 - DNA, 466 bp, Zea mays
  Clone ID: MRT4577_164610C.1
caacaaccacgaaccaactgatacaatattaacaaatctcgggatacataaaactgtccaagcgacgaatgtacaaacatgtggtgacgaccgcagtaaggaagttggcccagaccggcaactccagaattccagatacataaaactgtggtggtatcttcaggcagcaataatcccgtgcagcagcaccagtactgtactccttttcatcttatacaacaccaaaagaatggatcgaaattcgtaacacatgacaacaggatgacaattacaagagattaaaaaaaaaacacacatgtgagggggaaaaggaaggaaactcgggaagaggctacgccaatgatggaaagacgcataagttaccgacgcgctggagactcagggaacttgaccatctgctgctttaaaataggcgggacgtttggcggagcggctggcttgaagaagatgtgcggagtttgggctg

SEQ ID NO: 70838 - DNA, 394 bp, Zea mays
  unsure (1)..(394): unsure at all n locations
  Clone ID: MRT4577_164611C.1
gtaccggtgccgggaattcccggtcgacccagcggggcgagctagggttttgctgctctccgaccccgagctccgaaggccgcatcatcaggcgcgggccccctcgcgtgtgaccgagatggggctgccgaatcagggaccgtggattaccccagcttcaagctcgtcatcgtgggggatgggggaactgggaaaactacatttgtgaagaggcatctcactgggaaacgttgagaaaaaatatgaaccaaccattggggtgggaaggtcatccgggtgggatttcaccactgaactggggggaaggatcagggttctactgcgtggggataccgggangggcaaaggaaagtgttgggtgggcgctcangggatgggatacctatactccatg

SEQ ID NO: 70839 - DNA, 271 bp, Zea mays
  Clone ID: MRT4577_164612C.1
gcaaagcccaaaagtatatttctagggcatgaaaataacttgagtctattttaaggaattgtttcactctagaggtagataggggacctggctagaatctgacattaaaatatactttttaaaaaatattatatttggggtggggaaagtgattaaaaggtgaaaaaaaaacatagtattcagaagttttggaggttaatgtctttctctaagatttgccactttagaaattcaacagaaaagaggtaaaacagaaatggaatgtatctgg

SEQ ID NO: 70840 - DNA, 746 bp, Zea mays
  unsure (1)..(746): unsure at all n locations
  Clone ID: MRT4577_164613C.1
cgccggaagtgcccaccgctgaggttgtccccgaggacgaggacggtatcaggaggattgggatagtatacaccaggaagaacggcaagcgatccaaggtcagccctctcctgctcccgcaagagccacaggcgccctgtgacctcgcagctgcgattccatgctcctcctcccgggagtttgcttcacgaactggcttcttggatgcccatttctcggccctggtagatggtgtctccactcactctggggttcagacgctcgttgtccttgttgatacgtcttgctctgggagctctcaccggctccttggatttcttctacccgtgctgtggtggatgcgccacagtaggcagcggggaaagttccagaaccttgccactttcattttgtctgctggtgtggcggttgcgtttgcatcccacggggtgcactttgtcaagctccagagtgcctctgcattgttacataggcctcttgcgcattgtgggtggtgtgcgcttcatggttccacgaaatctgaaccacttttgtcagtcgatttctcagcacttccttcatacttttggagcttgcattatgccgtagctcttgattcgatgtatctgccacctatgattcggcacagctggctgctggttgggggatctgaagaaatctatcctcacactcctttgtatgnggattctggggctcagagcagnggttttgccactacgaacatggacagcaatgaaccttgcaga

SEQ ID NO: 70841 - DNA, 376 bp, Zea mays
  Clone ID: MRT4577_164614C.1
caatggagtcttctaatcccaatcaaaacccaaaccctaatccatctaccttcttcttttctcctagtcctagtaccgaccgtaatcttccttcccaaaacaaactcccccaggaattccttgcgcgttatagtcctgattttcaatatgtcgaagctttattatcaacccatagtcctgattctcaatacatcgaaaaaatctttcaacaaggaagtcctcataaacaattaagtcctcctaaaggacttgacccacaatatgatcagccagataaaccctataacaacgaatattactctccagagtatgacgaaaacgctccttttaccacagagtttcctcgtgccacagattatctcagcttccagtctct

SEQ ID NO: 70842 - DNA, 321 bp, Zea mays
  Clone ID: MRT4577_164615C.1
aaaagcaccaacttgttttcaaaagaaagcaatagtgctttcggttgcattatttcttcccctcccaagaccaccccttttctttcttctccaacatccttcccccactttctctccccttgacatttccatcttattctcctccctatagaacctccctacttaactctagaatagacagctatactccttggttggaaaatggttcacctcacctagggcctgctctgctcggcgtcaggatcatccacacgtccgtacgtacactcttcctttggctgattgtctccaaccacatcaccggaaaattttttttttttt

SEQ ID NO: 70843 - DNA, 433 bp, Zea mays
  Clone ID: MRT4577_164616C.1
ggtgctcgtggactggccgtcatggtgcatggtccgaaggatctgagccaaagtcacaggcaattgggtcgcaaacgctcaaacaggtggcgagacgggcgatgtaccaaagcgccatttgctagcttggatactgacttataagcgtatacatactatacttcacacgggcactgcgaaccactacctttttaagcaagggcgaagactaaacgtgcgaatcaaatggtacgatctgactaagaagaaagactatatgggggcggtgataatgggggaactgctgacctgattaacgaatgtcttaagccaactgatgacccttatgggggtgagaacaaaccaactgttggggagaatggctcaacacagattaggagaggcgacattgaccgatccaagagcgacatgattccatacgcttggctcgcac

SEQ ID NO: 70844 - DNA, 541 bp, Zea mays
  unsure (1)..(541): unsure at all n locations
  Clone ID: MRT4577_164617C.1
gtgggctgatcatgagccaccggaagccatagagatgagtagggccgatcacctatccttctttgatctgtaaacctgttgcggacaattacaagttgttggtaacgagcaagatgtactatgtagctccctaacccgtgcggaagagacattttagttccgcgtcaaacatgacatggagccaggcatgcataagaaaagacttcctatctctataaaatttaatgactacgcgaaataataattaatgtggacttgggtgtagattgatccttgtgcaatgatggatgggattaattggttcacctatctatggcctcagatgaatcatgtagcacacccaccatgccagaggctcaaatgcaatgcatgcaactgaattgcggacaggtgaacaatacatctttttttagcttgcttgaccataaacttggagacacctcctncacataataactatcattggaagggaatgcttcttttgcccctggagccatagaatatgcattagtgcaggacacccgattaaacattattaaaa

SEQ ID NO: 70845 - DNA, 1415 bp, Zea mays
  Clone ID: MRT4577_164618C.1
ggggcttccgtcctgttctcgtcgcacctctttacctccgccgccgccgctattgtcccattccaatctagaacccatagtcttcttcgtgattgtgcggttctttggtgagagcatgagctcgtctacttccggaacacgagagatgtcatctccaaattctacagcaacatctattggccaagttcaaaaggtgcctggttttgccaagcttcagggtgaaaactttgtgtacttcatgcaaacttattcaatgcatgttgggacgcactagcagaagatatactgcagactttgatctctctaaatatgaatgtgggagccaatgcgattcccgatgccatgcatgtatattctacgactttgaactccgccattttgccattgaagtccttgtaagaaatggatgcaccattcgaggggtctcttatatcccaggtagtgtccctgggaaaaaaaaaaaaattaaattgaattctcaggacctcattgagattgctggcataaaattctactttcttctaccatctcgctccatttttgccactcttgctgctcgagatgctactatgttgcctccacaatctccatccttgttgcaccctaattaccctgggaatccaagtgctaatgattgtggtcgtagcaatggtgagaatggggttaaaatcagcaatgacatgcaagggaagttggtgaaacaaaagagaagtttttctggagaattggatatatcttacagttatggcaccaaaaaaaatgttgatcgagttggaacacttgatggatgtgtcaacaagctacatatacaaattgcagataaggatacagacaatcaacagatcctactagaagaagagaaggatgtaaccacttgtcttacaaccctgatatctgagttatcaggtcctaaagaatgggtgcctatggaaagactcctttcagagatttttaaacgttttggtaaaaaatggcttcgtgatagggtaagcaagtacttaccacaaaagggcatgtctggctcttcaactaaagttgatcataggccatggtgtagcttgtgggagctactcaggaagcacccagagcattttgtcatgaccacattgacaagaggagaagaaacattagattatgttggcttggtacacctggtatctgtggaaaatgaaccatgaatcctagacccattattgccattcgaaggacttccgtaccattatgggctagttatgtttgaaataaactaggacatattattgttatcatataaaatttgaagcccattttgtagtatggctatcatgttctattgtaaaactatgcagctttgatgtggtacctttagttttgatctatgcatttcaatgtcggagtttggaaacatttattttgaaagagtttgatttgttggg

SEQ ID NO: 70846 - DNA, 234 bp, Zea mays
  Clone ID: MRT4577_164619C.1
ttgggtacctcgaggccggccgggagatcccttcctcgcaacaacttctgtcgatctcatctactgtaccgccagctaacgcatttcctcccctctcctatagtgcgttttttctcccgcctctgggctcctccaccaaaaccctaggtagcagcctcccactctcgtcgggaagctctatcagcagcaactgaagacgctgtctctccttgcaaggactgccccaaccctgac

SEQ ID NO: 70847 - DNA, 807 bp, Zea mays
  Clone ID: MRT4577_16461C.1
gagacaatggagcatttcatttgttagtgtccctgtgagtgacgtggaaactgtgcatcgccatgtctgctagtagtaagcgttttctgccgatagtggtggttgcggcaatggttgccgccgccagtggcgccgtggagttcgcctacaacggcttcggcggcgcgggcttgtcgctcgacggtacggccaccgtcacgccggccggtctgctccagctcaccaacgacaccaacatgtccaagggccacgcgttccacccggatccagtcaagttccaccggccgatgctgtcgtccttctccacgacgttcgtgttcgccatcgtgtcggagttcctcgacctgagcaccagcgggttcgcgttcctggtggcgccgaccacggacctgtccacggcgatgccgcagcagtacctgggcatgttcaacggcaccgacaacggcgacgcccgcaaccacgtcttcgccgtcgagttggacaccgtgcggaacccggagttcgccgacatcaacaacaaccacgtcggcgtcgacgtcaacagcctcaactccaccgtggccgccccggcggggtactttgacgacggcggcggcggcgcgttccataacctgagcctcataagcagggaacccatgcaggtctgggtggactacgacgctgccacgacggaggtcaccgtggccatggccccggcgcgccagcccaggccccggaggccgctcatctcgaccaggaacatcaacctctccacggtcatcacggacacagcgtacgtcggcttctcgtcgcgtccagcatcgtgct

SEQ ID NO: 70848 - DNA, 391 bp, Zea mays
  Clone ID: MRT4577_164620C.1
cggacgcgtgggcaaacccagatctaggatcttctaagttcaggaaaaattttgaggctcgggccttttgctttcttcctctaccaatcaatactagcataccagtgcatgtaaatgcttattttgaactctcttcaaatcgaagggatatctggatcggaaatgacatggctgggggaggaagagtacggtcagaatggaatttagcgctgcttgaagatgtcgttgctcctgcttatgggcacctgcttgcagctgttgctgaagagcttggtccctctgacttgtttctttcattttggcctagtgctgcaagtgtggaaccatggtcttccatggtgaggaaactctatgtttctattgcaaaacttggaattcacgttttatatac

SEQ ID NO: 70849 - DNA, 110 bp, Zea mays
  Clone ID: MRT4577_164621C.1
ccaggttgtcgttaacataacataagaaacatcaacatcgacacatgattgtgtctatcgtcattaccataatatacgcacataactcctgataaagtttatgaaatatt

SEQ ID NO: 70850 - DNA, 327 bp, Zea mays
  Clone ID: MRT4577_164622C.1
cggaattccaggcctacgacccacgcgtacgtctagaacgcatgcatctgcctatcttaagattatttcatttgttatacatggcttcggaacaattatctcatagggacaaatttcaacattacaatggacatattcctgagcatgaccagagccaaatttggcttactgattcatgccactcttactgcaaaggcggtttaaacatacagccatttcaaatactactctggcattacctattgctactgctcttcagatttaggcttcttacctccagatttaagcaaatctggtctgctcgatccttcaacatattgtgactat

SEQ ID NO: 70851 - DNA, 417 bp, Zea mays
  Clone ID: MRT4577_164623C.1
ggggaaaaaaaaaccttgccggggtttggttttaccacacacccacccaccatattaatgcatatttggggggtgcaacatacatacatgggggaaatcaacaggggaaaccccaaaaaaagactggctgatgataattattactgggggatcggatcatactggtccaatccatgggggccccaaagcgcgcatcatgcatgggaaccccttatggatcgtacccatgcggtcttttatttccacccaccatggtccatggttgaccaccaagggttcttagggcgccccataaaacattggtgggggagggggaggaccgcatcaagagaggctgtgggggggccaacctcttcccctttgttggggctccggatgcccccgcccccggccggaaggggccccttgcggtccccc

SEQ ID NO: 70852 - DNA, 545 bp, Zea mays
  Clone ID: MRT4577_164624C.1
actaatgggggccggtgcttagcacgtaataacgctattgaaagcatgctctagtacaatttcaggctttgaaaaaaagatcccgtatacctgttgataagcacaaagcttgccacctgagagagaaaagggactttacaaatatattagctagaagggcagtcttgtctcctattaaacacagaaacgcaccactagaccaatgtacgaccgactacatcctctgccttgaactacgtcggttctgacccactgcttggtaaccaagtacttatgtttgatctaaggttgatgttacatgaaaccataatgcttgaattttggttccaaccatatatcacaactcttttgagcttggacttgaagatacttacatgattatacatgtggacttggactccaaatttggaggttatatattatgggaattccttgagatacctgatgcggtacatacaggggatgagtctttcctaacagaatttttctctgtagcttccgatgaaggtgtgccagcttccaatctttcacttttgaccttacga

SEQ ID NO: 70853 - DNA, 300 bp, Zea mays
  Clone ID: MRT4577_164625C.1
aaaaaaaaatatacaaaaaaaaaaaaatatagaaaaaagaataaaaagaataaaaggtggaacagaatagaaagaggtatgataaatgaatgtctaatgaacacacctcttttgtcgggtccattctagcctatttcaacacggctgggggggggcgttttcaggtttcccaggttctggtcccctggtcgtgctcttttagctttgttctgcgggattgcaattttttcttttttgcctctctttctctctctctgtgatgggacaactggtgctctttccatattgatagggttagac

SEQ ID NO: 70854 - DNA, 258 bp, Zea mays
  unsure (1)..(258): unsure at all n locations
  Clone ID: MRT4577_164626C.1
ctgggcctcactccgctgcttcgccattgcgatccgctccangcctggatctcgctgctgctcgcgctggccgtcgcgctctccgcccgggcggaggaggagcccgccgccgcggcggagggcgaggccgtgctcaccctcagacggcgacagcttctacatcgccgctgcctatgaccccttcatgatcatgtagttctttgccctctagtgcggaaacattgaggatattgtcgttgacttctataatccccacat

SEQ ID NO: 70855 - DNA, 407 bp, Zea mays
  Clone ID: MRT4577_164627C.1
ttcttcgcgtgcgcagggcggcatgcggtacaccatcaccggaaacaagaacttcaacagaggtgcgatcaccaatgtgggcggcgctggcgacatctatgtagagacacactatgggcgtcagggcgtgaagtggacggcaatgaataacagctgaaggcaagtgtggaggacctgcgatgacctacacactgaagttgataccgttccgggtgaggaccagcgaccaccgtggggacacataatggcacgatctgcccgctgtctggaagatccgagttaccttccaggcatacaagaacttataagtcctccatgctgatacaccttcggcagtatgatatgcgaactgacacagcatgaaggcacaagcaaaagctacaacccacaatgatatggcataatga

SEQ ID NO: 70856 - DNA, 527 bp, Zea mays
  Clone ID: MRT4577_164628C.1
ccggccggggacgcgaccggcacggcggcggcgcacagccccgacgacgaccctccccgctgccttctccccgatctctacgacaccaattatagatggggaaggtgaacctcctccctcttgggatccggcaccaactccaaaagttctacactcaggtgagacaggcgaggttaaggttcgacgactcctcgagggacatgccaagaactatcaagttacattgttgtttattttccctgtcttattgggaagcaaagtattggaaaaaaactgcatttagttgatgatccactagaagtttaggctatgtcccactcgagtctttatactgtggtgttgtctcttgttatgcaatgttccctgcatgatttttgtttttggcatgtctacaactggttcagctgttcggctgctcattatggttgcagtcaaccataagattgttgtcttagcacctttgatatgtcgtagcaaaaactgctagttcactctttgggaaaaaaaaaaaaaaaaaatttgcggcc

SEQ ID NO: 70857 - DNA, 286 bp, Zea mays
  Clone ID: MRT4577_164629C.1
gggcacaatagatgccaggattgaatttttcctgaaacaccgtacattcacaggcagaatacacacacgcccattgatcccgccaacattgccagagagaaataaataactacggcgacatattatgctctgacaaagcttgtatagcacgatagccttcgaggctcaatccaggtgcagctatgtgtatctctgcctcgcatagaaagcttgttcattcacttgtcaccgtgtcgaatacgtcggtttgtcgctctaactttcagaagcaggcgtctagcaggca

SEQ ID NO: 70858 - DNA, 242 bp, Zea mays
  unsure (1)..(242): unsure at all n locations
  Clone ID: MRT4577_16462C.1
ctcccatatcggctccactaaatttcctatataccncgtctccgttgactcgtctctgctcgtcacctcgacggcagccatagacaacgatcatgatcggaatcaacggttttggaaggatcggcaggctcgtggcaagggtcgaactgaactcggaagatgtcgagctgatcgccgtcaaggagcccataatcatcacggcttacatgatctacatgtccgagtgagagactgtgcacggc

SEQ ID NO: 70859 - DNA, 660 bp, Zea mays
  Clone ID: MRT4577_164630C.1
cacagtgctctcgcggtcacgttgctctatccctggtcggcgatcgcgccgagcgagacgcgctctaacggacgatgaacttggagtccgacgatccctgcgcgaagacttcctcgccgaagtgactcccgccgctgtactcccacacgtccgctcgcacacgcgtgctgcggactccaagagcggattggcctgccgcgcctcgcgcagcgggggctgccggagtgtgccgatctcctgtgcactcgttccctgtcgcagtatgtaagatgcttatgatactggggacactatcactcgatgaaacttcctcgaagaagtacacacttccatgcaagacacacccattggttgtcgctgccccaggttgcagagaactattatttggcaaaagatatgctgccacattgtatgccgattagctctactacgcctgggtactgaacaacggaaagcaaagactgataatgagatattagagcggtcctctgggttcaactccatgttcagcgcaccgactgtgaaatcattgaatataagtctaggcataaccaatagaggcaagatgctttgagagagctctaggtgatgacgttgcccgacaaaatgactacccacacgccgatcaataatcttccctggaccccgtgcgaaatacct

SEQ ID NO: 70860 - DNA, 697 bp, Zea mays
  Clone ID: MRT4577_164631C.1
ggccgcttttttttttttttttttatttctttttttttttttttttttttttttatttttttttttttttttatgctctccttttgttgcttgcttgttgctgttgcggatacaccgccattgacttaaaagccttgcatcctttcgtcggaaccgaaccccactgactgtgaggtcgctttttctggcgcgcactggactttacagccttgggaaagtatacagcgaactgttactattcgtcgtcgtcgtgttctttggggggcctttggctggccacacccacaccgggggcatctagctaatcgccgcctcccgcgggcgcgccgaccacagcgagctcagcgtgcggaggcgctggaagtagtcgccgagcgccagcaggcccctggccgcctgccgcgtcgtcaggatcttgtgcatctgctgcagcgtcatcagccggagatggtccgcctgggtgacgaagatgacgagctctttcagcttctccaccgcagtggccatctgcagcatgtaggcgtcgggggccccgaaggggtcagcctcggcggtcaggatctcggagaggctctgctgtagcttctgcatgccctgcgacagcgcgtcctccgcctgcgttgacgtgtgctggaggccggccacgagcatgcgctgcgcccccggcaagggctccagctgggggctcaggatcttt

SEQ ID NO: 70861 - DNA, 229 bp, Zea mays
  Clone ID: MRT4577_164632C.1
cacacggagcgaagctacctagcatcgacttaacaacaatggctaccaagataggatccggccttgcgctaattgccctttgggtgagcgcaacagaggcgttcatgaatcgacatggctcacgtgttcggagcgccgatccgcccggacgtggtccgcttcacccacaagctgctgtcctgcaacaagcgccagccttacgcagtcttccgacgagctggccaccaga

SEQ ID NO: 70862 - DNA, 3679 bp, Zea mays
  Clone ID: MRT4577_164633C.1
ccatctccggctgacgacgctgcagcagatgcacaagatcctgacgccgcggcaggcggccaggggcctcctggcgctcggcgactacttccagcgcctccgcacgctcagctcgatgtgggcggcgcgcccgcgttattgcggcgatcagctagatgcctgcggcgtggcaggccaaaagctcgctcactggtgaggcgaccgtaccaaagaacacgacgccgacgacgacgaagactaaagagtggtagcctcgagcggccgggatactctactattgcatagtagccttcaacaacggtgctggtgctctgtcgatccgtctgtcgttactcacagcgcttcccggcccgccggctcttgtctctctgtttgccccgtggccagcatcgccagctccgcctccccgccgcagtacatgacgccggcggcgtcgcccgcgcagttcgcgccggcgcccctcaggatggggtacgggcggccggcgcccgtgatgggcatgtggagcagcgagccgttcaaggtcgacagcggcggccacgccacctgcagcgcgtccaccgtcatggaggcggacaccaagctggagacaagcaggctagaagatgttccgcaggtagcactcgagccagagaggagtacggatcaggaaacgagcaggccgccagagagggtcatgagaaggctcgcgcagaacagagaggctgctcggaagagtcgcctgcggaaaaaggcctacatccagcagctagagacaagccggatgaagctgtcgcagctagagctggagcttcaacgggctcgacggcagcagggcgcgtatgcaaatagtgaagcatgggagacccagctctcggatacacatgcccgatcgatccaggcgttgctgggttcgagatcgaagtgaagtcgtcctttggagctgcacacacatctgtaaggagaaaccttgtgcttggcgatttggcaccctccagttaattatccttggtttgaggaagaacaaggcatgaagaagctacagcagaacctcgccgagatcctgaccgccgaggctgaccccttcggggcccccgacgcctacatgctgcagatggccactgcggtggagaagctgaaagagctcgtcaacttcgtcacccaggcggaccatctccggctgatgacgctgcaacagatgcacaagatcctgacgacgcggcaggcggccaggggcctgctggcgctcggcgactacttccagcgcctccgcacgctgagctcgctgtgggcggtgcgcccgcgggaggcggcgattagctagatgcccgcggtgtgggtgtggccagccaaaggcccaccaaagaacacgacgacgacgaatagtagcagttcgctgtatactttcccaagctgtaaagtccagtggaggacgaaaaaagcgacctcacagtcactggggttcggttccgacgaaaggatgcaaggcttttaagtcaatggcggtgtctccgcagcagcagcagcagcagcaagcggtgtgcgtttgtcaagcgaagcgactagagaataaaacggaaatggattgaggccttctctatttgacgggcggaagacgtgtacatatattgttttgccacccggccgtggccttctagagaggcgtatgattcatgatgcaggccatactaggatcatatttgtacgtggtggaaccgagagcaaaacaatattacaatagtttaaattagggaaaaaaaaaaaaaaaaaaatgttcaagatcaaggcggcggcggccaacgcggacgtgttctacgtcatgtcgggcttgtggaagacccccgccgagaggttctttctctggatcggcgggttccggccgtcggaagtcctcaagatcctgagcccgcagctggagccgctggcggaggcgcagcgcatgctggtgggcggcctgcagcacacgtcggcgcaggcggaggacgcgctgtcgcagggcatggagaagctgcagcagaacctcgcggagaccctgacggccgaggccgacccgttcgggccccccgacccctacatgctgcagatggccaccgcggtgggcatactgaaagagctcgtcaacttcgtgacccaggcggaccatctccggctgacgacgctgcagcagatgcacaagatcctgacgccgcggcaggcggccaggggcctcctggcgctcggcgactacttccagcgcctccgcacgctcagctcgatgtgggcggcgcgcccgcgggaggcggcggtcagctagatgcgcctgcggcgtggcaggccaaaagctcgctcactggtgaggcgaccgtaccaaagaacacgacgccgacgacgacgaagactaaagatgagtggtagcagttcgctgtatacttgccccccaatgcaaggtgtaaagcccagtggaggacgaagagatcgacctcgctgtacgagtacgacgaacggaagggacgcttctcggtcagcggcggcggcgacctcgctgtacaaggcgattagtagacatacaaaatgtaaatggaaatcgatcgatgggcggaggatatgtacgtatcttgttttgatacccgcggccggggccctcctagaggcgtactgtatgattgattatgcgggccttctacaactactactggtgttgggctatatgtatatctctacaactattacggaaatcgattgatgggcggaagacatgtacgtatcttgttttgatacccgcggccggggccctcctagaggcgtactgtatgatggttatgcgggccgtctacaactactactggtgttgggctatatgtatatttatataaaatgtaatcacctgtaactatcgttggtcagattctaaagagcacgcggcatgcaggtgtggaacagttcagttcaaaaaaaaaaaaaaaaaaaaaaaaaaaaaaaaaaaaaaaaaaaaaaaatgtaaacggaaatcgattgatgggcggaagacatgtacgtatcttgttttcatacccgcggccggggcctcctagaggcgtactgtatgattgatgatgcgggccgtctacaactactactggtgttgggctatatgtatatttaatataatgtaatcacctgtaactatcgttggtcaaaaaaaaaaatttcccgcggccggggcctcctagaggcgtactgtatgattgatgatgcgggccgtctacaactactactggtgttgggctatatgtatatttaatataatgtaatcacctgtaactatcgttggtcaaaaaaaaaaaatttcccgcggccggggcctcctagaggcgtactgtatgattgatgatgcgggccgtctacaactactactggtgttgggctatatgtatatttaatataatgtaatcacctgtaactatcgttggtcaaaaaaaaaaatttcccgcggccggggccctcctagaggcgtactgtatgattgatgatgcgggccgtctacaactactactggtgttgagatatatatatatctctacaccggtcgcagttgtaaatggaaatcgatcgatgggcggaggatatgtacgtatcttgttttgatacccgcggccggggccctcctagaggcgtactgtatgattgattatgcgggccttctacaactactactggtgttgggctatatgtatatctctac

SEQ ID NO: 70863 - DNA, 279 bp, Zea mays
  unsure (1)..(279): unsure at all n locations
  Clone ID: MRT4577_164634C.1
ttcctttattccctgttctacccactcttccttctttccaacttcttcatattctcctttatcataatgtacncctccaagatacgttcaatttttcaacgtctttgcccncccaaacccaacccnccctccacacacctccagatcttttccctacacttataattattaccaccacaaaaatatttttcttctctttctattaaaaataaccatctttccattttttataccacatcatattatcctatctctcatcttccttactatccatcccca

SEQ ID NO: 70864 - DNA, 146 bp, Zea mays
  Clone ID: MRT4577_164635C.1
gggttaataatgtagacatcccgactacatgagaggatatttactaactgcgactcaagacaacttatatggggttacaggaactatcggtaacctgcctcacgattagagggcacaactttttttacacgttacagactttgatt

SEQ ID NO: 70865 - DNA, 435 bp, Zea mays
  unsure (1)..(435): unsure at all n locations
  Clone ID: MRT4577_164636C.1
gcaaaactgaactttgctgataatgctgtttttagacagaaagaaatatttgcactgcgtgatactactcaggaagaccccatggaggtcgctgatgccaaagcagatttgaactatattggtcttgatggagagattggttgcatggtgaatggagcaggattggccatggcgaccatggatattataaagttgcatggtggtacgctcgccaattgtcttgatatcagaggaagtgcatcagagggtcatgttgtgcaaactctcaagatactgacttcagatgatagagtgaatgcaattctagtgaacatttttggaggcattatgaaatgttatgtgatagcaagtggaattgataatgcagcncaacatgttgacctgaaagttcctgaggtagttcggttggaaggcacctatttataccaaggaaag

SEQ ID NO: 70866 - DNA, 258 bp, Zea mays
  unsure (1)..(258): unsure at all n locations
  Clone ID: MRT4577_164637C.1
gccgtgaactacccncaaacgcccgacgcatacgccgtctccttcaccatgaccttgggcgagctctacagcaaggaggtgcgaaaggtgatcgttgacctcctcctccccgtcattgacagcgaccgggtcacggacatcctgtaggtgacctactcttacaagacggccgctaagctgatcgacgctcctcccagtacggtgacggtgcggcgcagttgtacggcttttcccgatgatgatcctccagggacgctc

SEQ ID NO: 70867 - DNA, 502 bp, Zea mays
  Clone ID: MRT4577_164638C.1
cgggatttcccgcattagcacccgatgattcgtgcttctctgcgccggaacctttgggatgagttgctcttgcattcccttccacgccagcaaatagctagtgcgctactacctcaatgccttcatgtcgagggataggacttaaccgaaaacgttccacccatcgaacattgacagcgaccacgatgagagcgccgcaggaggtgattttgattttccaataacacgaacatctgatgaatcacctgccaatcgagtcaccttactgatcaacatgatgtggattggaacccatctccctagcaggaggacttgtatggatattctgatgatgaagactagtttgaccattcccgaggagacaagcataatggagagcacatgggtgagatgctgccacaggtccatccctcaaatgaaatctatacatcctgatctacacactcctgaccgtagacggatatagccaacatgactcctgcacatcatttgatgcgtcatc

SEQ ID NO: 70868 - DNA, 424 bp, Zea mays
  Clone ID: MRT4577_164639C.1
gggggactccggaccgcgccctgctgccaagccacacacacacccgccaccgaccactcactcactcaccagacaatcaatcatggctcgccggcatgtcctgcgtgcccccctctctgggggggggcgccacgggctcggtccccggtcccgcagccacgacttcgccgaggcggccgacaccatccctcggggcgagcagacctggcgctcggcggtcgccgcgcacgaccccgggagctggccgcccggctgtcggagccggccggccgcgccggtcggtacgtggccgctggcgggccgcacggaaagcgcaaaagggcggatcgggtcgggtggcggtcccggcgcgactgcggacattggggacaggtgggccacctccgcgaccgggcaggagagggcgcgccgggagggcccgcgg

SEQ ID NO: 70869 - DNA, 300 bp, Zea mays
  Clone ID: MRT4577_16463C.1
aacctcaaactttccagagtacaaataaaaacacatacacgcatccacaatcatgatgcgttaacaccagaccccgtctccccattgcgtccagcaaccatcgccaaaatttcttcccaacatacttccaacttccccactcaaccccccccttcagttcttcctaaccaggacgatctgaatccaagcattttgcttcccagctcaagctcggttttccagcccaccaccgccacaatttccgcccaagacttcccagtcttcaccacggatcccctcagtcaacatggccctccctca

SEQ ID NO: 70870 - DNA, 361 bp, Zea mays
  Clone ID: MRT4577_164640C.1
actcgtgaattcaccgctatcctcaccatcccgtgtgcggcgtgccactcgccgctataatacccaagcctatggataggtcaaccctccagctgcgcagtcactgctgacaaccgtagtctggatggcgagaggagcagagcggatctgacacggcccacgagacgctatccgagatattttatcctaacagcgacgagggacaaataccgcatgctgcaatgaatcagcgatcggcctactccaattgtaggaacatccatcaagatgctgccggacgtgaatcagctacctaacttgaaaccacaggaccgtgcgagcaaactctttttttcggagattctcactccccattccgaag

SEQ ID NO: 70871 - DNA, 368 bp, Zea mays
  Clone ID: MRT4577_164641C.1
tctcacgcgtccgcccacgcgtccgtggagatctcagaaactgcttcttgtattgcagcttgtttcctgaagactaccccatgtcacgcgaagcccttgtgcggctctgggtcgcagaaggttttgttctgagtaaagaaaagaatacaccagaggaggtggctgagggaaatctcatggaattgatccaccgtaatatgcttgaagttgtagactatgatgagcttggcagggttagcacttgcaagatgcatgatatcatgagggacctggcactttgtgttgccaaagaagagaagtttggttctgcaaacgattatggtgaactgatacaggtggaccagaaggttcgtcgcttgtcgttatgt

SEQ ID NO: 70872 - DNA, 430 bp, Zea mays
  Clone ID: MRT4577_164642C.1
agcaaatacattagcttcaatggaatcaaaggaatcgaccaatccttcagtggggcccaaaagggggccatttttccgcttcaatacgggacctaagaacatggccaggagtccaagaccacaggacccccttttatgaatcactccttgccccacatgggacaggcccactccttggagccttgccagctagtcccggaaaagctggggccacaaggctagggaggatttgccagcatttcagcagcagctaaaacatccttgacatgccaaatggcacaacccccatgtttcggggagtaccaacgccagcgcccactgatgcaagggggggggggacaaagccgttcagggatcttgggtatatgtcggggggggcaggggctatcctatctaaagggttcttttttggcccaactgggaaaaggaa

SEQ ID NO: 70873 - DNA, 372 bp, Zea mays
  Clone ID: MRT4577_164643C.1
tgcggcgctcaggcggcggttcataaatttgatagctacgaatttttcctccgttctttttatttgtcgtcaaatgaaccagccgacgataaatattagataacagagatattactatttataagattgtatataatcatatgattcatggttatatgtatagtgatatagtcgaaatcacgacccacgccaagcattatgtattgtactcccagccctaagaatgtcgctgaggtattagttggaccttacgtgtgatggtcacgtgtattgtaatgtacagattgcgttgaatgcaaccagtttagtgtaaacaaatacattcctactagaatgtgtgatttgtatttttttaaaacacacacgccccta

SEQ ID NO: 70874 - DNA, 381 bp, Zea mays
  Clone ID: MRT4577_164644C.1
tttgggcgtgtcccacagaggggtgaaccgtgacgttttaatcaaggtgcaggggcagtaatacctggcccaggggggacctgcacgggactacttcccgtatttcctaagccccaacggggtaggcgtggcgaatcgaaaaagggccgtaggaaccttaatcatgccccgggggatgccttttgactagaaatgaccaagccctcaaggtatggaccggacagccgaccaatcccgaaaacaaaccaaggccctatacatgactccaaaacaccaaggctttgaacctagcatggcacaatctttacaaacacaaggtggggtaacccgcattacagaaccatctcttacgacagaactggccgttccgctttaaacacc

SEQ ID NO: 70875 - DNA, 214 bp, Zea mays
  Clone ID: MRT4577_164645C.1
cgcgaggggtgattcgccatgggcggtcttactatggaccaggccttcgtgcaggcccccgagcaccgccccaagcccatcgttaccgaggccaccggcattcctttcatcgacctctcgtctttggccgccagcggcggcgccgtggacgcgctggccgtcgatgtgggctcggcgagccgggactggggcttctttgtgggcgtgggccacg

SEQ ID NO: 70876 - DNA, 287 bp, Zea mays
  Clone ID: MRT4577_164646C.1
aacacatatgccaccttaattgtgatttgtgtgatacctcaactgctgaaagctttcgtttatctctacctggttaaacaactttaaataataacaagtcaatatatctgtctattgaccagggctcttctgcagccccagagtacatggctgtggaagagatgtttaacccttcgccaagcacaggcttacatccactttcgccagcttggttttaatggggaggcataactgccttcaaattgaaatgaatagaaaagtggagacactccatgtggtgtcttttc

SEQ ID NO: 70877 - DNA, 509 bp, Zea mays
  Clone ID: MRT4577_164647C.1
gccggccgggccgcgataccaacctctcctcttttctccatcttctcatagaccacacggaagacgccagccgccggagagagaagagaggaaaggagagaatacatatccctggagaacaatggacctgacaattgtaggacctcctggtcaagcccgaggcatagtagctggacgagatcagcgcgctgtgcaccacacgctgcctgctatggaagcacaggctctccatggcctcgccttacattgaagcccacagccacgtctcctactcgcaagaccgctacatcttccacgctaagcgcaccgacgagatcaccgcgctctgtatgtactacaacaccgccggaatactacttcccttcgaatttttgctatatcttcatggaaagtatgtcaagacatatggccgtgatgacctaaccgctcttgcttatgcaatgaatgatgaatactcatcgtgcttgagacacaccatgtgctactattctattgaccctagtgcatat

SEQ ID NO: 70878 - DNA, 557 bp, Zea mays
  Clone ID: MRT4577_164648C.1
ggtaagttaacgggaagggcactggtggttatagaatggaaccgtaccggttttaaaataacaccaaatttttttttatttttgggggttttggattttaattcctgcccaaataaaatttaaaatggttatttttactggaccaaacaaccagtttattaaaccttgtgaaggccaacttggaaggaaacgtttttattttggtgaaattccccaagggcctaaaagttggctttaaacccttgaaacttgttttgtttttccggaaggccccggaaaacggggggaaccttgttcacacggttggacattgttttcttcgaattcaaggtcttaatcctgaacaagaagggaaaccggggccggtttgttttgcaaacaatggggccaaaccttgtcaacgttgccaatccccaatgggaaggggggggggcttcaatgggggaaacccccaacccgggccagaattggggaacacaaccttcaacccccgaaacccccttccggaaaccggaaaggaaaagaaacttggaattggggaaccccttggttcaagg

SEQ ID NO: 70879 - DNA, 1839 bp, Zea mays
  Clone ID: MRT4577_164649C.1
ggttgggccccgccgcgggcgcggggttttccattggcgacctcgaggccggccgggattgcctattgccccaccctccccgctagggttttgccagcatggccgccgccgccgcccggaggctcctctcccgccgcgcctcctcgtcctccctctccgcgctcctccgtcgcggcgctgtcccggagcagtcgctggtgttgcgcccggctgttgtcgcggcggcctcccgcctcggcttccagcgcgggatggcgcggcggcctggcggggacggctacgtctcgacgcggtctggcgcgggcggggaccgcgcgcccatggccacggagatggcgccgctgttccccgggtgcgactacgagcattggctcatcgtgatggacaagcccggcggggagggcgccagcaagcagcagatgattgactgctacatccagaccctcgccaaggtccttggaagcgaggaggaggcgaagaagaagatctacaacgtctcgtgcgagcgctacttcgggtttgggtgcgagatcgatgaggagacatctaacaagctcgaggggctccctggtgttctctttgtgctcccggattcgtatgttgatgctgaatacaaggactacggagctgaactcttcgtcaacggtgagattgttcagaggactcccgagaggcagaggagggtggagcccgtgccacagagggcagcagacaggccgaggtacaatgacagaacccgctacgcacgcaggagggagaaccagcgatgaactgtgcgataaaatcataaaaaagaccacagcaacaagtcccaggtggtttcagctctggaattcaaggatcaccgagtatcacctgtattaaattggcaatctcactttacgtgcagtctagagtatcgtttctatgtgctcagcttggacgtattgtattctgtaattacagctacttggagatttggaaggacctggcttgcaacgtagtataatctctagtcttttttctttgtggcaatatataattgctatgaataccagattgagatggttgcatactgttcgcagctcaaactttttttgccatggcttgacaactgctggattcctagatacagtagtagattattccattaccctgctttctgaacaataaacaatctatcacttgccgagaagcctcaggcagcttgagcggcctgcaagtacagctcgacgaccttctcccgcgagaagtcggtgaagtacccctggccgacgccgaccccgaggccggcggcgagccggctcaccctctcctgcacctggtcggcgccccaccgcgtccgggtgaagtaggttgcaggcgacctcggtggcgccgtcgccgtgcgcgagccccatggcctgcacgcacgcgagcccgccgccgcgctcgctgaccgcgcgcgcgatgcgcctcgcgacgctgacgtcggccgtggccaggggcacgttgtagttgtccacccacggcgtggcgcccaccaccaccacgccattggacgcggacgacgtccggggcccggcgtccggggccaccggcagcagcgagtccggcgcgccgtgccactgctcgccgccgggggaggtcggcgtgaagtagcccagctgcctcctgatggacgccagcgtcctgccgtctctgtgagctgcgccgtacaggtacgtcggcacttgaagcctgtctccgatgtccgccgccacggccctggcgagcgcggtgacgtcctcgaggcgggcgctggccagagggtggaaggcgatgtggtcgacgacgccgaggcgcgggtgcgcgccggctgggcgccaggcgcggcccgga

SEQ ID NO: 70880 - DNA, 416 bp, Zea mays
  Clone ID: MRT4577_16464C.1
attcccttctctacccactcttcctcccactcttcctaccactcttccttttatgccacttccacctcttcctccactcgctagctttcctccactcaatccacttccacctcttcccaaacttcctccaaatcactttttccatcaccccaaatggttcccattaccaccttcttcctctcatccttactctttatatattaatattgcaaatgtagattattactcttatttcgtctgcaaaatatacattcattttatctgtcttcatttttattctttccgtatcatcaaatatatcgaggaagtctatttctttctaataaaaccttgaaaagataattcatgttatgaacctttattgagaatattaataaaatatatactaaaatatatctatatcattaaataactta

SEQ ID NO: 70881 - DNA, 291 bp, Zea mays
  unsure (1)..(291): unsure at all n locations
  Clone ID: MRT4577_164650C.1
agcctgtacgccacgaagaaacgcggccggttgcacgtcatcaccctcaccggagcgngggggcgccgtctcagccggggcctgggctccgccctccgctccagggacacagacgcccgccgcgcctcccccggtgcgctcgtcctggccggcgagggcaagttcttcaccaacggctacgacctctcgtgggcgcgcgcggggccagccccggctccggagcaccgcctctccactatgcgcgccgcgttccgcggtctcgtcgccgacctgctcgcgctccccgtgcca

SEQ ID NO: 70882 - DNA, 565 bp, Zea mays
  Clone ID: MRT4577_164651C.1
ttttttttttttttttttttttttttttttttttttttttttttttttttttttttttttttttttttttttttttttttttggggcaaggggacctaaattttttaaaaaaaaaaaaaattgtttaaagggggggaaaaaaaccacaaacaccaggtttttttaagattaaacaaaagacccaattaccccaagcgaaaaataaaattgccccaaaagaacaaaaagaacaacatctcctaaaaaaagcaagcaagaggcccaaaaattgcttgaccaccccggcgggggatgattggagcaaaatcccccccccccagggaaggggaactaaaacccccccccccaccggggggatgacctaaagttaggggccccacggacgggggggggaaaaaaagcaccccggggggggcgcccctaccccccggggggggggttcttggggcgggggcccaagtatcccccgacctcccccccgaagtccttgacggggctggggggggcgggaaaccgggtgggcccctaaaccacccggggggcccccaaagggggggggcccccg

SEQ ID NO: 70883 - DNA, 781 bp, Zea mays
  Clone ID: MRT4577_164652C.1
aggctcctctcccgccgcgcctcctcgaactcgctctccgcgttcctccgccgcggcgctgccccggggcagtcgctgctgcgcccggccgtcgtcgcggcggcttcccgcctcggcttcccgcgcgggatggcgcggcgacctggcggggacgactacgagcactggctcatcgtgatggacaagcccggcggggagggcgccaccaagcagcagatgatcgactgctacatccagaccctcgccaaggtcctcggaagtgaggaggaggcgaagaagaagatctacaacgtctcgtgcgagcgctatttcgggttcgggtgcgagatcgatgaggagacatctaacaagctcgaggggctccctggtgttctctttgtgctaccggattcgtatgttgaccctgagtacaaggactacggagctgaactgcttgtcaacggtgagattgttcagaggcctcctgagaggcagagaagggtcgagcccgtgccacagagggctgcagacaggcctaggtacaatgacaggacccgctacgcacgcaggagggagaaccagcgatgagatgaaaaaagtccacaataacaagttcaggtggtttgagctctgtaattcaaggatagtgtgctttggatgtattgtactctgtaactacagttactcagattgctcaaaggacctggtttggaatgcatgcactgttactagcgccaaaaaaaaaaaaaaaagggctacgtttgcacatgtaaaatttctttatggaagctgcttaattgac

SEQ ID NO: 70884 - DNA, 291 bp, Zea mays
  Clone ID: MRT4577_164653C.1
atgcgggcttatagctcccttgttggaaccctggacataggggtaacctgtggcaaagcgtaatccgggcacaagttcacacaccgtacgaaatcgtaagcctactgacgtattccactcggcttccgtagcgcagagacctaacatcacaataatctgcgggtgccctcactagaccgctttccaacattaaaacctgtgggcccactggcctttttgaatccggcaaccctcggggacaggctgcttgcgtatagcgcgctcttccgcttgctaggtgattgactcatt

SEQ ID NO: 70885 - DNA, 1032 bp, Zea mays
  Clone ID: MRT4577_164654C.1
aaccacccactatacccgcccgcccggccagggttttgccaccatggccgccgccgcggccgccgcccggaggctcctctcccgccgcgcctcctcgaactcgctctccgcgttcctccgccgcggcgctgccccggagcagtcgctgctgcgcccggccgtcgtcgcggcggcctcccgcctcggcttcccgcgcgggatggcgcggcgacctggcggggacggctacggcgcgggccgggaccgcgcgcccacggagatggcgccgctgttccccggctgcgactacgagcactggctcatcgtgatggacaagcccggcggggagggcgccaccaagcagcagatgatcgactgctacatccagaccctcgccaaggtcctcggaagtgaggaggaggcgaagaagaagatctacaacgtctcgtgcgagcgctatttcgggttcgggtgcgagatcgatgaggagacatctaacaagctcgaggggctccctggtgttctctttgtgctaccggattcgtatgttgaccctgagtacaaggactacggagctgaactgcttgtcaacggtgagattgttcagaggcctcctgagaggcagagaagggtcgagcccgtgccacagagggctgcagacaggcctaggtacaatgacaggacccgctacgcacgcaggagggagaaccagcgatgagatgaaaaaagtccacaataacaagttcaggtggtttgagctctgtaattcaaggatagtgtgctttggatgtattgtactctgtaactacagttactcagattgctcaaaggacctggtttggaatgcatgcactgttactagcgcccgtttgcacatgtaaaatttctttatggaagctgcttaattgactatgaaggcctaacattaggtatttcattcattgccaacagcttatccatccctatctctatttgaagttcaatttacgagcagtgtagtttacagatgactatatagatgaactaatggatatggttttatgcttagagcgc

SEQ ID NO: 70886 - DNA, 253 bp, Zea mays
  Clone ID: MRT4577_164655C.1
cctatgcttgcgttgatcgagggtcagggacccgggcggacattataaagaaccgtatttggcaatctttggagggctccaaatacagagtggctcctcatataacataacaaccgtcagaccgtacagtgcacgagggtctatgaggatgtaagaaactgcaaacatttgaacaagctagttttgcaccacgaggacatgacatactgaggaacacggtattttgtccctacgaacatcattactgcattgt

SEQ ID NO: 70887 - DNA, 301 bp, Zea mays
  Clone ID: MRT4577_164656C.1
cagcgccagctccacccctcaccttttctttatatacacccctcctcccaaccctaccgaatcatcactaccaccgctctctcttcctctcctccatctctcaacgcctgaaactcacctcaccttccctcctctccgctcatcccccactactcccgtagaaaatagctgactctgattatatccatcccctcttctacgacaacctaactttcatcgtcaatgcttccttcgccctctactactctcctaatgccttctttcccagcatcttttttctccctctccacaccggtttaat

SEQ ID NO: 70888 - DNA, 351 bp, Zea mays
  Clone ID: MRT4577_164657C.1
atatttttttttttttttttttttgaactagaaaataccatggcgtccccagccccgcctccatccacacgccaatacatttgcggataaaccttgaatgttacaaatgatcaatttgtgacaatacatcaaaccaaattgttgaaaccggctttgtttggttgcatgggtaggaggggattgagggaaactaaacccatttctattcagttttgactataattctctcttatccgcttcaatccactcctaaccgagaacaagccgacgtttcggtccgtctgatcaggcacttcaaatcagtgcctgtcactttagctatttagcatttcaaggacatttcccatggta

SEQ ID NO: 70889 - DNA, 423 bp, Zea mays
  Clone ID: MRT4577_164658C.1
ggcacttatacgactattataaggaaagctggcacgctccgcagagcaccgatcctgaatagcgggcgcgactccaggcgttcgatcaatctcagaactgtgcctggatctgtcagctgccagcgactctgcactgcatatgccctgcccctgcgctgggctgcagggcttgtacagcgctggcgcacggctgacgacgatgatgggcgccggcgggctgtacctctacgcggagtgcctgaggcaaccgcagtgcagcccgctggcggcgtcgccctactacgccggttgtgggcagacgagcgctatgtaccagtcgctcccgcaacagtgctggcagcagcagatgaagatgatggtcgcgcagaccgttgcgcatgatctgcagaagatgatgccaatagagcgtgccgctgccgacag

SEQ ID NO: 70890 - DNA, 343 bp, Zea mays
  Clone ID: MRT4577_164659C.1
ccacgcttttgttgtcacacgggcggacgcgtgggtgggggtgcgtttatcaggcacccagggcctcggctcttgccatcgagggcggctcggggaacgaagacgtcaccaagaagctatcgcgaggtgctagataaggggactaagccaataggacatgctggccttatacacgagctgcatctacctaaatcgactggcttcagctaccaaaggccaatttccggaaataggcacgcattcactcaaccttcctcccgaaatgaaaccggtcgacggcatgctagcagcccatacgtaagatcaggggtccgatgatggcaaaattttcctgcaaaggctc

SEQ ID NO: 70891 - DNA, 327 bp, Zea mays
  Clone ID: MRT4577_16465C.1
cctttcttggtcttgtgcagaaagggctacgcgggaaggaacgcttccaataaacgctggtgacatatacatatgtcgctttatatccattgaacatagtatgggggcatacgtaaccaaagcatctaccttgataggtactgacaacattcagaatgctacagaggacaatgcgtgcttggaggcggcctacgaacctgattgccttttgcgaccatcctcttaaagagaccagggcctaagacggaacactctgttgcacgaatgaccgcagatgcacctctgtacaggggccctgggcagtcggcaagcccgctgttggaacga

SEQ ID NO: 70892 - DNA, 809 bp, Zea mays
  unsure (1)..(809): unsure at all n locations
  Clone ID: MRT4577_164660C.1
tccggccgcgtcccatttcattagttttgtctattaatatcttagtaataattttcatagttcactttgacagtaataattaatgttttttctagtgaggtgccatagtgtgacaaataaaagctagaaatcaacattcagtaattatccattaaactcattttgatacagtgtatttttcagtaattattgtttctttttatgttaacagttgcaagataaaacagttgaagaaagtacagatgttgtgactggaaacatatctggttttcctgccagccaatttgatcatagtgcatgggcatacaagggtgccatggtcaggaatatgccagatgacccgtcccagtcacaacatctcgttcaagaagatttagttgatgtatgtgacattttggatgacctgaagaatgaccctgtacagcgtgatttgtggaaagaagttgagaaacacgatgtaaagaatgtttctacatttggttctactgaaaggagcatccccctgtcccaaggtttcacgatgccccggctgtacctgatgacactgacattcagtacacacctcctcagccacgagcgacacgttctcaagctcaacctctgaaatcttcgctccgtaccaatgagactaggcagattaggaaaggccagaagaagctcaagaagtcgcctaagagagtctcccaagatgttgagcttgatgacaatggtttccccatcatcgactntgctgctctagatcgttntgatcctccacatcttgccgtggatgttgagagttatggtggaccagctgcctcaggttgata

SEQ ID NO: 70893 - DNA, 520 bp, Zea mays
  Clone ID: MRT4577_164661C.1
tttatttttttttttttttttttttttttttttttttttttttttttttttttttttttttttttttttttttttttcggggagggctggccctcatttttttcccagcattaatgaagagaacggggggacccacacacggcccttttttcaaacggaataacgtttaaagccccaagggggggacatgcgccacttgcaggccaagcaaaaaaaagggggttaataaaaggggggaaaaaaccccgggggccaaaggagttttaaaaaaataatcatctttggggggggaggggcccaacgggaaaaagtgggggggacccgggtcccccgggggcccgaaaaaaagggggacccccccaattccatttttgcccggggaagagggagactggcccaaaaacatggtgtggccggaacccaacaaaaaggtggggttggggggggcacccaagacgggggggttaaatttttcccaacccaaaataggccctgtgcaccccccggggcccaaccccta

SEQ ID NO: 70894 - DNA, 857 bp, Zea mays
  unsure (1)..(857): unsure at all n locations
  Clone ID: MRT4577_164662C.1
ggcgattgggaccctcgaggccggccggaattccccatcgcgataggcccgttcgcacgaatcactgctctgctttcaccccccgcatcgaacctcacccccgatctgatcgaatcgaaggctgcggcggcgatgggcggtgaccatggcggtgggcacgccggcggcgacttccgccagaaggtttggagcatgacgggcggcccctactgccgccccgtccactggcgccgtaacaccgccatcgccatgttcggcgtcttcctcatctgcatccccatcgctatgaagtccgcagagctcgaggtaccagagcttggccctttttttcaggctggagccatgttgctaaaagacagcaacgcccgcatcacccagtccggccaatcccatctcaactgtggtgcaaaaactttggtaagaaggaatactgaaggaccctccaactagcatgaagtgtgggcaccttgcttttgccttctttttgtggaaacctgtgcctagccataatgctgggttaagtgttaggagcatctctggaatgcttcgcgtagtatcttttgattcttctttccttcgtgttacatgtgaaatgcctgatgaactcaaataatgaccggtgatacaaaagcatgtgatgaatttactcgagggttttgatcatgtaattgtaaacatggcatgtcgtctgcacacttaatgctgaagcttgattcaaaaaaaaaaaaaaaaaaaatgcggccaaaagaaaaaaattggcccctaggccccctccgcggnttccgcccccgacccgtgacgcctcgcttcgcacccctctcggatctccggcgaatctccggcgcgatcctcccgac

SEQ ID NO: 70895 - DNA, 221 bp, Zea mays
  Clone ID: MRT4577_164663C.1
gggtacctcgaggccggccgggagagattatcgatgtcgccagaaggcgagagagacgcaacggaaaaaatgtcgttcacggttcgggctgtccggtacagctctgccccgaatcctcgcgagatcaggagtgcgtccaccaagcccaggttctcgacgccaggctggctgccgcacagttcgtgcgaaccccgcttaggaactcctaccctctttcgacg

SEQ ID NO: 70896 - DNA, 233 bp, Zea mays
  Clone ID: MRT4577_164664C.1
gccgcgccgtaattgctggtccaacgacgcttttttgtctcctggcgcaactcgttggcaagggggccagtaggaagcaaaaccggttgcaccaatcgatcgacgacacgcgcgcgatcgatgtgcggagcgaaagataaggtggccatttccaagccgtctgacggagagcagagttagctagctgcccacccggagaggacgatggtgagactaggatgcgcctactgacc

SEQ ID NO: 70897 - DNA, 341 bp, Zea mays
  Clone ID: MRT4577_164665C.1
cctttgttttggtggtgtgtgtattggttcttttgtatgatatttttttgtgtttttttctttgttggagccagtttcctttttaaaccgagtaaggggggcttgaaacagcgcacatacggagcgagatctcgggggaggacaggtttgaaaaaaccttttttctgaccgaccaaaaaaaaaggaagggggggcttaaattgaaaaaaatggctctgagaataagtggaaaaaaaagggaggggcccgcacgatggttgttaaaaacctaccctcgggattggatgcctatccaaccaaaaaaggggctacccacgtagaattcccggcaaccaggaacc

SEQ ID NO: 70898 - DNA, 341 bp, Zea mays
  Clone ID: MRT4577_164666C.1
cgtgcatgccaaaatataaattacaactatattgggtcacgcgacatacattgattcttgtcttacattcaaaccgcaaaatggcacgggtttcctgtttttacttataaaaccatacatcaaaaaccttcaactggatagggcaaaaaccaaaacagccacccatatcaaacaatcgtttagtaaataaaacataatgtaagaatgctttttaattacccagaaatatccccttttaaacttaagaaaacatcaaagcttggggaattggctgattaaaaacaacgcgcgatgctttaaagaccgactaacaccccctttccttacaaaactaatagata

SEQ ID NO: 70899 - DNA, 692 bp, Zea mays
  unsure (1)..(692): unsure at all n locations
  Clone ID: MRT4577_164667C.1
aattcggcacgaggccgctgcgagcagaggacgagggtcttcgccctagtcgcctgtgcgcagcgggcctagaggcagcgactgagatatccattccactcccgtcaataattcgtcatgaccactgaccaggttgccttcacggagccgagctcatctatgacgttaatgaaattgaaacttgaacggggatggggatccaaggaagaagatgacggatcgtgcaaacaaggagccgctatgcccgcggaagaggaagaagcgaataagcgatatatctgcttccaaaaggctagaagctggaattccattcagacacatgtcacaagcaacatgatttggacatttcaacgaacacgtcgttggacgtagcagcagcagcaggtagttgactagacttactaattgctaccacatgcatcctttcacatagcaggaattaataaaaaaacaccgctacttttgttcttataaaatctatgtaacatactcaatttgtttgcctggaatctagacttgcatggtgtccgttagatgtttttgatcccctctacacttctttctctttaagcgtttttagtgttgattattatctggtcanagtcaagcagatagaaaaagtggagtatgattgcaataactgagagatagtcagttccctgtcaactatcattctcaagtggacgagctgg

SEQ ID NO: 70900 - DNA, 338 bp, Zea mays
  Clone ID: MRT4577_164668C.1
gtatccatcaacaccagacttcaatgcccaagagttctgagagccattgccacatcagaagagaaactgtttttaccttttgcaacagaaaacatggagcatccatagcctcttgttttggtctctaagagaatctgtagcattgaggtatttaagatccggacggcaatttgtttgcataggcacttggcatgattaatgttttttttccttctttgatgagtcgtgtgcttgtgccaagttcaaatggtgagcaacgaggagcttggtttaaaggtttgactagttaattgatgtgttcagattcctgaaaatgttatctcactcacgattaagaa

SEQ ID NO: 70901 - DNA, 240 bp, Zea mays
  Clone ID: MRT4577_164669C.1
cccacgcgtccggccactcgttcgggcaacttcaactgaatttacacatactttacaaggggatctacacaattgtgacatgatgtgtttctacaggcaatcgttgtttactcattcctcaataattctaccctcaaggtaccttgatgatttttacaattctgctttttcggaccgtaaattcaagctattcttcataggccatgctcatttacactgatacttccaaagatattcatt

SEQ ID NO: 70902 - DNA, 619 bp, Zea mays
  Clone ID: MRT4577_16466C.1
cggacgcgtgggcggacgcgtgggatgggttatgtcattttgttacattgaatgaccctatgtatggtaggttaatatatgggttatgtcattttcagactatggttttgttattttctggacatgctgggcaggtgatgatgatgtttggactgatacttgatgtctcaaaatcgagctttttaaaactgatgcccagttcatccttgacttaaatgctgtgatgtttcttattatcctctgacaggttttcttttcggagttcacttttgatacacattgttgatacagttattgataattgtcttgactatttcaggtaccaacacctgggatcgctttgagatgaggattcacaagagggtgatcgatctcgtcagtacaccagacgttgtcaagcagatcacctcaatcaccattgaaccaggtgtcgaggttgaggtgactatcagtgacgcttaatatggtagccttatcatttcaaaaggcttctagtgaacaggatattttcaattcctagtgagaacttgtgtaacagaggaatccaagtatttcatatcaaagtttaaaagtcttatcgagggttcgcgggatggatgtatcctgtttcaaaagattt

SEQ ID NO: 70903 - DNA, 486 bp, Zea mays
  Clone ID: MRT4577_164670C.1
aagcagtggtaacaacgcagagtactttttttttttttttttttttttttttttacttttttttttttttttttttttttttattattttttttgtttttttttatatgtggtgtactgtttgttgttgtttttataaaaaaaaaataattacaattaatcaatcaaaagacgaggggcgatttgaaatcttctttttccgctcttttccttattaggaggaacccatttatcaaatgaaagggttccccaaaacaaacgaacgagaaacaaaagccccacaaaggggggggggatggctgtttgttttaataaaaaaggaaggtcgttttggaaagaaaaacgaatatgcggcctgtcgccaccaaggggagcagcagaaaccttgagaaaaaacagcgtgggggaacgatgggactaaaaaaaaaaaaaccggagctgggggggtgaccccccaccccgctacccaaaacggcgagccccccaa

SEQ ID NO: 70904 - DNA, 417 bp, Zea mays
  Clone ID: MRT4577_164671C.1
gaatcgacggaccgactccactcattcgaagaccgacctaatagacgtacatgcgcctcaaacaactccactgccaacagcgggtccggcgccttaaaacgtgtaaccatgatcaaactctggaattaaacatttataacgtcgatggccaaggaccatctcgcccaagctaaatcaaaggtttgtcattaggccaacggagaatgaaactatcacttatactttacttatctgaagttcatgagatggttgataaggctcagaggtagatacacctatgacataggacgggagaccataattcctaaaagaatatgtaccatatatacaacatgcatacgtttgccataggtgcatcaagatgcgtactgagaacgctatctaaatctttgataactacactcctagcaaccacag

SEQ ID NO: 70905 - DNA, 516 bp, Zea mays
  unsure (1)..(516): unsure at all n locations
  Clone ID: MRT4577_164672C.1
ctcggccacagcacaanaagtagaaccattacaacaatagacaacatggcgaccaaatattttccctcttagctccttgctctttctacatgtgttgctaacgcgacatttctcatgctcaaactccttagctcccttttcccctaccttccatattatagcttcattgtgaaaacccactcttcaaccatatagcttcaacaagcatcgcacagcaacatacctttatgccttgtgttcaacatcaccacctatttgggcatattggtacaaaccatagccacactgacactcgtgctacctggacaacatacttgcaactttctctacttacacacaatttcttaaccaatgctcactgacctgtgtttttgacacaactatacattaccagtactctgctacttacacacacttttcctttaaccaatgccgcctgaacccgtgttattgcacacaaaactatgcctttacgagctagctgcacagtcggcttcttctgaacacacattgctg

SEQ ID NO: 70906 - DNA, 258 bp, Zea mays
  Clone ID: MRT4577_164673C.1
aacacactccttgcaagcctcgactcggtcagtccatcatatcgggacagcctgagagagtgatgtcgcgcgcgacagttgcagtcctcttctacgtcctcgcggtcactgccctcagcatggacgaggcatgagcagagtcaccgcatgcaagcagtcttgcaagtgcatgcggtcgatgtcaccattacgcaggcatgtcttataaggcctgccaaggcacccacagtctgcagcaaccataactgctaccgttaa

SEQ ID NO: 70907 - DNA, 440 bp, Zea mays
  Clone ID: MRT4577_164674C.1
gcgaaaaaaaaattatataaaataggataggatgatgtgaaaaaagaagataaggaaaaaaaaaaaaagaacaaaggggaaatgttgaaagaggaaatggataacattgtgatggattgaaatgattatagatgacttaggattgacaaacagttgttagcggttctaaggacagttttatgcacattgtgaatttaaactcttgacaggttgatgtttgattaacaggcgacaacagttaatattgagtgccttgaaatatagacaagttatggttggttaattataaggagaatggatcaaaagctgatcatttgggaactttcgtacaaatttatggaatacatttgcgaacatgatgagggcgtgacatcaatgatatgggtaggttcttcaagatacgttgcgttaagatgtattgacggtaaagtgcgcatttt

SEQ ID NO: 70908 - DNA, 623 bp, Zea mays
  Clone ID: MRT4577_164675C.1
atataatttttccaaaaaggaaaaaaaaaaaaaaaaaaaaaaaaaaaaaaaaaaaaaaaaaaaaaaaaaaaaaaaaaaaaaaaaaaaaaaaaaaaaaaaaaaaaaaaaaaaaaaaggtttggttttccggccttttcaaatcccccttttcggttccgcctcccttaagttcctccccctctcgaagccttcctggccccttaaaaaaccgggaggtggtttgcccccccttttttggggggtttacttttttaggctcaaaaaaaagggtttttgaaaggggggcctttgatcccaaatgggggttttcaaaatttcccgggttccccaaattacggccgaaatttggggaaattaaaaaattcaaaattttcaaattggcccctcaaatccggttccaggaaaaaaaaaaagtcttatgttcccggggttagggttgccgaaaaaggaaaaaaaaaaaccccttttatgggaacccagaaggtttttgagctttcttcccccaaacctaaaaaggaaagggttttggggggaaagggaaacggggggggggaaaaagaatttcttttctcaaaaaaaggttttggggttgcaatggttgataatcttgcccgccgggtttt

SEQ ID NO: 70909 - DNA, 520 bp, Zea mays
  unsure (1)..(520): unsure at all n locations
  Clone ID: MRT4577_164676C.1
nccgtccgaaaaaaaaaaaaaaaaaaaaaaaaaagagggggaaaaaaaaaaaaaaaaaaaaaaaaaaaaaaaaaaaaaaaaaaaaaaaaaaaaaaaaaaatgaaaagaaaataaaatataatataagagaaaaataaaaaaaaataaaatagaaaaaaatattggggggggcggtttttgggggtcccgtttttcttcccgggggggggggggtttttttttttttttttggggccctttgttttatttcgggggcggctttttccaatggccgttggggggaaccccgggggttccccggtttttggggcttgcccctattcccctttttgcccggtgggggttttgcgggtggggccccccgtgcccgctttcctcgccgttggcctccctttgggggctttgggtcccccccttttgttggcctttaaccccggggggttggggggtttccctctggggggccccttccttttcgggtgcccttgggccgcttttttgcgcttttttcccttttttt

SEQ ID NO: 70910 - DNA, 245 bp, Zea mays
  Clone ID: MRT4577_164677C.1
ggctcctcgccgtggagtcagcagcgccatgagcagggagcagccggcaccggcacagcggcggttcatcgccatcccctccttgtggtcctccggctgccgctcccagtccagcgtcgacgttgtcgacaccgcgcgccacgccggcaacggcaaggaagccccacccgcatagagcggtgccaggcggcgcgtcggctgggggcaagggggagtcgctggtggcgcggctcgtgcgcggtttc

SEQ ID NO: 70911 - DNA, 276 bp, Zea mays
  Clone ID: MRT4577_164678C.1
cccatgcgtgcgtgcccaaggggagccaaaaatacgagagatagggtcccgcgcgaaaccgtactagccaaagcgagacataaggaaacagcggcggacaggcagctacacaagggggcacgagaggagcaaccatacacacacaggggcacctgacttccagtaacgccgacatggagcccatgaatgactaagaaagcgagaatcccaaccataagaaacagacgcctacgtgaaacgacatacacctgagcagtagaagctcaaagaagagct

SEQ ID NO: 70912 - DNA, 352 bp, Zea mays
  unsure (1)..(352): unsure at all n locations
  Clone ID: MRT4577_164679C.1
acggccaggcagccgagcagagaaaaagagccgaagcagcaccaccaccacgngccncncnncacagcnggccggccncacggcacccggccacaagggcaagangcccgccncngncgcngncaacccggccaagaaggcangcngncnccagcnccaccancnncgccggccgnccccggcnccacncccggcncgggnccccnnccnccncncgaccccgcgccggcgccccgncagagcnncncccggcccggccccgcccaacnccnncgcnggcggggccnccgacnccgacagcgcggangacggcgccgacaaaacaacncnagggnncggccgagcaggaggg

SEQ ID NO: 70913 - DNA, 285 bp, Zea mays
  Clone ID: MRT4577_16467C.1
attcggctcgaggccaattaaggatcctccatcatctttttccaccccgctgtcaatcttcgtatggtgcgtctctgtgttcttacatagtctaccatcgagcccatagcaatgtgatccgtagttttcgtggaagccccatgagatcttttaagcgcacctgggatgctgattctgtcgtacacgaaccggacggacatgctggctttcgtgcgctggttactgaagctctacgcttcctgttctgagtgcctacgtgcatctccaatcttgaatataatgtcg

SEQ ID NO: 70914 - DNA, 268 bp, Zea mays
  Clone ID: MRT4577_164680C.1
acgcctcgcaggtaccgattccaattcgacggacgacgccacgcgtacgcttcattgacctcgacgacagctacaactgaagtgcgcgctcgatcgattacaccctgactgtagagaccgtgcagtggcagaacacacatcgaggctgagctgatcaaggagcatgctcaactttgtctgctccttgatctgcctgcagaacgtcaagtataatggtggcgcacctgtatgatcacttaagtgcgaaactatcagaggatgcacttta

SEQ ID NO: 70915 - DNA, 284 bp, Zea mays
  Clone ID: MRT4577_164681C.1
ggccgcccttttttttttttttttgggtttttttttttatttttttgttcctttgcttctcttctctttatttttttctttcccttttttagacgaagcgagattttcttttccaattggccaaaaatagggaaaaaaatgccccagttgggtaaattcttgaaacaaaatttttttaagtggcccatgtagggtttaatcgatagctttctcggggggataaggggggggttcaaaaaccctaccgttgacgagatcttgttatattaaaagaggccctggga

SEQ ID NO: 70916 - DNA, 623 bp, Zea mays
  unsure (1)..(623): unsure at all n locations
  Clone ID: MRT4577_164682C.1
gccnggcccgggcctgccgaaaaaaaaaaaaaaccgtggtcaacaggccaagctcctcacgggtcctcacccgccgccatgctcctcacctgaggtctcctcatccacgcccaggctcctcaccgcgcccacgccagcagggggcttgcgccagcagccagcgctctccggtccccacaccaccgactgcagccggtggttgttcgattgccgccccgaagctctccaccatcgccgccgtcgacgccctccacgttggctgctcctcctacaacaggttacataagaaaaggaaaaaggtagttatcggatggagtccatctcaattgatgatttccatggcattgatgatgagtctttagcaatagtagaagctcatgttcgacatgatcagccactagctgctattgactgggagtatctgagatgggaactgagccgctattactagtatgtatctgagatgtgaactcgaccactgttactagcatgtatctgagacgagaactcaaccactatctatctatctaagaaagttggagaagcttacttgccttttctcatagggagagcacatgctctatccgaaaaaatagaaaaaaaaaggctcctaaggccccgct

SEQ ID NO: 70917 - DNA, 580 bp, Zea mays
  Clone ID: MRT4577_164683C.1
gccggccgggccgggaccgccgcgacggcgccccgcactgggtcctccttcacctcgcccccctattccacgcccgcgatggcaccctgctccacttcctcgccgtccaggtgcccatcgcccccgccgccgtcgcgcgcggggcgacgtgccacacgacggggcatctgctagccgcgtgccgtgacgaggccagcagggtcgcggaggatttcccctgcgccacccacgcgggcaaggtgtttgtcgatatggacaagagaggtctggaggccgaggaaccacgtgtagctagcgatagtgagaaagagatggcaataagtacggctaacagcattgtctctgcgctgaacagctacagcaagctaactggtctagtggactgactcccgcttgcctgacatgccaattatttatgctagtgatgcttttacatcattaacaggttactcaagagaagaaatattgggctgtaactgcaaagtcttaaatgggccaggcactagcttggaggttttagaggagataaatcagcatatttgttctgagcaggcatgcacggtggatctactgagttaca

SEQ ID NO: 70918 - DNA, 744 bp, Zea mays
  Clone ID: MRT4577_164684C.1
caaagagcaaggcacagtgctatagaggtaaaacgggggagaggacgagcgaggaggacaatgggaacgagccttgcgcaggcggtgacggcgctgatgggcacgtgcgcgcggcagctgtcgcgggcggctcggcggctgcaccggcgcccgcgcgcgcggcaggcgctcgcggcgtccttgtcgtcgcgcgccatcgtgccgttcctcgagaaggccgccgggtccaagaggaggaggagacgcgaacaggatgagccgagcttcgaggcagaggaggacggggtgtggaggaaggagataatgatgggggagcgctgccagccgctggaattctccggggccatctactacgacgccgagggccgccgcctcgagcagccgccgaccccgcgctcgccgcttcgcagcccgctgccgtccatcacgctcgcggcaatcgccggcggagggcacgtactagcgcgcagctagagagcactcgatttcgctgtaaatgtacgtacatggtttttgttctctctcaatctcttgtgttggtttctctctctctggacgtcggcgtgtgctgcgagtaccatgataaaacgtctatggaaatctggcttgctgttctctacaagctggcgcggctctgaatatctgctacagtacgtacagttctccatcggatccatcatcgtcagcattagtacagtacattactccattgtgaacaggttgctgtattttgttcttgttctt

SEQ ID NO: 70919 - DNA, 1516 bp, Zea mays
  Clone ID: MRT4577_164685C.1
aaatttggcagccataggccatagcccatagcccccgctgccccccgggcgcagatcttttctgggcttctggctcccctctcccgccgatcacgccgcctcacctcgccgggcggcgtgatggcgacttccggggccgacgaccacgggcagggccagggccaggggcacggccgcttcgcgtcgtccctgacggcgcgctactcggactgggtgctggagacgctggacgagctcccagggagcttcctgctcacggaccccgccctgccgggccaccccatcgtgtacgcttcccggggcctcgccgcgctcaccggctacgcgccgcgcgacgtgctgggccgcaacgcgcgcctcttccagggcgccgccaccgaccgcgccaccgtcgccggcgtccgcgaggccgtccgcgcgcaccgcccgcaccaggctgccatcctcaactaccgccgcgacggcgccccgcactgggtcctcctccacctcgcccccctattccacgcccgcgacggcaccctgctccacttcctcgccgtccaggtgcccatcgcccccgccgccgtcgcgcgcggggcgacgtgccacacgacggggcatctgctagccgcgtgccgtgacgaggccagcagggtcgcggaggatttcccctgcgccacccacgcgggcaaggtgtttgtcgatatggacaagagaggtctggaggccgaggaaccacgtgtagctagcgatagtgagaaagatatggcaataagtacggctaacagcattgtctctgcgctgaacagctacagcaagctaactggtctagtggtgagcaggaagagatgtgactcgattggcatcccagcactcagttcgtcgttaaaactctctcttggtagaatcaaacagagctttgtattgactgactcccgcttgcctgacatgccaattatttatgctagtgatgcttttacatcattaacaggttactcaagagaagaaatattgggctgtaactgcaaagtcttaaatgggccaggcactagcttggaggttttagaggagataaatcagcatatttgttctgagcaggcatgcacggtggatctactgagttacaggaaagatggaagttcattctgcgatcatctacatgtatctcctatccgagatacttcgggcaaggttcgcttacatctttctcaggtggcctttcatatctgggttcaccttgacatgggtgcaaagcacgattttagtgggctgacccccgagaaatggctgcttggcgctgttggtgcggtgagggttgctgtgagaggcttgtcggcatcaggtagcctgttgagaccaccatcccaatagcagttttagtctcctcgccatttcatgaccacggcgaccggccttccacgatgtacattgctgcttgctattctgtgtaaagcaactgcttagcatgacaaagtaaatgagttcgttttgaaggaaaatccatggtaaatacaagatgttggtgtgattatat

SEQ ID NO: 70920 - DNA, 623 bp, Zea mays
  Clone ID: MRT4577_164686C.1
gggatctacttccgagggcagcgcatctggaacgcggtcatccggcacctcctctccattgggatggccaacgctgaccaggtgctgctcgccggctgctcctcgggcggtctggcggtgatactgcactgcgaccagctccgcgccttcttcccgtccggctccaccgtcgtcaagtgcatctccgacggcggcctctacctcgacgccgtggacgtctccgggggccgcagcctgagatcctacttcggagacattgtggccatgcaaggaatagctcagaacctgccgccggcttgcaccgcccgcctcgacgccacctcgtgcttcttcccgcagaacataatcgacggcgttaaaaccccactgttcctgctaaatgccgcatacgacttcattcagattgtgctcagcctggcgccagacagagctgacccaagcggcgcttggcgagcctgcaagtccaaccgcacggcctgcagcgcatcccagatgagtttcctgcaagtgcagatttcagggaccagatggtagcgtccgtcaaaggcttctccggttccaggagcaacggggtcttcctaagctcctgcttcgcgcactgccagtccgagcagctgggcacc

SEQ ID NO: 70921 - DNA, 816 bp, Zea mays
  Clone ID: MRT4577_164687C.1
ctgtgcggcgctcgggccggccgggtccaatatactaacgaggcgatcccttccgctcctccctgcagctactggccttcctctcccccattccaattccgagaacaggggcggtggaggaaccaggtaccatgtgctcggtagccagggtggcgtcctgtgcttgcactgtccataggcgcctcatccattacggttgcggagagcagatattttaatatgttctgctcagggccagcttgcactgctgcaaccaagggatcgacgggactgatctgcaaccagtgtaaagatgtgtcactgatgcgactagtactcatccgaggcgctcctctatctcgctcctgactgagacccagactgagattcttagcattctactccatgaatgggccattcttgccccactcaaggagcacagcgtcgcggtggatgactactacacaccccttctcttcttgaagggctccgtggtgacccctgagaacctctgtgagtcgatgcttctctgcaagaaggggatgaagattaggctacccatccgtgagggcacttgtgctttgtgccaccatgttgaatgatgagattcttatcatgcttaaagaccccagcgtgcagctggaatgaatcgacctactctccacaagatgctgcaaggcgcagagctatgaacagcatggctagcggctggccctctagtatattccactgattctggtgaaggttctgaaattccttgagacaacggatgactgctctgagatacatgcatgcgaagctggtgcgctagcttcaatggaagccatgcctctgtct

SEQ ID NO: 70922 - DNA, 1571 bp, Zea mays
  Clone ID: MRT4577_164688C.1
aaaaaaaagtacgttacatcgtctatgctaccatttgaaattcgaaaccacatattagtaaggactcccgctttttatcttggcccttgcttaaacttgtacacatgattcatgtcgttcctattttaatttacattattattacacatatgcacacacacacagggaggtgcgtggtgcaacagcgccaagacatgccggctcaccaggagctccggccgtggctcgtcggaccacatggccaaagagatccccttcaccggcatcatgagcagcagccgtaccgtgaatcctgatttctacatctggaaccgggtcaaggttcgctactgtgacggtggatcttttgccggcgaggccttcgacaaggacactgggatctacttccgagggcagcgcatctggaacgcggtcatccggcacctcctctccattgggatggccaatgctgaccaggtgctgctcgccggctgctcctcgggcggtctggcggtgatactgcactgcgaccagctccgcgccttcttcccgtccggctccaccgtcgtcaagtgcatctccgacggcggcctctacctcgacgcgtgcgtacccctgtgcgctgtgctttgaaccttccttccttccgtgctcgctccgcgtgggcatgcaatgcaactgaactgacaacaggatctttgccaccatgacggacggcactgtcgcatcgcatgcagcgtggacgtctccgggggccgcagcctgagatcctacttccaagacatcgtggccatgcaaggaatagcacagaacctgccgccggcttgcaccgcccgcctcgacgccacctcggtgatctcctatttcacttcacacacagtcgttgtcaattaattgggctagtcggtgatcttctgatgaagtggtgattgtgggcgtgcagtgcttcttcccgcagaacataatcgacggcgttaaaactccactgttcctgctaaatgccgcatacgacttcattcagattgtgctcagcctggcgccagacagagctgacccaagcggcgcttggcgagcctgcaagtccaaccgcacggcctgcagcgcatcccagatgagtttcctgcaagtgcagatttcagggaccagatggtagcgtccgtcaaaggcttctccggttccaggagcaacggggtcttcctaagctcctgcttcgcgcactgccagtccgagcagctgggcacctggaacaccaaaccaggtggctcccccaccattcaaaacaaggggatttcaaaatccgttggcgactggtactttgatcgagctgaggtgaaggcggtcgactgccgctatccctgcgacaacacttgccaccacattatatgagaggatccacgtttttttattattttatgcatagggaagaacattcgctctctcaacgaagtgtacatcgtatttgattttgggaatgcaattggatacagccatcaaatgaacacaacacgcgaaaataaatggtaatggcgtgttccagtaagacaattgagtgattcaacagctgtgttagcattgaaaaaaaaaaaaaaaaa

SEQ ID NO: 70923 - DNA, 227 bp, Zea mays
  Clone ID: MRT4577_164689C.1
ctcacacttactcactcttacttctttttttactcatacacaatagtacatccggcggactacttatactttcaaatctgcccttattcactcttatcccatatacaaatacattcagatcaatactcaaaccataatctatatatgcattagcttactctaaacattgcaaaacatcttactacaaatatttacacattgaaattaaaaccttaactcaacctatt

SEQ ID NO: 70924 - DNA, 1207 bp, Zea mays
  unsure (1)..(1207): unsure at all n locations
  Clone ID: MRT4577_16468C.1
cattgggacctcgaggccggccgggaaaaaacgcgacacatcgcgtcgcgattcgcgagggctccccccaaccccatcaagtctggccaggtctctcccatatcgggttctcccttcctcttcctgtttccgcgcgcgagatcgccgccccgggtgggctctagatcccgatggcctcgcgccgccgcaccctgctcaaggtcatcatcctcggcgacagcggggttgggaagacgtctttgatgaaccaatatgtgaacaagaagttcagcaaccagtacaaggctacgattggggcggatttcctcaccaaggaggtgcagttcgaggacaggctcttcactctgcaaatatgggacactgctggtcaggaaaggtttcagagtcttggcgttgcattctaccggggagcagattgttgtgtcctagtctatgatgttaattctatgaaatcgtttgataatcttcacaactggcgtgaagagtttctaattcaggcgagcccatcagatcctgacaatttcccttttgttctgttgggtaacaaagttgatgtagatggtgggaacagccgtgtggtgtcggagaaaaaggcaaaggcatggtgcgcctctaaagggaacatcccgtactttgagacgtctgctaaggatggaacgaacgtggaagatgccttccagtgtattgtaaagaatgctctgaagaatgaaccggaggaagaattgtatgtgccagataccgtggatgtggtaggtggcaaccgggctcagagatcatctggctgctgttaagacatgaggcatccacgaggcgtggtgatcatcatcggctatgcagtgaccaaacaatacctccttaacattgctgggcctccatggttatctacgtgtccgtattccatttgttacctttccagtctcctgctatgtacccaagggcgcatttcccatgctgtcagtcaatccgtagacttcatttgtgcagttccatcagtagcgtcataccttgtgaatacagttggacaaaataagagcaagcctgaactgaagttcgtctctgtgtgggatgggggtcgccttttcctcgctttctgcttcaatgcgagttgccacacccgtgctggctagaaatgccgtcccttctggaaagcgacacccagttggcaccataaattcaatgcaagacgtcttnaaaatcagttgccatt

SEQ ID NO: 70925 - DNA, 220 bp, Zea mays
  Clone ID: MRT4577_164690C.1
catagtcgcgttgactcacgaactcagaaagagacaacatggtgcagctgactgatgctgagcaggctgctgttaatagcctgtgcggaaacgtgaaccctgatgatgatggtggccaggacctgggtagactgctggttgtctacgcgaggactcagaggtactttggtagctttggggacctgtcgtaagcctctgctatcatgggtactctacggtg

SEQ ID NO: 70926 - DNA, 315 bp, Zea mays
  Clone ID: MRT4577_164691C.1
ttgtgttagggaggaaacatctaccaccaggggggccacctggagcccgacgcccggatcaacatacgccgcaccatcctgctgaacgctatatagggaggcgccactcgctccgagtaagcacgagaggtgaacggaacgccctttgtcacgctccaggacaggtactcggactggaaggcgtacctgggcgaggacgccgaccgggaccatgctgaatacaacccgcacgagccgaacgggcgggggctgaaggggctaccctgaaccaagagcctgatgatagtgtcgggactggacctcacctgcgagcgg

SEQ ID NO: 70927 - DNA, 416 bp, Zea mays
  Clone ID: MRT4577_164692C.1
atctaaaagcacaaattatccatcccacaaagagtaagaaacattggttcttgataagaaagaaagaagaggaagaagatagtcatgattcatgaagaatattaaaaagcaagtcatcaacaacacttgaaaacggcaataaacataaggaagaaaaaactggttgcttgctgcttttgattcttctctctgaagaacaatcattcaaaagcccattggttctctttgggaacctcttcctcttcctctggggggaagacgttcttaatgttgaacggtgtgcggatctcttctggagactttcctttgatcatatccgcaactgtctgacatgttagatcaagcaaggtcttgatattcaggtgattagcagccagaatgagttcaaagagagtagcttgatcgatcttcataaa

SEQ ID NO: 70928 - DNA, 619 bp, Zea mays
  Clone ID: MRT4577_164693C.1
caccaccacccacatgagcagcctcgacaggccgcgcccttttccggcgagggagacccggcccgggcttgaccattcgtcgagcaggtaacgtgcaaggggccaatcgcttctccgcagggggcatcggcgggcagccggagtcgcccgtcgccgaggccaggtggttctgtaggtccaaaccagctgctgcaagtccactcccagtcaccaagttcgccatctccatttggcgctcccaccctgcctccagtcctgccgccagctgaagcatccacacctcccgcaggggtagatgatgggctagagcacggcgtggcggcaaagagaagcaggcgctgttgctgaggggtcggggggcggatatgagcacgtcgtctatctcaccggcaccgccgtcgccgctcataggcagcgctgcctccatccagtttctctcagcaagccttttaattaatttcattcatccaatccataaacaactattgagccacagccagtgaaaactcggagtagtacttatggtggatcatttggtatgcccatcagggatgatcggatagatgaccagaaacagaagtagcagcagttggcgatataaatcaattatgcacaatgt

SEQ ID NO: 70929 - DNA, 610 bp, Zea mays
  Clone ID: MRT4577_164694C.1
tggggcccccgatgcattttatgcagcgttacatcgttcatttgtttccggagaatgtgcctccttacaggcttggtgttttccaggtaagggcagagtttctctccgccgatggcaaagtgatctcaacttcaagtcaaccatgcatgctcaagttcaaaagcgtacacatgcacttcatcgagacttttctccagagcgtctctcttctgtccggctactcatcggaatctcaggttattagactgaagatgaggggtatcacccaaggtctggaaccaacaactgcggtgaggataatcctggagcaaagagcagagtttggtcgcggtgcaggcattccagagatatatgttgcatcactaaagctcgagggcgaacttcctctcgtcagaagattgctctggaactggaggtggaccttttttgtctggagcagcacggggttgtttgtttctgaattgctgttcgcgcttgtgtgctgtagaccctgtatatttcccaggagtggacataatgttgctgctccttaagaccttgggctggctaacctcatgtaacgtattgtacaatttccgaaataaataaaaaaaggcggcatttggtgggt

SEQ ID NO: 70930 - DNA, 376 bp, Zea mays
  unsure (1)..(376): unsure at all n locations
  Clone ID: MRT4577_164695C.1
ggcaccgaccacgagacgaacagacctctatatctagcagaggcccgcgccgccggggccgaccgcgacgaggaaggaagcaggagggggaggccaacaggnaagcccgaccccgggcgcggaggaggcaagcgcaccaggacgcgggcgagggagaacaaccagaggacacgcaacccgngcacgggcagagcaaacacccagggcggggggggggggggcncactttttttttacatgaccannnntntgaggacacgaagcccctaggacacatnatgaggccccccctgaagaaaaccgccctggagcatatagtgccctgaatgcacgaggacgaattcatgcatacctgaacaacttcttagacgaggtg

SEQ ID NO: 70931 - DNA, 1399 bp, Zea mays
  Clone ID: MRT4577_164696C.1
aattcggcacgagggatcgatcgaacgatctatcagaagttcagaatctatctctctgctcctggttcaccattgcgcaaattggagcaagatgggaaggctagccctggctgtgccggtgatgcttctgctgctttgcacgacgtgcagactgacgctcggaattacagacggtctgctcccgaacggcaacttcgagcggagcccgctgccgtcgcagctgcgggggacccgggtggtgggcgcgtcggcgatcccgtcgtggcagacgtcggggttcgtggagtacatctcgtcggggcagaagcagggtgacatggtgctggtggtgcccgagggcgcctacgccgtgcggctcgggaacgaggcgtccatccggcagcggctccggggcgccgcccgcggcgcgcgctactcgctcacgttcagcgcggcgcggacgtgcgcgcaggcggagcagctgaacgtttctgcgtcggggcagtcgggcctgctggccatgcagaccatgtacagcagcaacgggtgggactcgtacgcctgggcctgggtcgccaacgccgacgaggtcgacatcgtcatccacaaccccggcgtcaccgaggaccccgcctgcggcccgctcatcgattccgtcgccatcaagacgctcaacccgcctcgtcgcaccaacaagaacttggtcaagaatggtgacttcgaggagggcccgtacatcatcccggggaccaagtggggcgtgctgatcccatcgcgcgtggtggaggaccattcgccgcttccggggtggatggtggagtcgctcaaggccatcaagtacatcgacggcgagagcttcgccgtgccgcggggtcggcgcgccgtggagctgctggccgggagggagagcgcgatcgcgcaggtcatccgcaccgtgccggggcgacagtacgtgctgtccttcaccatcggcgacgccagtaacgcctgccgcggctcgctcatggtggaggcatacgcgggccgggagtccaccaaggtggcgtacgagtcggcggggaagggcggcgtgaagcgcgccgtgctgccgttccgcgccgcgtcggcgcgcaccaggctcgtcttcttcagctccttctacagcaccaggagcgacgacctcagctcgctatgcgggccagtgcttgatgacgtcgtcgtcgtcagcgtgcgcacgaagcgcggctagagaagcgtgctctgtggagttggggcgtgccctgtgcgtgcgaaacggaggaatttttcatgctgctgtcatcgcacgggtactttactaccgtgtttgtaggtgctcgttgggggcatcagaaaattgctccaaccatcggaaatttgttgtgttagattattgacagtctgtttggttaaaatccgaggg

SEQ ID NO: 70932 - DNA, 748 bp, Zea mays
  Clone ID: MRT4577_164697C.1
aacgatctatcagaagttcagaatctatctctctgctcctggttcaccattgcgcaaattggagcaagatgggaaggctagccctggctgtgccggtgatgcttctgctgctttgcacgacgtgcagactgacgctcggaattacagacggtaacgtggttgatcttgattcgctgtcgttgttcgcatgcgatccttggtgtttgccgctggatgaagcttcttggcgcgatgtgtgattggttttctgccacggcgcgcgcgcgcgcgtgaatgcaatgcaggtctgctcccgaacggcaacttcgagcggagcccgctgccgtcgcagctgcgggggacccgggtggtgggcgcgtcggcgatcccgtcgtggcagacgtcggggttcgtggagtacatctcgtcggggcagaagcagggtgacatggtgctggtggtgcccgagggcgcctacgccgtgcggctcgggaacgaggcgtccatccggcagcggctccggggcgccgcccgcggcgcgcgctactcgctcacgttcagcgcggcgcggacgtgcgcgcaggcggagcagctgaacgtttctgcgtcggggcagtcgggcctgctggccatgcagaccatgtacagcagcaacgggtgggactcgtacgcctgggcctgggtcgccaacgccgacgaggtcgacatcgtcatccacaaccccggcgtcaccgaggaccccgcctgcggcccgctcatcgattccgtc

SEQ ID NO: 70933 - DNA, 345 bp, Zea mays
  unsure (1)..(345): unsure at all n locations
  Clone ID: MRT4577_164698C.1
ccacgcgtccggcgaatcacagacgcgtctatctcagcttgctgcgctgcactaccctgccctgccatcatatcgacgggagccccgcccaaccaaaaccaaggaaaggcatggctgcttcgaagctcgcgacgctggcgcttggccggcttctggccgggaacgcggtgggttcccccgccgcggtgcgcgcggcgatgtcctntttccaccgtgcacaacactcatagcccgcctctccctcgtgcacataggggggggcctttcccccccaaccgtgctgtgggggcatccgcagcctgctgcagcaggccaacaacacccccgaccgccgcaccatatgcg

SEQ ID NO: 70934 - DNA, 246 bp, Zea mays
  Clone ID: MRT4577_164699C.1
tggggcgccccgggctctgcgggggggtttttttagatgcctgtgcttttcccccccggcgcccgatttaagatgggtgctaacatggataaggtcctgtctccgtcgtttaatcccgccaagttccggtggtggcaagctgaagatgaagaattggagcttgggaaagcttaaaggagaaggtgaacaacgcggtgcttgtttgaccaggctacctactactagctgctttttgaggtgcccaag

SEQ ID NO: 70935 - DNA, 441 bp, Zea mays
  Clone ID: MRT4577_16469C.1
gggggagccacgcgtccgaaaaaaaaaaaaaaaaaaaaaaaaaaaaaaaaaaaaaaaataaaaaaaaaaaaaaaaaaccggcaaccgcacaattattaaaatagcctacaccttccttcctcccactttccactttctttactattccaaaacttacataatctatagcgccacctaactcaatttccattcccaaaattttccaattcccaaccttattaaactctaacaacacccaacttattcccctttccaacaatatccctatccccatctcacttattactcctaaatattcaccaccaattacctttccaaaaatactcccccccttacacctaattaataccctctcttttactggttattacccccactttccattttttttttttacctttttaaccccccccacttcccatccctttaaccctttctttt

SEQ ID NO: 70936 - DNA, 1737 bp, Zea mays
  Clone ID: MRT4577_1646C.1
attgggtacctcgaggccggccgggagaccttcctgcccgactcggagggcgccatcgacggccacctccgcgaggtggggctgacgttccacctgctcaaggacgtgcccgggctcatctccaagaacatcgagcgcgcgctggaggacgcgttcgagccgctcggcatctccgactggaactccatcttctgggtggcgcaccccggcgggcccgccatcctggaccaggtggaggccagggtcgggctggacaaggccaggatgcgcgccacccgccacgtcctctccgagtacggcaacatgtccagcgcctgcgtgctcttcatcctggacgagatgcgcaagcgctccgccgaggacggccaggccaccaccggcgaggggctcgactggggcgtcctcttcggcttcggcccgggcctcaccgtcgagaccgtcgtgctccacagcgtccccatcaccaccggagcgcccaccgccgcctgagtcgtccatctatcctcgcgatcgctccagacatgaacgacccgacctacgaataatgtatctgcgtaattaatttctatctgtgttgtgtcctagtagctgttaagtaccgttttaaaaacccttaattaattttattaaaaaaaaaaaaaaaaaaaaactgccactccactcctaccccacacagaagcggcggcggcggagcaaacgcaggcgaaggcgagggtgtgagggaaggagcaccagccatggtgcacgtcaacttctaccgcaactatggtaagacgttcaagaaaccaaggcgtccttatgagaaggagcgtcttgatgctgaactgaagctggttggtgagtatgggctgaggtgcaagcgtgagctttggagggtccagtatgcactgagcaggatccgtaatgctgcaaggcacttgctcacccttgacgagaagaacccccgtcgtatctttgagggtgaggcgcttcttcgccgcatgaaccgctatgggctgcttgctgagggtcagaacaagcttgattatgttcttgccctcaccgctgagaacttcctcgcaaggcggcttcaaacacttgtcttcaaggctggcatggccaagtccattcaccatgctcgtgtcttgatcaagcagcgtcacatcagggttggcaggcaaattgtcaacgtcccatcattcatgggggagggtggagtctgagaagcacattgacttttcactgtcaagcccattcggtggaggccccgcaggaagggtgaagagaaagaatcagaagaaggcaagcggtggcggcgatgctggcgatgaggatgaggagtgaggatggacaagtagcgttacccaatataataatattatctagttttcttgaacttgttcgaatgatgagtgcttagctgtgtgatctgacgcagagttccctgtgctgactctgtgtcatggatggtccattttatcttgtggtattatcagcctttacataactgctatgtttggatatgttcaattctgttgcaattttatgtggttgttttttgcgttttgttgctattaaaaaaaacaaaaaaggcgcctctgttctttcaatcggctaatggtttgcttaaatgttatttaaaatctgcttcaccctgttgtactgtttggggatatgatcctttttaattttttttagtttttttttttttgttaatttagtgtggtttctctcttttatatatcttttatttttgta

SEQ ID NO: 70937 - DNA, 660 bp, Zea mays
  Clone ID: MRT4577_164700C.1
tggacgaccactcgccgctgcccgggtggatggtggagtcgctcaaggccatcaagtacatcgacagcgacagcttcgcggtgccgcggggccggcgcgccgtggagctgctggccgggagggagagcgccatcgcgcaggtgatccgcaccgtgccggggcggcagtacgcgctgtccttcaccgtcggcgacgccagcaacgcctgccgtgggtcgctcatggtggaggcatacgccggccgggagtccaccaaggtggcgtacgagtcggcggggaagggcggcgtcaagcgcgccgtgctgccgttccgcgccgcgtccgcgcgcaccaggctcgtcttcttcagctccttctacagcaccaggagcgacgacctcagctcgctctgcgggccagtgctcgacgacgtcgccgtcgtcagcgtgcgcactaccaagcgcggctagagagcaaaagtccggtggtcggtggagctcggccgggcgtgcgagagggagacggagtaactattttcttgatgttgttaccgcacggttgctttgccgtgattgtatgtagctgctcgttgtcgttgggggcatcagaaaatttgttcgaaccatggggaaactggcgtgtcagatagtactagtatatggtttctacatttccactact

SEQ ID NO: 70938 - DNA, 325 bp, Zea mays
  Clone ID: MRT4577_164701C.1
atcttataatggcaacgactatagggcagaggtgtttatttagatacatcttacctgcacctaactatttgaattacatattattggaacggtttcatctttatgtctttgggtgtatacgtaaatgttggagccatattctgtcatgagctacaaacattcacggaggaactattgggtgaccaagaaagctactctttttactcaaacaactcttgccccttttgcctctaagcttatggatcaagccttatttttctttacggagagcgttaacatgaaaaaaatatggctctacctcattcttgatgggatgctggaattt

SEQ ID NO: 70939 - DNA, 251 bp, Zea mays
  unsure (1)..(251): unsure at all n locations
  Clone ID: MRT4577_164702C.1
gggggagaaaccccaaccaaaaaaatggatattnttctaagaaaccccccccccggggggggggccccacttggcgggccccccccaaagggaaccaaaaaaaaggccccccccaccaggggttgcggcaaggcagggttcaaggaaaacaggtggttgaaaggaaaaaaatgttgtggccgaagaaagggaaaaaggtttccccaacccacctggttgaacaaagggagcccaaagtgccccccggcccc

SEQ ID NO: 70940 - DNA, 591 bp, Zea mays
  Clone ID: MRT4577_164703C.1
cgggttcccccctcgagtttttttttttttttttttttttttttttttttttttttttttttttttttttttggcggggggaaggagagtttttttattacattatgacatcaaaaatcacggggcacacccccacacgtccacaaatatatatttgcaaccttttccccctaaaaagccaaatccagttttgagttcgacaatccataaacaacgccacacttgggacgttaagttgttttttttgggaaaaagccccccgaggccgccgaggttgaacccccccccgttgccgttgttgtcgcccccggaagcctttttgccgccggtcgttttggggcgggaggggggggccggcgcggggccaaccttgttgaggagggggtccgtctccaccagctggtcctttttgaaaataaaaccaaaaatggtttccccgaggccctttttttttttggggggggcggggccgcccctgttgggaggggggggaacaaccagaaaggaccggggcgccggccgggtcttccctgaggggggcgccacggccgccgttacggtgctgccgaaccccaaaaagccaagctaaaa

SEQ ID NO: 70941 - DNA, 1511 bp, Zea mays
  Clone ID: MRT4577_164704C.1
ggctctccgcacatggatcagccgactgcaggccgagcctttcttcctcccgtcgtgcttttcctgtccaggtgccatccccagccgctcctctctccagtgtcatgccatctgaactctgcgtactgctgccctgaggatactgccttcgtcgcgccctttcgcgccatggcgctcggccatctcttctccagtcgtgccatgggagccactcctccccgccaggaccgcgcgagccccttctcggcgcctgcctccgttctcgctcaagccgagctcggcatcttctctagcagcgcgcggcgagcttcctgtcgggcagggagatgactttcagcgggccaaaaatgcagaaatccacgatacatttgctgcacctgcacgttgtaaaaggggatctgctgctatacgtatccaaggaagaagaagaccaccccctctctatgacaggaccgagagatggtgatcgtgcaagtgatgtggtgccaaccacaaggtacagtcggtggatgaccccaggaaggatggacttaaccagtggatgctcgccaagcgaatacctcccccagcaaacactacctaagtgttaaattaaaggcaagccccggttttatgcataaccgttatatatatgctattttactacacttaatgtttgtaggcttgtaccgtgcacttaagtgtaggagttggttgaaaccctagttgcatgaactcaggattcctttttgagatggatactagtatgctaggtcgagtagctgctatgctaaatcaggatctcggtagaagtcgagtgatttttctagcactcgcgcgaggtcaggaattggttgtatccattttgataacagaatgatgatggtctgtggacacggatccatgtggatgtgttgtctatgagacgaaattggaataaggattaacgtgcagatacctgtgtcaagcatttgaacgtactgagcacatgccgagaaatatggtaaatcggtaagcctagtacctgagtgaacctgcccgcagactttacccctcacgcgacctgagacgaggtctcccattccggttatggtgggtacaagtgcggccactgcacgacggccagtcggggtcagtggggcattgtacgccaaggcggtgagccctgatctgttgccagggaatcgatggggacagttgatgtgtgtggggacggagtgcctcgccacgtcgtgtgtttaggtttaccttgcaaggataaaaactcgattcgaatcgtctgcttctcgcagccaatgagactgcttgatccattgtactgcattgagtaacaagtgaaaatgtgatgacttggcaaaagttgttgattgctaaatgtttgatatcatgtatgactagataggtgcacatttagtgttaagagagtcacactaaaaattgaaaaagctaaaacttgattttagacttcagctagtgcttttggcaaaactggaccctctcagccaaacagctgcatgtctagagtcgacgtg

SEQ ID NO: 70942 - DNA, 358 bp, Zea mays
  unsure (1)..(358): unsure at all n locations
  Clone ID: MRT4577_164705C.1
gccngacaggaaggangaacgagcgagganngaggcccnggggggaaaggncanccaagggganggcnaccgggncnccggnanacccgcnangncaagaacgannggggaccggnancngaagccgnncgngannccaaaaccagaggncacggnggnncccagggcgaaagaagacgacngncncanccncgcaagcgaagggcngngggaagnggngacgaacgaagaggcgngcagagcngcgcgccggcaaaaccaagngnggcacaagaacaacggngccgcnggcgcaacgnggncgnngngcgacgagggngaaggaaccaccaccgaccccgcngcccaagccgcagcg

SEQ ID NO: 70943 - DNA, 423 bp, Zea mays
  unsure (1)..(423): unsure at all n locations
  Clone ID: MRT4577_164706C.1
ctggccgggaggcggagctcncacgatgcaatgtacgacatgtgccgcgtcgcgtggccagccacatccaggggtggtggggcgggggtcgccacccccgcgccgtgctcctcctccgggtccgggcgcgccagggtgangggtatccgggacgcgcccgtgttcgccgcgcctgccaccggggtgggcatgggccccaccgtgnagcgcgtgaanagcggggtccagaggtggaagaccgaggggtatgacaagaggcgcggagcggtgcnagcctctcaagtgcgggcagagccccaggggcatggggtgtcggctgcgccgactcccgcgtgtgcgcgggggtgacactgggcctgcgncgccgggaggcgttcaccgtgcggaggtgggctccatgggcccaccctacgacaagatcaa

SEQ ID NO: 70944 - DNA, 298 bp, Zea mays
  Clone ID: MRT4577_164707C.1
cttggaggcaggcatgattgtcactgatgagcccgggtactatgaagatggggcttttggaattcgcattgagaatgttgtccttgtggttcctgtgaagaccaagtataattttaataaccggggaagcctgacctttgaacctctaacattggttccaattcagacaaaattgttagatgtggattctcttacagacaaagagtgcgactggctcaacaattaccacctgacctgcagggatgtgattgggaaggaattgcagaaacagggccgccagaagctctcgagtggctca

SEQ ID NO: 70945 - DNA, 651 bp, Zea mays
  unsure (1)..(651): unsure at all n locations
  Clone ID: MRT4577_164708C.1
ccggccgggaacccccannctcccatcgcaacacccatcatgccgcccaaagcacccctcaactggggcttgctccccccatcctttctccttccgtcatcgagtcgggccatcctccctcacatcacaagcaatgcttccaggataccaatcttcagcaaccaccatccaatgccgcaccataaaatcaacgaatactcctcgcgcctcccgcttcgcctataggggaccctccaatgcgccacttcagtcgaccactgccgcagcgcttgctcggcgggaacactccactcctttacgaacggggctattcgcgacaaaacgcggcatgactgctgtcttcgaccccgaaaccgggaagcgtacaccctgcactgtactgcaagtcgaccggaatgaagttattgcgcacaagacgcggccagaaaacggatactgggccgtgcagatcggcgcggggagcaaagacgagaagaacgttacgaggccgatgctggggcactttgcaactgcgggactcagcccgaagagatgggttggcgagtttaaggtcaaagggaaggagggtttaagtgtcagaattgggcagggtatcggtgcgagttggtttgagaagggtgcgtttgtggatgttaggggggttagtagggg

SEQ ID NO: 70946 - DNA, 357 bp, Zea mays
  Clone ID: MRT4577_164709C.1
cgaaagccggcacgggtaaaaaaaaaaaaaaaaaaaaaaaaaccacacacatgagtcggcatcttcgaataacacaggtagagcagcgacgatgaggatcccttcgctaataacatacatggtacgtaggacgcacgtccttcgacggtgctctcacgaccgtaagatatctcgcctgaacacctgaaacatgcagccacctgcacagaatctttcggctggtactctacagagacttcaacaccacatttgtcccaccatgataacctagacaaccggtatctgtctgtgcatgatgtccattaccttgttgcgaccgtactgtctgcagaactccatatagctgatcgcccactg

SEQ ID NO: 70947 - DNA, 2458 bp, Zea mays
  unsure (1)..(2458): unsure at all n locations
  Clone ID: MRT4577_16470C.1
cctgaaatcagagaacatacttctgggagaagatatgtcagtcaaagtcgcagatttcgggatttcatgcttggaatcacagtgtggaagtggaaggggttacaggaacctaaggggatggctcggaatataaaagacatatactagaaggnnnnnnnnnnnnnnnnnnnnnnnnnnnnnnnnnnnnnnnnnnnnnnnnnnnnnnnnnnnnnnnnnnnnnnnnnnnnnnnnnnnnnnnnnnnnnnnnnnnnnnnnnnnnnnnnnnnnnnnnnnnnnnnnnngnnnnnnnggggntnnncccngagtcgggccccgggcctcggaacctccctttgggtgngngttctacaacagtattgatgagcttttcttgtgggccgggtacctcgaggccggccgggataatcgtcccagagacccagactcccccgctcccaatcccaccaccacccaccttcttgcaattgcagccgccagccggtagtggcagtacggcaatttcagcctcagctgaaggtcactgtctctcttccatctttttctctctcaacaaaactccctgaattgcaaactccaccaaaacaaactccaagcccatccatcaccagtcctctgtcccctccccgaccgcaacgatctgctttgcatcttccccttcctccaattccagtcccatgcgtaatcgtctttcggaattgaatctctccatgtcatggcgctctgagcaagtacagctgcagtcagtgagagaaatgtaggcaccacaaatcagtccagcaaatccctgctcgtgctctaccaaaaaatccagtctttttccagcccaaatccgcctcttccgctgctgccataaagtccggactttacgaggctttcacgacgtgcgagatttctgttatcgatctccacgaacccgatagcctgccataaagtctgcacagacgcttcgcattgcttcaaccaaagatccatccaaactctgcaccccagaaagctagtacgatctcggggggacatgaagcgcctgcagtgcttcaagcagagcagcggcggcggcaatggtggcgggccggggaagcgcctggagcggcggctgtcgctgggcgagtacaagaaggcagtgtcgtggtccaagtacctcgtagcgccgccgggcgctaggatccggagcggcggcgaggagctgtggagcgccgacctgtccaagctggagatccggggcaagtttgcgtcaggccggcacagccgcgtctactccggcaggtacaccggccgcgaggtggccatcaagatggtcagtcagccggaggaggacgccgcgctcgccgctgagctagagcgccagttcgcctccgaggtcgcgctcctacttcgcctccaccacccaaacatcatctcgtttgttgcagcatgcaagaaaccaccagtattctgcatcatcactgagttcatggcagggggctcccttaggaagtatctacatcagcaggagcctcactcagttcccctcaacctagtgctgaaattagctctagatatcgctcgcggaatgagctacctacactcccagggtatactccatagagacctgaaatcagagaacatacttctgggagaagatatgtcagtcaaagtcgcagatttcgggatttcatgcttggaatcacagtgtggaagtggcaaggggtttacaggaacctacaggtggatggctccggagatgatcaaagaggaacatcatactaggaaagtggacgtgtacagctttggaatcgtcatgtgggagatcttgactgctttggtcccgttcagcgacatgactccagagcaggctgctgttgctgttgccctgaagaatgcaaggccgccactgcctgcttcatgccctgtggcaataagccacctgatcatgcagtgctgggcgaccaaccctgacaaaagacctcagtttgatgacatcgtggcgatcctcgagagctacaaggaagcccttgatgaggacccgtcgttcttcttgtcgtatataccacctccaccggaccacggccaccaccaccatcatcagagccttctccggtgcttccctcgctccatgcgaaggtctgcatctctgaaagtatgatcaggccgggatgttgcctctgctcatcgatgctgtgtacaatatgcaccccctttcgactttctttgttttctatgcgcgcgtcggccctctattatgcggcattagcatgctatatgagctagtttatgctctcattttctccttgttggttaattatttccgtcattgatgccttgagtaatgtagagatgacaggcaggcatgcagcttccggttattatctatggatgccatttgcttttggtgatgggaaacatgaaagagccccagtaaatgtaatataattaagctctccattcaaataaaaaaaaaactcgagagtacttctagacg

SEQ ID NO: 70948 - DNA, 562 bp, Zea mays
  Clone ID: MRT4577_164710C.1
aatccaattaaagagtgatgaagcttcttgggcaacctcctgctcacctatctcccgctgctgcccactgaccggctcgcccgagtgttcaagtaccccataggtgacgataataggccaacatacatgcagacccttccttcccagaacatcatcctctggaatgagagctgcataacccactatcacgaagtattactgagccttgactttgcataccttatgccgaactcactgcgagtgacataccctgtcattcctcttgttgttgcggagacactacgcatgaccacctcttcctttatggatacaattgcatcatattatccactggaataggaatgtaaacgtgagcgctttgtcaactctcactgggaaagaggtccctatcgacctcgaactccctgtctcgattgccttaatcaaggatcgtggcgaacataaagaaagcttgcctcccgcggagcacagggtcatctatgctgccaatcaccttgctgatgaccataccgcacaggactacaacatcgaggagtgtatctggcctccatcttgaccttgc

SEQ ID NO: 70949 - DNA, 375 bp, Zea mays
  Clone ID: MRT4577_164711C.1
ggcatcggacgccgcccggtttccttgagagctcgtgggacttcgcgcagtcgctgggggacacgtacgagctcgtcgccgtggcgcggaggctcgagtccgtcctcgacgtcgccggccacgacgccgccgccgccgcgccgcaggagggcggcgcgcggggagcggggacgcggcgcagggagagcgcccgcagcctgaggaacctgttgcttcgctccacgtcaaggaggttccaggaaccaagcagctagcgtgctctcacctctcagtcactgtatatggctaaatgttatcatgagatttaagagaaaaaaaacttcgcagttcacaaggttattttttttctttctcccacacctaaatttctaaacc

SEQ ID NO: 70950 - DNA, 599 bp, Zea mays
  unsure (1)..(599): unsure at all n locations
  Clone ID: MRT4577_164712C.1
tttgaggagatgtatgttatttttgaagcaatgaaagggagaaatttggagcktgttttaagttgggttgcaaaaaaccatgatgrgttgttgcagaatgggtttatgytggagttcaagttttwtsagtttgagtttgttgaaatattgtcaaaaagggagtaggggtgaggcaaaagwtgaggtttttttatatgttagaattaatttggtnttttttgcagcggtgaacaaggaagaattcmagaagttaatggtttgctttttatgggttggcsggwtggataaatcccwatattttgagttaatgtaatcggvgwattgggagaagttagttgaggrgttmacccataaattttgtagctttttgggcaagtsgagggagagccagttgagtgttgaagtgtcagttggttttmaaggattacaaattttgttgaaagtgargmaagtmatggttgrgaagaagaaggagtggaaagttatgaagcagtttcttgtcmcaatagaaatggggcaagaattcaagtataattctgtttttgtgtgccgggtgttaagggagmagtcaagtgaggagaatccmccaatggggatgc

SEQ ID NO: 70951 - DNA, 355 bp, Zea mays
  Clone ID: MRT4577_164713C.1
tatagttggagctgctgcgcgtgccggtccgggatcgatatccgggtcgacgtgctcacgcttactgttggcggcgcttctgttttcgttcgggtgcaggcaaatgacattggtgttgctgtgaatcctgcatccacctaactgccagatacagtacagcgtaccttttggtctaactccgccatccagtatccctaaaaaaacaagaggccaccataatgcgcctgagagaatatacaggaggtggcaagctcaaacccagacccaactagggaggcgatactgaaaggcgattttacctcactggtgaagcagcactattcgctcttcgaagcagcatgggacgctctatttg

SEQ ID NO: 70952 - DNA, 718 bp, Zea mays
  Clone ID: MRT4577_164714C.1
tcggagcctcaagctgtgctcgaattggctacacacgtgcacgaatctgaagaagccaaattgcttggcattcaattatgagcgcacctttcattatggagtttttctcaacacaacttgaagaagtatatccatatgtcgatattgtattctgcaatgattcagaagctcgtatgtatgctatgatgaaagaatggtccatggatttaacagtcgaacaaatagctggtcgtttggccaataatgatcgacgaaatctagatcgtcctcgcattgtaattgtaactcaagatttaaaccctgttttaatgaccagaagcaaaacacccgagttaaaaggacctgaaaattggagttcaatcgaatttcctgttcaaaaactagaaaaagaagaaattgttgatactaacggagctggagattcatttgctggcggatttcttgctcaattggctctaaatgaattcaatctggatctagattcactcagacgatgctgtgcagctggcaactattgtgctcgggaaataattaaacaaaacggttgcactattcctgataaaaaagcaaattattaaatttaatcttttaactcatttagttagagatttataaattcagttttcaatttaacctatcattaccgcaaaaattgtttttatttttaaatttgtaattaaaagcagttttaaataaatcaaagattttttatttcata

SEQ ID NO: 70953 - DNA, 263 bp, Zea mays
  Clone ID: MRT4577_164715C.1
gaaccgtgcccacctctgaaatgtgagtactgacccaaaagaccaataccaaggaactagctgggaacaaaggatggatgctcaataccttttttaccagaaatgcacccataaaagccttattggtcaccagctttctacttaaacaccattacaaaataggacgcgcaacacggcactcaacgagacggccatggatggccatacaccgctcgaggtgatacagtcggtgaagaagacgtagaaccaacaaccgggggcgc

SEQ ID NO: 70954 - DNA, 470 bp, Zea mays
  Clone ID: MRT4577_164716C.1
agacctcctcagccggcctaccctccctccctcccgccgcctcctcctctaaaagcccgggtcaaactcccccggccagcgagggagacgggggagagagagggagaggggagaggctctcggatccgagctgctccctcccgcgcccgcccagatctcctgcgcagcccagcacccgacgctccggatctgcgcctgtcgcaaagatctacaagcgaccggccggcagcttgccgccgctggtggttggttcgttggtgaggaggaggattaggcggcggagatgtcgtccagcacgatccggaaggcgctgggcgccgtcaaggaccagaccagcatcgggctcgccaaggtcaccagcaacatcgcgccggagctcgacgtgctcatcgtcaagaccaccagccacgacgacgagccggccgaggagcgccacatccgcgagatcctccacctcacctccggatccc

SEQ ID NO: 70955 - DNA, 610 bp, Zea mays
  Clone ID: MRT4577_164717C.1
tatcctcttatcttaagccatgcttattgtatctaagtatctttccagaagatcacctaattatgagagacaagctgatattgaaatggatatctgaaggtatcgtttatagtgaagatgaagaaactagcttatatgagctcggtgacagctacttcaatgagctagtaaatagaagtatgatccagccgataggtattgattgggaagagaaagtaaaaggttgtcgtgtacatgacatggtgctcgacctcatatgttcattggttagtaaagaaaactttgtcactatattgaatggcaccaagaggaaaatttctgactcgcaaagcaaggtccgaagattgtcaatccaaaatagcaatgtacaaggggctactatcagtatggcgcaagtcagatcaatttccgttttcacaaatgataatgttgaccaactgtacaaagtttcaagctgtcaagttttgcgtgtgttggatttagaatattgtcctgctccggatacttggaattttttgcatttgaggcacttacgactgaaaggctcgaaggttaaggtgcttccaatggaaataggaaagctatggtttttgcaagtcctggatattgg

SEQ ID NO: 70956 - DNA, 622 bp, Zea mays
  Clone ID: MRT4577_164718C.1
ccggccgggaaaaatgcgcgcaccgctctgcactggatggacgatgggattcgcctaattctttcgatcgaccgctctgctgtagacatcgtcatcgtcgatgtcctcctccgctacatcacccacctggactggtctgccgccttccatgccaacctcgccggccacgcactcgccaacgagctcgacgttgtacaggtgctcgcaggtggtcggcaccgacacggacggcttcgcgggcgcggcggccacggaccgctgcctcgttggcttcggtgtaattagagacctcatggtgttcgtcgacaactaactcgatgattaccgaaggatggatgagcacgatcaatatgagtcaattggtttagatgattcactcgaggatgagaggaatcttgatgaaaccatggctgatcgaagggtcgtagaagtagagcctaatgcaagggatgtgaggactggtgtagcagatgacaagaagtatgccttcaagacaagttttagttactgtatgatattagagaaattatcatatttatattctagattaatgatcttgattgaactaccgaatgagtatttggtatgtgaactgaaaaaaaaaaaaaaaaaaggggcggcc

SEQ ID NO: 70957 - DNA, 352 bp, Zea mays
  unsure (1)..(352): unsure at all n locations
  Clone ID: MRT4577_164719C.1
aaagaaacgatgtccactggcgaactgacngcgccgtcgtgcggcgatcgatgaaaatgccncnaggccaccaccctagacnaacncaaactaantgcggaaaataagcctattttttcttgttgctgggagagatatttccgaagaaggaatgccttccttccttttaactgattcgccgaggacaccagatcctctagagggttgtgcttttttgcgtgaggcttttggggcgatttgctttgctcgcatgggggatcatttcgctttggatgttggggagctcttttcgtccccagtctgtgaggcaacggggctattttcccgcggcaaggaggaaattaaagcgctt

SEQ ID NO: 70958 - DNA, 573 bp, Zea mays
  Clone ID: MRT4577_16471C.1
ctcgagttttttttttctttttttttttttttttttttttttttttttttttttttttttttttttttttttttttttttggccccagggctttctttgaaaactttggatggaaggcataaaattagcccttcccaataacacaaaattatggaagggtaaaaaccccaacgggcccaggttaaaaataaaaaaaaaaaaaaaaaaaaaaaggggtggccccccccccccccggccaactttttatgggggcccggggggaaaatttccacaaaagctaatttaattaacccaaacaaaccgtttaaaggaaaagggccaaaaacggaccctaaaactcgttttacctaaggaaccaaaaccggggacgtcaacaaaaagggggggggggggggggaaaaaggacggggggaaacgggggggggggcggccatttaattggccttggaaaaaaggccctgggggggggcaaccgggggcaaccccggaaagggcccctttttgggggggcaaaagggcccccaggggttgaaaaacttgaaaacctcggggagcttttcctcggggggaaaa

SEQ ID NO: 70959 - DNA, 471 bp, Zea mays
  Clone ID: MRT4577_164720C.1
ccttcgagcagcataacaagaagacacaccaaaatctagctagcttgccgcacctgcttggggctgccaagtaaaagtagtaagctagagaagcaaagcaaagctccgatccaatccaatccaccgcgaggattatgtctctggtaaggctcctggacacgctggccctggactcgtgggtgcggaacccgttcaccatcttcggcacggcggtggccgccgacgccgacgccgaccgagacggccggccggctccctgttcctccacgtacacgcccccccgccggtgaacggatagtagcgtcccacgtcgtcgtgcgactgtgaggttgtcgctcgctcgcccgtgctgtctcaaagtttgtttccgtggtttggtcctggctttgcgtactacgtgatggattcagctgcctgtactgtactgcgtgcatgcatgtaaccgtgaaaacaaaagggtggtattcctgc

SEQ ID NO: 70960 - DNA, 292 bp, Zea mays
  Clone ID: MRT4577_164721C.1
aaaatgacgacaccactcttaaatatatttaactaattccttttacataaagcttctgggaaaaaaattcgtaggacagaccatcgatctctctagaaagcctggctcaggacatgtgtccacctcaatctatatggtagccgaatttacgggaaatggaaactaaactctacaggaaaccacccgtaatacacgtacattaacatgaattcgggaaaattcaaacaacatcttaaacatcctacccaagatgctcgaaatttgatcagtctataataaatagccttccgct

SEQ ID NO: 70961 - DNA, 773 bp, Zea mays
  unsure (1)..(773): unsure at all n locations
  Clone ID: MRT4577_164722C.1
cctcgaggccggccgggccgggagcagcagctccgactccgagcataacaacaagacacaccaaaacctagctagcctaccgcacctgcttggggctgccaagtaagtagtaagctagagaagcaaagcaaagcaaagctccgatccaatccaatccatcgcgaggattatgtctctggtaaggctcctggacacgctggccctggactcgtgggtgcggaaccccttcaccatcttcggcacggcggtggccgccgacgcgtggctggccagcgacacgtcggcgttcgccaacacgcacatcgagagccgggacacggcggccgcctacgtgttcagcgccgcgctcccgccgggcgtcaagaaggaggaggtgacggtggagctggacgagggcaacgtgctggtcatcgccggcgagcgcagcgtgtgccgccaggagcgcagcgacgacgggtgccaccacatcgagcgcagccgcgccaccttcctcggcaggttccacctgcccgaggacgccgccgtcgacggcgtcagggccgccttggacgccggcaggctcaccgtcaccgtgcccaaggtcggggccgccgccatcgtgcccgagaagcccgccgccgacgcgacgccggcgcccgtgcccgtcgaggccggcccctgctgagcttctgacgatgccgacgccgaccgagacggccggccggctccctgttccntcacgtacgcccccacgccggtgaacggatagtagcgtcccacgtcgtcgtgcgact

SEQ ID NO: 70962 - DNA, 1264 bp, Zea mays
  unsure (1)..(1264): unsure at all n locations
  Clone ID: MRT4577_164723C.1
gtggcggcctgtgcggagcagcagcagccgaccagacacaccaaaacacctaactagaagacacaccaaaacctagctagcttgccgcacctgcttggggctgccaagtaaaagtagtaagctagagaagcaaagcaaagctccgatccaatccaatccaccgcgaggattatgtctctggtaaggctcctggacacgctggccctggactcgtgggtgcggaaccccttcaccatcttcggcacggcggtggccgccgacgcgtggctggccagcgacacgtcggcgttcgccaacacgcacatcgagagccgggacacggcggccgcctacgtgttcagcgccgcgctcccgccgggcgtcaagaaggaggaggtgacggtggagctggacgagggcaacgtgctggtcatcgccggcgagcgcagcgtgtgccgccaggagcgcagcgacgggtgccaccacatcgagcgcagccgcgccaccttcctcgccaggttccacctgcccgaggacgccgccgtcgacggcgtcagggccgccttggacgccggcaggctcaccgtcaccgtgcccaaggtcggggccgccgccgccgccatcgtgcccgagaagcccgccgccgacgcgccggcgctggcgcccgtgcccgtcgaggccggcccctgctgagcttctgacgatgccgacgccgacgccgaccgagacggccggccggctccctgttcctccacgtacacgcccccccgccggtgaacggatagtagcgtcccacgtcgtcgtgcgactgtgaggttgtcgctcgctcgcccgtgctgtctcaaagtttgtttccgtggtttggtcctggctttgcgtactacgtgatggattcagctgcctgtactgtactgcgtgcatgcatgtaaccatgaaaacaaaagggtggtattcctgcattgcacggctgcaacgtgtaattccgtctttaatcaatgtttttctgtgcttagtaaatgaaaaggcaacctaagctggaatccanaaaaaaaaaaaaaaaaaaaaaaaaaaaaaaaaaaaaaaaaaaaaaaaaaaaaaaaaaaaaaaaaaaaaaaaaaaaaattcccccatcccccaggaatccacacaaggacttcgacgtcacacgggggctgggcacaaacacaccaagggtcggcaccaatggtttactaccaggagggggactactgctccgaggaggtgaggtcggtggccccggccggtttcggccgccacggggggg

SEQ ID NO: 70963 - DNA, 159 bp, Zea mays
  Clone ID: MRT4577_164724C.1
tgaggtcgaggctcatgaggagatccatatgctcgtccagcatatcccgagggcggggtcatgtcaagtttggcgtcctcttcaatacaaccggtgtcaaatatcttgaagctattttagctccttgagggccgtcaagaagaggaagattctaaccta

SEQ ID NO: 70964 - DNA, 464 bp, Zea mays
  Clone ID: MRT4577_164725C.1
atggggaaaacaatttttcccaccctagaaaatttcaacactccgggagggacaatggggggccaacggggcaaagaacccgggaccaactgggccatccggggccgctaaaccatggtacgggttttttggggaaaacaatttttcccacactagaaatttctcacaggggttaagagctttaaggggaaggacgggtggggctaacaaggcccaaccaaaaacaactgggttatttaaccttgcaaaggcacaggggcacgttgcaccgcccgggaagaaaggatcgggggctcttgcagatcggttaacaaaagcccaaacaattttaaaaaacggggggctgatcaaaaacctttatatggggagatcattggggtaatttttactaggggggtttttggaggctcatccttccggggggggggtggcaattctggggacctgggaaggggtccggggaa

SEQ ID NO: 70965 - DNA, 339 bp, Zea mays
  Clone ID: MRT4577_164726C.1
tctttctaaaaaaaaaaaaaaaaaaaaaaaaagtaaaaatttaaaaaaaaaaaaaaaaaaaaaaaaaaaataaaaaaaaaaaaaaaaaaaaaaaaaaaaaaaaaaaaaaaaaaatggcctcccccccctttatttcctaaccgttacctccattctaacaaattttccctatatttattcttattaaaccttgcctaaataattacaatacccgtttcctttttaaaatttttttcctctcacaattccacacaactttcaacccggaaccataaattttaaacccttttttccctaattatttatctaactcacataaattaccttcctctcaatttc

SEQ ID NO: 70966 - DNA, 291 bp, Zea mays
  Clone ID: MRT4577_164727C.1
aattacccgagcgcgatgcggtcgtccaatgggcagaccacgctcaaatcctttctcttcaagcccaggtatgccgtctgattcgcatccatcccaattttcgccccctccgggccagcacttcaatctccgttccttgcattctcctattcgtgtgttagggttgtcgatggagtaccgtcaccaccgccggcggcggtgatggaggcgccgatctgttcgccggagccgccgaaacgggagattgtcagagtcaccaagacgaccattaaggagaaggcgagcgcgttc

SEQ ID NO: 70967 - DNA, 349 bp, Zea mays
  Clone ID: MRT4577_164728C.1
tttggtttgggggaaacccgaccgcgtgcgttatacatgagaataccgcagaacacaataccgtagtcacaaaaactgaggtcccaaccaaagtggagaatatgttaaaactcccataggcttagacattctccaggtgcaaaaactgagagcccagctagctcgccaaacaccattctggatataatactgcagtatttgagaatactgcggtattctttcaaaactgtacaaaaaccgtgctgccaatcaccgcctacgttgccgttggcaatctgacagcccggacgaggcacagaaccgatattatgatccatagcaggagtgattgtcggttgggtggcttgat

SEQ ID NO: 70968 - DNA, 167 bp, Zea mays
  unsure (1)..(167): unsure at all n locations
  Clone ID: MRT4577_164729C.1
caccggcagcgacgggcacacgctgncgaggaggtacccgcgcgngatgctggggcgcagaggaccctcctcagggctactccgggatccgcttcgagatcctccaggccataacaaagctgttgataattgatgtgagcccctgcctgccgttgcggggcaccata

SEQ ID NO: 70969 - DNA, 364 bp, Zea mays
  Clone ID: MRT4577_16472C.1
tccgctatgagtccctctcagacccatgcaaggtcgactcgggcaaggttcttcgtatcgacattattcctgataaggaaaacaagaccatcaccatccgcgataccggtattggtatgaccaaggctgatctcatcaacaacctcggtactattgcccgctccggtaccaagcagttcatggaggctctgactgctggtgccgatatctccatgattggtcagttcggtgtcggtttctactctgcatacctcgtcgccgacaaggtcaccgtcatctcaaagcacaatgatgacgagcagtacatctgggagtctagcgccggtggtaccttcaccctcactcaggacactgagggcgagcc

SEQ ID NO: 70970 - DNA, 171 bp, Zea mays
  unsure (1)..(171): unsure at all n locations
  Clone ID: MRT4577_164730C.1
ctgatggaggagaagattctgctattgaactgaacaacaaggtcgacaagaattggtcagtaccacatgtttttttgttgcttattacgcaaacagttaataggctgaagtgcaattttgttgcctttgactgtaggtacatttagcttttnntttttaggctagacaaag

SEQ ID NO: 70971 - DNA, 409 bp, Zea mays
  Clone ID: MRT4577_164731C.1
ccgcgcggcgccttcacgggggtagccgggaccggggccaaaccgcggcccgcgcagacggccacggagaagactaaccccctgccaaaaccagagaccctgcggcgcccaaggagagagcgaactcacagtaaagccgaagaacaaaccgaacccataaaaataaagaaacccgcccggcccgccgcataaaggaaaaaaccaacacgcggggggaggcggccaacgccccagcccccagggagaaaccgcccgcccccagtgaaaaagggaacagccccccgcccgggaggaggcggcccagaaagaggggccccaagcggtccacccctgtaagaccgaccaggcgaaaatcccgttggccggcccccaccggccaaaaaaacatgaacggacgcgaacagcggga

SEQ ID NO: 70972 - DNA, 200 bp, Zea mays
  Clone ID: MRT4577_164732C.1
gacccacgcgtccggaactactgaaacacgcacatctagcgctagctgttcaggcaggggcatcgccccgtaaacgcaccgagccggtcagagacggcgcggacacgatgctcaccaccacgtgcagtaccggccgctgtgctgctgctgccacggcctgcaaaaacactcgtaggcgccattacctgggggcaggtgag

SEQ ID NO: 70973 - DNA, 371 bp, Zea mays
  Clone ID: MRT4577_164733C.1
aataatcccccctcttttttttttttttttttgtctttttttttttcttcgggccgaaattatatacacggataaactgaaggggtcgttcggtccaggaaatgtaacttgaatagcaatgaaaaaaattccactcctcctataggatttttatccctatggccagcccaaacaacttactttaagctaaattgaacaacttatcggggtccaaaactctgggggggctcaaattctttctccagatcgtccctttcagaggcatgaccacttatattccgtcgaatcccaagctgccaagtcccagcaaaccggcaggaacaccaaaaactaacttttatgaaagacaatgtccaacccacaccctggat

SEQ ID NO: 70974 - DNA, 742 bp, Zea mays
  unsure (1)..(742): unsure at all n locations
  Clone ID: MRT4577_164734C.1
gcggcagcggcgcagcatgtccggtacctacaccctcagatggctcggccaccggcgacgccgcgtgacgcgacgccgtactcgttcccgcacttcccttacagcagggggagtctgccacccgccgcggcgcttcagcagatgccacagtatgtgtgcggcccggcgtatggtctgcgccctgcgagctcgtcggcgatgatgatgaagcagctacaacaacccatgccgacgcagcagcagcaccagcagatgtggcagtaccatgtctcgcagtaccagccgaggccggacgctacgctttctccggcggcagcgtggcacggcatttcgtcgtcgctgcgaccgatgggcatgcttgctcccccggagatgccgtcgccgccacggccgccgcagatggagctcttctgcgcgccgtaccaaggtggcaggcagccgcagcagctgaggttgatgtagcctggcctcccttctgctgctgatcagctgattgatactactattcagacgcactaatttataggggataatatacaacatcttagcaggaaaaaagggggatggtgcgaaaaaagaaaaagaaagggagatgcataagggtggggtttatttatacactcaggaaataggggtatgcatgggaccagaggggactaaactggangccactggtatttagagggagagcccttttggcaatgcctacgggtctaactctggctcatcttcaatctctatc

SEQ ID NO: 70975 - DNA, 174 bp, Zea mays
  Clone ID: MRT4577_164735C.1
acgccagctccgcgacggcgcggaacggtttcggaaggatcggcaggctcgtgagcaggagcccctgcagacgaggatgtcgagctcgtcgcgtcaacgaccctcacaccacgatactgactactgttcatacgacacgtgcacgccatggaaccacgcatcacctcaagatcc

SEQ ID NO: 70976 - DNA, 313 bp, Zea mays
  Clone ID: MRT4577_164736C.1
tcgatacaggcctctaaacatagtagacatcaacccagttgtactaaatgatccttgtgaggatggtgtgttagcacttagctctggtaattagcttcggtgttattacttgacatctgttgtccagttgtgatatctgtgaatttcatctattaaatatatgtagataagatttaatagatgaaattcacagatatcacaactggacaacagatgtcaagtaataacaccgaagctaattaccagagctaagtgctaacacaccatcctcacaaggatcatttagtacaactgggttgatgtcgtttgtgag

SEQ ID NO: 70977 - DNA, 1150 bp, Zea mays
  unsure (1)..(1150): unsure at all n locations
  Clone ID: MRT4577_164737C.1
ccggccggggtacggatacggatacagtccttccattccctttttgataccttccagctacatcttcattagactaaccgcttcttcatactgccttgcgctgttatcacgtctgactgaccatcttctgttctcattatacagcatcaaacatacaaagccgctctctttgcccttccattcgcccccggacgccatcccgtgacatcattagggggaatcctccaactacaactctttgctttcagccccaattcaacgagaaatactatctatcctccaccggtaacgctcgaatcctgagcgtccgttggcctcagccgtgaatccgtccgtcgttcccttctatccgctcgactgtcgcttttttttcgccctcaccccgtcaataccgccaagctgtcttccccaattctacttcagagaaccgtctcctacgacgcggcgaacaaacctccgcgccggggaagcatctatctcaacatgcccgagcgaaacacaggaggagaaggagctgctggagctcgaaggaggagatctagcagtatcctccaggtctaccacgagcctccggagactctcgagcaaatcagtgatcaggcttctctgcctaatctcaacgccaactggacaaatgccaaaggtgcttggaccatccatcttgtcctgattctctctgccaagattatcttcgacgcgatccctggtgtctcacaggagacttcatggacccttaccaacatgtcctacatgttcggttcctacatcatgttccaccatggtccgcggtgttcctttcgatttcaacagtggtgctttcgacaacctcaacatgtgggagcaaattgataacggggcgcaatacacaccaaccaagaagttccttctcagtgtcccaatcgcccttttccttgtcagcacccactacacacattacgacttgacgtactttaccattaacttactggctgtcttgggagtcgtcatccctaagctgccttttagccaccgaatggcgtttcggtctattctcaggaaattccggaggaataagctacgacggaggagcagagacggattaactaccgcgngcctgactcgttccgctgatatcaggngcgttaggatacggcaatcttcggcataaaag

SEQ ID NO: 70978 - DNA, 140 bp, Zea mays
  Clone ID: MRT4577_164738C.1
aaattaaaaggggggttatgttttatgaccagcatcaattatagtgcaaatcaaagtacaaataggacagcaaaatcattgaacaatctatcaatttttaattgaggctaaagaaacaattaatggtaatataaaattat

SEQ ID NO: 70979 - DNA, 248 bp, Zea mays
  Clone ID: MRT4577_164739C.1
tccctccttggatagggtttgagactgagctcccccgctcgcgcgcgagccatggtctccttcacctgttcccatgtcggcgcgacggctgcgggcggagcctcgcccttcctcggcttccggtggcggagcggccccgggggagccaccccgtcgagctccctcttcgttggccggcggctggcatcggtgcatatgcgcgcgccatctcgcggggcccgcgggggctccgcgctgcgggtcacgtg

SEQ ID NO: 70980 - DNA, 786 bp, Zea mays
  Clone ID: MRT4577_16473C.1
aaccctgtcctgtcccgtccacgtctcgcgagtgcaccccggccgggcacgggctctccgggctccggccttccccccaccgtccactgcggttgcgcagcccctggttttcgccgaaagacgacggtttctacgcgaaacgcccccgtgattacacgaaaatcccgtgcacacccctctgcgccacctcgcgcgtcgcctcgtgcaggtcggcgtcaacgatgtattcgcggttccgggtgacttcaacctcacgctgctcgaccacctgatcgccgagcccggcctgcgcctcgtcggctgctgcaacgagctcaacgccgggtacgccgccgacgggtacgcgcgcgcgcgcggcgtcggggcctgcgccgtcacgttcacagtcggggggctcagcgtgctcaacgccatcgcgggcgcctacagcgagaacctgcccgtcatctgcatcgccggcgggcccaactccaacgactacgggaccaaccgcatcctccaccacaccatcggcctccccgacttctcgcaggagctccgctgcttccagaccgtcacctgccatcaggcggtggtgaacaatctggatgacgcgcacgagcagatcgacacggccattgccacggcactgagggagagcaagcccgtgtacctcagcatcagctgcaacctccctgggctgcctcatcctacctttagccgcgacccagtgcccttcttcctcacccccaggacgagcaacaagatggggctagaggctgcagtggagggcactgtcgattcctg

SEQ ID NO: 70981 - DNA, 298 bp, Zea mays
  Clone ID: MRT4577_164740C.1
ggacaggaaactggagcgcccatcctgacagacgatgtcagcctgcaggtgttcatggatcatttgaagaagctggctgtgtccagtgcctcttaagctagtagcacagcctagaagtggaagaaaatgctgtcagattgtgctcacattgttgatagtgtcctagcatcattcacctttctgggagattctaataaataacccaaggctttttttatatgtatgtcttcaggttatagtatgtcttcaggttataatttatttgtagtcctctctacctgttttcctatacatgaaa

SEQ ID NO: 70982 - DNA, 439 bp, Zea mays
  Clone ID: MRT4577_164741C.1
gttttctcttctgtactcttacttaagagaacttctgagtgcggacaaggaggatcttcttcaggtcccgagcgacaacaccctggtgatctcccctgactccctgcctcttgggcgaaacaatgctgcaaatgagaaggcctgctttgataactacaaatatgacctcctccagctctccgacctgacctatgctgcatagctttaatgcacatatcctggagcgtgacacaagctgctgatcgtgtatggacatcgctctatctcctgtgagactcatcacaacgcctggtgacattctttgtgatacccttatcagccctagccactacgtgtatgactgtgtctcaacccatgttcctgttgcctacattactctcttgtctggagctgcattcagctgatactagctgacccatgatcttgtggctgctcactg

SEQ ID NO: 70983 - DNA, 106 bp, Zea mays
  Clone ID: MRT4577_164742C.1
ccgaaacaaatacttgtattgatgcaatgcatagtaaactgggtcgtccaacaaacatgctatctgacgacgacacatgctgccacagaggagtatgctgcgccac

SEQ ID NO: 70984 - DNA, 654 bp, Zea mays
  Clone ID: MRT4577_164743C.1
atggacagaacaccggcattcaaggtgccatcacaaacggaactccggttccgtccctgcgggtatgaacaacctccacaccggggagcctgcggggcgacaagttccgggcgactcgccggcgacctctgcagcagcagccatggtcccaggacggacgcggccaccggaaggctctcgttcgcgtccccgctcaagggatgcgaaccagccatcaaagccaaagagccggaggccggccccatggctggaggacgcctcctccgcagagctggaggatggtttccaccaccagaagctggaagaggaggtggccagccgacccgtgcgggaggtagagccccggctcgcctcgctctccgccccagcaaggatgggaccgggaagggggataccctgaaaaggatccttctccgtgaaggaaacaggctccaagcctccctactgatcagaggttcaaaggctggcccctcggaggggtttaacagccgccttagagcgcgtgggatccacacccactactggtcagaggttcgaaggccggcccctcgaaagggttcaacggccgcctcaggccactcgggctccgcgcccactactgatcaggggtttgtaggctggccctcgaagggttcacagccgcctcagacatag

SEQ ID NO: 70985 - DNA, 762 bp, Zea mays
  Clone ID: MRT4577_164744C.1
ccggctcgaggggccggccgggcccgggacatcttcttccatggcagccatggattccctcctctggttcgtggagctcctctccctcctttgcttcttcgtcttctactaccgccacctccagtccaagaaaataagcaaggcggagccgaccgaatggccagtcctgggccatcttttcggcatggtcgccaacctgtcccacttccatgactgggccaccggcatccttgccggcacgcgctacaacttcgaagctcgcgccggcatcaccggcgtccgcttcttcgtcacctgcgaccccgccaacgtgcgccacatcttcacctccaacttcgccaactaccccaagggcgacgagttcgccgagatcttcgacgtcttcggcgacggcatcttcaacgccgacggcgactcctggcgccgccagcgcgccaagtcccagctcatcatggcgggccctcgcttccgcgccttctccgcgcggtacagccgcgacaaggtggagaggagcctcctgcctttcctcgcgcacgccgccgaggccgggaccgacaccctgcgacctgcacgacgtgttcctgcgcctcactttcgacatgacctgcaacctcgtcttcggcgtcgaccccgggtgcctgcagatcggcctccccgtggtgcccttcgcgcgcgccatggacgacgtgctcgagacgctcttcctccgccacatcatctccccggcgtgctggaagctcatgtacccggtatgaggtcgca

SEQ ID NO: 70986 - DNA, 1433 bp, Zea mays
  Clone ID: MRT4577_164745C.1
atgtcttcgtgcttccttatgcgtcgtgtctttccaccttccgagcccccggatgggggatgcccgcagtccttccgccttgtcgttggaggaaagcaactccgtgggggttggtacctttcaaccatcgttcggcttcaaggattttcatcacgcagcccggctgcacccctccgccggcggtcacccaaggcggtgaccaccagcccctggatggggagaggcaagccgagctgtgatcttggccccgccctcagcttcaaggatgttcatcatccttgctggggcgtcgagcgaggcgagccggggctctacctcccgcgcgggtcggctggccacctcttcttccagcttctagtggtggagaccatcctccagctctgcggaggagacgtcctccagccatgccggggatggcgaactgttgctgcccagctaggatgcaacattccgccctcttcctcgctttcgtggcgagggcgggagcgaggacctgccggtgcgctttggagcggcccgctctttggctttgatggctggttcgcatcccttgagcggggacgcgaacaagagccttccggtggccgcctccgtcctgggaccatggctgctgctgcagaggtcgccggcgagtcgcccggaacttgtcgccccgcaggctccccggtgtggggttgttcgtacctacggaggtggaaccggagttccgtttgtaatggcaccttgaatgccagtgtttttgttcattgtggctgttggggccgacgccggagttgatctgccgaggcctcgggccgggctgatgtcttcgggggacatctggccgaggcctcggggtgaccagccgggccgcctgctcgagccggattcttggaggagaccctggcggcgatggcccgggcatgatgatgaagtcgtccttcagagtggagatcctcggatcgcgtcgccgtccgaggctaggccggacctcgccgaaggtgtagtcgacgccgagggtgctgctgctcccttcagccgtcaagatccgagcctgcaggatcggattatcttgtagcgtgtgttttctgcgatcgctaaggcccaaacacaccctcgccgtgttgtaaagttgcgcttcttttcctcttgtttcgagtatctggacttttccgtcggtaacagaattgtctgtgcgagcgagagttgcttttcgcggaaggtgatgagtgaggtatccatatcccggaggcgtgggggggggtgggctcgatcggccttgccgcttacgcgcgctcttgcccgtccatggggttctgtcaccggcgtagtcaagaaagcccgaagaatcgcttcggcaggagagctttcgaacgtgaagacttgttcggtccgcggaatcacttatccgaacgcgagttacttatctcagaaggtgatgagtgaggtatccg

SEQ ID NO: 70987 - DNA, 281 bp, Zea mays
  Clone ID: MRT4577_164746C.1
gagggagggctagaaaatcccgtccatatatatgatgcaaggcaaatgatatattatgataggtgactgactggcgggtagtttatccttagatatagtacatatatactgcaatgcaaatgatatattatgataggtgaactgcctcgaacaattggtggggtacttgggggcctactgttcggcaatgtgtgtacttatggactgcactctggtaccgactcttgcgacttcgtcgtatccgtcatcgacagcagcttcgaatctgtccgcgacttatg

SEQ ID NO: 70988 - DNA, 340 bp, Zea mays
  Clone ID: MRT4577_164747C.1
cacgcactagaccgacccgcgaatcacccgctctctctacgtgcggtcaccgtcctatgccactgcacctccggctccctctccctccccgtccgccaataagctaaggcaaggccgacgcttcctcctcttcgtcctcctcctccacgctaccgtggatgcgccgcgctcttaccgtcgtgatgtccgcgtcgctgctcgtgctctccgagtcgttctatggatggctctggctccggagtgatcgatgtgggcgcacggtctcccgtcgaggtggagtgcaccgatgtgcctacggtagtgtgatcaagcctatgcacgtcaagacgaacaccgtctg

SEQ ID NO: 70989 - DNA, 267 bp, Zea mays
  Clone ID: MRT4577_164748C.1
ctctgtcctcctatcttcctgggtagatgccctggtgtagggctgagtactgaatggtcttccatccccagcaagggggtgcagcccagggtcaggcccttcagagccagggcagaggacgcacggtggctagagccgctgcactatccttttcagagcacttcatccacttgctcctccctctagcctcggcaccctgggtgggaaagggttgatgctcatcatttattgaggggaagccattaataaggagtcagactaaaaggg

SEQ ID NO: 70990 - DNA, 500 bp, Zea mays
  unsure (1)..(500): unsure at all n locations
  Clone ID: MRT4577_164749C.1
acannagctttttttttctttttttttcttttttttcttcgtttttttctatttttttttttttttttttttttttttttttttttttttttttttttttttttttttttttttttttttttttttttttttttttttttttttttttttttccctttctttttgcccccttttgttgcgtaccccggccgttttccggtttttccggcccccccggcgccacccatttgggggccaacttgccccccgggctgccttccaggggaaaaaggggcccgccccggagcgcccaaaatttgaggccccaaagatgtggcgggaaaacctttggccccccttaccccccgccccacccggggcggggggcatttttctaaccccccccccccccgaaaagggccttcccccaatagggatggttccgggcccaccccccttttaccgacggaaacaccttaggccctcctctctgaaattggtgcccccccccggggcgaggg

SEQ ID NO: 70991 - DNA, 506 bp, Zea mays
  Clone ID: MRT4577_16474C.1
tcgccgtcgtcgctgaagggaccatagccaccgcaagatactgtgatggggggttgtgtcaggacccacatgagcgttgcatactacttgcgtgatcacgtgaacttcagaacagggctccctgctcccacaaactatagggtcagggtaaggcttattatccactacccaagccggtactttacaccccactacatgatttgttgagcgatttaccatcgtggacgttacatcacacatcatatctgctagtatatcaagtgatatggtttttgcttctgcttactcgtatgagttgacacaatatggtctcgaaggtgggatgaccaactatgccggtgactgctgcactgaccttttgcttgctcgccctgtgctgaagaccggtggctcatataaggaatgtgaaggcattgttgacgccactggagatgacgtttgtggtgctccatgtgatgagaggaggccttgccctgctctcttggatggtgggcttagtaggacta

SEQ ID NO: 70992 - DNA, 381 bp, Zea mays
  Clone ID: MRT4577_164750C.1
cgtcacgtcatcgtcacccccttttatttaccttgccgcctcggttcggcacgagcactgactgactcccggcctcttcgctgtcggctgtcgctgggtctctcccctcacgatcggccggggaagacgaacgagggcgctggctgcggttgggcttcgttccgtctcccccccccacgcgacgtggctgccacgcttctctctctctctctctgtctctccttgtctctcctccacacttggtcgtggcgcggcggtcaggaacgaggagatctcactctcagtcccggcaagtccgcgtctggggccaggagacagaagagtctaggacggaagcggaaccaacgacgaaggagagacccaactaccactttgcttgct

SEQ ID NO: 70993 - DNA, 590 bp, Zea mays
  Clone ID: MRT4577_164751C.1
ctccgctgcgtccgcctcagcactctgtatagtgcgatgtacaccgggggcacatccggctaagctcttctccccggtcacaacctacgtccgattctccacgagctggcagatcccgcgctgctgtgttgctgcgcgccgaacaccgcgccatgttaggccgcaattacctctgtagcaccgacgtggaatgggacgtttacggtctcgccatatcctgctggatcacccttgcgctgactagatctctcatgtactatccgattagggtgccctagacatctgtgatgatgtgtgctggcatgtagtgaggcgcatcacttatgtcctaaccgagcggctctaggccagcggaacggctgtcgatgatgacaggacctccaggaccatcttggacgggcccgtgggtctctttatgagtggagctactgcctttgactgcatgactagcatgctttacgatgctagcaatgatctcatccctcgcaaacaggatgaatcgtatggccatctagtggatctatctctctgtctctctatatctcactatgtggctatgggtgagtctttgcgtgaccctcttgactact

SEQ ID NO: 70994 - DNA, 280 bp, Zea mays
  Clone ID: MRT4577_164752C.1
ttttggtttttttgggagaaataacaaacttgctggctcagggatgtgatctaaaaatctctaaggtatactggcaacatggatcaggccatacagcacaataagacgcacatagacatataggctactgcccataatacatgtgatcgctacttgagcatctccacggagacctagcaagtgccccagatcggggcaacgctttctataaacacctcccaaaggctaattcacgctaccattgcaaataggctcttaaagactcacgatgagtacccct

SEQ ID NO: 70995 - DNA, 878 bp, Zea mays
  Clone ID: MRT4577_164753C.1
cctcgaggccggccggggacgcgattaccgacggcaggtgagtgtgactatatattactttgccacggaaggaaaggactgtagtttttcttcagtatacccagaattacagacgccaacaaagatacccttcgagaaagggttggcccaaaggtttatccagccctctggatctggtgttgacttgggattcttttctcttgatgagctttcgagttcatcaggggaagtattcccacttgttgtttatgcagaagcatatccatctccagaggaaggtggcccgtcagtaaacgccactcgtgcacagattactcttgctgttttggagaagcacaacaacgaccttcaagtcaaagttatgaagcaaatcttgtggattgatggcgtgaggtatgagctacaggaaatttttggtcttgtcaactccactgaagcggatgttgctgatgctgatgccgatgacacggggaaggaatgtgttatctgcttgtcagaaccaagagacactgctgttatgccttgtagacatttgtgtttatgcagcgaatgtgcaaaaactctacggtttcaatcaaataaatgccccatatgcagacagcctgttgaaaaactaatggagatcaaagttagaagtcctgggccataaaggagagtttgctgatatcgttgctgctgcactatgttatgtaattgtccataatcctgtaacaacatcgatcttgaagtgtatagttctgttgatggttgtgaacttgtgatgatgcggtctagaaatgaactgtgaagacctttgtttggcatttgataaaaaaaaaaaaaaaaaaaaaaataaaaataaaaaaaaaaaaaaaaaaaaaaaaaaaaataaataaagg

SEQ ID NO: 70996 - DNA, 221 bp, Zea mays
  Clone ID: MRT4577_164754C.1
aattgttcattcaggtttttgcttacactgacactggcacccatggggatgggtgacacattattactcaatcattggcgctaaaggacaaaagtagctagctagccagcggctatacgacagcacacagtgggttgagtgggggacaccgacaacaacagcgtaggggcatggagaacagctgctgcaggccgcacatgggcattcggacgcatggtttt

SEQ ID NO: 70997 - DNA, 430 bp, Zea mays
  Clone ID: MRT4577_164755C.1
tcggaaagtagaatccattagcaactatagatcaacaatggcgaccaagatattttggctgcttatgctccttgctcttactacatgcgtcgctaacgcgacaatcatctctcaaggctctcaagctcagtatagctttccatttaaccaaataccatccatcgaactctgctgctgattgacagcaccaacaactactaccattcaggctgctagctgctgtgagccctggtgacttattgacacaacaacagttgttgccgctctaactggacgctatgcctaacgctggcacgctactacaactgcaacaactgctgccagttaaccaacttgctttgacaaaccccacagtggtctaccaacaacccatcattggaggtgccctctattagattgcttatgaggtatagctcaataatgaaagttt

SEQ ID NO: 70998 - DNA, 1513 bp, Zea mays
  Clone ID: MRT4577_164756C.1
cctggccggactagtgtatgtagcgtagtggtatgtattggtttcctgagactatagatgctaggttcgaatccttgctttgatatagttttaaaaaaaaaaaaaaaaaaaaaaaaaaaaaaaaaaaaaaaaaaaaaaaaaaaattgagagggctccttcgtaaaatccctcacccgaacaatggatcggaaattccccggcaggggaatcgcctgcatccgcccttcccaaaccctagcatctcgaatccgccggtcgccatggcaccgttacggcgctgggcagacctgccggcagatctcctctgccgcatcggagaccggctcgacctcaagtggtacgccagcgcgcggggcgtctgcacggcgtggcgctgcgcgcttccgccgccgtcgcccgcgctcctcgtggtcgctgacgacgctcgctgttgcccctacgctgcctccctccccacgcggaggtcattcgagctcaccgccatcgtctcgggaagccgctgcattggctccagcaacggctggatcgcgctctccgtcgtcctcttcaacggcaagaccgtcttcgtgctcctcaaccccatcgccgctgtggagatcctcctcccgccgctgatctacgagagtcgctgggtttccaaggtcgtcttcaccccgagccccgccaaggatgacttcgccgccgcggcaatctgcgatatcgacaggatcgcgtacgtcaccgccggtgccaggaggtgggccgtcatggaccccgtccgcctcacctgcggggaccagctcaccgacgtcgtatacaccgacaaaggtaaggtcttttgcctcaccaagtgcggggacgtgcatgtgctccgtcttcctgagcgccggcgccggaagcctgccaacgctgatgaagcaggatcctcggagccagagttctctgttctccagtcaccacaacctaatgagcgcacaattacattccgcccactgcgttggcaacatcagcgcaattttcggatgatgcgctatgaacaggcccgggcaagagaccaggatctactattcgcatctcagactgtttcgagtacaagcggtaggcaacgtcgcagcatcattacggcacctttcttcccccatccggagcctccggaaagtttccgcagccggcggtcaagttcccccagccggtggtgccacctggtatgcaacactacccgcagcctcctccggcgtcacatgccggctacccactcccgcaggaacactactcggccgcccctccgtgctacgcccaaggctaccagatcgctcaaagttatattcctgttcatgaaggaaggcctgttataatccgtcctcttccatgttgagtcctatccatgatgtgctctctgtttataattgagttcttctttgctgccattccatggtatcttggagcttctgtgctcatttgtgtacgagtacgtgattacatgtataaaccacgatatgttgcttgcactattgctgcctcgcttgctgcaat

SEQ ID NO: 70999 - DNA, 392 bp, Zea mays
  Clone ID: MRT4577_164757C.1
cacaaccacggtggcaatgatagaatgcagccgaacatcatcgttgggcatcgacgtcgccgtcgtccgagcaccgacggcagtaagaaaccctgttgccggcatcagccagtcccaagcgcaacgacggcagaccaacaagtacgatggcggcggcgtcatcatccccgggaggaggacaagctggaggacctgctgcggacgagttgtttccctagctccccagttctttaggaggaggacctacgcaatcagaagatggccaggtacggtttcggtttgggacaacaatgtgtcgcaggacgaccgttcactggtcaaggacaaggacaggaatgctggcgacgttctggcattggttactaggtcccgtgcacccgcgtctgcaaaag

SEQ ID NO: 71000 - DNA, 307 bp, Zea mays
  Clone ID: MRT4577_164758C.1
cgggttgagccagctaaaccagcaccagccgggccagctagcatttgttggggctcaacaagcccccctcgcccgccgtgaccgattgatggacatcacccacgacgacttcgtcgtcctgtgcctcatggcgctcgcaggcgcaggaggaggagggcacgctgcggccggcactgccaggacgacgacgacactggcgacccaggtacgcgagctccgcttccggtgctccaggtgcggcaaggcccttccggctgaccaggcgccagacgcgcccaagggcgaccaccggaagtgcgtcaacaac

SEQ ID NO: 71001 - DNA, 373 bp, Zea mays
  Clone ID: MRT4577_164759C.1
tcgaggccggccgggctgatgtcgcgcccgcgcctgaggcggacgtggagcgcgtctacgtctccggcggcgccgtgagggcggcgggcaacctgttcacggccgccgccgccaacccggtcgccgagttcaacgtcttcggcgaccccttcgccgcctacctggtgctccactccggcgtcccgatcactatgatccctctcgacgccaccaacaccatccccgtgacggaggcgttctactccgagttccagcgccgccagaggacgtacgaggcacagtactgtctcctgtcgctggacggccctctggcgcgccagaggacgcgatccgacagccatgacaactctttctccttactcccccccccccc

SEQ ID NO: 71002 - DNA, 393 bp, Zea mays
  Clone ID: MRT4577_16475C.1
agcgcacttactcccaaacggagaactttacaccatgaaggagctgatcgatggacttgctctgatggcgctgcctggcagcgcacgctccagtacaagccgcggctggcgctgccagacacaaccgtttgatctaccgcctcaaggctatatgccgtctccgctctatctgccgccggagcaacatccagaacgacggcaatacccaactcaagcaccgcagctaaccccgtgccatcagctccgatcctgatgcgtcagcagcgtcggccgcccgttcctgcgccagtgcgtcgaaggactgaggcaccactgcaatccggcggcgacactgtaccgctcgacacagtgccaggcgctgcatcagcagtgctgtcaccagatcacgcatgt

SEQ ID NO: 71003 - DNA, 356 bp, Zea mays
  unsure (1)..(356): unsure at all n locations
  Clone ID: MRT4577_164760C.1
gacagacagacagacagagaaagcacaggtaatgcagaaaaaaaacacatatattagatcaggcacgagggggacataggatcgacgacgacgggaatcgttaaaccgtgagacgttggagatgaanaatcttaggatcggggacggagacgaggccggngaccatgcatgaataatgggggtgcangcacgcagttgacaggatcttatttagacgccggttcatagtttagtacgctggggggtggttgttgtntttgtntgntntttntttntngtgcgnnattgtngggatgggtgagttggtgttgtagtagttgtagttgtagttggtgttgtatttgtaggtgttggag

SEQ ID NO: 71004 - DNA, 2280 bp, Zea mays
  unsure (1)..(2280): unsure at all n locations
  Clone ID: MRT4577_164761C.1
cctcgaagccggccgggccnggaagagaaagagggcggcggcacggcagagccaaagccgaggcgagccgagcagtacatgcatcccgcttcccgcattcctcatcgaggtccggtccagcagccttttgcgccttcgtgtccctcccctccactccctcaccgggggctgggctggtggggagtggggactgggggcagtcgccacgccgcagtccattctttcgtcacccatcgcagctccaacacctctcgctagtcgtcatggcggcttccgcggcagcgttccccctcccaccgccgacgcctcctcttcgactttcacatgtcttttgatatcacagaaaaggattgcccctgccttcactgctgtgaatgccagggacgtttctgtcgccctacaatatatggacattggacttgatagttggcaaactttcttctatatactggacgttccagctttcgccaacctgctgctttaaccacatcttttccttctttcccgattttgcctctcactatcatcaattaccgctaaaagtgaaacaagtgttctccctatggccaagacatcacttcctcctggattccggtttcatccaactgatgtagaactcacagtctactatttaaagaggaaactactgggaaaacacttacgctgcaatgctatcactgagattgatctatacaagttcgccccttgggatcttccagagagagcttccttggagagtaacgatctagtgtggtatttcttttgcccgcgcgataggaaatattctagtgggttaaggactaatcgctcaactggagttggatattggaaagctaccgggaaggacaggccggtggtatataattctaggactgttgggatgaagagaactttagtgtttcatcttggcaagccaccacgaggtgatagaactgactgggtaatgtatgaatataggctggaggacgaggaaatagctgcttctggtgttaaactggatgcctgcgttctatgcaaaatctttcagaaaagtggcccagggcccaagattggcgcacagtatggtgccccattcaatgaagaagactggaacgatgccagtaatgtagagtgttctccatgtgtgccttctgtggccccttgcgcacctgaatcaagtcgtggtgggttgaattctgctggtcaacgcctggctgtgagttatgatgtcaaggtttccttgggctcctcggcagaaggtatcaacagacctgctgtcaatggagttcatcctgtcagaccttctcctgatgctcctaatgactgcatacacattcaattgctggctgaggttatgagatgttcctcaacctcaatgcatgttttacgtactgctggtgacgatggtttgctggctgattcaactgctgactacagtagtgataatagaatatctttggatgctattgaaactatattctgtgaagtggatgagcttgggccccaggctatggtgaacaatactaaccattgtgactcatgcggtgagtatttgattcaccctacgatggtggcacgaggagctgaacagtacttagagctaaatgacctgtccttttcgctcaccgatggtcctgattcctgtggcgtgcttttctctaatggtgtatctgttgagcaactaccggatcttgagctcaggtttgagcagttctctcctgaccacatctccaataccgctattgcttccacatcaacaacggttggttcatctgcttcagtgcccttattggaggatcacaggacctgattcagaattggagtcatctggcgcacatgttaattgaatctaggaggatctgcaggacaaaggcataatgctccctttttttcaattttcatgaagttagaatttttttttggatgaaggcacggattagtgaccacttggcacagaaatatgtttgtgttgcggcttgtgaatccaggaccatttctctgcctgtagttttgcatggtagaactagatgggcaacaacaaaatgtgttcagtattgaataacgcactcactgcattaactactttgcctagcttagtatagtattctggatcttgaggcagggtagaagtgggggtgtgggacaatgtactcacagcttgttgtcatttagcagcaatatcttgtttcggtaacctgtggcaatatcttgtttggttacctggatttgctagtgcccatgcaagatgatgttttcgttgacgccataataataaatagcaatcgattttaaaggaaaaaa

SEQ ID NO: 71005 - DNA, 300 bp, Zea mays
  Clone ID: MRT4577_164762C.1
cttagcaacaaaacaagtgaaatattttgcaatacctgagtgtcaaatttcaatgccaatcaaacttttacttgataaaggaaagaatataacacaacaaaaatggaaaagaatacacagatttgacaaaacacactttttttttctccttttgttttgagtaaaattatcccttctttggctttccacactcactggagacggattcagatcagatgattggctcagcttcttcaatcattcttgaattaaaatcagcaacactgatttctcaagtatacagacaccaaaaatacacag

SEQ ID NO: 71006 - DNA, 1755 bp, Zea mays
  Clone ID: MRT4577_164763C.1
gccttcgtgtccctcccctccactccctcaccgggggctgggctggtggggagtggggactgggggcagtcgccacgccgcagtccattctttcgtcacccatcgcagctccaacacctctcgctagtcgtcatggcggcttccgcggcagcgttccccctcccaccgccgacgcctcctcttcgactttcacatgtcttttgatatcacagaaaaggattgcccctgccttcactgctgtgaatgccagggacgtttctgtcgccctacaatatatggacattggacttgatagttggcaaactttcttctatatactggacgttccagctttcgccaacctgctgctttaaccacatcttttccttctttcccgattttgcctctcactatcatcaattaccgctaaaagtgaaacaagtgttctccctatggccaagacatcacttcctcctggattccggtttcatccaactgatgtagaactcacagtctactatttaaagaggaaactactgggaaaacacttacgctgcaatgctatcactgagattgatctatacaagttcgccccttgggatcttccaggctggaggacgaggaaatagctgcttctggtgttaaactggatgcctgcgttctatgcaaaatctttcagaaaagtggcccagggcccaagattggcgcacagtatggtgccccattcaatgaagaagactggaacgatgccagtaaatgtagagtgttctccatgtgtgccttctgtggccccttgcgcacctgaaatcaagtcgtggtgggttgaattctgctggtcaacgcctggctgtgagttatgatgtcaaggtttccttgggctcctcggcagaaggtatcaacagacctgctgtcaatggagttcatcctgtcagaccttctcctgatgctcctaatgactgcatacacattcaattgctggctgaggttatgagatgttcctcaacctcaatgcatgttttacgtactgctggtgacgatggtttgctggtaatttcgttgatgccaggctactttctttttttgttttgtttcttgttagctccagtgactttctatttctggtgtcgatgcaggctgattcaactgctgactacagtagtgataatagaatatctttggatgctattgaaactatattctgtgaagtggatgagcttgggccccaggctatggtgaacaatactaaccattgtgactcatgcggtgagtatttgattcaccctacgatggtggcacgaggagctgaacagtacttagagctaaatgacctgtccttttcgctcaccgatggtcctgattcctgtggcgtgcttttctctaatggtgtatctgttgagcaactaccggatcttgagctcaggtttgagcagttctctcctgaccacatctccaataccgctattgcttccacatcaacaacggttggttcatctgcttcagtgcccttattggaggatcacaggacctgattcagaattggagtcatctggcgcacatgttaattgaatctaggaggatctgcaggacaaaggcataatgctccctttttttcaattttcatgaagttagaatttttttttggatgaaggcacggattagtgaccacttggcacagaaatatgtttgtgttgcggcttgtgaatccaggaccatttctctgcctgtagttttgcatggtagaactagatgggcaacaacaaaatgtgttcagtattg

SEQ ID NO: 71007 - DNA, 812 bp, Zea mays
  Clone ID: MRT4577_164764C.1
aattcaacgaggaggaagatactcttcctcttatccccttgcctcgcgccgccgccaccggaccaatccacagccaatccaatccccctctgtctctttttggccgccggcgatggcgctggtgcccaaccccagcgttccgggtatccggatctgccggccgaaaatcatatctgactaccctttgcccgacgaagaatccaattccagatcttatctgctgaagaagatcggctccttctaccgcaaggcgcggaggcggctcgacagccgccgccgccgcgtgcaggcgcacggcctctgcgtcggcctcctcgacccggtctccaacatcgtcatcaacagtatcaccgactcctgcaaaggtgagcgcaaacgcgagggcgaggttgtgccacaggaggacctgcggcgccgttcgcttgacggcctggtggtcttcctcacccgcatgttccccaacctcgcggagggcctggccgtgcgctacctgcgcgtcgccaaggccgacgtcctcatcgctgcctgcatcatcgtgtcggaccacggcatcaagggattcggcaactccgaggccgagcctgccctcatcaacatggccctcaagtgcgccgggctggccgctaggcaccctgaccccaagcgcctagtctacgcctggcaaaagatctgcaattgcatggaagacgccctgggcctgcttgagatgatccaggaaccaagccgcatctcgcaggtcatcaggcagctcgcctttatggttaccgagggaccgccgggccgcggattagctgagcggcgtgcggggatgc

SEQ ID NO: 71008 - DNA, 389 bp, Zea mays
  Clone ID: MRT4577_164765C.1
atcttcttgtcccgctaggattatatccgagccttcccgcaaaacctcagagcggagacgagcgcacgatgttcggtttcgggcaccacggtcaccacggccagaacccgtcggtgcacggacgagtgcaccaacccaccttataagatcttctgcaaggccgacgaggggtactgtcttaccgtgcgggacggaaacgtggtgctggcccccgacaccctgtcgacgagcaccagcactgttacaaggacatgcactttaacactcacgtcaaggacgaggagggcaaccctgcattcgctctggtcatcaaggccactgggctcgacatcaatcactacctcggcctagaccacccggggaatgtggtgccgatcaatccggaatac

SEQ ID NO: 71009 - DNA, 926 bp, Zea mays
  Clone ID: MRT4577_164766C.1
gaaaaacaaagaagaaaccttttttattacagaacagcttcaaaacattccatggctccggtaccacatggtcgacaccacgcgaccgacctttacctttttttattcatttctgagctgatttgattgcgtgtcacattttcactgcatgaacttcagttaaacatctcgactttacacaacccagcaagtgggtcatcatctcagggcacctggatggatggatgcattggcgatatatgtcttccataccttatatatatagtatcatgtaaatatataagagttattggtcactcctaacagctacctagtttccaaaatcatctcagcagacaccagcaacttaaggacggtcagctagcttctactacttatgtacagcaggctttcgtatattgctaccgatctccatccgcgggtttctcctccagcagcttggtgctgcaggaatgccctttgtcgcggttcagtattgattctctaatctccttgtacttgttcagctcctccagcgtgtccgccgctgtccttgacctcagaagagaagaaggcacccctgcagagcttgatgcgccgctgccatgttcctcggtcattaccctctggagtgaagaaggttcttgaggaaccggggcgctagggcctgtcagtagcctttccctgaggcctggagcgttctttaggatgcgcatgagaataccgattgctgcatctggagacctcgttaacgagcctccaagatcctgactcgactcatggtcctccctgtcagaaagatcaaccctgttaagctgatcaatgatggtgtctttatcttcccatgcaaaaaccaactcccgctcatccagctcatccatgatgaaaagtttgctggaggtacgggtcaactttagtccacgaaaatacaccaaatcatcattact

SEQ ID NO: 71010 - DNA, 2834 bp, Zea mays
  Clone ID: MRT4577_164767C.1
aacccttattatccgaatttgcaccctggtaatgcttttccaacctcaattggaactggagggtacgctgtaagtggttccattttgccaccttttgtggctggctttgctccccaaggtcctcttgctacacctctcgacagtcctatgactccaagctttagtggtaggccatctggattttctccagcagggaatcttacagggggaacagagtttatgcagtcatataaagtatacggacaacctggggctggtatgcagccatccattcccgattcgaactttattcatttctttcagcatccctctttatttcagtatactggtggaaatcaatacaatacaatgggtccaagatttactgttgtgaatccaactgaaagctttgatccacaaaagatgatacatcaagctgcatctgcatatccatctgatcagaggcttccactgccaataactggctttcctaattctcctacatccagaagaggagggactgttccaaattatcaaggcatctcatcctacattggagtgccaatgacttatcctactagtccagtgtttcagggacaaacattgcctggagtattgcctcctgttaggagaaacgactctgttggatttctgcccccctcaagaaacatcactggtagccctggaattcaagggcagcgagcaagacagaagtttgatgaatcaaagacctgctctttcttagaagagttgaagtccaacagagcgcgcatggttgagctttctgacatcacaggtcgtgtagttgaatacagtgctgaccaacatggtagccgattcatccagcagaagttggaaaactgcaccgccgaagagaaggcatctgtgtttgccgagattcttcctcatgcttcagcattaatgactgacgtttttgggaattatgtgatccaaaagttttttgaacatggaactcatgagcaaaggagggatcttgccaccaagctcgttggtcacgttttgcctttgagtcttcagatgtatggctgccgtgtaatccagttgccacgcgtcagctcagaagacaggtgtgccattgaacggactaacaaaactctcgtcgaagattgtatacgtgtggctaaccctatcgcctatccctctcgcggtcttgcctcggtctctggcggcggcaccgccgttttacactcctcctccttcgacaacccgtcgcagtagcgtccgtctctggtgtccggctgtccggctctggactcccgacctcgacatcaggatctgcgcctcccgaccggtatgtgggggctctgaagaaggtgcagaaggatctgggcgcgtcggtgttcgagccgctggtgcaggcgtacgccgccgtcgggaagttccctgggatgtggcagcggctgaagatcgagaacgtggaggtcggggaggggacggcccagctgcttgactctatctgcgccgatcaataggctctggaagttatggaacttgaccagaaaatagatctagttcatgagcttgatggtcatattatgcgatgtgtccgtgatcaaaatggaaatcacgttatacagaagtgcattgagtgtgtccccacagaacatattggttttgtagtgtctgcttttcagggacaagttactagcctttcaatgcatccatatggctgccgtgtaattcagagaatcttggagcactgcggtggtaactcacaaggccagtgcataatagacgagatattacagtgggtgtgcatccttgcgcaggatcagtatggcaactatgttacacagcatgttctagaaagaggaaaagctcatgagaggagccaaattattactaaattggccgggcaggttgttaccatgagccaaaataaatatgcatcaaatgtgatagagaagtgttttcaacatggtgatattgcggagcgggatcttctgatcagacggattgtggagcagacagagggcaacaacaatttattggtctgtttggtagtgtagtaaaagtgttccctccattatcccttcctctctttgccaaacgggtcggggttctggaaggtagggctaggacatggggacctgatctcagttcggtacagccaatcagataacaccatgagtatctcagttctgctattccagctttctgggagctgcgaatcctatggattaccaagacatgggatctctgtaaacttatttcttcctgtgttgatgttagtttatatttcctaatcaccttttatattcaatcaggcaatgatgaaggaccagtatgctaattacgtggtccagaagatacttgaaacttgcaacgaggatcagcgggagcttctgctcagccgcgtaaaggatcatatgcaagcattgaggaagtacacatacggcaagcacatcgtaagccgagtcgagcagctctgtggcgacggaactgccgagtcaggttcttgaaacgaaccgccgcctaattcttcataggctggagggtgtcctgctcttttgctcattccgtcagtgacgaagaaagcaaaacggatcaagtctaactctggcgcttcagaacagactaacaaagctgtcgtcgaagattgtataggtgtgactctgttcagggatagtcttcaggttctagaacagaagggtagtggtgtgcatcagtgtatctgtttactggataatagtggttggttaggtgtgtgcagaaaaagtttagtgctatgctttgtatgtgatacatattaactatgccttggaatgttcatatgttgtcctgattacgtgtgaaataactcgttcagttcaagttgcgttttctggggcccg

SEQ ID NO: 71011 - DNA, 282 bp, Zea mays
  Clone ID: MRT4577_164768C.1
gggggcaaatgggcaaacaacattaacaaaaatttttgccctccccatagaccagggataaacattgccccgggattttaaaaaataaaagggtccccaacttccgttcaaaatttaaaccatttcatctcgcatattttgggtaagtatcaggattccccaaacccaccaaaaaattttttgctgaaacaaattctaagggacttaaacattggggaagaagcctatttcgcctaattcttggaggccctaaccctgggtttttggatcttaaaacctttt

SEQ ID NO: 71012 - DNA, 285 bp, Zea mays
  unsure (1)..(285): unsure at all n locations
  Clone ID: MRT4577_164769C.1
gggctaganacnacagagccccagagcncagagggggggcnacggaggatacaacagcnanngacgngnggncngcnggnngngnacccgcngagcnncnncnaggncagccggggnnnccgggggacagnggngncgancagcngggggaaannannaaggggcnaggnaccccaacacgggangaaannaagcgcangaanccaaacnacaccgaannnaagnnnccgcaaancaaagcncacccanggcacaaaancnnccacaaaagaangccancngaag

SEQ ID NO: 71013 - DNA, 335 bp, Zea mays
  Clone ID: MRT4577_16476C.1
cccacgcgtccgcccacgcgtccgtgaaaaaaaaaaaaaaaaaaaaaaaaaaaaaggaaagaaaaaaaaaaaaaaaagggaaaaaaaaaaaaaaaaaaaaaaaaaaaaaaaaaaaaaaaaaaaaaaaagggggggccgttaaaaaggaacaaaggttaacgaacccgagaatgcaaaaaaaaaaatttggtatagggtcaccaaaattaaattaacgggccggggtttaaaaacggagaaactggaaaaacccgggcgaaaccaaaataaatgggctggaagaaaaaaaccttttcgccagttagcctaatggcaaaaaggcccgaaccgatcgc

SEQ ID NO: 71014 - DNA, 1511 bp, Zea mays
  Clone ID: MRT4577_164770C.1
gggtttgatgaatcaaaaacttgctctttcttagaagagttgaagtccaacagagcccgcagggttgagctttctgacatcacaggtcgtatagttgaatacagtgctgaccaacatggtagccgattcattcaacagaagttggaaaattgcactgccgaagagaaggcatatgtgtttgcagaggttcttcctcatgcttcatcactaatgactgacgttttcgggaattatgtgatccagaagttttttgaacatggaactcgtgagcaaaggagggatcttgccaccaagctcgttggtcacgttttgcctttgagtcttcagatgtatggctgccgtgtaatccagaaggctctggaagttatggaacttgaccagaaaatagatctagttcatgagcttgatggtcatattatgcgatgtgtccgtgatcaaaatggaaatcacgttatacagaagtgcattgagtgtgtccccacagaacatattggttttgtagtgtctgcttttcagggacaagttgctagcctttcaatgcatccatatggctgccgtgtaattcagagaatcttggagcactgcggtggtacctcacaaggccagtgcataatagacgagatattgcagtgggtgtgcgtccttgcgcaagatcagtatggcaactatgttacacagcatgttctagagagaggaaatgctcatgagaggagccaaattattattaaattggctgggcaggttgttaccatgagccaaaataaatttgcatcaaatgtgatagagaagtgttttcaacatggtgatatggcggagcgggatctcctgatcaggcacattgtggagcacacagagggcaatgacaatttgctggcaatgatgaaggaccagtatgcgaattacgtggtccagaagatactcgaaacatgcaatgagaaccagcgggaactcctggtcagccgtgtcaagggccacatgcaagcattgaggaagtacacatacggcaagcacatcgtaagccgagtcgagcagctctgtggcgacggaactgccgagtcaggttcttgaaacgaaccgccgcctaattcttcataggctggagggtgtcctgctcttttgctcattccgtcagtgacgaagaaagcaaaacggatcaagtctaactctggcgcttcagaacagactaacaaagctgtcgttgaagattgtatagttcaagttgcgttttctacatggccatgggaccatctgccgatttgatgaaaaaggaaaggttgtgcacctttgtaagcggcatggagatgagctgcgctatttttttttttacaaaatgtctgctgggattgaactgtctattttatagaaatatcatattttcttttaatgtcaacagaaaaattacggactgtgtatggatcccatgtagctaaggccagtgagtgttacgatgctttgtcagttgatgttatgtcagtcttttcattgttaattctgaaagtagattttatgcc

SEQ ID NO: 71015 - DNA, 312 bp, Zea mays
  Clone ID: MRT4577_164771C.1
tttttttttttttttttttgtttttggttttttttttttttgttttgtttttttttttttttttttttttttttttctaaaaccgccctttataatcccaaccagacccttacattaaggggagggttttattagggggataaaggacatggggccttaatctcacactccacagcaaaggacacaaaacccctgggggcacacccgggggggggcggccacaggtcctggggaccaaactatggtaattggacaggaaaaattaagcccaacactacaggcaagaggcagcacccacagcttatggaattc

SEQ ID NO: 71016 - DNA, 1998 bp, Zea mays
  Clone ID: MRT4577_164772C.1
attcatgtgattttacagtaaaaatctgttagaatttcatgatggattatggtgcattggcaatgaagatcattcggtgcgcaaaccctatcgcctatccctctcgcggtcttgcctcggtctctggcggcggcaccgccgttttacactcctcctccttcgacaacccgtcgcagtagcgtccgtctctggtgtccggctgtccggctctggactcccgacctcgacatcaggatctgcgcctcccgaccggtatgtgggggctctgaagaaggtgcagaaggatctgggcgcgtcggtgttcgagccgctggtgcaggcgtacgccgccgtcgggaagttccctgggatgtggcagcggctgaagatcgagaacgtggaggtcggggaggggacggcccagctgcttgactctatctgcgccgatcaatagcccaagcacgtcctagaggcggcgacagaaatgagttgctggcaagtttgacaaaacaagcagacatggtcttggtggctcagcaggaattaatcacccaaaaaaacagttacaagttgggttcatgcatgtcttacgtcaaggattgtactccccgttaaactgttggttcgggccagtggccggcccggtacgttcaggcccaccgggcgaacgggccggcccggcacgatttatccctgtgcgtgccgggtttgggcatgtcgctaggcacgtgggccagcacgacccggcccgaagcatcaacgggccgtgcctggcccggccctatccgtaccgggccgaaacgggttcggaccgggtccgtgccgggtggcccgtttggacatctataggtccctatttggacctgaagtgaagcattttaaagttgaaggacccagattctcacttcgagagtttatgaacctagatgagaatctaaggctctggaagttatggaacttgaccagaaaatagatctagttcatgagcttgatggtcatattatgcgatgtgtccgtgatcaaaatggaaatcacgttatacagaagtgcattgagtgtgtccccacagaacatattggttttgtagtgtctgcttttcagggacaagttactagcctttcaatgcatccatatggctgccgtgtaattcagagagttttggagcactgcggtggtacctcacaaagccagtgcatagtagatgagatattgcagtcggcgtgcgtccttgcgcaagatcagtatggcaactatgttacacagcatgttctagaaagaggaaatgctcatgagaggagccaaattattactaaattggccgggcaggttgttaccatgagccaaaataaatttgcatcaaatgtgatagagaagtgttttcaacatggtgatattgcggagcgggatcttctgatcagacggattgtggagcagacagagggcaacaacaatttattggcaatgatgaaggaccagtatgctaattacgtggtccagaagatacttgaaacttgcaacgaggatcagcgggagcttctgctcagccgcgtaaaggatcatatgcaagcattgaggaagtacacatacggcaagcacatcgtaagccgagtcgagcagctctgtggcgacggaactgccgagtcaggttcttgaaacgaaccgccgcctaattcttcataggctggagggtgtcctgctcttttgctcattccgtcagtgacgaagaaagcaaaacggatcaagtctaactctggcgcttcagaacagactaacaaagctgtcgtcgaagattgtataggtgtgactctgttcagggatagtcttcaggttctagaacagaagggtagtggtgtgcatcagtgtatctgtttactggataatagtggttggttaggtgtgtgcagaaaaagtttagtgctatgctttgtatgtgatacatattaactatgccttggaatgttcatatgttgtcctgattacgtgtgatatctctcgttcagttcaagttgcgttttctac

SEQ ID NO: 71017 - DNA, 2226 bp, Zea mays
  unsure (1)..(2226): unsure at all n locations
  Clone ID: MRT4577_164773C.1
gtcgcagaacacattgagcggggacctaaaaatgcctgcaaatgcttcttcagngcttcaaggagtggacttgtcaaacaatgccttctctggagttataccatcggaaatctcgaagctgcagaacttgcagtcattgaacatgtcatggaactcaatgtatggaagtattccggccagcattttggctcgagagtggccgggagttcttgattttaccgccaaccgactaaatgggtgcattccagcttcaaaaggaggggagtcattgaaggagttgaggctggggaagaacttcctgactggcaacatcccagctcagattggcaattgctctgccctcgcatcactggatctttctcataacagtttaacaggagtgattccggaaacactatctaaccttaccaatctcgagattgtggatctttctcagaacaagcttactggtgttctaccaaagcagctttctaatctcccccacctcttgcaattcaatgtttcacataaccagctctctggggatctccctcccggtagcttctttgacaccatccccctatcttgtgtgtcggataatcctggcctttgtggcgcgaagctcaattcatcttgtcctggtgtgctaccaaaaccaatcgtgctgaacccaaacacttcttccgatccaatatcaccaaccgagcttgtgcctgatggtggtcgccatcataagaaaaccatactcagcatctcggcccttgttgcaattggtgctgctgttctaattgctgttggtgtcattaccatcactgttcttaaccttcgagtgcgtgcccctggatctcattctggtgctgtcctggaactctcagatggatatctcagccagtcgccaacaaccgacatgaacgcagggaagcttgtcatgtttggaggaggaaatccagagttcagtgccagcacccatgctcttctgaacaaggactgcgagcttgggcgtggtggttttggcactgtctacaagaccactcttcgagatggacaacctgttgccatcaagaagctcactgtgtcaagcttggttaaatctcaagttgaatttgagagagaagtgaagatgctgggtaagctacgccatcgcaacctagttgcgctaaagggatattactggacgccgtcgcttcagcttctcatttatgagtttgtctccgggggcaacctgcacaaacaattgcacgagtcatccaccacaaactgcctgccatggaaggagagatttgacatagtcctcggtatagcgagaagccttgctcatctccacaggcatgatattatccactacaatctgaaatcaagcaacatcctgctcgacggatcaggcgaggcaaaggtaggagattatgggctagcgaagctgcttccaatgctggaccgctacgtcttaagtagcaaggtgcagagcgcgcttgggtacatggctccagagtttgcgtgcaggaccgtgaagatcacggagaaatgcgacgtgtacgggttcggcgtccttatcctcgagatcctgacagggaggacgcccgtggagtacatggaggacgacgtggtcgtgctctgcgatgtggtgagggcggctctggacgaaggcaaggtggaagagtgcgtcgacgagaggctctgcggcaagtttccgctggaggaggccgttccgatcatgaagctcggtctggtctgcacttcccaggttccgtctaacaggccagacatgggtgaggtggtgaacatactggagctgatcagatgcccccaggacagcccggagactgaactgggttaacctcctctactacctacactggatcccggactgtttgttggtttcacttttgagatccttctctgcttggtaactgaccggacgatgaaaggtgaagcaagcgagttctactctatccagtgtgccgtcgccgaagtgtctagctagtcttctgatggttagggagttattatggaacgcctacagtagtttcgtcgcctcccggggtgttgatgtgtttgacttagatcctcaccagtaaggccaagatgtatggtgtggatcctctcacatcaatcctggtggcctgtaatttcaatttattttttttagctatgcaatgtggtgcaacttgccctttttctagaccatgttatgaaaacaaaaaaaaaaaaaaaaaaaaaaagggcggcgactctagaggatncaagcta

SEQ ID NO: 71018 - DNA, 289 bp, Zea mays
  Clone ID: MRT4577_164774C.1
atgtgaggatgcgctgcggaaaatcaaggccctgattgggccggaccagaaggagtaccaccgtgagctggagcgcaactactgccgcctgcgggaggctctgcagcccctgcttacccagcgcctgccccagctgatggcacccaccccacccggcctcaggaactccttgaacagagcaactttccgaaaggcagacctctgagcgcacaaggaccaaagctgtacctagaggaaccagcacccgggcctcagctgtctgtgctgcgaggggagtctgcctggtgcc

SEQ ID NO: 71019 - DNA, 331 bp, Zea mays
  Clone ID: MRT4577_164775C.1
tctacgcgtacgactagatctagatccagatctagacctctatctcacatctcagggtccatttcgaatgtctaacatttttcattacgtccacgtctacaatgctaaacctcaccatcaataccacactcaactcaaacgacagcgctttaaacacaccggagcatacggaccatacatttctcacctgtactacaactggcccacctgcacctgtcatcaattgtcacagacgtggcaccacttgtccccaagctttaaggacacgacttttatctccccacatgcattcacgaacactttacgaacatgttccttagctttaccaaca

SEQ ID NO: 71020 - DNA, 927 bp, Zea mays
  Clone ID: MRT4577_164776C.1
aactacaacaatgtattatttcattttaagttccaatagccaataaatacagagtatttaacatcacaaagattcaaatgtacccaataaataataaagttatgttgaatcattatcgcttcgaaacatttttagcccatatccaacagggaatagcgggtcatagttagagtctccagcatctataggcaattgatcaacagacttacaccatgtcacaggcaatgtgcccacaaaatcatgatctccaaagaggcaatcggtaattcccatgccctcacttccaggcagccaggcagcgactagagcttctatcttttccaaaacttgtgactcaataattaatggccttccagatataacaatcactagggtagggattttacttgcaacacggatgataaggtcagagccattaaacggaatactaaggtcagttctatctcctgtccattcggcatatggaacctctccaacaaccaccaccgcataggaaaaccccccagtttcaatcatagcttcggttgggcatttctcatacacaacttcagtttgcactcccactaattcttgtatggcctccaatatgctcgtaccaagagttatttttccactgtctccatgccatgctatcgtccagccaccacattgatatccaatatcatcagcatgtgttcctgcaaccagtattctttttgcatctttggccaatggaaggaatggcttattctgatccttgccatttttcagaagtaccaaagacttgcgaacagcctcacgcgctagtaaccgatgttccttacaaccaactatgtccagtagagattggtctgaaaatggatgctcaaacactccagaaataaacttaaccctcagaattcgttcaacagcatcatcaatccgagacatggtaaaaaaaaaaaaaaa

SEQ ID NO: 71021 - DNA, 741 bp, Zea mays
  unsure (1)..(741): unsure at all n locations
  Clone ID: MRT4577_164777C.1
ctcgaggccggccgggccgggatctcaccagttcaccactcacaatcacaaccctcgcgtggtttgttttggcgggccactgcagctgtctcgctcatcctttctccgtcctccttcgtccccggccattgctccgagctcgccaagaccgccaggaggcatccgtagcataggcccatccagcctatcccagcagcttccccacgggcgccgcgcatggccaaccgtgaagggtctgcgcaggaacatggaacgttggaggcatatgtccacccaatgacttggatattgaagaatggctggatatagatgatgaaccagctgatatttatgttctcggatttcaagagattatcccactggaagtcgggtatatgattggaactgaagacactcgtccggtcgcagtatgggagcatatcatccacgaaactttgaacaagaagtgtccggataaatcgaagtccaaacgccacagtgactctcccccgccagcaaggtttaatccattagactatgttcttgccgtggagaatgagttgcataacgaatccaacagtgatagcgatggggagcttcatcggctgcacaatgcagaatcatccgattcagctcgacgccgtctccggncattggatttagcctgtggcgttcacaattataatggggataanaggaaaagctgcagtatgtacgggtaataagcaagcaaatggtaggagtgtttctttcggtatgggt

SEQ ID NO: 71022 - DNA, 158 bp, Zea mays
  unsure (1)..(158): unsure at all n locations
  Clone ID: MRT4577_164778C.1
accaaatcctgctctaaatttggatacacatgtttttatnntccaagtgaagtattnttcttttgttcagacattncnntccntttnctnaattcaatattnacacctatttttttcttaatacgatttgaactgtgaaaaaaaaaaatttttttttt

SEQ ID NO: 71023 - DNA, 1000 bp, Zea mays
  Clone ID: MRT4577_164779C.1
cctcgaggcggcgggcgggtcaccagtcccactccatcacaaccctcgcgtggtttgttttggcgggccactgcagctgtctcgctcatcctttctccgtcctccttcgtccccggccattgctccgagctcgccaagaccgccaggaggcatccgtagcataggcccatccagcctatcccagcagcttccccacgggcgccgcgcatggccaaccgtgaagagagtcaaatgcagcaggcagcacacgtaccatgcaggcttagaaggcagaaatcggagatccttcgtgctcagtatgttgacgttagagaactcagggtctgcgcaggaacatggaacgttggaggcatatgtccacccgatgacttggatattgaagaatggctggatatagatgatgaaccagctgatatttatgttctcggatttcaagagattatcccactggaagtcgggtatatgattggaactgaagacactcgtccggtcgcagtatgggagcatatcatccacgaaactttgaacaagaagtgtccggataaatcgaagtccaaacgccacagtgactctcccccgccagcaaggtttaatccattagactatgttcttgccgtggagaatgagttgcataacgaatccaacagtgatagcgatggggagcttcatcggctgcacaatgcagaatcatccgattcagctcgacgccgtctccggccattggatttagcctgtggcgttcacaattataatggggataaaaggaaaaggctgcagtatgtacgggtaataagcaagcaaatggtaggagtgtttctttcggtatgggtccagagaagcctgcagaagcacatccagaatctgagagtgtcaactgtcggtgtaggtacaaggggttttattggtaacaagggatcagtatcagtcagcatgactatgcatgaaactcatttctgctttgtatgttgccaccttgcctctggtgagataaacggcgacg

SEQ ID NO: 71024 - DNA, 199 bp, Zea mays
  Clone ID: MRT4577_16477C.1
cggttcaactaattttctcaggtctcatcatgaagcttcgcgtgttcatcgttgctgtcctgattgtgatcaacttgggcacctgcatggcaaaggttggatcttacggcacaactgtgtcagcgtcaccgaggcaaatccgagtacttaccgccgcaactgatggaagaaatggacctcccagcaatgatcaccagtg

SEQ ID NO: 71025 - DNA, 642 bp, Zea mays
  Clone ID: MRT4577_164780C.1
gagtgagttttttatagatatcctgctttaggaaaggatgataacgtgcatgctgtgtataaatattggacaagtaagaggtccaagagagctgcaccattgcttagggttttcagggtgcacccataaggcgagggcatttatcacaaaagtctgccatgaagcgaaagagatctttcaagagacaaaaaagccaagctggtcgtggaaagcctgaagctttattgcaatacaatgctgaagaggacgcagctttgcacagagttgcccaagctgaacgtgcggcaaaacaggctgtagaaagagctattcgactgcgcaacagagcccagtctctcatgacaaacgcagagctcgcagcatacaaatccgtcatggctctcaggattgccgaggctgctaggatatctgactcgtcccgagatattgtttgtactatcctcgactaaagaaaaatatgggttgttcattgatttgtgtggagagcatggaaaatactcttcatcgcccatgatattggcttttcgacaagctgtggggttatatccccccccttctgttaactcactttgtcaagtcaattttgaggcgaatgcttgaactgaaaactgtaatttcttgtataaattgaagtagttagct

SEQ ID NO: 71026 - DNA, 384 bp, Zea mays
  unsure (1)..(384): unsure at all n locations
  Clone ID: MRT4577_164781C.1
atataatatcgaatggtataattgggggccgagtaatatatggttacagcagacacaatcggatcaaccaacatgcatgtaaacacacgtacatcagcacaaagactgacaccaaacatgcaaagagagatagcaaacttaacaactctgtttatctttcttttacacacacaccacacaatacctatgtatggcatccagctcagcctcgcttattattgttcaaccaccaccacaagctagatagattataatcatattcatggtcttcaatcgatgtgatcaacagttgcaggggtcgcacttgcagcccttaccgcanctcagccgttggcggcctcgccggactccgccgagtcctccacgaactcgagcgcggccttc

SEQ ID NO: 71027 - DNA, 1314 bp, Zea mays
  Clone ID: MRT4577_164783C.1
caactatacaccacttattggtatctgagaggtgtgaagatacaagggattactaggtatttgcttaaaccttcagatatgaggtcatatgtcattaatcgtcatactcaagcctacatgtggacagttgatgatgcatggaagcttgagttcactgataggtgggactggctgttattcaaagagttgcatgttgtgggccgtgagcgtaattctcagggaaaggcaatcccaattcctggggtacatgaagtttctggtgagatggaagggattgttacagatcctttcttacgccctgtgccagactatatcaggatggtggatgatgaagttgggcgagctatctcaagagattctatttatgacatggactcagaagatgaacaatggctcattcagttgaatcatgcagattctgattcaaacagctctcaaaggaatcatatctcttacgaagactttgagaggataataagcatatttgaaaaggatgcctacaacaatgcccaaggaaaaaatgatttgagtgagtttttttatagatatcctgctttacgaaaggatgataacgtgcatgctgtgtataaatattggacaagtaagaggtccaagagagctgcaccattgctaagggtatttcagggcgcacccataaggcgaggacatttatcacaaaagtctgccatgaagcgaaagagatctttcaagagacaaaaaagccgagctggtcgtggaaagcatgaagctttattgcaatacaatgctgaagatgaggcagctttgcagagagttgcccaagctgatcgtgcagcaaaacgggctctagaaacagctattcaactgcgcaacagagcccagtctctcatgacaaacgcagagctcgcagcatacaaatccatcatggctctcaggatcgctgaggctgctaggatatctgactcttcccgagatattgtttgtacaatcctcgactaaagatggatatgggctgatcgatttgtgtggagggcatggggaatactctttttttttctttggttgcatcattgcccatgatgttggcttttcgacaagctgtggggctattttttcgccctcccctcgggttgtcaactttgtcaagccaattttgaggtggaatgcttgaactgaaaactgtaattccttgtataaattaaagtagctagctaggttctgtatcttatgggatctgatatgtagaaatgatgaaaggaaaaggtaaaaaaaatgcatgagatgaagcgaaaaaaaaaaactgtttgcaaaaaaaaaaaaaaaaaacccgcggcc

SEQ ID NO: 71028 - DNA, 700 bp, Zea mays
  unsure (1)..(700): unsure at all n locations
  Clone ID: MRT4577_164784C.1
gggttgccttgactgcctgmctcgtcttaccaccaagctaagctagcgcgttccttcgttcgttcgttccttccttcctccctcgcttcctgttgctggtccatggaadwararraarmgcarwggcgggcgcgggggttgtgghgctgcagctggmcctcctcgaggcggcggcgcgwcggagcgagaggccaagaggcgccgggtgchccsggttcchgcgggcccaccggccggggcagcagcggcggcagchgcgccgggggcgccgcagccgcrggccccgcgccgtgccgcgtctcttccmggcctgccgccacgtcttccggggccccggcwccgtgcccygtcccggcgdggtcctgctgctccgccacatgctcgacwggytgcggccggyggtcgtggggcctktgcccggycctgngcttcttcbgtgctcgngacgcctcacgtggcggtggccccccgcccctcdcgcccccgncggtattccyctgcccgnytttctcgctggtcctcctcttcctgccgcgmyacgcggtgmtyccgctcccccacccccctggggtggcggtgttccgcccgctgctcctgggggtcgntgcccgtctcgtcgttcgcctggctcytctctgctgaccccgvtccttcttccgccrcgngcyccccctgctcttcgtcctccgatggcccctgc

SEQ ID NO: 71029 - DNA, 753 bp, Zea mays
  Clone ID: MRT4577_164785C.1
aagcagttcttcactgcgcccaactcgcctgctggccggggcgcgcccatcttgcctgctcgccccagtgctcctgctcccccttgtgcgccaccgccgctgttgcctgtcgcctccaccggggcccctcgtgctggtgctaggcgtcgcgcccgtgctgagaaggttgtgcagccggaacggcatagcacccggctcgctcagaaggcctcatccaacttcgtcaacatgactgacaaggctgttcagcgaaaggaaattcagaattccctccagccatgttctgctgctgtcaagaaagaagttcagaagaaggggctgctcaacaagaccaaggccccaatctcagtcgctgccctgcgcaagctggtgcgcgctgctggcctgggttgctctgcggctgacgccgtgggagtggtgccgccggccgtggaatgaagatcttcagcctatgttccaagcgcacgttggaggtcggcgtccgtgcgtttgtgtctgtcgccgctatctgctcgtcctgttgtgctgttcgtctctctgttgttggtcggctctgtgagcctgttttctgtcttctgctgcttaggctagactcttctgggtggcttgctaatctttgtcccttggtgttatgtttgtgtggtcatggctagttgtggtaagaaccttgctgtaatgtcgtggaacgttcgtggtcttggcgactcggataaatgtgttcttgttcgcgaaaaaaaaaaaaaaaaagcggcc

SEQ ID NO: 71030 - DNA, 365 bp, Zea mays
  Clone ID: MRT4577_164786C.1
cagaacagcagctttattgatcaaatctggattcatcgaccttgataatgtctattctcacttgcttccaaatgacgacgaggcgtttgagcattttgattctttcatttcaagaagaattgatgaggttggtatttcttataaatctgtaactggccaagagagtagcatgaaagggagtggcaagaaggttgatggatggaaaactttagaagtttcttgaagtaaaagccttatgtacagccatcccttcatgtgacatatactgcatggttatgttacacgttgttgtcttgtctaactatgtacaatattttccccttttgtcgtaatgaaaaacagaaagagctttagtttttttcttc

SEQ ID NO: 71031 - DNA, 145 bp, Zea mays
  Clone ID: MRT4577_164787C.1
cgccgagctgatcgcggccgaggagctggaggctgacgccaacatccaccccgacgacggggactcgccaagcaatttacacgatacctcctaaattaaaaagtgaatattcaagatgaattggttgcttattatgagcttactt

SEQ ID NO: 71032 - DNA, 420 bp, Zea mays
  Clone ID: MRT4577_164788C.1
ctgcagggagccgggccggaagtatactgtgccgggtcgacgagcttttgagtcggcggccgccctgtcgtcgttttggatcagttgtacgactatacgtggccaggcccaacgagcttctaacccagaaccattacgaattctatgtacgcctgctgaacgcatgcagcttctaccggcagggggctcttatacggcgacagggtgactgtgttgagtccactcctcacttgacagcacaggcactggggatgatcaaatgcaagaacagcatgactgtagggaacactgacgcaacctaggcttcctaggctacccttagacacctcgatggcagaagcgatgccaaggaaccagacgcgcacacacatgagcactctcatggtaggctgccaagactgagtggacacgagcaagaac

SEQ ID NO: 71033 - DNA, 369 bp, Zea mays
  Clone ID: MRT4577_164789C.1
gatggaacaatgaataacccaaaccttgccagttttcagcatgtcataaggcctccatccgagcgaagggaccatatgtctcatgaatcttctaatgctcctgttaacaatcatcaatcaacttctgaagtcaacaaggggtactttcagcaaggcataaaacaaattcactctgatgcaaggcaaggacaagcgcacctagtaaatggaacctggccgcatcaaaagactgaactgctcagaagtaatttgcagtcaactggtgtacaatgctacaccacctggtggacatggatttgggatgtcacaacaaaatgcaactgatcacaaaaatgactgctcggagaattttcctgaaagacatgtcat

SEQ ID NO: 71034 - DNA, 299 bp, Zea mays
  Clone ID: MRT4577_16478C.1
aaaaaaaaaaataaaaaataaaaaaaaaattaaaaaaaaaaaaaaaaaaaataacaaaaagaaaaaaaataaaaaatataaccatataaaaaaataaaatccataaaaaataaaacataaacactactactaacctatctaccaaatcaatatatatccttatatcaattgctgcaattttttttttttgacatacatatctgtaccttatgcatgtgtgttatttcagaatatagataaattttttcttccattatatcaaaaatcgtaaactatcttttatatggcatccgttttaa

SEQ ID NO: 71035 - DNA, 229 bp, Zea mays
  Clone ID: MRT4577_164790C.1
atgacaagaaaacaagggaaagagttaacctgtcacatagcaggttaactttttcagggtttgcagttagaggtattcgaccattcactggctgagccagatcacgggaacttgagagcttttactgtgattcttcaatgtaaaaaataaacaacaatgtcaaactgtgtttatatgatttgtataaagcctttttaagattactatttaaataaacattataccagag

SEQ ID NO: 71036 - DNA, 478 bp, Zea mays
  unsure (1)..(478): unsure at all n locations
  Clone ID: MRT4577_164791C.1
gatggcattgaacggattttctcaacaatcaacgtccacatagacgaacaaggcgaacattatggactggcgccggtggcagagagtgtggacaagccaaataaattacctgccgtgtgctggcgacgttggaacttggaacgagagtgtactgtacggagccggaaaaaaaccacgaacgcgttctgtagccggcggcgcagtagagggtacaactgtggctacttttgccaaagtgcgtggcccaactaggttagctttagcccacttcgttgtttaagacaaatggagattgctttttagcagactgctgcgcgcacgttttgatttaaggaatttttttaacaacaaccaaagtaacaagttaaactttttcatatgctcctgtagttgctaaaagagctaatttgctaacctcatttttttcaagagatttacattntctcaaataaaattagtttttttttaaaaaaggaat

SEQ ID NO: 71037 - DNA, 626 bp, Zea mays
  Clone ID: MRT4577_164792C.1
acggtattttggtagctacgatccacccaaaagccatccccgcaaaccggcgggccttgggtgctacggatctgagctcgcatctgtcaagaggatgacgcgccgtggcacgccatggcgacgttgtctgtgaaccctaacgcgccgctcttcatcccggcggtgtaccgtcaggtggtggaattgttgcctgagtggctcgagcttgacaactaccaccgcctggttccgtgaccactggttccgtcagcactgagcactacgaggctcgccttcgccgtcgtcgacgccgagctcgacgttgccgtgcttcttcctgacgactccgtcgatctccttgacaccgacgacctcttttacgctgcctgacactccaccagaccgcacagcgcctagcctacgctagctgtcacgctactacctcgacatgctcagggggctgagcctcacctgcctccgggccggcgacgctccatcgccgcagccgctgctgcgcgcccagcagcagatgcacgcggacaggccggcgcaccacgcacaggggcgccgagcgcctggtgatcatccaccaggctcgctacaagctgcctgctcatggcgggcccgcgccatggatgtggagcgta

SEQ ID NO: 71038 - DNA, 369 bp, Zea mays
  Clone ID: MRT4577_164793C.1
atcccggtcgccacgcgtcgtctcacagcgggtctcggtatggaaaccaatctcaacctacagatcaacaggcaatccagtgcatttacttataccctgtcctcagcgatatagctatacacataccttgggcttatgcacaaacatagcacacacacacactgtgtgcaacctgtgctacttacaacagagttctcatcaacactagtcatgacttgctttattgaacacacactacatcagcagtactgtgctacccagcattctcatcaacactcacatgacttctgtattacagacacaactcacattagcagtagtgggtagcctgtacctttgcacacacagtgtgcgtcacagacgtggcta

SEQ ID NO: 71039 - DNA, 389 bp, Zea mays
  unsure (1)..(389): unsure at all n locations
  Clone ID: MRT4577_164794C.1
gaaagaataagatgctatcactcaaatgtgtagattgtgggatggcatgaaatgttgacatgagaggacaagctcacaggcttaagggcngagagaacccaaccgaatacaagaaggggggtatagtttggttgaacgccattaggagaggtgacaaggaacgccttaacgtaggtgaggctggtgcttaggaccacaccaaactgagaacagatgcatatgagaacggtgcctcttgcaaggagtctactggctaaggttcaaagtagatggctactgctatgtggctctgatgacgacacactcatcctatgctactcacagtcccaatagtgaacattcaactacctacgaggaagaagatgattatcatgtacactgtgagactg

SEQ ID NO: 71040 - DNA, 610 bp, Zea mays
  Clone ID: MRT4577_164795C.1
aaaaaaaagaccttgtaatttcaaggggggggcttaaattcgccctccaaatttcaaattaccaaaccatttcaaggggttttttcgttggccccctttacaactgcccattacctttttaaaggttttgtttttccaaaaaaacatccttaaatatttcctaaatcctaagttgcctcccaaaataaaaaataccccaaccccctcttaaatttcctttaaaaatttgccccccaagttggggggggggcccttttttccagtttgggcaaaaattggaaaaatttcgaacaaaaatcatttttttccccccagtaaactcgttttttcccccataaaagggactgtttgggggctttccaccaaattaatttcaacccaaagcgtaatttttttctccaaaagtaatcgttttttaaactgaaagaaccttttaaatttaattttgaaccctgtttggggggttcatccccccaaaattccttttcaaacttttttttaggaagaaaatccttttttttttggggttggcccctaaaacaaatggtgtcccctgccccaaaaaaaccatttttttttaaactttgacctttcccaaaaacaatttcgg

SEQ ID NO: 71041 - DNA, 1123 bp, Zea mays
  Clone ID: MRT4577_164796C.1
gccggccgggtcggggtgttttcttccttccccagtcgcatcccacgcgcccgctcctcgtcgccgtcctcttcctccatctcacccgtccctcagcctcgttaatttttcgcccccatctttgaacgcagcggctcaacctccatcgttctctccctcctcctccccccgatcccgtccctataaattgcgcccccgccgccacagcggaccgcaagcacgcaatcacacagctcgctgctgctgccgtctccccgtgtcctgtcgttctcccgtcgccgggggcggaagagttcggcgggcggttggggattgctcgggagccccgtgatggcgaagctgtacgtgcaagcgttcccgcccgcggatctgaacaagaacaccgagtggtttatgtacccgggcgtctggacgacctacatcatcatcgtcttcttctcctggctcctcgtcctctccgtctttggctgcacccctggcaccgcgtggaccgtcgtcaacctcttccacttcgcgatcacataccactttttccattggaagaaaggaacaccttttgctgatgaccagggaatgtacaacacattgacttggtgggaacaaatggacaatggcaaacagcttactcgtaataggaagttcctcattgttgttcctgttgtcctgtatctgatagctttgcacaccacagactaccaacaacctatgctcttcctcaatacccttgccgtcagcgtgcttgtggtcgccaaactaccgaatatgcacaaggtcaggatttttggaataaatgctgagagctaaacagcgtcatccttcaccagacattttacctatatgctttttcagaacggtctgtatgttccccttctagtgctttagttgggctcattcatcagagtaccatagtttaaaagttgttagcagatgggccttggtcgttgtatagagagatgctcagaggctggactggacatgtcgctgctgtacatctgatgtgcacagattctgtacacccttaatgttgctatatggtttgttgcgagcatctgtcagttgctatatatgtatgtatagtatcattcttgcagagcaatgtttcctcagctaccataatactagt

SEQ ID NO: 71042 - DNA, 446 bp, Zea mays
  Clone ID: MRT4577_164797C.1
aaacacccaaaacaaaggtttttttttaacattaaaaccccacaacgatgggcccccctacaaaacaaaggggggccccaaacggaagggttttgcccccccacaagggcaaagggttaaaaaacagtttccaaaatccagcaacaacaggccagatttccttaaacaggggcccccaaaaaggtaaaacaattctcggggggggtaaaaagcccccaaaccaaaggccccaaaaaaaaaaacacccgcccccctttggaaaagggcaaaagtcctcatcacttttggggccaaaaaaaaaaaaaactttgggggaaacctttggttttttgggggccctaccaacaaaaaccttggaaggggcctttttaaaaaaccccaacttcaggggtggcccctgaccccgggggcaaaaggcggccatgtttttgggggcccaacccccc

SEQ ID NO: 71043 - DNA, 1411 bp, Zea mays
  Clone ID: MRT4577_164798C.1
ctatcgaagagctatgacgtcgcatgcacgcgtacgtaagctcggaattcggctcgaggatctttcatgtgacttctgcgttcgtcactccatcaggctcacatggtatatagtgaacatgcatgatgcactagctaatcctaaaaaaagttaactgcttttcatgccttattcgttactactcgtatgctaaagcaatgagcggcagaactgcactatttttatccattattcgcagaaagatactaactgtagcttgcttcctccccacattttcttgacagctcgcttcccccggggatccacgcgcccgctcctcttcgccctcgtcttcctccatcccacggtcccacctgtccctctcaccgcctcgttattttttcgcccccatctttgaacgccgggactccaactccaccgttcctccctcttcgttccctccgatcccgcccctataaatccagtcgcctcagccgccacagcgggccgcaagcacgtaaccacacagctcactgctgctcccgtcttcccgtgtcctgtcgtgctcccgtcgccgggggcggaagggttcgcgaggccggcgggcggttagggatttctccggagtcccgcgatggcgaagctgtacgtgcaggcgttcccgcccgcggatctgaacaagaacaccgagtggttcatgtatccgggcgtctggacgacctacatcctcattgtcttcttctcctggctcctcgtcctctccgtcttcggctgcacccctggcaccgcgtggaccgtcgtcaacctcttccacttcgcgatcacataccactttttccattggaagaaaggaacaccttttgctgatgaccagggaatgtacaacgcattgacttggtgggagcaaatggataatggcaaacagcttactcgtaataggaagttcctcattgttgttcctgttgtcctgtttatatttgatgcggccccctctggagggcctctttggcgaccgtaacggtgagaggaggaggaggaggctagaaccagggatagctctggtcctgtatctgatagctctgcacaccacagactaccaacaacctatgtcttcctcaatacccttgccgtcggtgtgcttgtggtcgcgaaactaccgaatatgcacaaggtccggattttcggaataaatgctgagaactgagcaacgtcatccttcgccagacatttaccctatatgcttttcagaacggttttgtgtgttcccccccttctagtgcctttagttgggctcatcagagcaccagtgttgaaaaagttgttagcaggatgggccttggtcgctgtatagagagatgctcggaggcgtgctgtacatctgatgtgcccggattctgtacactcttcacgttgctatatattcggtttgttg

SEQ ID NO: 71044 - DNA, 450 bp, Zea mays
  Clone ID: MRT4577_164799C.1
cccacacgttcatgagaatcatgatcctgatgagatcgataaagcctatgaaacatgccgaacagcatgccttaatgatcttacctatgaagagtgctttcacggaaggtatgacatcttggatgctatactccatgctgcagtccagtgccctgttctgagcatagaggctattattgatgcctgtgcactgtactatgcaccgtacacgggtgcacatgctgctgttgtaatacctgatggattacctgaccgcgatatcaaatacatgttgaaacttggcatgagacttgtgatggctgctttagacgagggacatgacgaccgagaaatggaccgtgatgtagggattgatggtgtactgcttatccgcatcaataacacgtatctcgagacatttgcagtcgctattacgctcacggaagggcttctggaacgtgatctaggaca

SEQ ID NO: 71045 - DNA, 230 bp, Zea mays
  Clone ID: MRT4577_16479C.1
aattcggcacgaggcgcagccgacggccagccaaccgtaaagcctgcctgcccgaagctagcagaacgaccggcaacagcagagatgcctgactgacatgggacccgtcatggaagcatcatagccctaggcggccagagctctcagacaatgacatacacgcgaccgtccgccatccaccactgggaaaggctgccgacctaacacaatggactattgttctcgcgcgg

SEQ ID NO: 71046 - DNA, 506 bp, Zea mays
  Clone ID: MRT4577_1647C.1
tcgtccggggctatgtgtggagcctgaacgttacacagacccataccggcatgcagatctcgcatgacacccagctgacaaggcagagcgccaagggaacgaacgcgaggactgtggtcaggctgtagaccatatcagtggatgccttgaaacagcgacgagacgtggcgctcgaaccgagtgcttgcatactgtaactgagagacaccaaccaaaggcgtatcttggggtgaagcccacactataccgctagccatatctgacaagcataaaaacgtacgccccacacagtaccggggaaggtccaacaggaactctacatgcaactgggatagacaccaaaagcgactcttagacaacaaaagcggaacagcacagctcagcggaatacgtgtccaaaaaactctgaacccactcagccaacaaatactggggaaccatcatcatatatatggtccagtgacatgaatatgatgagggctacacatacttggatgctgagtaac

SEQ ID NO: 71047 - DNA, 307 bp, Zea mays
  Clone ID: MRT4577_164800C.1
agcagccacccgaggacagagagacaacgccgcgtagcgccagaccaccagcaacaggcacccattcacccccggcagcacaccgccacgcagcacgggccacaaggcaaccccgccgaggccagcacaggacgccaccgacgaagcacaggacccgccgacggcgggctcagcggggcgccccggcaccacccagaagcaccgaaacgcgcccacaggagcggcaagaggccggacaccctgccgggggagacggggcagagcccggggatgcgaagccaccagagcggcagccacgacgtcccgg

SEQ ID NO: 71048 - DNA, 267 bp, Zea mays
  Clone ID: MRT4577_164801C.1
attgattgtatgatccatacaccagctgtttgattcatcttacctgtatttaatttttttgttgtgcacatggagggcctgtgttagatcataggaactaagatatgggtcatggcagtcaattcccattaaataatatgatgaccaactttgtttgcagttagtgtaattaatgaacactgatgtttttggtatgcaatattttacgttcttaaagttgagcggagattaataaaaaaaaagttaatagaggtagttttgttcgcc

SEQ ID NO: 71049 - DNA, 504 bp, Zea mays
  Clone ID: MRT4577_164802C.1
atgtcaacggctgggggagaaccgtctgtgttcaaccccatccctttccagccaagcttcgacaccaactctctcactagcttgtatgctgacctacccttccccttaggatgtcttgactctgaggaggaagatggtctgggcatcggcctggacttctccgggctacgcgaccccgagttcgtgctacagttcctatttgtgtgcaacgaactgctctccgacaacttggatgactacatcaccgacgaggagggttatgacccaactcaggagtgcttccacgcagatcacgaggagcacgacggagggaaccagctcggcatgcttcaggagaatgatgtgccaccccacacgcaagggaggcaggagagacgggtggggtccaaacctgtttggggagccacatggcccacctccaacaacttcgcaagttgcacgccaagctcggggaacaacaacaatggctatgacagctctaggaggttcttgagaaggaagtag

SEQ ID NO: 71050 - DNA, 348 bp, Zea mays
  Clone ID: MRT4577_164803C.1
cgcgtccgccctcgcgtccgctgctgtctttatctggcactaagtctggagtttctagaggggggatggatgcttgatctttctaatgggttgtctgcactatagtatctttgttgttgttgttatatctgtaggaatatataaagtcagtactaggttccccctgagagttgcagagaattgtgctagccatatctgagtatataactggacttgagttattgtagcactactcgaatgttgaacagaataacctttgtgggttacttgctatatttgcatctgagtggagtaatattgagactgagattaatcgtctgtatcctggagtggaggagctcgagaccc

SEQ ID NO: 71051 - DNA, 262 bp, Zea mays
  Clone ID: MRT4577_164804C.1
tttttgtttttttaaaactgacgtagcagtaatgaaaaacatagactcatgaattacatgacaaaagccacatcaattacatgacagaagagtcatccattgtcataattagacacatctcatcacccgtgactaataagagacaatatctcatacataggcataatcaaagtctaaagtataagaatgcaatacacatggaagctgacgatcacccatcaccatctggttgcagcgacgagtgatggctgatcccttcagt

SEQ ID NO: 71052 - DNA, 192 bp, Zea mays
  Clone ID: MRT4577_164805C.1
gacccactcttcctagtaggtccttaactactcatccatatcatgtgccttacatctgcacttattctcggctcgttcatttcaaatttttatatcacaaacccaatcaaacttaaataatatctatacaagaaaacattactcattaacttttacacaactccttactcataatttctataccctcacaat

SEQ ID NO: 71053 - DNA, 373 bp, Zea mays
  Clone ID: MRT4577_164806C.1
aggcactctctgcccctatggatacacaaccgagcggaactctagccttggagctagcctcttcaccctcaaaaatattccgtgctgcttctgtccaccccgcggggcagtttggcggcgacatggctgcggtcggtcacctgttccacgatgagaagcgggcgatgaggggcagcaagtttgcgctccttccttcgacttctccctttttccgcaccccatccgaggatggcccatcctggaagagcactaaccacaaacaatgctgcttgtttagcaaaattcctcgagagaaaactttaacaacctgatggctaggacttccttgaccttgaaccttgtaaactggctttgaaaaaagcaaaggaaacca

SEQ ID NO: 71054 - DNA, 733 bp, Zea mays
  Clone ID: MRT4577_164807C.1
cattgggaccctcgaggccggccaggccggggtccgcaataactccttcctcccttctccacattctcttccacttccaattccgcccgttccccttctcctcctcctctcctccccttccatgccctcttagcttctgaaggtctccgccacctcctgctagctacccttctgagctttcaagctttgctgaacgcacgcgggcggacgcggtaaagcatcacatcttctttgagagctgcagggaagagatcgatcagagttctattttttgcaaaggcacacagacatatatagttcttctgctagatctcaccgccagtcagctcgcagcgaaggttccctgggctaccttgtcgctggatctgttgctggtcgtgttgttacttgtcaggcaaggtataatatatctccgtacagctaggaataggattgggtagtaggggggtacgcatgtgccagtgaagaaatgggaaggagctagtgaggaggcagcaagaattagggttatggagaggttccgcgagaggagaaatgatgatcccggcgaggcacatgccgccgacgatgatcgtccggaacggcggcgcggcgtacgggtcctcgtcggcactgtcgctcggccagccgaacttgatggacaaccagcagctccagttccagcaagcgttgcagcagcagcacctgctgctggaccagatcccggcgacgacggcggagagctgcgacaaca

SEQ ID NO: 71055 - DNA, 1681 bp, Zea mays
  Clone ID: MRT4577_164808C.1
ctgtgcacctcgaggccggccggggatgcaacagcaccattcggtcgctccagcttttgtgcacgtccactgtgtccctcctcgctacccccgctttttgtgcgcggtggcaacgtgcgacagccgagaggcagaatgacgaagcaagtggtggtggtggacacagctctggtggcgccgagcgaggagacgccgcggcagccgctgtggctgtccaaccttgacctggccgtgccgaggacgcacacgccgctggtctactactacccggcgccgggcacgggctccttcgcgccggaccggctgagggccgcattgggcgccgctctggtgccattctacccacttgccgggcgcctcggcgttggcccggacggccggctgcagatcgagtgcaacagcaagggcgcgctcttcgtcgtcgccaacgcagacctcaccggcgcggacgtcttcgacgactacgagccgtcgtcggagatcaggaacacttttgtgccgttaggggagtccggcgaggcgaacaacagccccatatccatgttccaggtgacttttctcaagtgcggcggcgtggtgctaggaaccgccatccaccacgcggccatggacggcgtgggcgcgttccagtttatgcagacgtggtccggggtggcacgcggcctggacgtggcggaggcgtgcgggccgcagccgttccacgaccggacgctcctgcacgcgcggcgcccgccgtgcccgacatccgaccacttcgtctactccccggcgttcctcagcggccgcccccggccctacgtcacccgcatctactccgtctcgccgaagctcctcgccgacgtcaagtcgcgctgcgcgccaggcgtgtccacctactgcgccgtcaccgcgcacctctggcgctgcgtgtgcgtcgcgcgcgggctagcgccgggcgcggacacccgcctcggcctgccggccaacgtccgccaccgcctgcgccccccgctcccgcgcaccttcttcggcaacgccgtcgtgcgcgaccacgtcaccgcccccgtcagcaccgtcctcggcgcccctctcgggtccgtggcggagaccatcaagaaggcggtggaccgcgtggacgacgccttcgcgcggtcggtgctggactacctggagctgcagaatgcaggcggcaagcagctgagcggccaggctcaggcccaggcgcccagggagcagctcgtaccggcgacggacctgtgggcggtgagctggctggggatggccatgtacgacgccgacttcggctcaggcgcgccgcggttcgtcgcgccggcgcagatgttcggcatcggcacggcgtatatgacgccgcgcggtccggacagggacgacggcatcgccgtgctcatctctctggagcccgagtacctgtcgtgctttgagaaggtcttcttctataacgagtgatgtctcaggtctggagttcaaggatgtgaacgtgtgaatctccgttcgagtagtaagctatttttcctttccctttttttttgtacgtctgagcggtcccaccgagtattctaggtattccttgaaatacttattgttttggtcaaataaataaatatctgccttgcgttattaaaaaaaaaaaaaaaaaaaaaaaaaaaaaaaaaaaactcaagggggggcccggtacccaatt

SEQ ID NO: 71056 - DNA, 204 bp, Zea mays
  Clone ID: MRT4577_164809C.1
attgagataaattaaggggtgggtttatcatttgtttttaatttttctcttgtcatgaaagaaaaacctaaaaaagccaaccgtgtttcaaaacaattcaaactgtttatccgtgaggatgtcccaaaaagaaacatgatgtcttaaccaggagctgagagaacactttcaagctgaaagacaaaaggtctttaaatagacatg

SEQ ID NO: 71057 - DNA, 407 bp, Zea mays
  unsure (1)..(407): unsure at all n locations
  Clone ID: MRT4577_16480C.1
ngatcctcccaaatccccaaagcctccgacccccttcctctctccctccgccgccgctgcgcacgcagggaacaagcgacatgggcgtctacacctttgtgtgccgcaacaacggcggcgagtggaccgccaagcagcactccggcggcggtgctgctgcatctggtggtgctgctgccgaggctcccaaggaggagaagaaggaagaggagaaggaagagagcgacgacgacatgggattctccctgttcgactagagttgtgtgtgtcatctggatctcagaagtggtggtttggtcctgttgccgtagttaattttgctgtcctgtctgtgaacctgaagaactcttggtaattgttacaagcgacctgttccagtttatgtgagaatttgatatgttgtttct

SEQ ID NO: 71058 - DNA, 300 bp, Zea mays
  Clone ID: MRT4577_164810C.1
tcgtccacgcgtccgcccacgcgtccggccacgcgttcgatccatcgacacgatcgcgagcgcaagcacgtacacagacagaagctaaagttagaagaagcaccaatgcctgatcgatggcggcccatgctatactatccggccgacaaatgctggaccgacccgcgcagaggaccaggtctaggtcgcccacaaggaaagctcccttcacagtaagggccaggtgcagccctacaaagaagcatggttccgacaggcagcgaggtgtcgggtccaagcaatcaatttcctacctcgatg

SEQ ID NO: 71059 - DNA, 1778 bp, Zea mays
  Clone ID: MRT4577_164811C.1
ttgggaccctcgaggccggccgggcctgcatgagcctgacctcatctcatcatcgcctccacctcaccagagaaatcctcctcctccctcgtccctcgccaattcttttttgtatcaaaccctctttcctccatctcagatccctctcccgtcccagctcgatcctgcccgatggccaccggatcgtacgccgctgccgtccgacgctgagcaaccaggacaacgacctccgacgaccccccgagcacccacgagatggtcgcggaggcggcgccgttctcctcatcggcgatctggtcgtgtcaccgcgacgagatcaccttcgaccgcctccacaagttttggagtgccctgtcacctcatgcacgacatgagctgttaagacttgataaacagacccttattgagcatgctcgcaagaatttgtactgttcaaggtgtaatgggttgcttttggaaagtttcacacaaatagtcatgtatgggaagtctctgcttcatgaaggttcatgtgagccaaggattcaggaagttgaagcagaagttcaggaaccttcagttcatccttggggaggtctttcgacaacaaaggatggcatcctaactcttcttgattgcttcataaatgcaaaatctcttcatgtgatccagaatgtatttgacaatgcacgtgcgagagaacgtgaacgtgagatgctttaccctgatgcatgtggtggcggtggcagaggatggattagcccagtgatacctaactatggcaggggccatggaacacgagatacctgtgctttgcacactgcacacctttcttgtgatactctggtggatttttggtcggctctgggtgaagaaactagatcatctcttttaaggatgaaagaagaggacttcattgaaagacttatgcacagattcgacagcaagagattctgcagagactgcagaaggaatgttattcgcgaattcaaggagctcaaggaactaaaacgcatgcgaagggaacctcgctgcactagttggttttgtgttgcagataccacatttaagtgtgaggtgttcgaggatgctattcttgttgattggcatcaatctttattggagcaagatggaatataccatcatttcgagtgggctattggaacggatgaaggaaaatctgatattctaaactttgaaaatgtgggcatgattggacaagtccacaggaaaggcctcgatcttgatcactttgaagactattttgttacactgagagcatgtaggctggatggccgccgtacagaattctgtgtgaaggcccatgccttgaagggccaatcatgtgttcaccggaggctaatcgtgggggatggatttgtgacaattacaaaaggtgaaagtattagaagtttctttgagcatgctgaagaagctgaggaagaggatgaagatgatgtagtggacagagacagcaatgaccctgatggtgatatcgctcatccacaaaagcatgccaagagccctgaacttgcaagagaatttctcctggatgctgctgctgttatcttcaaagaacagattgagaaggctttcagagaaggcacagcgcggcaaaatgcacatagtgtttttgtgtcccttgctctaaaactgttagaagaacgagttcatgttgcctgcaaggaaataattacattggaaaaacagaccaagcttcttgaggaagaagagaaagaaaagcgtgaagaagaggagcgcagggagaggaggagaacaaaagaaaaattaatataata

SEQ ID NO: 71060 - DNA, 1324 bp, Zea mays
  Clone ID: MRT4577_164812C.1
accggtccgcactcccgggagaatcagaagaactccaacttgcgtcggcaaccgcgaaaagcggagggagggggaagggacgtgggaccgatccaatcatcaatccactagcttcactgggaaacgaagaaagaacataggactgatccggtcggtgggacttcctctcgaatcgccccgatcgagaccctagttgccccacgaaccgaggatccaagatgagtttcctgttcgggaagcggaagacgcccgccgagctgttaagagaaaacaagagaatgctggatcgatccatcagggaaattgagcgagagaggcaaggattgcaggcccaggagaaaaagctcatcactgagatcaagaaaacagctaaagaaggccagatgggagctgtcaaagtaatggccaaagaccttattcgtacccggcatcagataacaaagttctaccaactcaaatctcagctccaaggagtttctctaagagttcagacactaaaatcaactcaagctatgggtgatgccatgaagggcgttacaaaggcaatggctcaaatgaacaggcagctaaatctgccagggttgcagaggataatgcaagagtttgagcggcagaacgagaggatggagatggtgagcgaagtgatgggagatgccatagatgatgctttggaaggagatgaggaggaagaagaaactgaggagcttgtgaatcaagtacttgatgaaattggcattgatatcaaccaagagcttgttggagccccgtcggccgctgttgctcaacctgcttcagcgggaagggttgcccaggctgaaagtgctgggaatgctgacactggaatcgacgccgatttgcaggcaaggctggacaatctgaggagaatgtaggtgctacaccagcaaaagagtagtgccttctagctctgttgcctgcgaatgtgaatacctagtcaatcaaagcaaaacgtttacaagccagtgtgtatgttgaaatgaatgaagcgttcgatatgccggtagtaatgacaaatgttaaatatacatatttacaatttcttcccctctgagttcatgatggattgatgcctgcagatgcggcatgtcagctgcgtgctaactgtgatttgcaagctgttgcttaaatacacagcagatatctaagctttaaaaaacctttttttacttttttgtgcatgcctggttagaatttttaatttttggtttttttcggaccgcacaaaacatttttctaatgattggttgaacttttaatttttcttttgcacaattaacacacaattttcaattttttgcatgtttgc

SEQ ID NO: 71061 - DNA, 360 bp, Zea mays
  unsure (1)..(360): unsure at all n locations
  Clone ID: MRT4577_164813C.1
tcgattangnanngcgnntgcncctcnatcntncanctgntanccacananncgtcncactnnncngngnnacnaccaccnngannnatnnatgntnncggnagntntggcgnntantangtnggttnnanagctacgcngnnggagncggnggngacncntnccnnnngngacntccangnggnngtgnggcnaannagcgnnncnannanaacatanannnngccnnngntnnngnnncnnantcaaannncgnncangatganatnnncngncngnnggtnncagnnggntnctgatggantntccnnnnnnntggancntcgnatnctcacantnnnangnncnntcnagacacnt

SEQ ID NO: 71062 - DNA, 291 bp, Zea mays
  Clone ID: MRT4577_164814C.1
aaaacacaaaaaaaaactaaaacaaaacttttggccagggtttaaaggggcccctagtttaaaaaaataaattcgggggaaaaattataaaaaaaaaaaggttatgtttaaaatggcaaaaaaggggacaagtcaacaccttttttatttgaatggaaaaaaaaaaggcaaaatgttgaaactttaaaaaaaaacccggggacctaaaaaaaagccttatttttttccttgaagtccaaaaaatgctccttctcgacaaattggggtataattgggagcccctttttaaaa

SEQ ID NO: 71063 - DNA, 959 bp, Zea mays
  Clone ID: MRT4577_164815C.1
ggaccctcgaggccggccgggacccacgcgtcagaactccagcttgcgttggggaagggcgcgtccctgagagacgaaggaagagagcctaggactgactcactgacccgaacccgttcccggcgggacttcctctcgaatcgtcccagtcgagaccctagttgccccacgaaccgaggatccaagatgagtttcctgttcgggaagaggaagacgcccgccgagctgttaagagaaaacaagagaatgctagatcgatccatcagggaaattgagcgagagagacaaggattgcaggcccaggagaaaaagctcatcactgagatcaagaaaacagctaaagaaggccagatgggagctgtcaaagtaatggccaaagatcttattcgcacccggcatcagataacaaagttctaccaactcaaatctcaactccaaggagtttctctaagagttcagacactaaaatcaactcaagctatgggtgatgccatgaagggtgtcacaaaggcaatgtcccaaatgaacaggcagctaaatctaccaggattgcagaggataatgcaagagtttgagcgacagaacgagaggatggagatggtgagtgaagtgatgggagatgccatagatgatgctttggaaggagatgaggaagaagaagaaactgaggagcttgtgaatcaagtacttgatgaaattggcattgatatcaaccaagagcttgttggagctccgtcggccactgttgctcaacctgcttctgtgggaagggtcgcccaggctgaaagtgctgggaatgctgacagtggtatcgacgctgatttgcaggcaaggctagacaatctgaggagaatgtaggtgctacactagcaaaaagagtagtgccttcaagcactgttcctgcgaatgtgaatgaatacctgatcgatcaaagcggttacaagccaatgtgtatgttg

SEQ ID NO: 71064 - DNA, 398 bp, Zea mays
  Clone ID: MRT4577_164816C.1
aacgaagaaataacgattctttgattacttaaattcttaatttgctcttctgtttctgttacgggatgatgattgttcagcagtcagcaccagcagcagccgctgtcgccgccgccgccagtttgttccgagcagcctacagttttgactaacagtatagggtatgttgtgaagaagtgaccacgggcgtgccatgttagttagttgcaggcctgtacagatgatgaatgttcttctacatcaacactagcagcctgcattgaggcactcgtcgatgataccacacttgggagctaggatggtggaaaaacaatgagccatcacaaccctctgttgctctcctaatgagacagaacaacttcccggtttgctgtagaatcccaccattctctggaatg

SEQ ID NO: 71065 - DNA, 378 bp, Zea mays
  Clone ID: MRT4577_164817C.1
ccactcgtcctgttagcgtcattgcatccttttcggcgaacctctcaaactccactccgcggatcccatctaagagctgagaagagtgtaatactactatatcgcaaacaaatccagccacaacgagtggacagacaaactaacaaagcgttcctacataatactctctcataatctaaagttaaattacacacccatcttttgctacatagcagtatacttttatgaatcaccgcttttattaaacttcaaattaatctacatgtatacccctgcccagatttaactatattgttaccgtattactcaccgatcattaaaaaacaaatcttacaatctttaaaaactaataaattaattcttattatatttacttaa

SEQ ID NO: 71066 - DNA, 232 bp, Zea mays
  Clone ID: MRT4577_164818C.1
agaattaaaacagacggtggggaatcacaacataagcgctctcttcaaacattgatccattgctcctaatgcgtaggcacctcattttacacaaccattaccaccgaaacccatacaacgataaccacattgaggcttcctggtgcactcatttacagacaaaacctgtcacttccaatttgatgccttctcaaaccgtcttcctcatacaatggacatggcaaactcccct

SEQ ID NO: 71067 - DNA, 893 bp, Zea mays
  Clone ID: MRT4577_164819C.1
gccgacgccgccgccgccgccgccggaggcggcacgtcgtcggagtccgagtcagaccgcgtgatgcgctggctcgacgcccagaccccggcctccgtcgtgctcgtctgcttcggcagcgagtacttcatgtcggagcagcagctggcgcggatggcgcgcggcctggagctcagcggcgagcgcttcgtgtgggtggtgcggttccccagggagacagaggagggcgacgaagctgcgcgcgcgctgccccgcgggttcgccccggcgcccgggcgcgggctggtggtggaggggtgggcgccgcagcgccgcatcctggcgcacccggcctgcggcgcgttcctgtcgcactgcgggtggagctccgtgctggagtccctggcggcgggagtgccgatcgtggcgctgccgctgcacatcgatcaaccgctggacgccaacctggccacggagctgggcgccgccgtgcgcgtgcagcaggagcggttcggcgagttccgggccgaggacgtggcgcgcgctgtgcggagagccatgcgcggggaggagagccacgcgctcaggcgccgcgccgcggagctgcgggaggtggtggcgcggaacgacgcggacgacgcccaggttgccgcgctcgtgcagcgcatggcgaggctctgcggcaagggacagcagcgagtggccgtgcccaactgaattcccttgcgctctttgctgttccaaattccaataaatctgcctgcgcatggcagcatgggcttcttcttcttcctgctgtagattcaaaagcccaccaatgtaggaactggtaaatttttctattgggcctttcggcggcctagtctcgtgtcagttatgacttcccagaaaatatatatacttgtttggaaccg

SEQ ID NO: 71068 - DNA, 1334 bp, Zea mays
  Clone ID: MRT4577_16481C.1
cattgggtacctcgaggccggccggggggctcccaagaaaccattacggaaacatagccaacctccggcccggccgggagcagcctcccaaatccccaaagcctccgacccccttcctctctccctccgccgccgctgcgcacgcagggaacaagcgacatgggcgtctacacctttgtgtgccgcaacaacggcggcgagtggaccgccaagcagcactccggcgagatcgaggcttccgccgctaccccatacgagctgcagcgccgcctcgtcgctgccgcctccgcggccgactctgcctacggcgtccagtcgtccttctccatggtcacccccagctccgccgtgttccaggtgatcgtcggtgctgtcggtggtggtgcaatgatggtgagcggaggtggcggcggcggtgctgctgcatctggtggtgctgctgccgaggctcccaaggaggagaagaaggaagaggagaaggaagagagcgacgacgacatgggattctccctgttcgactagagttgtgtgtgtcatctggatctcagaagtggtggtttggtcctgttgccgtagttaattttgctgtcctgtctgtgaacctgaagaactcttggtaattgttacaagcgacctgttccagtttatgtgagaatttgatatgttgtttggaatcaaaaaaaaaaaaaaaaaaaaaacaaaaaaaaaaaaaaaaaaaaaaaaaaaaaaaaaaaaggaaaaaaaacaaatccccaaagcctccgacccctttcctttctccctccgccgccgctgcgcacgcagggaacaagcgacatgggcgtctacacctttgtgtgccgcaacaacggcggcgagtggaccgccaagcagcactccggcgagatcgaggcttccgccgctaccccatacgagctgcagcgccgcctcgtcgctgccgcctccgcggccgactctgcctacggcgtccagtcgtccttctccatggtcacccccagctccgccgtgttccaggtgatcgtcggtgctgtcggtggtggtgcaatgatggtgagcggaggtggcggcggcggcgctgctgcatctggtggtgctgctgccgaggctcccaaggaggagaagaaggaagaggagaaggaagagagcgacgacgacatgggattctccctgttcgactagagttgtgtgtgtcatctggatctcagaagtggtggtttggtcctgttgccgtagttaattttgctgtcctgtctgtgaacctgaagaactcttggtaattgttacaagcgacctgttccagtttatgtggcaaaaaaaaaaaaaaaaaagcggcc

SEQ ID NO: 71069 - DNA, 305 bp, Zea mays
  Clone ID: MRT4577_164820C.1
cggagcctcccctgcctctcttcccgcccgcagggccctgcggctagcaccagaagccagaggctccggaccgacgagagccgaggggagctacaccgcggaacaaatgctcgccagggcgccaaaaaagaggggttccagcgatatctcttgctgggttggtcaagccaggatgggcgaacggcaggaatagatgcaagaggaacagggggccaacgatagacacatcgcgccgcaagaacggcacctactgggcttgtgtcaagaaggcatccggcctcacaccccctagctgggagaacggc

SEQ ID NO: 71070 - DNA, 277 bp, Zea mays
  Clone ID: MRT4577_164821C.1
ccggaccggcagggccgtcccattccacctgtactgaactttcgtatgagacaagccgttgttcgttcgctggctcggaccatagggtctcccaagatgggagcgcgcagccgattctgactccaaccaaaacactacggacgccgagccgtatgtgctgaacgacaaatacgacgtcaatgtgtgcgacgaggactacaacctggttggggaggacgaattcgtcgaggaggaggagcatttcgcgcccgagccactgtgcaagacctggttccac

SEQ ID NO: 71071 - DNA, 375 bp, Zea mays
  Clone ID: MRT4577_164822C.1
acacgttattttctggacgctttttttcttttgttctgtcctttttttttatctttttacggaggctcataatttttttgggaccggggaaaaaattcgaaaccggaattatattttcccccgggtaaaaaaaacggggcggggtaaaaactttggtaaagatatcaaaaattttgggaggattttaacaaacagggccggggggaaaaacaaataaattacccgcagaacttgggaggggttgctgaaaaaccatatccttgaggcgatttttgggaaaccaccctcataattgtccaaagttaaaacatagttggtcacctcttataaaacattccccaaggttcctaatggggcttctggaggggggggaaa

SEQ ID NO: 71072 - DNA, 566 bp, Zea mays
  Clone ID: MRT4577_164823C.1
ccaaggtgacatattaaatgctgtgttactgcatcatggacaagttgtgctgaaacctactcggaattggttgtggatctttatatggattttaaccttgctcctgaagacaggagccacatggccctaggagactattctcgtttcccagcaaaacggtttaaagataattgaaacattggatctgtatctggggagactattgtttgtttcctatgagccacaaccaaaaagcttggccgttgcatttccccccgagaaaaagcgttggagttaatgactcgcaaggtcgtggaaaggaaataatatttttcgaggtcattatgtagcttggcatggacaggaaagcaggcttatttttgcatacagcagttggaaataggttgtttagggcattaaaaataggatgacagtaaaatcccatataagttgctggtctgccaattcgaaaataatgatgaaggggtaggctagtaacattttgggggtattcttttttttttttaaccaaaaaattgtagcctttgttaccggtaataaatagatccaaagcttttatgttggtt

SEQ ID NO: 71073 - DNA, 319 bp, Zea mays
  Clone ID: MRT4577_164824C.1
actggtctacctgccggctcaaacctttcccccttcttttattttttccgtcggccgccgctccatccggggcgggtcaccatgagtgagtcgcatttcgatccacatcgaccaggtcggtatccaggtcacaaacgcgtgctgggagctctactgccttgaccatgtcatttaggctgacggttacatgccctttgacaagaccatcggggtcaatgacgatcttttccacagcttctatagggagactgtggctgcgaagaccgtgccccgtgctgattgtgctgacctcgacgcagtttcaacgatgaggtcagga

SEQ ID NO: 71074 - DNA, 2193 bp, Zea mays
  Clone ID: MRT4577_164825C.1
cgtaagctcggaattcggctcgaggaagcggggccggacgaaagggacagacagcggtgtcgcgggggcacctgcttcccaacgccgtccgcacctgctgccctgtcgtccgccctccttcccttctcctcccctccaactgtttcctcaacctcccgacccaaccacggccgtgcccgccaaggcgccaaccgcacagcagcagctggggtgctgacgtgctgtgggtggttctgttgtccatggcgcggaagcatcagcatgttgccatatttaccacagcgtgcttgccgtggatgactgggactgcggtaaacccactgtttcgggctgcataccttgccaaggctggagattgggaggtcacgctggtggtgccttggctgtccaagggggatcaggagctcgtttatccaaacaagatgaggttcagtttgccggcagagcaggaaaactatgtgcggcggtggcttgaggaacggactgggctgttgccgaagtttgacataaagttctatcctgggaagttttcaactgagaaaagaagtattctacctgttggagacatcagtcagacaatatctgatgataaagcggatattgcagtgctagaagagccagaacatcttacttggtaccaccatggacggaggtggaaaagcaagttccaaaaagttataggtgttgttcatacaaactatttggaatacgtgaaaagagagaaaaatggatacattagtgcgtttatcttaaaacacattaattcttgggttacagacatctattgtcataaggttataagattgtctgcagcaactcaggatgttccaaggtctgtgatttgtaatgttcatggagttaaccccaaatttattgagattggcaaattgaaacatcagcagctatgccaaagagagcaagcattcttcaagggtgcatattatatcggaaagatggtatggagtaaaggttacacagagcttcttcagcttcttcataagcaccaaatggaattgtctggccttaaaatggagttgtatggcagtggggaagatgctgatgaagtaaaggcatcagctgagcgactgagcttagatattagagtctatccaggccgtgatcatggagattcaatattccacgactacaaggtcttcataaacccaagtacaactgatgtggtatgcacaacaactgcagaagctttggcaatggggaagattgtgatctgtgcaaaccatccttcaaatgttttttttcaaaagatttcctaattgtcacatgtacaatactgatgaagagtttgtgagactaacaatgaaagctttggcagaagaacctatcccactgtcagatgatttgcggcatgaactttcctgggaggcagcaacagaaagatttattagggttgctgatattgcaccaactgtgcctgtgggacaaccaccaccctcctcacagcatttcatgcgcatctccccagatgaactgcagaagaacatggaagaggcatcggcatttttccataatacaatctctgggtttgaagctgtgcgttgtgtgttcggtgcaataccaaacacactgcagccggatgaacagcaatgcaaggaacttgggtggaatttgcagggatagcattagcttttcttgcgatactgttgccatggaccatagaatgaaccagtctaactcaacggcaaaaagctttgtcgccggaaaggttctcagattgatcaaacatacattctatgtggtgttctggtgtggggcactgcattttttcttcatatatcaaaggcgttctgaagttcctggatgcatcgtatcttctgattgttaatcttaagcagtctgaagtgcacactagtattacagtctcatatatgtggactgtttttcatcatgttgtttcccaggattgacgcgtgtgttgaaaatcttattgtataataatatgccccttgttttcgcagccatccatgctgaaacttttactacaccgcctaaaatctgtgtgctagttgatactacctgtgttctcgataaataaaaaagaatagaaagggctagtttggaaacccaattttctcaggggttttcattttcccaaaggaaattaattcattttttttttgggaaattgaaatcccataaaaaaatgggggtaccatactagccccaaaagttaaa

SEQ ID NO: 71075 - DNA, 339 bp, Zea mays
  Clone ID: MRT4577_164826C.1
ggtgaattactcactgccagggagggatctaggcgtcggttggatgtattaaagctgctggcaccttccttgcggggcatctgtacaataaatgggagaagcacacttggatgaatgatggcattgccaggggtgggcgggcaagaatacgctactcatagatgaagaaaacccacggcggacaatctttgagaggcggcttactcgctgcgggtgtggtataagatggactccttttcttttacggatcttgtgtccattgatttagtacttggcagacactctctactgatgcagtactacaacaaggatactcaagagccccctgctctagcctca

SEQ ID NO: 71076 - DNA, 262 bp, Zea mays
  Clone ID: MRT4577_164827C.1
gcggttaaagttcatcgccgtcgcattgcattgtacgccctaatgatcaaatgctcgggtgagtgatcgcagtactgcttataagaacactcgcttcttccattgttggatcatgtaacgagatatgaaatttcgctgcagggaaaccaatcagcctggttctgcaaaatctgttgggaacgatatgacactgcctactgttttctggtgcctatttacatgtggataaagaaccacattgtgccaaaaagcatgcctatct

SEQ ID NO: 71077 - DNA, 1069 bp, Zea mays
  Clone ID: MRT4577_164828C.1
ggtaccctccggggaccggcgggcatatcctgccttgagtgttcgtgcaacgctgcccctgccgcgtcgtcttctggaccgtcttctccactccgcccagctcgcagtcgcagctcgctcaaagcagcacagcagcaaggagaaggaagaaaaagagcagcgagagccgagaagagaagcgcgccgccgctcgagctcatcccgccgccggacacaccgcatggccatgaggcacagggcgcggtcctcccccacctccccgctcaccccgtcctccagcgcaagaacaaacaagatacttggtttctctgtatctctcatcctcatcaatctggcttcaattatggagcgtgctgatgagaatctccttccagcagtttacaaggaagtcagtgcagccttcaatgctggtcctgcagatctgggatacctcacctttgtaatgaactttctgaagtcaatagcatctcccttggcaggtatccttgctctgcactatgatcggccaatagtgcttgcaatagggactgttttctgggccttatcaacaggggctgtcggtgttagccagcgttttgggcaggttgcattctggagagccgtaaatggcctagggcttgccattgtaataccagcgcttcagtcgttcattgctgatagctataaagatggtacgcgtggtgcagggttcggtttgttaagcctcattggcgctgtaggtggtataggtggtagtattttggcaacaatcatggctggaaaggactattggggattcccaggatggcgtgttgcatttatgatggtcgcacttgtcagcttgataattggaattcttgtgtacttatatgcgactgatccaagaagaatacctggcaatcgccttcttgacgaagatgagtatgagaggtgtgctattcttttcatctcacctagctggaggggttcattaatcaatactactatggtagcgaaatagaactcacatagcttgtaattttgtgacatattagatcatgttttgatgtatatgttagaatataatataagtgaattgtccacctcctcc

SEQ ID NO: 71078 - DNA, 522 bp, Zea mays
  unsure (1)..(522): unsure at all n locations
  Clone ID: MRT4577_164829C.1
ccggccgggattagcaagttgaagcactgagagccatagccgtcggcgagccgagcgattccaggttgaagtgaaaaaatactaaagccctgctctcggcgttcgccgccgttcggttgttgtggggcggtgaggccttggacagagaggttcagagcttattgctgttgtgcgtcgtgatcggttgagtcaacagcgactgcttgcccaatttgtcttacatcgttgccgatccatggctcgtgnagggtagcttgactgactcccagggtcgtgcagcgaggttacgtgtcacctgaagagcaagttggtacctggaatctcaagtcccaggtcaagaacaggtaccacgggatgaggcgcatggaggatgttgcgatgtgttcgtgagaggtctaggtcgtcgtctcccagtccactttggggtgctgggaccgntgtctccttataatggaattatttaatggatntattttggataggaactactcttatataggtaaagatgtggacattccgacc

SEQ ID NO: 71079 - DNA, 757 bp, Zea mays
  Clone ID: MRT4577_16482C.1
agcagcctcccgaatccccaagcctccgacccccttcctctctccctccgccgccgctgcgcacgcagggaacaagcgacatgggcgtctacaccttcgtgtgccgcaacaacggcggcgagtggaccgccaagcagcactccggcgagatcgaggcttccgccgctaccccatacgagctgcagcgccgcctcgtcgccgctgcctccgcggccgactctgcctacggcgtccagtcgtccttctccatggtcacccccagctccgccgtgttccaggtgatcgtcggtgctgttggtggtggtgcaatgatggtgagcggaggtggcggcggtgctgctgcatctggtggtgctgctgccgaggctcccaaggaggagaagaaggaagaggagaaggaagagagcgacgacgacatgggattctccctgttcgactagagttgtgtgtgtcatctggatctcagaagtggtggtttggtcctgttgccgtagttaattttgctgtcctgtctgtgaacctgaagaactcttggtaattgttacaagcgacctgttccagtttatgtgagaatttgatatgttgtttggaatcatatattctccttgccatttgttgtgatttttcggtgccaaaaggttactgtttcctgtaatgataatatgtagctagtacttcttgttcaagaaattgaacagcaacagtactacttgttcaagaaattgaacagcaacagctcgtcatgcaccttctttct

SEQ ID NO: 71080 - DNA, 384 bp, Zea mays
  Clone ID: MRT4577_164830C.1
tccctgatatggagttgtctgagaatgctggtgctcgctcctgccgtattgtgggtccccaggtatggttagcgggcgcctcccgctatgctaccggagaggacactgctgagactcggaaaagtgtctcgcttgtcactcgacgtgtgcgccgaagcgcacgccagctggccgatctgcctcttcggcagcactcctccgccgtgctctccacgggagacgtccctgagagtgcgatttagatgcctggaggcttgatgtagccaccgagagcgtgggagaaactcgcaggagaggctgtggacattatggttaccaacgttcggcgcggcgcaaatattcataggacttctcctgacaccaatcctagtagttgatacatgc

SEQ ID NO: 71081 - DNA, 315 bp, Zea mays
  Clone ID: MRT4577_164832C.1
catgctgacgcgtggacgacagcggcgctagagttgttttgaatagtatgatcgttcaggcaagggcctgcatggaggtgcccccgcgcgatgagctctgcccggacttgagccagccccacggcctgcagctcgcgacatggttgctcaccctgccgaggtcctcctcttcatgcagatctagcacccttgagtctcagcaggttgcaatctgcaatgcacagtcatatgctgatgatttatgggaggctgagcctcagagccctgtatcggtcagctccaggaagcttgcacctgagagagaggagataaagg

SEQ ID NO: 71082 - DNA, 1149 bp, Zea mays
  Clone ID: MRT4577_164833C.1
tgtgcggccctcgaggccggccgggccgggatctctcactactacatacatcaccaactaggatcgatctctcgacagcaaatagctagcaatggagaagtacaccaaagccctagcgtcattgctcaccatgctggtgctggcacctctcctcgccatggccaccgacccagaccccctgcaggacttctgcgtcgccgacctcaacggcaagccatcagtgaacgggtacccatgccagccgccgtcgtcggccggcgaccagttcctcttctcgaccaagatcgccacgggaggcgaccccctggccaacccgaacggctccaacgtgacggagctggacgtttccgagtggcccggcgtgaacacgctgggcgtgtccatgaaccgcgtcgacttcgcgcccggcggcaccaacccgccccacgtccacccgcgcgccaccgaggtcgggctcgtcacccgcggcgagctcctcgtgggcatcgtcggcagcctcgactccgggaacaggtactactccaaggtggtccgcgccggggagacgttcgtcatcccgcgcggcctcgtgcacttccagttcaacgtcggcaaggaggacgccaccatggtggtgtcgttcaacagccagaaaccgggcatcatcttcgtgcccctcacgctgttcggctcctctccgccgatccccacgccggtgctctccaaggcgctccgggtggacgccagtgtcgtggatctcatcaagtccaagttcgccggtgggtactgagactgagacgggacccagcatgcatcttgctagcgcactatgcatgcgccgacaatggctttgcgttggcggattgatatttctcgttacggaatgggcgacgtcgtggagatccgcaacagtttgatacgccagggaaataaaataatgttcatgcgtcagagcacgtataataagctatattatggttaagattcagtcgtaataaaaagtaaagattattcttgcttctgtgttcactgcctagctagtctctaggtaaaatgtatttgctcattttacatgtaataataagaatggacttatatatatgtctgccttttcagtgtgtttcaataaaaaaaaataagaaactaatggtttacacccgctctagagga

SEQ ID NO: 71083 - DNA, 824 bp, Zea mays
  unsure (1)..(824): unsure at all n locations
  Clone ID: MRT4577_164834C.1
tctgccgggaaccaactactctctggtggcggttcgtccctgatctccaggaggtccctgtaccccgcttgggctctcctaaaccctaatcgtgaccgccgcgccagcgccagcaactgaagtttcgtcctcgcggccttctctccctccactcgaaccgcgccgacgagcgacgacaaccgttgctgcattcttcaatggcgactgtgccagttaacccaaaacctttcctgaacaacctgacggggaagcctgtaattgtcaaactcaagtggggtatggagtacaaaggttatcttgcttcggtggactcctatatgaatctccagcttgccaacactgaggagtacattgatgggcaattctctggaaacctgggagagattctgatcaggtgcaacaacgttatgtatctccgaggcgttccagaggatgcagagatagaggatgcagagtgagaagatgtgaatgtaatttgattctgacatgtatgtttgaatacgccggtgacaactagacctatcggatcttagttatgatcagtagggcttgaggtgctgttcaaactgagaaggaatatcacgaattatttgaatgtgaacttgcacgatgtattagacgttatatcaatgcaaaacaatcggctctggttgctgagatcaaaaaaaaaaaaaaaaaaggcccctagcaattttaaagaggcggaagagggggggggtgtcaatgcctgtatcatgaaaccttttaccgacccataccaaaaanaaaaaaaaaaaaagagggcggnnccgctctagaagnngatccaagcnnnttacgtaccg

SEQ ID NO: 71084 - DNA, 319 bp, Zea mays
  Clone ID: MRT4577_164835C.1
cacggccgccccgacccctcatttccttacccggccttgggggtcgcccgcgtcacccattccggccagtcccatctcagctgtggtgcgtaatctttggtccgatggacttctgagggaccttccaaactagcatgatttgcgggcaccttgcttttcttttgccttctttttgtgaaaacgtgtgcttagcgcccttgctgtttaggtgttcgagcttctctggattgcttcgggtggcttctttggtctctttttcctttggtggggtcgttcttgtttcttgcgcgcgtccctgatggactcgtttgttgaaccg

SEQ ID NO: 71085 - DNA, 176 bp, Zea mays
  Clone ID: MRT4577_164836C.1
cacaggcggcgaatttttcgccccccccagcacgccgcgcagtggcatagctcaacggcctacaaagcgacaacgaagtaggcgcaagagaaagccgactctgcggggcgaggggaaagaacatatgcagctaacaacacatggcaggctggcccacactggagaaagcccccggg

SEQ ID NO: 71086 - DNA, 418 bp, Zea mays
  Clone ID: MRT4577_164837C.1
gccggccgggctgcggacacgatattattgagaacactttcaactagaaagcacatagcgtaccaacaatcggaagcccaaagattggggggttctagccccctggattttctgaaactgctggtaaggggaccatactcccacaatggtcacaagctgctatagcacccctacttcccccctacctctccccagcgggggcttcaggatgagggaacacaggggaccaccccggcaggatccaaaaaggcaccacaggtggcagcgaacctttatcacaccagagtctccaacgatggtgcgccgtattacagcgctcaccctgggggaattatttggacaaaaacatcggggaaagactcttacacaaacttgggctagggaaggttggtgactacacccagcaacaggagagtcc

SEQ ID NO: 71087 - DNA, 644 bp, Zea mays
  unsure (1)..(644): unsure at all n locations
  Clone ID: MRT4577_164838C.1
cattgggtacctcgaggccggccgggaaaaaaatttccnnnnnnnnnnaaaaaaaaaaaaaaaaaaaaaaaaaaaaaaaaaaaaaacctgggggatttggtcacaggccaccagggtcaaagaaaacctttgttggcttggggctccgcccacttccttacaagtaagggagggtttggcaaaagatcataaaacccaattataaaacccgtntttttctggtcgataccatggtaaaaagttgcagcaattgcatccatgtgtgtgcaaccagaagtcactcaacgtcctttcatgggtgaagttgttcaggcattgaagctggtatgcagggagtttgaggaaacaagttatgtaagactgaaaagctttcgagaagatgatcttgcaaccagtgttccaggggagagagtgggaatttcagagtgtaacataacactgcctcagcctggttaagaaccaaggtagcattatcttcgtaagagatgctcagtacatggggcaaggattttgagttgttcaggttgtttgtgtagagggagcaggaattttcaagtaaactatctttggggtgggggttagcaaatgatgttcatatacctcttttttatcttcgctcatcaagcctggacatattagaatcg

SEQ ID NO: 71088 - DNA, 460 bp, Zea mays
  unsure (1)..(460): unsure at all n locations
  Clone ID: MRT4577_164839C.1
cgaccagcgttcgtcccggnagctcgaaacagcggcgcaggggggggcgaggggggtgactggcccgcgactcagtcgagcgccactccctggcggacaagatctccacgatcgtcctnaaggttgaccttgaatgcgagagagctcaggaagatagaaagtcctttgcaagatccaagacaagatggagcggtgggggagcgatctntgttcgacgaggaagagcaatgccgtgaccatatacgggccgttcgacgccgacacggtctgcaacaagctttgctgcaaggccggtcgggtcatcaaggcgatggacgtcaagggcaaggagaaggacggtggtaaggtcgggaaggagggcggnggtgacaagcccaaggacgccgacaaaccggcggtggtcgagaatgacgccggtaaggcctggaaggagggctgtgcctaggtgggagaagaagga

SEQ ID NO: 71089 - DNA, 576 bp, Zea mays
  Clone ID: MRT4577_16483C.1
gggtgccctcacgccggcgtccgtcgatactgctggtcctacactgaagccttccttgctccttgccgccggcgagtcgtggcagagaacgatgacccggcgggaacgggtgtcccatctacgcgggcaacctccccggcgacatccgcaagagggagtgttgatctcttgtacaagcatggacgtgtagtggaaattgacttggaaatgccaccaaggcctgctggatttgctttggctgagttagaggacgcacctgcacgctgaagatgcaatatatggacgtgatggatacaacttttatggccataagttgagggtggaattaccccatggaggacacacgcacatcttctgtagatcgatctagcacctgtagaagtgctggacaacgcggagcctcaaaacgttctgattaccgagatatgggtactgaattaccttcttcagcatgatggcgagatctcaaggaccatatgcagccagctggcgatgtccgttccactgatgtgtatcgtgaggctcgaccaactatgggaatagctgattctactagactatgaacatgtgaaacac

SEQ ID NO: 71090 - DNA, 364 bp, Zea mays
  unsure (1)..(364): unsure at all n locations
  Clone ID: MRT4577_164840C.1
cgccgcgggggncgccggagagcacagaaacaanggngaaggcagnngcggagcggggnagcagcganggcgncaagggcaccagcnncgacacccaagagggagagggcccnaccacggncaccggaagggncncgggcccgaagccgggccngcaagggnnccaagcgcagggggggggggacaccaccaanggcagcaagncaacgggaccacacgacaagccngcgagcaaggaacaaggagcaccagaagaagagaaccgccangccggagaacggggaaaagcgacagccggagcacgaggcggcgcaaacaacaaggcgaccgacaggcaggacccacagaccgggccaaacgcaaa

SEQ ID NO: 71091 - DNA, 326 bp, Zea mays
  unsure (1)..(326): unsure at all n locations
  Clone ID: MRT4577_164841C.1
acccaggcgcgttcccccaaaagcgcgaacccgcaaccgcacgggcagaanggggcaaagagccagggccgcggccgccccacaaccagaggagcccccgggcagcaggaaaccgacaccaagcgacagcgacaccggcgaccccgagggggggcccgggacccacagcgccgccacagngagccgcaacacgcgcgctcacgggaccgacgccgacacaacgccccggaccggggaaaacccgggcggccacccacccaaaaccagcccgagcaggacagaccccccggacgccagccggccgtaacacccgaagaggcgccgca

SEQ ID NO: 71092 - DNA, 198 bp, Zea mays
  Clone ID: MRT4577_164842C.1
cctctaccctgggcgacaacccgcggagcaccagcttcatggccggcgtcggcaccagcttcccgcgcaaggtgcaccaccgctgcggcttgatcgtggaggtcatgacggacccgtccgtggccagccggcaagaggagtactccgcctggaacccgatgacgggcgctgaccccaaggacatgaagggcgccatcg

SEQ ID NO: 71093 - DNA, 511 bp, Zea mays
  Clone ID: MRT4577_164843C.1
gtcttcatggcatactcttccccaatcattcagtggaaaaacagtttttagggaatctgaacactgtgtcaactggaagcaatacatcaaacactaaacttgatgtcattgatggcgattttttgggactcctgttggagcataaattgatagagttgacatctggtgtgagatcgccctacactaagacaaccaaaggtgttcaagcgcaccacacttcatctgcttgggaagatatggcatctgcctgtgaaacatgtatcattgcttctactgattatgatagggagtcggtacacactttgaatgatggataagctactctcccccagaccgatcttgcttgtagaagtctccattcatctcagcctgtgaagaagtacgatcacgatgtcacggatcaagcagagccgactgagcgtctcaggcgtagttcactcttcacatgggaggcttctatttcaaccgatacctgcagctgatcatagagctggaggagtgcatatggaac

SEQ ID NO: 71094 - DNA, 1639 bp, Zea mays
  Clone ID: MRT4577_164844C.1
tggacgcgtggggcctgaggtgtcagccgttcacgattacctttatgtccacgtaggggtgcgtgcaaacgttctatgcataggcgcaattaatggcggccattcttggtacgcctctctttcatctttctttaccatgctgagttgtctgtcaatgaccttaaaagctggccacgcgtccggggagaccgtcctcgaccgcattgaccccgccgtggcacggcctcgaggccggcgacgacgcaggcgcgaggcgccggagggtccggccatgacgtcgtccgtgcggcagtggtggcgccgcgccgccgctgcgctcaaggacaggaggagcctgctcctggcgcgcctgcgcccgcgccgggccgggtcgtcgtcgtggcaccaccgggagctggaggcggccgtgatccgcgcgacgagccacgaggaccggtggatggactaccggagcgccgcgcgggtgttcgcgtgggcgcgctcgtcgcccacgttcatccggcccgtcatgtgggcgctggcgcgccgcgcgcggcggacgcggtgctgggtcgtggcgctcaagtcgctcatgatcgcgcacggcatcctcctccgctcgggccgcgcgccgcgcgccggccgcgtccccttcgagctcgctgacttccgagaccggtcctcgtcggcggcggccaggtccctggccttctccgcctttgtgcgcgcttacttccggtttctggactaccgctccctcttcgccgcgcaggaggacaccgacggcgatgacgacgccgaaaggtgctcggatccccagacggcctgtcttgatcggatagcgaagaaacagttcatgctcgagctgctcctacaaatccgcccgtacggcgacggcatggaggtgccgctggtcctcgaggccatggattgcgtcctcatcgagatcttccaggtgtacggcgagatatgcaccggcatcgcgcggttcctcatcagcggcgttcagggcggaccggcgatgctgacgacccgcaaggaggtcatggcggcaggggtgaaggtgctctggcgggcggcggagcagagcgctcagctctcgtcctacttcgacctgtgccgcgagctcggcgtggccaacgcgcgcaagctcccgacatcattagttcgcttgaaagacgacgacgtccgggacctcgagcggatcctcatgagtgagagtgacatccagaacgaaagcggtgaggaggcggaggcggaggcagaggcagaggcagaggcggcggcggacgtgaaggacgcggggtcaacgtcgacgaacactgcggtggtgatggcaacaacggaatgggtgacattcgacgaggagagaccaagcgctggcgttgtcgcctaccacggcgggggtcacgtctctaatcactggaaccccttcgtcgctgcgccgttagacggtagggaaggcggaaacctgatcgagcttttctagttttctaaccgaacgcaatattgttgggttaaaccataaccttttgctcttttgcgcccgcccgattgtacactatgctctttgtaaatagtaacgtgactcgtttggtccaaaaataaaaaaaaaaaaaaaaaaaaaaaaaaaccctaccatgactacgtggagaatctc

SEQ ID NO: 71095 - DNA, 764 bp, Zea mays
  unsure (1)..(764): unsure at all n locations
  Clone ID: MRT4577_164845C.1
gccggccgggcttcccgggctccccaaattcgtttgtttcccacggcgcaagaaagaaacaagggtacaagaacagcccgctaaaggaaagaaacaagggctacacaagaacagcttgagagctcctctccgatcccgacccaccgcctgcaactcttcttctctcctacgtgttcgtcagcccgctaagtgttaagatggcttcaagcgatggtcagacagaagctgcggccccatctgtccccaaaaaccctgctatggcatcatgccggaagaagaaaacggatgatgctaccttcctcgaagatctgaaagaccacatcgatgagttcatccatgcctccatggatgagcacaagacctgctttaagaagacgatccagaagatgtttgggatgtcgaaggctgttgcagagagatccgcggcagaagcgaaggaagctggagttgaaagtgctttgccacttcagaccagtgtctcgcagtagaatttcacgttggtagtttcttgcttgacgccggcctttttttatacaagggttttgttgctctgtgttgtctgaaacgtataagcgtctcagtggcatgttttcataactgtattgtagtgctttcatcattctccgaagtttgttgtgtgagtatgccttaaatataccagtgtagtttgcttcattctccgatgccttgtatggccgtagacccccatgcatatggacatcctgaacccacctgtnaactcattgagcggttcntgattggct

SEQ ID NO: 71096 - DNA, 288 bp, Zea mays
  Clone ID: MRT4577_164846C.1
tattttcctaagtaggcgggatgtcatttttttttttttattgcaccacctgtgggcccattcttcaatgccgaccccccagaaaaggatacgcgagacaagggaacctgatatacatttaagagaaagaaacagaaacaagccgccggaacctaacctggcgggcactcaggattaaaaaatgggcccccagggggggccctgattacaaaccccatgacatttgggatacttaggccaaaaacccaggggttgacccccggccaaaatcccagcttcccggcactt

SEQ ID NO: 71097 - DNA, 606 bp, Zea mays
  Clone ID: MRT4577_164847C.1
cccacgcgtccgctgagggctccggctcctctcccgttctgatcgccaattcgccttccaccgcctgcaacccttcttcccttctcggtcatcgtgacggcatcacatgcgtcagcctgctaagtcttaagatggcgtcaaccaatggtcagacagaagctccagcaccatctgtccccaaaaatcccgctatggcatcatgccgaaagaagaaaacagatgatgttaccttccttgaagatctgaaagaccacatggatgagttcattcatgcctccatggatgagcacaagacctgctttaagaagacaattcagaagatgtttgggatgtcgaaggctgttgcagagagatccgcggtggaagcaaacaaagctgaagttgaaagtgctttgccacttcagaccagtgtctcgcagtagaatttcatgttggtagtttcttgctcgtgccaatagttttatataagggtttttgttgctgtgttttctgaaacgcataagggtgcgtttgtttacgccggatttggctgagaatcgttccggctgattaactcttatataaattagataaacaatccaacccggaatcattccgggtgctcag

SEQ ID NO: 71098 - DNA, 493 bp, Zea mays
  unsure (1)..(493): unsure at all n locations
  Clone ID: MRT4577_164848C.1
gctgggacctctaaattctgtggacggcacatatgggggtcagattgactcttcttcatctgagacaatcatcgcggaactttcaaccctcatgagggacatgggtttgcatatgaccgctcttgcatcgaaactcaggtgcacaaaaacggttgacagaaaatctatgcaaaacgttatcatagctgctagagataaagaggtgcctgaggcccttgttgtgatcaggagtgccctgtagcaagggcaggcactgcaggctctttacagggtatttgcatcacttgatcaatcggtaaatactagctaagatgctctgtaggaggcccttatttctgctgctaagccatcacattcaggtagtcttgctaagcaagcactgccttctatagctaagngagatgctgtgctatgcttagcagatggagaccagaagtgtgcatctacaatagaaatgcttaaaggcattatcgaagacgacagcactactaac

SEQ ID NO: 71099 - DNA, 926 bp, Zea mays
  Clone ID: MRT4577_164849C.1
atccttctgactcgtccctggcctggtggtgcgagatctttccttctttcccacgctccaagaaagaaaaccagaggcgccccccgttagccaattcgggccccgtttgtttccgacggcacaaggaaaaaaaaagaccagactgagggctcctctcccgttccgatcgccaattcgccttccaccgcctgcaaccctttcttcccttctcggtcatcgtgacggcatcacgcgcgcgctctcctcttccacgagtccgtcagcctgctaagtcttaagatggcgtcaagcaatggtcagacagaagctccagcaccatctgtccccaaaaatcctgctatggcatcatgccggaagaagaaaacagatgatgctaccttccttgaagatctgaaagaccacatggatgagttcattcacgcctccatggatgagcacaagagctgctttaagaagacaattcagaagatgtttgggatgtcgaaggctgttgcagagagatccgcggcggaagcaaacaaagctgaagttgaaagtgctttgccacttcagaccagtgtctcgcagtagaatttcatgcagtagaatttcatgttggtagtttcttgctcgtgccaatagttttatataagggtttttgttgctgtgttttctgaaacgcataagcgtgtcagtagcatgttttcataaccggattgtagtgcttcattatctatagttttctgtacgtgtaaaatagaccagcgtaacagcgtagtttgcttcattctccgaagtattgtatggctgtacacccaggcatctgggcatcatgaacccaactgattggctaaatgaaataaatctcctccatccaacaaaaaaaaaaaaaaatcagcgggcccgcagctaaaaaaaaaaaagtactctgcgttgttaccactgct

SEQ ID NO: 71100 - DNA, 1500 bp, Zea mays
  Clone ID: MRT4577_16484C.1
ggtaccccccgaggccggccgggagcagcctcccgaatccccaaagcctccgacccccttcctctctccctccgccgccgctgcgcacgcagggaacaagcgacatgggcgtctacaccttcgtgtgccgcaacaacggcggcgagtggaccgccaagcagcactccggcgagatcgaggcttccgccgctaccccatacgagctgcagcgccgcctcgtcgccgctgcctccgcggccgactctgcctacggcgtccagtcgtccttctccatggtcacccccagctccgccgtgttccaggtgatcgtcggtgctgttggtggtggtgcaatgatggtgagcggaggtggcggcggtgctgctgcatctggtggtgctgctgccgaggctcccaaggaggagaagaaggaagaggagaaggaagagagcgacgacgacatgggattctccctgttcgactagagttgtgtgtgtcatctggatctcagaagtggtggtttggtcctgttgccgtagttaattttgctgtcctgtctgtgaacctgaagaactcttggtaattgttacaagcgacctgttccagtttatgtgagaatttgatatgttgtttggaatcatatattctccttgccatttgttgcaaaaattctgggagataactggcctgtgtcatctgtggattgctcgttactagctgctcttgatcatgtattggtccccgccggccgggccgggagcagcctcccaaatccccaaagcctccgacccccttcctctctccctccgccgccgctgcgcacgcagggaacaagcgacatgggcgtctacacctttgtgtgccgcaacaacggcggcgagtggaccgccaagcagcactccggcgagatcgaggcttccgccgctaccccatacgagctgcagcgccgcctcgtcgccgccgcctccgcggccgactctgcctacggcgtccagtcgtccttctccatggtcacccccagctccgccgtgttccaggtgatcgtcggtgctgtcggtggtggtgcaatgatggtgagcggaggtggcggcggcggcggtgctgctgcatctggtggtgctgctgccgaggctcccaaggaggagaagaaggaagaggagaaggaagagagcgacgacgacatgggattctccctgttcgactagagttgtgtgtgtcatctggatctcagaagtggtggtttggtcctgttgccgtagttaattttgctgtcctgtctgtgaacctgaagaactcttggtaattgttacaagcgacctgttccagtttatgtgagaatttgatatgttgtttggaatcatatattctccttgccatttgaagaaaatttcgaggccaaaaggttactgtttcctgtaatgataatatgtagctagtacttgttcaagaaattgaacagcaacagtactacttgttcaagaaattgaacagcaacagctcgtcatgcaccttcttctaggg

SEQ ID NO: 71101 - DNA, 217 bp, Zea mays
  Clone ID: MRT4577_164850C.1
acgcccacgcgtaacactaacaaaatttctctagtgcggatattccagcctctaaacatacacggaaaagttttaaacaaacaaacctgcctaacactcaccctttcactctattttaactataaagaactttaattcctctcgtcccttttatatctgatatcccccaaacttactcattaaaaaatacttcattcacatcatgtttaatcttgac

SEQ ID NO: 71102 - DNA, 164 bp, Zea mays
  Clone ID: MRT4577_164851C.1
caaacgcccccactcttgcaatactttggcccattgctaactcgagggaagctcaacgcctttcagtctcttgagctatctcgacttgtcgtcaataagaacaaaaataatcttctgaaaaattggtttgcagaagataagctggagggaagcagtgcagaaga

SEQ ID NO: 71103 - DNA, 257 bp, Zea mays
  Clone ID: MRT4577_164852C.1
cggaattctacccacgcgtcatgagtacttgatcaactagaagctcgtattgacttcaagtttttagtcctactttcaggttccggaacctttcttgtcttccacgacgtggcattagctaaagatctcactgaggccaataatgatgattatgtacagaacatcaaactattaagaatgactgaattaatggttcatatgtggtttactggatataatgtacgatttgtatatatacctacttatattagcagata

SEQ ID NO: 71104 - DNA, 263 bp, Zea mays
  Clone ID: MRT4577_164853C.1
ggcagcacctccgtccatgccggcgccgtcggcggcggagccaagcggaggcatcgtagcccccgtggccgtggtggcctcgcatttctgccccccctacgtggtgcaacttgcggtgaaagagaagaaggtgagccttcgggaaggcgactttaccattaccgacaccaacggggccgtcgtggtcaccgtcaaaggtgccttgatcagcattcacaaacggcggcggcttcttgacggcggccggaacccccttcttttgc

SEQ ID NO: 71105 - DNA, 112 bp, Zea mays
  Clone ID: MRT4577_164854C.1
cgcggcggattttggtggtgcatatggtcgttactatgcaggattaggagggggatatggagcccggtctgggtttgtttatccttgccgctttcacctatattgaggaggt

SEQ ID NO: 71106 - DNA, 328 bp, Zea mays
  unsure (1)..(328): unsure at all n locations
  Clone ID: MRT4577_164855C.1
gacccacgcgtncgnccacgcgnccgaaaaaaaaatccaattaaatttaaacaaacaaacaaaaaaaaaaaagggaaggaaaaaaaaaaaaaaaggggggggccgccccaaaggacccacaccaccgaacccgggcaacccacgacatacaccaaacaatagggcccccaaaacacaacccactgcccccagcttaccaactaccgaacaggaaaacccctgccgccccccaaaaaaatcgcccagccaaaaagcccattggcacaagccgccgaaaaaccaaaaaggcccacaccaatccccctcccaacaaattacaacccctaaa

SEQ ID NO: 71107 - DNA, 423 bp, Zea mays
  unsure (1)..(423): unsure at all n locations
  Clone ID: MRT4577_164856C.1
acgcctgcaggtaccnnnnccnnaattccctnttgggcggcacgctactcatactatttactagtatcgcgagcggctcccttctagtattatccaagtcttacgtactacttacatgcggacgtcataaactgttgctatagggtgcaccttaaattcaatttcactgcgccttacgtttttacaaacatcattgacatggtaaaactcctggtcgttactccaatcttaatctgcctatctagcacatctccctctttccgtcaagctgtctgtaatatacttaagaggccctgtacccgaactgcccttcccaacaatttgctcatcctgtaatggtctaatgggactctgccctggtagcgtgctcattaagctgcggagggtgtggttgattactctcaacagtgactctcttacact

SEQ ID NO: 71108 - DNA, 345 bp, Zea mays
  unsure (1)..(345): unsure at all n locations
  Clone ID: MRT4577_164857C.1
gcggccgtgacttctgttactacattcncagcggcagcgggttttatgtttttcggcagcgacgacccgttggaggggcgctggttgttcggagacgggcgacatgcatagcacgctcaaggggatacgcggtagctataccccgtgctttctggacctgtacgacgcggccaccgtggcgggcggcgtccctggctcctacggcgcgtatcgggcgaccgaggagcagctcttcacgccctggaccgtattcgtcatcatcgcttacaatgctgcttacggatccccggtacaacaagcgacttgcgttgacagatagggaacttgtgacccactacctccgtg

SEQ ID NO: 71109 - DNA, 235 bp, Zea mays
  Clone ID: MRT4577_164858C.1
cggggacccagagagcggccgttctaaacccccgggtgagagcacaagaaaaaacacacgcccaggggggggagtttgaggaccacgcccgcaacgccacagccaaaggggcgaaccaaccccaaaaacaaaaaaaccgaacaaaagcggggaaacgcaccggaaagagaccagcgcaacaaacggaacccagaggcgcggacaagagccgcaacaagcaaacagggcaggccgg

SEQ ID NO: 71110 - DNA, 466 bp, Zea mays
  unsure (1)..(466): unsure at all n locations
  Clone ID: MRT4577_164859C.1
caccggnctcggaatacccgggctcggacccacgtcgtctcgtcccatcgcgtctctgcccacgtctgtccgtgttacaatgtgtaggtgcatcaccgtccgggaccaagcatgcggcgtgagtttttgtccggtcaagcagcatcgaggaccggtgcgcacgtctggtccgactaccaacatttcagtaaggatgagcaccgctccacgttggtgcctgcgtctcaggggtcggcatggcagatcttcgtgaagacacattactggcacagacgatcaccgcttgagggtggagtccctccgacacacattgacatacgtcaaaggccatagatccaaggacaatggaggtgcattgcacacggaccacgcagcaggctgatcnttcgccggcaaagcatctggaggatggtcgcaccttggctgactacaacattcataatgagagcaccctccacctggtgct

SEQ ID NO: 71111 - DNA, 516 bp, Zea mays
  unsure (1)..(516): unsure at all n locations
  Clone ID: MRT4577_16485C.1
ggtaccctncgagggccggccgggatggcaagttggcaacgagagatgccaagtctcagtcccgggtctggggtctggggtgtggtggtggtgccgacgacgaggcgagacgagacgacagcggagcgcaagaggggggctgtggccgggacttggataatatatggaagcttccgctcacgcccagcgcgcgcatgcataaatcgacctgcgcgtgcttttcggtgccgctagctgcggcgtcgccatcggccgtcaggatcgggccgccgtgatccacacaattagctgcacggcggcgacgctacgtatcttcccctgcatatactccttggattagtactacagtactactgtactagtagtgtactgctgctggccggctgttaatcagctcgtgtgtcagtgtgtgtttaacgacgacgggttgataaatgaataatgtacaacatgattaagttggtaccaggcccagtgcatgaaagggacgacaaaaaaaaaaaaaaaaaagcggcc

SEQ ID NO: 71112 - DNA, 511 bp, Zea mays
  Clone ID: MRT4577_164860C.1
attcatactaactatacgacttctagctacaatcacgagcttacttgagggctgcttgggtggtgggctaaacagcaggaatactcagtgggcggcggaggacgtgctgctagatgtacgccgctgctgtatataatcttttttacacgcatcacctcaaaacaggtggctttgggtctggccacgtacatccagaactgtattgtatgagtcatgacgctaccctttttttgattatttttccgagctagtctctcttgcatatgtcggacattctggaccgcaagggagtatgcctatacctgatatctatgctaacttaggtggtatggtcaacatgctacttaattgaccgtgctcagaacattcaagggtttatgtgggctcgagcataaagatgaccaccaactgcaacagactgatcagtgcttaccaccaatgaatgacatgtacaaatcttcactgctgcccaagtgtgctgtagacattgataatagcagggctagaaaaa

SEQ ID NO: 71113 - DNA, 587 bp, Zea mays
  Clone ID: MRT4577_164861C.1
gccacgcaactcaggagataacactctgagtgccaaactgacagtgtttgccatgttttcgaccatctttacgaagaatatggggatgtattggagggtatgttggatggagtgctcttctttgcacttgttgatacacgtaataaaagctgcattgctattggcgatgctcttggcttcaggccttggtgcatgggatgggcactcggtggatcattatggatgactgcatagatgaatgattggaaacactatagagaactctccataacatttctctaatggcatatgtactgcagcatgacaagagggctcaggagatcgtgcaacccaccatctgttccatagactgctcattaagccctttacattgctctgttgctccagaagatggttgataagactgtgattactaagctgacgactgatgtgccattatgtgtgctactatattgtggactcgactcttctgtggctgcatctgactgcttacagaccttagacgaaacacagggtgacaggcaatggcgaactaaatggcttactttgtgtgtaggctcggagggtactgctgatcttaaagctgc

SEQ ID NO: 71114 - DNA, 1200 bp, Zea mays
  Clone ID: MRT4577_164862C.1
attgccacaactcgcaaggaagccctttttctcatggcggcggcggcggcggcggcgggtggagagggagatgtaggaggaggcaacagcgcgggcgccctactgcgcatcttcgtgggcgggctggcggagagcgtgggcgcggccgacctggaggccctgttcgcctccgctgggcgcgtcgccggcgtcgagttcgtgcgcacaaacgggcgcagcttcgcctatgtcgacttccactgccccaacgacaaggccctcgccaggctcttttccacctataatgggtgcaaatggaaaggagggaagctcaggctggagaaggccaaagagcactacctcactcgccttaaacgagaatgggagcaggatgcggctgcagcggcgtcaaaggaggctgcgctgaaagataatgcagagaaccagaagccgaaactggataaggctgctttggagggcttgaagattaacatctacttcccaaagctgaggaaggtgaaagctttgccactgaaaggcacaggaaaacataaatacagtttccgacatattgaagttccttcttatccaattcatttctgtgactgtgaggagcactgtggacctcctgaggaagctaataatgaatatgcttctgttctcaatgctgctgcatatgagaaggaacgtaacattatgaattctgtgatgaacaagctttttgagaaggaaaatgaacattttgattcaggtgcaatggagaaatgtgatgaccgtactgataccattgaaccctccaatactgtgaatggcatgcaaattgaagagacggaagatgctccagaggacttggatgacttgcaaatggaagaaacggaagagtcttcagatgaagatttagatgatgaccttgtgattaacattgctccccgcaagtccaataagccagcagttcgagagaacataaagctggaagtgaataaggactcacagttacaaaagcgtccaaggattgaagagacttccctgccaaagaagaggcagaaatctgaagcctcatctgaacctataaaaaggaatggagaacaacatgtttcagttactccagacactagaaccgcaggcaagacttttcctgcaaaatcagaagccaaccaaaatgaacagaagtctctggatttgaaagcaaaaagaacatatgagttctcttcggcactccca

SEQ ID NO: 71115 - DNA, 643 bp, Zea mays
  Clone ID: MRT4577_164863C.1
ggaacgctgggacgcacgcgagtccccaatcccgaattccacccacgcgtccggctaagggtccccacaactgtcgcttcagaacttcactttctaatctacatcatcatcctccgtcgctagggatgcaccttgaggagccgagaaaccagcgcttcacacagctcacacatagagcactcggagcggccagccgaggccccacaaccgcaccgactacttcgtctatggcacgttgccaaagctccgctgctgatatactcacgacgaccggccaatgcgcccggacacgataaccctaccacgcacctattaataactggcacctaaccaacatacccgacccgcacgccgaaagaaacgtacgcgcctaacgaccatgacagattgggttcacgccttcatcctgaactggaacgtgctctcacatttgaagcgcgccggataccaggtaactatgacccatcagcacactagcatatgccccagcacttgcacttgtgtaactgactgagaacatggtgcgcgctcagaaagctacagtcaaagccagccaacgcggtcctggacacgtaaagagtacacaatgtgtcaacagtgtgcaacattgttgataaaaccatatcagagcagtacatgtttc

SEQ ID NO: 71116 - DNA, 415 bp, Zea mays
  unsure (1)..(415): unsure at all n locations
  Clone ID: MRT4577_164864C.1
atttcggcaccnaggccgcgggggatggggggtgggcaaacaaacacagggctcggtggcttatgtgtaacttggacgaagaacctcttcgagactctattccatgaaacgatgagtccggagggtaatgccgtggattatcaacgcctataactcaactaattccccctcancttttggagtcggcttaacacccagcactatctacaacaccnttaactcactacccgggttgccgcatctcctgatcgctaatcgaagaaattcttcaggtgtccatttagaccgcgtgggacaactacaactccatcattggcgaatggttcaggctattctcgggcgacaaatcggcccattactgtgtcccaccacatgaagaggaagacattgctacccaccctccggggacgcgcac

SEQ ID NO: 71117 - DNA, 316 bp, Zea mays
  Clone ID: MRT4577_164865C.1
aaaaggaaaaaaaacctggccaagaaaagccccccctttttttaaccgggctctttggggaaaagggttaccccccagggggttttttttccaaaaaaattggggatttaaaaaacaggaggttgaccctagggcaaagcttttttgcccgggaccaaaaagaaaccaggccccccctttaggggatatggggcctcagtttttttaggtttggggggttgtttttataaaaatggcccggggaaaaccctttcaaaatccccttaaccccttgttgggccgacccaccaaacgggcctaagggggtcgggtttcc

SEQ ID NO: 71118 - DNA, 307 bp, Zea mays
  Clone ID: MRT4577_164866C.1
cggctcgaggtctacaagagccctgcttcagatacttacatagttgttggggaagccaagatcgaagatttatcccagcaagcacaactagcagctgctgagaaattcaaagttcaaggtgaagctgtctcaaacattcaagaaaacacacagactccaactgtacaagaggagagtgaagaggaagaggtcgatgaaacaggtgtagaagttaaggacatagaattggtcatgtcacaagcaaatgtgtcgagagcaaaggcagtccgagccctgaagaacaacagtaatgatattgtaaatgcga

SEQ ID NO: 71119 - DNA, 145 bp, Zea mays
  Clone ID: MRT4577_164867C.1
attactgaaaggatttataatgggacgtcagtttaaaaaaatgctcgacacaaagttttaactacttcaaaagggtggggtactttcaactactttcaatcctatcttttctttttaatcatcaaaaatcctaattcttacaaac

SEQ ID NO: 71120 - DNA, 374 bp, Zea mays
  Clone ID: MRT4577_164868C.1
aagctgaacttggagacacacacgaatttcagaacataagctcatccctagcatcaagggcatctacgataacatgaatgattccacttcttcagcttaaggctagaacaacaaatgaccacataatacactaattacaactacctccaagattctttaatacacaatgaaaccgacaaattactttaatcaacttctaacacagaactttgcactaactatttactgcatcaaccaacatggtccatcatctcaatacatccaatatcataattgcaacagcaatactcagcacatccaactttaccgaccattgtaactaaacatacacgtcatttcctaccataactgatccacctatcaattacctacat

SEQ ID NO: 71121 - DNA, 1088 bp, Zea mays
  Clone ID: MRT4577_164869C.1
cgacgcgacccgctcgctctcgctctcgggccccagtccgatcgggtcggtgcctacccacccccgctggccgccgcacccaggcgaggcgaggcaaggcgcgtcccgaacaacggaaccaactgcaccgaccgagtcaatcaatccggcgagtgaccgagtggggtaggttgtgtgcggcatgacgaccacgcgcgaccgtggcgccggcggcggatcggcgtcgagggtcggtgacggggacgtcgacctgggcgagggctgggactggggcgccatcccgcggctcctctcctccgcctgcctcttcctctgctccggaggctgttttggttgctgcgataagactgtaaagcaactgggtgaactgtccagaaacttgatcacccaggaccaaattaccattggagagccattttggagcacaaccaccatcgaggttgaaccagcagatctcagtggtgttacttcagtcaatacatctaacttggcctctggaactggtagcagtcataaccttcctggacttggtaataatggacttgttctgtgggaacatacaaggcaggagtggactgaaactagaagtctgcggctgaaggtgaagcaggttcgtgaaccagtattgagttggaatgcagcatatgagagtctgcttggatcaaataagccatttcctcaacccattcctcttcatgagatggtcgatttccttgtggacatctgggagcaggaggggctgtatgactagcgcaaatgatttcatgggataacatctgggataacacatagttgttcctcaagagaggggaaaaagaatgacatagagggtgtaggcttgggatgtggtgatgagttggcctgtcatacttgttttttgtcaatggaggcctgctgtacttgcagaatacagagctgtggttgtaagcttgtaagaagtcctgatactaatagtggctttgtttaatttgtcaaagaaaggtgtgtgaggttgagttgtgacaaaagtggattaggcctgctgatgggtttggattgaaatgagtttaaagggctgtgttttcatgtggttgcaaaacacaaacccc

SEQ ID NO: 71122 - DNA, 840 bp, Zea mays
  Clone ID: MRT4577_16486C.1
gggtaccactcactcccggccgcgttggttacctcgaggccggccgggagcagcctcccaaatccccaaagcctccgacccccttcctctctccctccgccgccgctgcgcacgcagggaacaagcgacatgggcgtctacacctttgtgtgccgcaacaacggcggcgagtggaccgccaagcagcactccggcgagatcgaggcttccgccgctaccccatacgagctgcagcgccgcctcgtcgctgccgcctccgcggccgactctgcctacggcgtccagtcgtccttctccatggtcacccccagctccgccgtgttccaggtgatcgtcggtgctgtcggtggtggtgcaatgatggtgagcggaggtggcggcggcggtgctgctgcatctggtggtgctgctgccgaggctcccaaggaggagaagaaggaagaggagaaggaagagagcgacgacgacatgggattctccctgttcgactagagttgtgtgtgtcatctggatctcagaagtggtggtttggtcctgttgccgtagttaattttgctgtcctgtctgtgaacctgaagaactcttggtaattgttacaagcgacctgttccagtttatgtgagaatttgatatgttgtttggaatcatatattctccttgccatttgttgtgattttcggtgccaaaaggttactgtttcctgtaatgataatatgtagctagtacttgttcaagaaattgaacagcaacagtactacttgttcaagaaattgaacagcaacagctcgtcatgcaccttctttctctcgtgaagaaaaaaaaaaaaaaaaaaggccccta

SEQ ID NO: 71123 - DNA, 356 bp, Zea mays
  Clone ID: MRT4577_164870C.1
cccttctagtataacttcactggtgacctgttacagtttcatcctgaacatttacattaattgctcgatagagtgatgtggagcctgaagatactactgacattataggcaaaggagcaatcgggtacctctggtcaattctctttgacttcatatgtatagtctgaataaattgtggtggaaaacatgcactcagaaacgttgagtagggattagaatttataagtagcatagctgcataggggcaagaagattagtattgatcaatcatactgcgcttacgagccattctgcaatccaatgtaaatataacttagcttcattgttcggtgcaacgcattgcctgtatggtcctc

SEQ ID NO: 71124 - DNA, 493 bp, Zea mays
  Clone ID: MRT4577_164871C.1
cccaaaaaggaaaaattttgccttttctttgtatccccattggggcccaggggggggaacttttaggacccaaccccatcccttgttacgggaagaaactgaattttggggaacaaaaagggaaaaattttccccggcccaataaaagccattcaaaaaaaacattaaacaattgttttgtatttcccctggaaaaggcaataatcgacccccagggaaccccccgtaaataaaccctttgacaatggaaaaatttgaagaagcaacgtttccttcccaaacacggggagggcggggccgatcacaaccaggagaacttgggacagctttcgggccctttccttttggggcccaattactttgggggggaacggggccggcagcccaaacccgggggggacccaaactttgttcccaacaagcccaaaaaattccgggaattggggcccttccttgggggggagtccaaaacaacaaccagaagccccttaag

SEQ ID NO: 71125 - DNA, 396 bp, Zea mays
  Clone ID: MRT4577_164872C.1
ctcacacgtccgtggacgcggcgctcgtcttgctactggggacacccgtcgggctagtggcggggctggcattcctgacgcggccccacaccaaggtcgagctcaaagacaggctcgtcttcatcacgcacggatgcagcggaatgtcgctcgccatggtcacggtcgctgcgcggtccgtcgcgagattattcatgccggggagtacccttgtccggctcgaggaggagcgcgccgccacccatggcggatcggtccgagacgaccgaagagtgcacgccgccgacctgcgctacacctacgacttgatccttgctattcaggaagccgtgcccctagacatcgtggtatcaaccacctcatgttcacactccaagatctctttaggcaggacat

SEQ ID NO: 71126 - DNA, 641 bp, Zea mays
  unsure (1)..(641): unsure at all n locations
  Clone ID: MRT4577_164873C.1
ggccgcttttttttttttttttttctttttttttttttttttttttttttttttttttttttttttttttttttttttttttttttttttttttttttttttaaaaaaaggccctttctattttggggaagccccaacccccagcaaaaaaacctttttttggacccaaaacccaaaaaaaaacaaaaagggggccccccccaggggggggggggggaaaaaccccgccgggtttggaaaaccaaggggggggaaagggaaaaatagtgcccgctggaaaagggggccccgggtgggccccacgggcccggaaaaccgcaaccaccgggggtggaaaaaaaaggggaaagggccaacaccacaccccggggcgaaagagaaaaagagccgccggggtaaaaaaaacgggaaagttaaaggcccccggtggtgaaaaggaaaaaaatgggggggggaggcaagacaaaaccggcaaaaaggaggnttttggtgtagaaaaaaaaaaacaaagctaaagcccacctaccgggggaaaaggaaaaaaacggcttgccatgaaaaaaaggaaaaaggttttccaaccaacaatagttcgtgattataggcccccccaagtgtttgggccaaaaaaaggcccccaa

SEQ ID NO: 71127 - DNA, 222 bp, Zea mays
  unsure (1)..(222): unsure at all n locations
  Clone ID: MRT4577_164874C.1
ccggcccaaanccccgggccagccacacccttccgacacaccccgggcctttcgccgacaccctaaaatgtcccccaaaaaccggaacctgaaggtgggccactcttaataaaccatgcgggcccccctaanttcctttttcccgaaccttttccccccaaacggcttaaatttcgccaagcccttttttttaaagcccttttccaaaattttaaccaaggc

SEQ ID NO: 71128 - DNA, 363 bp, Zea mays
  unsure (1)..(363): unsure at all n locations
  Clone ID: MRT4577_164875C.1
gtttcgattttcacatgtagaattgagggcatctcaagtaacgtgggtatgaagaaggcgctacagctgccggattacctaaagccgacggagctgaagatgatgctcaatacgatcaaggccttcctgccgattgtctttgtaagggaggcatgacacctggatgtatcatttgggagcaaactttaaacgtctacctcttttaactaagatgtatcattttcttccaaagacacgaaagtatgacacattgggtttgttaccggttagaagctcgtaagacgtcttcttgacactactacaaatcgtgttatatgagatggttaatttttagttattaagatgcttataaagtgtccanna

SEQ ID NO: 71129 - DNA, 221 bp, Zea mays
  Clone ID: MRT4577_164876C.1
ctcaagtccgccctgcgtctgggctcatggtaggtgtccggctcagtcagtactgtctgtaataaagatccaacgtggggccaatgtaactaaggctgctgccagtaagaaatgatctatctggcttgtgcagtccttgcttgttggttacctcgaggtaggcttaggatatctcgtcttgttgccatccttgcacttgtctcgttaacaagtaatctatg

SEQ ID NO: 71130 - DNA, 473 bp, Zea mays
  Clone ID: MRT4577_164877C.1
gcctgcggagccgggccggaagtaattgctgggtcgacgagctattgtttcggcggccgcccttccttttttttggttcactttttacggttgtcggttcggtgggcgcaacccagggtccatgctggacacggattgtcaccatgcctgacaacaacaccaagctaacttatgcacgtcatgaccgatagggaggcctatgagcggcttatgaccaccgcatgggtgttcctgcacgaggagcccacccaggatgcgaattaaaaaaattgtacggacgcaataaaaacttgtgtattgctgttggaggactcttgggccaaggtgaaccgagtctaacatgaatgtggctatacttggattgaagctaattatgctcatggaagactagggggggcaactagcatagactacggaataattgagctatgcagcgctacacctaaactgacctgcggttcagacgaaatgct

SEQ ID NO: 71131 - DNA, 1307 bp, Zea mays
  Clone ID: MRT4577_164878C.1
gcctcctccagcagcgatgggtggccggtgggcggtgccggctgctgggcaccgcagcggaggcttctccgggcggagagggcgcgcgaggagggggaggtggatccggcgacgcgatctttgtgaagaagccggcggccgcggcggccgtgatgacgagggacgagacgtcggtggcgatgccgacgtcgttcatgaccgggtctgtggtcggtaagcgcttctaccgcgacgccaccgtacggcgcgccgacgatggcaatgggtggaccgtgatgctggactaccgcacgctcaagtcgccggccaagcgggtcctcaagctgccctcgcgcgccctcgccatggccatcgccgccgagtgggagtaccaggaatcagatggaattcgacctttcacaatgcctcttatgaagcttgcttgcactgcattggagagagttcctttgacacgcagaaaagtgattgacaatttgatgaagaaatttcatcaagatttggtattttgccgctcacctgctgatagtgaactgaccattggagttcatcaaaagcagaaggagaaaatcgatccgattctggagtgggtagacactgaatttgggttcaaacccgttgtctacacaagcttctttggggggaagcaagacgagggccttgctaaagctgtagaaactgttctgaagaaagcaactgactgtgagttggcatccattgatgctatggctgcagcagcccattccttggtgatccctcttgcaatatttagagaaaggttgggtattgaggaggccattgagttgatcaggcttgaagaagaccaccaggttgatcgatggggcttggtggaaggaggtcatgacgttgatatcgcggatcttaaagtgcagatgtcctcggctgttgtatttcttggactttcacggggactgtgaatgtttcttacctatatgttggctagttgtttatttccaagcttgtatgaatctgagaccaagagtttgtagagaataattgccgcggaaggtcgatagcaaaccaagtatctgtactgtattcagcaatcagcagttctgattctgatgttcgattttggattgagtccagaaaatgctgttgaggtttgaactagggaagcccagcattcctctggctttgtactgttgtgagagtaagaacatatctaggaactagtattgcagtggcagtcacttctgcaccttccagctccagcagcacaagttgcatgatcgtattgaccggtcatttttagccatgctcaatttgctgtaacaaatagtgctgct

SEQ ID NO: 71132 - DNA, 437 bp, Zea mays
  unsure (1)..(437): unsure at all n locations
  Clone ID: MRT4577_164879C.1
gtcnttttgtattgggaaaaaagaccaatatgttctttatgattttatagtgctgttttacttttactataaaaaagtagcctacaagaaacaaatgtagaccatctttggatgtgagagatctcactttttttataaagtatattcatatagctgttgacttgacccaaaaggataagatggaatgcttaccgtgaattttatgaactgtgattcaaaaaagctatctgacccaagacactctgtcacatgctaaccatgtccagtacagaatttttgtggccatttattttatcaactaaaacaaatacaagtcccagtaatggacattgaccagttgattcttgaagtcgggaagctcattaccagttttatagtttctgatcgttgcataaaaattatgattattttattcatttggcctaatgaattatcac

SEQ ID NO: 71133 - DNA, 380 bp, Zea mays
  Clone ID: MRT4577_16487C.1
ggaccagggaaggggggccaaagattaaaaacgggggggggggggggactggactaaattgcacttgcaaaaaaaaaaagccccaaatgggggtggggggggctcaagcaaaagctaaaactcggggggaaatacccaaaaatgttgggtccaggggaaccggaaggcatcgagggggagggatttttgaagcaagggggacatgcaataaaaaaaaaaaactggttaaagccaaaaccaagggtggaagggtttttttgacctgccaaaagggccatggttaaggcccctcaaggggcccgggccggaacaggggtttttgggggggggggggacaccgagcgcaaaagttccggggggcgtcccccaccccaaggaaa

SEQ ID NO: 71134 - DNA, 479 bp, Zea mays
  Clone ID: MRT4577_164880C.1
gcctctctgacggcaaaggatggggcgcttactagaggaccacttttactaaatgcacacttaagatcgctcataatatataatattgagtacctttgcctaattactggactgaaaacaacattgaaatcactagctctaatacttttcttaaggcagaaatcaaagagaatacgaggtgcattatcctgcatgacagtccttaacctacagagaccactgactgccttatatgcttccctaacaaagctcatctcatggcacagatggactgcctgttcatctgtgtgtgcccatctctgagcacagtacctcatacaagacataccataaatgatactgtaagcacatttaataaacaatggcaccaaaacactatccggagcacaaaagtaatctcataatctaatctatgaaaatgtggaagagaatggcagaggcaaataaagaagctaaaggtgtttctcaaggtgcttctc

SEQ ID NO: 71135 - DNA, 495 bp, Zea mays
  Clone ID: MRT4577_164881C.1
ggaatatacacagttaaaatccaatgtagatgctgctgctgagaatagctcagctcctgttcaaaccgttccactatctgccggtggtgcaaaagaacatagtgcggctaacaggcaaagttagagagggcaagaacgactctgtctatcaatcagcgtcaccggtgatggattcgaactcatccaatcacaagaatgtgccaagatccgatgtgaaaaacagcggcatagtttcacattctagagcctggaagccgaaaaccaattctcatcctcagaacagctcagacggcaatattgctgttgaagggaaagtggattcccatggtggtaggcttgagatgaacatgcccaaaggatctgatacaattacccatcaagacaccagcagtaaaccgatgaaaaggagtgatggcaccgatgaggcctcacacagcatacaggagaacctgacacaggaagatggtaaccagaagatcgagactggacaggagc

SEQ ID NO: 71136 - DNA, 477 bp, Zea mays
  Clone ID: MRT4577_164882C.1
gatgaatagcctggctacattgcaagttgtataaataaacttgtacaacaaagtttgatagtaacttggtttccatttaaattgggatacaggaatcctcttttggggggcgtaggttttttggatatggcaatgccaacctaggtggaggtggggtacagttattgctaatacatgtgaacatcatgaacgctcggcgttccgaacccaatactcatgaacagaacagtgtttggggacattttgcggccgggaggctgatgagtgtaaaattggagcattgatctggcaccgctttaactaggaggagcaccgcttgtggaactacgcttactcaagcttgagggtgccgccgcgctccctttaacaggtgcataaccattggccaccatcttgtgctaacactctgacggtttatgaatccggtggatacccctttcgtgcttgcacagttagaatatggccgatcgagcgaat

SEQ ID NO: 71137 - DNA, 386 bp, Zea mays
  Clone ID: MRT4577_164883C.1
accggcccgaattaattactgggtcgacgagcttacttatcggcgggcggccttcctttttttgggtggttttaatgaaattttcgtttgcaccccaaccgtaaacggctggaaggaacacggtacgttactcggataaacagcagcccggaggatggtatgtatatacaaaacgcgaggttttgttccgctgatgacaaaaagaactttcgggactttacaccgcccggtgaaccagccataggaccaatttcaatcatgtgcttgtctccagacccttaacccggcagtaaaaagggtcgcaaccacagcagtccgcgtcctagttgaccacaacgtggcacagcttgttcttattgagttgggccacaatttgggcccaacag

SEQ ID NO: 71138 - DNA, 300 bp, Zea mays
  Clone ID: MRT4577_164884C.1
atggtggaggatcttgtgttagacttcactgaattttcacttaccacctgggtacctgtctagaaccaagtggtgctcgatgtaaacctccttccctttgagagtgctgcatgctactgtactggagtttttgtttagtttttacatatatttgaaatacaaactcttttgtgcaattgatgacttttcttaccatttgggtaaattctggaatctcctaaaatattattggtagtatgcactgtccacgagaggtagatgaggacaaaaagagtacagctctcgtctcctcgttgagac

SEQ ID NO: 71139 - DNA, 120 bp, Zea mays
  Clone ID: MRT4577_164885C.1
gcagaatgaggcatgctcttatatgcaccagcaaatatattagtggatccaagcaagcattcatctaacaactccttggattcagaaaaattcaagatgaactttccaaggagagatgag

SEQ ID NO: 71140 - DNA, 304 bp, Zea mays
  Clone ID: MRT4577_164886C.1
agctgcggcgtcatcggcccacctgactcgacaggctgcagctacgaccccagccaggggctagagcaacgagaacgaatgagctagtagccgaccgcgtatctccatcatggccgagctggtcgcgaggcacggacacgagctgcagcgggacagccagagcaccggcaggcgcatcgcggtgggctgcatgccataccgcgtgcggtgcgactgcaagctggaggtgctcgcgatcacatcccagaaggggcacggcatgatgttccacaagggctgatgcgaggtggacgagtccatggac

SEQ ID NO: 71141 - DNA, 242 bp, Zea mays
  Clone ID: MRT4577_164887C.1
gcagcggaaataaatggtttattacaaaaggattacaaggtacaacatttacaagttatagcaatattacaatatatcatcggagggattacaagagaacatgtttcaaaagattacaattcggatggataaaacatttataagggtttaaatacaaggtagcttaagcgacaatcctcaataaagaaggctaagatggggcatacttatataagaagggcgagcgcaccggcagttagaac

SEQ ID NO: 71142 - DNA, 323 bp, Zea mays
  unsure (1)..(323): unsure at all n locations
  Clone ID: MRT4577_164888C.1
cccacgcgtccgcccacgcgtccgcaagtggcttcacataaatgctacatgtgcaatgcagctgcagtgaaaatggtggntgcaaggaagctcacgtagttccaccattttcactgcagctgcattgacaagtggctttatatagaagctacatgccgacgcgggaagggtggcatcatctagacgcaccgggagatacgagaacgttaggtcactcaagacaaaacagcggaataattttatacatgtctctgctgggcatttacgtactaccggtacaccattgggcggtgctgcgttgtcgtttccggtcctttatgtga

SEQ ID NO: 71143 - DNA, 1272 bp, Zea mays
  Clone ID: MRT4577_164889C.1
atggagggccagccgctccctctcctcctcggtcttcgcccagccccaccaccctcgcctcatcctcaaccaccctacccgcctccgactccgcgtacaccgtcgcgagtcgaaccagctcgccgcagtgcgtttgaggcgtccatcgggcagtcagacgcacatggccctgaccgtagcggctgggagcggctgaccgtgtcctcgctcccttttctcttccccaaccgtgcccgagtcctcgcgctcccgccccctctgggggccgctgcggtggttgaggcgacgcaggaggactggaggaggacaaggagtgggacttgggaggctgcgctgcagaagtggaagaccaagacttacgcgctctcggtgcccctccggaaaggcgcgctacgcggctccttccctccatcttggattaaggatttcgttgaagttcaggggaagaagctcaaattcagtgccgagctccgtgctaatcttgatgggatcttctctgagatgtcacggtgtatggacaagggtcaagttcagccaaagtccgcaatggcagctgatgtcgtgtcccttggtgactcctggcttggctatgctatctgtaaggaattgctagagcctgtcaagaatgctgaagaacaggattggttccgtagactgagtgacagatggaaggtgagaaaaaaagtttgtgatcttgcattgccttggactgggaggatttatggaggcccgaacttgctgggaggatttcaatggtctactagagaggtgattggtgcagttctgaagcatctggggtcatcatataacacggttgatatggaaatagaggtcaatggtggtagagcagcagtcctgaatagctttacacaactacagaagcagtctcggagatgtatgggtcgcagtgggttggagcagcgatgtggtcgttccctgctgcaaagcgaatgtctaatgtcgcggtggtcgttcccaagtctggcagcagcctatgggctgatctgtggagtgctaggagcctacccttctgccaagacgtcatccccggagcatctccgcactccgctgtacctcgagagccccgtgcctccagaggcccctcgagatagtaacaagcggaggacgaagctggacacgaaccttgtcaggggagtgccgccgcccgagatcctggaaagatgcgagtttttggaacccctgtcagtggtgcgagtggtcgaggcagagaaatgggcaagcaaaatgacgagccagctgtcctgcttctga

SEQ ID NO: 71144 - DNA, 776 bp, Zea mays
  unsure (1)..(776): unsure at all n locations
  Clone ID: MRT4577_16488C.1
aatctcataacactgccttgccaggtcaagaacagaggagcaataagctaactgacattaatgactttgatgctagtgttcagaagcctatgatgtggtcaccaccaccaccacccaacatcggaaaaaacaacccactaacgtttcagcagaggccctctgtgcataattcgtttcagttgggaaggcgtgaaactgactttaaggatgccagttctggtgctcaaccttttggtgattccctaggcttcttcatgcagacaacctttgatgaggctccaaatcgtcttagttcattcaagaaccagtttcaggaccacagttatgctcgtcaatacgcagatccgtacttatttatgcatcagcaaccttccttgactgttgaatcaagtagaaagatgcacacagagaacaatgagatgcatttctggaatgggccgagcactgcgtacagtaattcaagagatcaagcacaagacttcagatttacagaacacccatcaaattggttaagtccgcagttctcccgggcagaacagccacgagtgatcaggcctcacgcatcaatagctcctattgagctggagaaacaacagaaggcagtgatttcaagatccttggngttaaagttgatactgccagtgctgggtttaccatttgaactccccatggctggaacgcatgagnctgtgctacaaactcaccatctgtatcattagatcatttgcaaactgattggtctcctgaggggtccttaagcattgctgggacgactg

SEQ ID NO: 71145 - DNA, 300 bp, Zea mays
  unsure (1)..(300): unsure at all n locations
  Clone ID: MRT4577_164890C.1
attgattaccatgttcccgcatatttctttgtaccaaatcaaaacctgggaaagagtcgttctaagtttgttaggattcaccatcacccatngacttctatatctacaacgcctaaaacgctaacggactagcccccgagcgagaaacaacaattttctaactaaatgtaacaaaaaatacaataacagcaaaacaattacatcttgatcccaatctatagaacccaattctataaacacacaaatacgacttgattatttttatattgcatcaccattactcacttaaacaaccgtcgc

SEQ ID NO: 71146 - DNA, 234 bp, Zea mays
  Clone ID: MRT4577_164891C.1
tttcctacggggctacctccgttttccacacctttgccccttctcccgattccttccgtcggtcgccgctccacccgggggaggacgctatgagggtatgcatttcgatccacttcgccgaggagggtatcgaggtgggaaactcgtgatggcgagttggactgttcttgaccatgttattcaggctgacggcaatatgcccggtgaccataccattgggggaggtgatgatgc

SEQ ID NO: 71147 - DNA, 414 bp, Zea mays
  Clone ID: MRT4577_164892C.1
ggatttcgttgaagttcaggggaagaagctcaaattcagtgccgagctccgtgctaatcttgatgggatcttctctgagatgtcacggtgtatggacaagggtcaagttcagccaaagtccgcaatggcagctgatgtcgtgtcccttggtgactcctggcttggctatgctatctgtaaggaattgctagagcctgtcaagaatgctgaagaacaggattggttccgtagactgagtgacagatggaaggactgggaggatttatggaggcccgaacttgctgggaggatttcaatggtctactagagaggtgattggtgcagttctgaagcatctggggtcatcatataacacggttgatatggaaatagaggtcaatggtggtagagcagcagtcctgaatagctttacac

SEQ ID NO: 71148 - DNA, 563 bp, Zea mays
  Clone ID: MRT4577_164893C.1
cgggaccttttttttttttttttttttttttttttctttagaggacaagcaagcaagctgataaaaagaataacgccatgctttccagccaggaagcaaggctctgacctgttacaattagaaaaaaaaaaaggtttagcagcaatgagcacagcaaacgcaagcatcatttcgcttctcaggcactacaccacagggacagaggacaaaaaaaataaaaattaaaaaaataaaagggttattatacacatgattacacctttgcaaacctcccaagtcacatcaatccatcaccactgttccctcatcagcaatggagatcatgatcacggatcagttcggttcaagcatcattccagccttttaccgattcgcaatgattttacacctcatgcttgtgctgatacactccaggatctcattctaaaaagatttcccaaatgcaaagggagaaagaaagaaataaagaaaaaatatgtatgtttactaactctcctaaaaaaaagagaaccaaattggggacgagaagtttttttttcctgagctgtgtggttaatgacatt

SEQ ID NO: 71149 - DNA, 1126 bp, Zea mays
  Clone ID: MRT4577_164894C.1
aaaaaaaagtcccaaactagcccttaaagggtgtttgtttaaaataataatctgtcaaattatatgatccaccaaattttatctcaaacacccccttaaaaaccagttcagttcaatggcgtgttgtgtgtaaatgtgtaatggtgctgcaaaaagcattttcctcttaacaaaagcaggaattcaaaaatctacgtaaaaaagtatgaacatgcttcggtgaatttaattaataagactgcgtttggaactttggtttttggtttcctcccaataaggctgtctccagccggacgcgtgggcggacgcgtgggttggtgcagttctgaagcatctggggtcatcatataacacggttgatatggaaatagaggtcaatggtggtagagcagcagtcctgaatagctttacacaactacagaagcaggtccaactattccacggcatgaactatctgaaatcgtttagtctcggagatgtatgggtcgcagtgggttggagcagcgatgtggtcgttccctgctgcaaagcgaatgtctaatgtcgcggtggtcgttcccaagtctggcagcagcctatgggctgatctatgggcaataccatgcgcgacgagatttcagactgaccaaatcgggagccgagccagaggcccgtctccactggttcaccagtggttcgacttctgcctgcagagcgcaaggagcctacccttccgccaagacgtcatccccggagcatctccgctccacctcgagagccctgtgccagaggtccctcaagacaagaacaagaggaagccgaagctggacacgaaccttgtcaggggagtgcctccgcccgagatcctggagaggtgcgagtttctggaacccctgtcaggtaaggcgctggaggactaccagtggctgatgtctcgggtgcagagacctcgtcttggtttgtttgggaacatgttgcagaagatgtcagctgtacttgacttcaaaagaagatcttagagccactgtactgtgattgaccaagttttttttttctttttacttcgtggtgcaactcttaacaacgtcctctatattcatcctctatatatgtcctttacagtttcctctaaaagatttcatcctct

SEQ ID NO: 71150 - DNA, 1878 bp, Zea mays
  Clone ID: MRT4577_164895C.1
ggatccggccttgtgcgaggggactggataagcccatcgcccatcggcagcagaaggccactgcccggacggagcttccgaaagggaaccgggcagcggcaatggagggacagccgctccatctcctcatcgcccagttccaccacccttgcctccgcggtctcatccccaactaccctacccactacctgcccacctcccgcctccgactccgcgtacagcgtcgcaagccgaagcagctcgccgcagtgccttcgaggcgtccatcgggcagccaagccgacgcgcctggcctggtgccggtgccggtgccggtgcctaacacggtggcggcgctggtgctccagctgaccgtgtgctcgctcctttttctcttccccaaccgtgcccgagccctcgcgctcccgccccctccgggggccgctgcggtggttgaggcgacgcaggaggaggaggaggaccaggagtgggaggctgcgctgcagaagtggaagaccaagacctacgcgctctcggtgcccctccgggtcgtcgcgctccgcggctccttccctccatcttggattaaggatttcgtcgaagctcaggggaagagactcaaattcagtcctgagctccgtgctaatcttgatgggatcttctctgagatgtcacaatgtatggaccaagggtcaagttcagccgaagtctgcaatggcagctgatgttgcttccgtccctgactactagctcaacaataacacgaagctggacacgctagtgcctatgggagtggctgagcccgagatcttgttgcattgcgagtttctggaacccctgtcaggttagtgcctggaggactaccagtggctgatgtctcgggtgcagagatatggggaggtccatacagatggggcaccatggtcattgcttacaagaaagacaagttcaaaagacataatttgaagccaatacaggattgggaggatttgtggaggcccgagcttgccgggaggatttcaatggtcgattctcctagagaggtgattggtgctgttctgaagcatctggggtcatcatataacacagttgatatggaaatggacgtcaatggtggtagagcagcagtcctaaacagctttacgcaactacagaagcaggtccaactattcgacagcatgaactatctgaagtcgtttagtgttggagatgtatgggtcgcagtgggttggagcagcgacgtgatccctgctgcaaagcgaatgtctaatgtcgcggtggttgttcccaagtcaggcagcagcctatgggctgatctatgggcaataccatgcgcgacgagatttcagactgaccaaatcgggagccgagccagaggcccgtctccactggttcaccagtggttcgacttctgcctgcagagcgcaaggagcctacccttccgccaagacgtcatccccggagcatctccgctccacctcgagagccctgtgccagaggtccctcaagacgagaacaagaggaagccgaagctggacacgaaccttgtcaggggagtgcctccgcccgagatcctggagaggtgcgagtttctggaacccctgtcaggtaaggcgctggaggactaccagtggctgatgtctcgggtgcagagacctcgtcttggtttgtttgggaacatgttgcagaagatgtcagctgtacttgacttcaaaagaagatcttagagccactgtactgtgattgaccaagtttttttttctttttacttcgtggtgcaactcttcgttccgtatgtttcattgtagcaatacactcagaggatgggcagatctagaccgcccaggaaggaaaggcagcagccttctttaatttttatcaagggttacttggtactac

SEQ ID NO: 71151 - DNA, 1672 bp, Zea mays
  unsure (1)..(1672): unsure at all n locations
  Clone ID: MRT4577_164896C.1
cgctggtgctccagctgaccgtgtgctcgcacctttttctcttccccaaccgtgcccgagccctcgcgctcccgccccctccggggaccgctgcggtggttgaggcgacgcaggaggaggaggaggaccaggagtgggaggctgcgctgcagaagtggaagaccaagacctacgcgctctcggtgcccctccgggtcgtcgcgctccgcggctccttccctccatcttggattaaggatttcgtcgaagctcaggggaagagactcaaattcagtcctgaactccgtgctaatcttgatgggatcttctctgagatgtcacaatgtatggacaagggtcaagttcagccgaagtctgcaatggcagctgatgttgtttcccttggggactcttggctcggctatgccatccgtaagggattgctagagcctatcaagaatgctgaagaacaggattggtttcatagcctgagtgacagatggaaggtccatttgtgcaggaaccagaacggagaagcagatcctaatggtacaatatggggagttccatacagatggggcaccatggtcattgcttacaagaaagacaagttcaaaagacataatttgaagccaatacaggattgggaggatctgtggaggcccgagcttgccgggaggatttcaatggtcgattctcctagagaggtgattggtgctgttctgaagcatctggggtcatcatataacacagttgatatggaaatggacgtcaatggtggtagagcggcagtcctaaacagttttacgcaactacagaagcaggtccaactattcgacagcatgaactatctgaagtcgtttagtgttggagacgtatgggtcgcagtgggttggagcagcgacgtgatccctgctgcaaagcgaatgtctaatgtcgcggtggttgttcccaagtcaggcagcagcctatgggctgatctatgggcaataccatgcgcgacgagatttcagactgaccaaatcgggagccgagccagaggcccgtctccactggttcaccagtggttcgacttctgcctgcagagcgcaaggagcctacccttccgccaagacgtcatccccggagcatctccgctccacctcgagagccctgtgccagaggtccctcgagacaggaacaagcggaggccgaagctggacacgaaccttgtcagcggagtgcctccgcccgagatcctggagaggtgcgagtttctggaacccctgtcaggtaaggcgctggaggactaccagtggctgatgtctcgggtgcagagacctcgtctcggtttgtttgggaacatgttgcagaagatgtcagctgtacttgacttcaaaagaagatcttagagccactgtactgtgattgaccccnnnnnnnnnnnnnnnnnnnnnnnnnntgcaactcttcgttccgtatgtttgacggtcatgtggttctcattggcggcagggttgcgagtggtggagtcagagatggccgtgaggctcagctgccccgccgctcaacggtcagtgcgatggcaccatgaggtcgtgcggatcattttatacggtgtccgtcatcgtaagcactaggcagncggcccaacgtgaaaatgccgagccagctgccctgcttctgatcagaaacatgagttcagtcttcagac

SEQ ID NO: 71152 - DNA, 163 bp, Zea mays
  Clone ID: MRT4577_164897C.1
ctaagtgactacacgatcatgggagaattcggttgtaatcgagacgttgtgaacatgcggtgattcttattgcacgtgcgtactctcgggttgtctgctgcttctcgcagcgctgtcgttgaagcacgtctctacgacgtcgattacgcacggatgatttccc

SEQ ID NO: 71153 - DNA, 290 bp, Zea mays
  Clone ID: MRT4577_164898C.1
cttggtaattaattgcatttgcatcattaaacctggcttgactcatgtgttgcttgatagttcatttgttttgtctataaactatgtgggcgtcactctgtataggtccatgtacaattttccaattcttcctatcaagtttacaaaaacaggtgggtgcctgtccagctgtacctgactatgatttggggtgggtggggtctgaatctttttctttgttcttataatctcatggtgtagaatttctgctggttgggcctgatgacacttggaatctgattacttcttta

SEQ ID NO: 71154 - DNA, 229 bp, Zea mays
  Clone ID: MRT4577_164899C.1
cctcgaagccggccgggattcattcgatttggcagccactgagcagtgaccaccagcagctgacacgaggacacaacagagataaggcccgctccgcccgcagtcgtccccagctcgcgcgacatggcgcccgccgcccggtggtccacgtcccctgtgctcatctttctgctgctgctcgcggcggccacggcgacgacgacgaccactacagcaaagcatgggcatc

SEQ ID NO: 71155 - DNA, 300 bp, Zea mays
  Clone ID: MRT4577_16489C.1
gggggcccataaaaattttggggtattaaaaaccaataatgtaaacaaccatccataacgacgtttttaataacccaatggcaaaacggggcggacataacccgaaagtcttacaacattaggggttgaaaaccacaccggggacaatagcagcacacaagccttacgattaccccatcaggatactttttgtactgatgaccattattaccttcctcgcccttattaaacttaaaaccaacctgttcataatcctttttgagcgctggcagaacctcacgggccttaaaaaaattcccc

SEQ ID NO: 71156 - DNA, 433 bp, Zea mays
  Clone ID: MRT4577_1648C.1
aaaatacaaaaaacacacctccctaattcccactccctaccacccgaccccctcctacctggccgctgttagccgtcccggatctccgcatccagatcgccgagacgcccccctctggagtagctggcgtcctcaccgccggacccaacctctgtcgcctattcccccgcccagctcactcttcaccggcgggaccccctccgccggggtgctacctcgacaactcgtcactctcgggatcaggcggatgtccacctgtacttttattaaagaccacgacctttgttgcccctcttgtcaagaaggaatgatccgactatgctccgaggagagacaaatctttgctcgcaatccccgagaaagtgcatcctcaggcgattcatgtcacctattgaaccctacccttgaccaccccgcactttatgccccccca

SEQ ID NO: 71157 - DNA, 451 bp, Zea mays
  Clone ID: MRT4577_164900C.1
gtcaaaatatttgatttcctattgttaacatcacataatagctggggatccgtcacatctcggatggccataaatggtgccggggtaaaccattattagaacggtggaattatacagttaaaaggttttacttacacgggtactttgaatttcacactgacatacttacaatataacaaggacagccaacataagccacaggtagctcaatcattaccctccgggagatgattgctttgcttaatgttgaccgttccattgttgaatcttggcctttctgtcctccttgctttccttgactggcttccttgcatgccttgaggtgcttcaatgcatgtgccttgcttgatgattatacctgttatgtcagcagactttgcatgcttgataattatacctggtatgccttccaactttgcagacttggtaattgtacctgttatacctgcta

SEQ ID NO: 71158 - DNA, 725 bp, Zea mays
  Clone ID: MRT4577_164901C.1
ctcgaggccggcctgcgcgacatcaaaaacgctggctgtacgcgagcctgcccatctcgacagcgccaagttgccgccgctgtccaaagcctgtgtaaaacatgggatgaatactgttagaggatactgtttataaagtgagatttaataaagtagaaaataagatagatgatgcgacagtattgagggaaaaaacaatagcgggaccgcggacgtggcttctcttctccacggaccgccaaaaggcgtggataggataaagacactggttttatgactaggtaataataaggttagcttagatgggtgttggtgggttttataataaggtaataataaggttagcttaggagacgatcacgtgcgctgaacaaaggtgatagcaactctaatgtacaaaacttggtacactactacgctgttctagcatcaacagaagaacatcaggtggacataatgctctggctctcaagtccgagccaacaactgtgacatgcatgtacctctgtaatgtacaaaacttggtacactacggcgagagttgcgcaaaggggaaggttagagtgctggcaaggaaggtctccccccctacagctcagtgcacgggactactgcaagattcctgaggtgggtcttcctgatcatgcctggaaacattcagttattcacactatgactatgtaaaactagcacacactgggtgccgatgacattactagctagga

SEQ ID NO: 71159 - DNA, 446 bp, Zea mays
  Clone ID: MRT4577_164902C.1
gtaaagaacagtacctgacatagctagatcactgtaaagccaactccccgtataaaggagaccagcatatcttgagcttacacaacataggcaacgtgcagattattttagagctgactacgatgcagaggcgggaattctggaggggggcctacacaagagtgcaccgtgccctgtgatgcccaaaagcaaggttggaaaggcaaacatggaaaagaaaggggcggggggcaaggcaatatttctgaatgacaagttaccgggagccacaatctttctgataccgaaccgctgggaaccccccctaaattttgtagagcttggctgccttgaccaccggattagccttgaacttggcgtccctggcagcagtacggtggtggaacttgcagtccagcttgtcggactagcggtggaatgcagaaaacaaattcctatacctgcag

SEQ ID NO: 71160 - DNA, 888 bp, Zea mays
  Clone ID: MRT4577_164903C.1
gatttttctcatccacggagccaggcgaccgccgtcgcttccctactcacccttggccggcgacgacgtgcgcccaccacggcaggatgacgacgctgaggaacctcaagatcaagacgtcgacgtgcaagaggatcgtgaaggagctgcgctcgtacgagaaggaggtggagaaggaggcggccaagaccgccgacatgaaggagaagggcgctgatccctacgacctgacttgaaactgcactggctgacttgaaagcaacactggctgaactgaaggagtcaaatgagcaaggtgccgagattggagaagctgagagtacaatcgcagaagttgaagcagttgtcaagccagcagaagattaaactaaaaaaactcttggtttgctgaactgttagcgcacatcctattttcgcatattgagcccttgtgagcctattacgagatgtttgaggcgcgaaatcctgtaccattatcatcacttctatcttgaaatttgagtttctgttccccaagctctaagcgttactgtttgttgtctgggagagcaaaaactcttggttctccgggatgttattaccatcctattttctcatattctgcccttgtgagcttattacgatatgtttgaggcgtgaaatcctgtaccattatcatcacttctgtcttgaaatttgagtttctgttcccaagttctaagcgttactgtttgttgtctgggagagcgcacatccctggcttctccgggaagttgttagtgtaaattgaaattaagaaaaaatggacgaatttgaatacaaacgaaatttgcgacggtcaaaaaaaaaaaaaaaaaaaaaaaaaaaaaaaaaaaaaaaaaaaaaaaaaaaaaaaaaaaaaaaaataaa

SEQ ID NO: 71161 - DNA, 349 bp, Zea mays
  unsure (1)..(349): unsure at all n locations
  Clone ID: MRT4577_164904C.1
aaataaaaataaaacccngggaagggattattttttttaaaaaggaggccccactcccacacaaccaaaaaaataaaccgtggataacatattgccaccttgcaggacaggacgcttgctgactaccaaagtgaagcaacctgaacaatttgcccgaaaatcaaaactgccaaaatcggtacggacttggagaaaaaaaagaaacgccgggctacaatatgacacataaacacccaaaacatgaagggcatggcccaaacgaaccccaacaccaaaaaaaggcagggggaacaacattggataggcaaccttaaaagcaacagacgtaacttcaaattttatagcagcg

SEQ ID NO: 71162 - DNA, 642 bp, Zea mays
  Clone ID: MRT4577_164905C.1
accctcgaggctggccgggtccctgctataagtggcacgccgggcgggtaagcggcggcgcgcggcgacccccgcagcagctccgaaccttctcccagccggcgcaggaagctcaccgggaagccggtgcaaaacccccaagatcacacacacacacaccccagctacaaatccgtccgccagcccccgtcgacatccctcactcccccatgcgcaccggcagctcaccgatccccggagccgctactgctataaatacaaagcttccccggcggtggtctagccggccatggcggcagtcggagcgcacccagtgctgtaccaccacccggcgccggcgggcgacgcctcctccatgtcctcctacttctcccacggaggcagctccaccacctccagctctgcgtccagcttcaccgccgcgctcgcgccgacgacgacggcgctcgccgagcatttcgacatctccgagttcctcttcgacgacgctgcgggcgctggggtcgccggcgcgccaggtgtgttcgccgatggcgcggcccgccccgtcgtcctgccggtgccggatgccgctggtggtggtgcaattatcggcgcagccgctgggggcgcggctgcggcgtcggaggtgccagagcggcc

SEQ ID NO: 71163 - DNA, 290 bp, Zea mays
  Clone ID: MRT4577_164906C.1
aaaaaaggccccaaattttttaaaacgggcgggtttcccctttttctgaagtctctccgagcttgttaaacaagggggtaatgcattccaaaagggaccttggccctttatctgttttaggaatgggcaaaccccctttttattatttttgggccttcacgatggactattttttcaaaggcccgaaaaattcctggccttccccaattccttggggggcccccactatggggtttggggccttaattttccttgaccgggctggggggttcctacccaaaaaaccaagg

SEQ ID NO: 71164 - DNA, 998 bp, Zea mays
  Clone ID: MRT4577_164907C.1
ccggccgggccggggacacgactctcggcaacggatatctcggctctcgcatcgatgaagaacgtagcaaaatgcgatacctggtgtgaattgcagaatcccgcgaaccatcgagtttttgaacgcaagttgcgcccgaagccttctggcggagggcacgtctgcctgggcgtcacatagggccggccgggcgggcacgctcgattcggccgttttccgcatccacggtgccaggcgaccgccgccgcttccctactcacccttggccggcgacgacgagcgcccaccacggcaggatgacgacgctgaggaacctcaagatcaagacgtcgacgtgcaagaggatcgtgaaggagctgcgctcgtacgagaaggaggtggagaaggaggcggccaagaccgccgacatgaaggagaagggcgccgatccctacgacctcaaacagcaggagaatgttttggctgagtcaaggatgatggtcccagactgccacaaacgacttgaaactgcactggctgacttgaaagcaacactggctgaactgaaggagtcaaatgagcaaggtgccgagattggagaagctgagagtacaatcgcagaagttgaagcagttgtcaagccagcagaagattaaactaaaaaaactcttggtttgctgaactgttagcgcacatcctattttctcatattgagcccttgtgagcttattacgatatgtttgaggcgtgaaatcctgtaccattatcatcacttctatcttgaaatttgagttttatgttcccaagttcaaagcgttactgtttgttgtctgggagagcgcacatccctggcttctccgggaagttgttagtgtaaattgaaattaagaaaaaatggacgaatttgaatacagacgaaatttgcgacggtcgatggaaatgtattgtctatagcccactaaaaaaagaaaaaaaaaaagccccgaaaaaaaaaaaaaaaaaaaaaagcccctaaggcc

SEQ ID NO: 71165 - DNA, 719 bp, Zea mays
  Clone ID: MRT4577_164908C.1
ccggccgggacgccccccatccccttccttctctgcgaaactgagcacttgaccccgaaccctaattcaagctactgtatttggctatctatatccggatctgatccaatcacaagcgcaagtgtctgcacgtatcgtccctgctaatttcgttctttatatcctttgttggatccgccgctgcctcctgcattccattccaggatgacgacgctcaggaacctcaagatcaagacgtcgacgtgcaagaggatcgtgaaggagctgcgctcgtacgagaaggaggtggagaaggaggctgccaagaccgccgacatgaaggagaagggcgccgatccctacgacctcaaacagcaggagaatgttttggctgagtcaaggatgatggtcccagactgccacaaacgacttgaaactgcactggctgacttgaaagcaacactggctgaactgaaggagtcaaatgagcaaggtgccgagattggagaagctgagagtacaatcgcagaagttgaagcagttgtcaagccagcagaagattaaactaaaaaaaactcttggtttgctgaactgttagcgcacatcctattttctcatattcagcccttgtgagcttattacgatatgtttgaggcgtcaaatcctgtaccattatcatcacttctgtcttgaaatttgagttttatgttcccaaaaaaaaaaaaaaaaaagcggccgcc

SEQ ID NO: 71166 - DNA, 613 bp, Zea mays
  unsure (1)..(613): unsure at all n locations
  Clone ID: MRT4577_164909C.1
cggccgggnacaccaccgaccaccaccgcttnccgtgcacaggcctcgctatacgcttgcttatttagtcggcatgggctgactgggcggcacttccggcaaaacagcggccaccaaaggccttgccgggagctccatacccggcaggaagacccccgtggccagggcgacggtccgtaccatgccgaggacgcgggcaaccgacatattggtcgagcccgaggacacgagcgcgaacttggaactggactacagctgaaaaaccatctttgcagagggacctctacagctataacacacgcgtatccctacataagcgatacagatgaacgatcttgctgacgaagatgggctccgaggcaccaaaagagggccgtggattgaagttactgctggtgcgcggaggcttattttaggcctacgccattgagagggaggaaccgaacctacacccgaccaaaaaaggaccttacgagccgctgcactcgtacccgcgcggcaagagataagctaaattatgccattagagtgggctctatcgttgctaggaactgctagctccagacacggggcgatcggcatgcatgatctctctatcctgcagctacgcagc

SEQ ID NO: 71167 - DNA, 358 bp, Zea mays
  unsure (1)..(358): unsure at all n locations
  Clone ID: MRT4577_16490C.1
cacgcgggggagcgaaccgcaagcagcccagcncgagaaccgggcggcctccccgcccgaancgcaggccgaagaggccacctcgccgaccgtccgaccccaagctccctccgtgggtaccccccgctagggagagagccccgcccgnccgggggggtggcgnncccnaggcgccctcctcgacggcccccgcccccgcgcccagcccacccccccggcgancgngaccaccgcctccggcccccccccccccccacccccaggcgccgccctcgnngccccctgcncgaaaccgcactccncccccnncggccccccgccccccaacccgnangccgcgcgggggcccccccggggg

SEQ ID NO: 71168 - DNA, 383 bp, Zea mays
  Clone ID: MRT4577_164910C.1
gagcatgcaatgtcatatctttattatagtggcatctaaattaaagtgagttaacgcgacattacaaccctcaatagctgacaaaactcctatagttacccatcttaatcgatacctttataaatgatgttgcagttggaaatacaatatgcaacctatatgcccctcaagaaatttgagcatgcaacaatacctaaatgaactcgtctatcaatcggcatcaatatctttggttcagtcattgacacacaccatgacggctcaacatgtgcaggaactagtgctagctgtgatcaaccaattagctttgtcaaaccttatcttcctactctcatgaacaacaagtttttaaattcaagctactgtttacattgaacactact

SEQ ID NO: 71169 - DNA, 830 bp, Zea mays
  unsure (1)..(830): unsure at all n locations
  Clone ID: MRT4577_164911C.1
atcctctctccctgtcccggcggattggctgctccctctgatggcatgtccactctgcggcgacgagccgtcgcaaggagcgggaaccaggcggggcaacgcttctacaagtgcatccgctactatgcacggcagtttggtttctttgagttccagcgtgcgtactgaaggaggatgactcatgagcagatcgtcgctgcacagcaccaagccggatggcacccagccaggcttggatttgcagtccatcagggcaatgcggctgctcaaatggttcatgctgccatccagccccagatccagccgcatgcgcagccgcagatccaggccccggtgcagcagctcccgccggcggtcaacaatctgatagccaatgccatcaggacatacagcaaacaagtcaaaaatagcccagcacttgccttctacaagcaatcagtacatatgtttattttcctttatctgcaagtaaatggccactcaccgagcaaccacaaactgcatgctctttgtcctctgggcgttgagtctgctttttccgtatcttatcccaaacccgatttctcaagaatataagttgtagaaatcatacgcctcacccagcgaatcaaaacttaaacctagctcaggtcgcaccacgctcttgtcatggtgctttgcatatttgcgaatcgacagctcgagggcgctcattcttgatggacagggcacacggcccggtggcgcgctccccagccgatgcctgcattgatttgtanatgcgcaatgtangttattttttanaaaaatggaaagctgatactcatacaagcaggatttccttttttcaa

SEQ ID NO: 71170 - DNA, 373 bp, Zea mays
  Clone ID: MRT4577_164912C.1
gttgtacaaggcgtctggcggcgaggcagtggacaagatagagggggaggccaaggtggaggcgtaggccaagatggagacggaggatccgctgctggacctggacctgacgagctaccagctgcacgatctaaccgaggcggagatccgactctctctgctggacgatgacctcaccggcaaccgcttgtctcaggctgatctacacatcgcgcaattcacctatctgcggaggctctcattgcggctagagccttcatagcgattacacgcgctccctgatgacgtgctgaaaggctatgtacagattgaagtgtgccgcctgagatataacaaacgcacaaggatcgcatgggctggcatatcgaaggat

SEQ ID NO: 71171 - DNA, 169 bp, Zea mays
  Clone ID: MRT4577_164913C.1
ccctacactgcgtacctctcagcgcaggccggcacacgaaatttcacggtcgactcgagaccagattcgtatggtcgcgatcgagatttcctccgtcaagcgcggatctgaacgatactgtacgtgtcgaagctcgaatccgtcatgaatggtgccaaatccaaaggtg

SEQ ID NO: 71172 - DNA, 695 bp, Zea mays
  Clone ID: MRT4577_164914C.1
cgggcgccgacgcggcgcggcgcgcgcagtgggaggtgtccgtgctgtccaggctcgcgcacccgcacctgccgtccctgctgggctgcgccgagacgcccgacctactggggtgggcgctgccctactgtccaggcggggacctcaacgagctccgccacgcgcagcccgaccgcgtgttctccaccgcggccatccggttctacgtcgccgaggtggtgtccgcgctcgccgagctgcacgccgccgggatcgcgtaccgcgacctcaagcccgagaacgtgctcctccgcgccaacggccacgtcatgctgaccgactttgacctctcacggcagctcccgccgcccaggtccccctccgcatccacgtccacgtcgtcgtcgtcgtgctcggcgacatcgtcgccgccgcctcagacccagaagacccacatgaagaacatcttcaagagaagcgagtccgctgtgaccgcgcccacctccggacaggaggaaccgcgcaacctcccctggtacctgagcaaaagcatcgacggcggcagtgaccaggtcaagaaggcgaaatcggccagggtaacgccggtggaccgtggcaaggagctgccgagcttctgccacgctgccgcagccgcagccggagagcggtcgttctcgttcgtgggcaccgaggagtacgtggcgcccggagtggtg

SEQ ID NO: 71173 - DNA, 459 bp, Zea mays
  Clone ID: MRT4577_164915C.1
gggggcaattatttttagtttacatgaaacagcatgttgggaaagggcatttgggggggaaaaacagagcctgaactgcaacggaacaatgagacaaaaaaaaaagcagaaaggctcacgggagggagcctgaacaaaaaggggcgcccggaataataacaaatgcataaggccgtttgacttaaaaatatagtcatgcgagaagagggtggcacacaaaaccatggaattgacatttattgaaagggattgcaccatttacaggacgccgcagaaaacatggaatacaccggcaaacaagacaggattaaaccaagttgtgaaaagacatggtggggcccggaagggcgaaaagaaacagcactggggcctgggaaaaacacaagagggccaacggagctttaaaggagagggggagtgcgttaagggtgacagcataagggggaaaaaccaccggaa

SEQ ID NO: 71174 - DNA, 2482 bp, Zea mays
  Clone ID: MRT4577_164916C.1
cctcgaggccggccgggagtttgccctgtttatttcctttcatccatctccgtgtccctgtctctctctcttctccccctcccccccaatctccgaggcgagctcgagctcccaaaccctaggcctcactggggagtcacctccgccactccagcgatgtctctcgccgcagcggcttgacggtgcctacccccaaatctacctctccgttggagagcgcggcgtggttgctgcgtgaggcgcaccggggtttgcaaatggagccgaggcgcatatcggcgagcccgcgcccatgcagcgggcggcgggtagtggccaggaagaggccgaggcaggaggcggtggtgagcagtgtgcggaagctgcagcgccgggagatcagctcccgccgcgaccgcaccttcaccatgagcgccgcgcaggagcgcttccgcaacatacagctgcaggaagagtttgacactcatgatccaaaggagaacgcttcactactcccttacttgaggaaaaggtcaaaaatcattgagatagttgcagcgcgtgatatagtctttgctttatcacagtcaggagtatgtgctgcttttagtagagagacaaatcggagaatatgctttctgaatggaagtccagatgaagttatccgcagtttattttacaacaagaataatgattcactcattactgtatcagtatatggttctgaaaacttcagtgctctgcgatgcagaacaactcgaatagagtacgttcggcgaggacaaccggatgctggtttccctctttttgagtccgagtccttgaaatggcctggatttgtagagtttgatgatgtcaatggaagggttttgacttactctgctcaagacagcacttacaaggtgtttgatttgaaaaactacacattactgtatttggtgtctgataagaatgttcaagaaataaagatcagccctgggataatgctattgatttatgcaagaacaagcagctcggttcctctgaagattctttccattgatgatggtacagtcttgaagtccttcagccacctcctccatcgtaacaagaaggtagattttattgagcagttcaatgaaaagcttctggtcaagcaggaaggagagaacctccaaattcttgatgtaaggaacttccaattgacagaagtgagcagaactgagtttatgactccatccgcctttatttttctacatgagctgcaactgttcttgacattccggaatcgagcagtatcagtttggaactttcgaggtgaactggtcacgtcatttgaagatcacctgttgtggcaccccgactgcaacacaaacaacatatacatcacaagcgatcaagatcttattatctcgtactgcaaggctgactcaactgattcaacttcagaagaaaatgctggctctataaacataagcagcatactgaccggcaaatgcttggcaaaaataaaccctggaaattcgtgcaagcaaaaggatccatgcaagcagaagaaagcatggaggttccagaatacagtctcggaggccctggaggacatcacagctctatactatgacgaagatcgtgacgagatctacactggcaaccggcatggccttgtccatgtgtggtcgaactgaaagccgaaatagtggcggctttcacccacagcatggtgatcttcacctgtatgtgtattaacagcttgtacctcacatggcaggggggcacgaagacggaccccccagccaccaggtacggacgtgatgcttcattgttgaggcaattcttatttatcccaccagcgtggcaagagctctctccacataggcacccattcagaaatcagaaccccccctccccgatttgttgtaggattgacaatcgttgtgcgttttaaataaagcatgtgtgttaattttttgttgttgttgggaatgtcgattatgtcccacaactcagtcagtgagttcaagtgttacggatgtaccttgcaagtaatgagattcattcgttgagttgtgatttaaaaaaaaaaaaaaaaaaactcgagactagttctctctctctctctctcctcgtgcggaacacagtttcggaggcccttgaggacataacgggtttgtaatacgacgaggatcgcgacaaaatttacactggcaaccgggacggccttgtccatgtgtggtcgagctgaaaactgaaaatgcggggcggctttcaaccgtagcacggtgatttggttttcacctgtgggggtattaacagctactagtgcctcacgtggcacgggggtggggggcacgaaaaagggaccccccaagccactcaagtgacagtttttatttatctcagcaagccaagagcactgtccatcattttgaaaacagaggccccccccccccccccccccccccaagatctgttgtaacggacgtaccttgcaacttgccagtaatgaaattcattcgtttatctg

SEQ ID NO: 71175 - DNA, 945 bp, Zea mays
  Clone ID: MRT4577_164917C.1
ttcagatcaacgaatggatttcattacttgcaaggtacgtccgttacaacagatctggggggcctctgatttcagaatgatggacagtgctcttggcatgctgagataaataagaactgtcacttgagtggcttggggggtccctctttcgtgccccccacccccgtgccacgtgaggcactagtagctgttaatacgcgcacaggtgaagaccagatcaccgtgctacggttgaaagccgccccgcagtttcagctttcagctcgaccacacatggacaaggccgtgccggttgccagtgtagatctcgtcgcgatcctcgtcgtagtacagagccgtgatgtcctcaagggcctccgagactgtgttccggaacttccacaccttctttctttccttgcaagcattggagtttccagtgtttatttttgccaggcatttcccggacagtatgctgcttatgtttatagagccagcattttcttctgaagttgaatcagttgagtcagccttgcagtatgagataataagatcttgatcgcttgtgatgtatatgttgtttgtgttgcagtcggggtgccacaacaggtgatcttcaaatgacgtgaccagttcacctcgaaagttccaaactgatactgctcgattccggaatgtcaagaacagttgcagctcatgtagaaaaataaaggcggatggagtcataaactcagttctgctcacttctgtcaattggaagttccttacatcaagaatttggaggttctctccttcctgcttgaccagaagcttttcattgaactgctcaataaaatctaccttcttgttacgatggagaaggtggctgaaggacttcaagactgtaccatcctcaatggaaagaatcttcagaggaaccggacgcgtgggcggacgagtgggcggacgcgtgggcggacgcgtggg

SEQ ID NO: 71176 - DNA, 792 bp, Zea mays
  unsure (1)..(792): unsure at all n locations
  Clone ID: MRT4577_164918C.1
gcggtgtaaccctaacgccgccacgcgcggccaaccatggcctcctgcgacgacgacttcgttctcctcggtgacgacgcacaccagccggcaactcccccacccccggcccccaccgcccagcaacccgcgccgccgccgccgccgccgccacaggcctcccatcccttcagcttcactgacgcggttgcgggggctgccgccggcgccggctccttcgcgcaggcccaggaggagagcaaccaccacgccgagcgcggcaagccggcgcaccacgccaagcggggcagggagcgcgccgaggagttcagcagcgatgggggcgagtactgttcctacatcaacagcagcggcagcggcggtggtgggaagaagggccgtggcggtggagggagctcgagcgtgtcagactaccgtaaggatcgggaggagtggacggacggcgcgatcagcagcctcctcgacgcctacacggaccgatttgagcagctcaaccggggaaacctgcggggtcgggactgggaggacgtggccggcgccgtgaccgacgggcagggcaagactaccggggccaagagcgtggagcaatgtaagaataagatcgacatcttaagaaacgttacaaggggggagtgccagcggctctccagttcgggcggggggtgccatcagccactggccctgggtaaaaagatggagcagatcgtggggaactccgcatctcctgcctnctccaagcttctaactgctngcgaggatgagaaaccgaggcagcagcagcagcacagcagc

SEQ ID NO: 71177 - DNA, 1082 bp, Zea mays
  Clone ID: MRT4577_164919C.1
ggccggccggaaaaaaaaaaataaaaaaaaaaaaaaaaaaaaaaaacggtttatttcctttcatccatctccgtatccctgtctctctctcttctccccctcccccccaatctccgaggcgagctcgagctcccaaaccctaggcctcactggggagtcacctccgccactccagcgatgtctctcgccgcagcggcttgacggtgcctgcccccaaatctacctctccgttggagagcgcggcgtggttgctgcgtgaggcgcaccggggtttgcaaatggagccgaggcgcatatcggcgagcccgcgcccatgcagcgggcggcgggtagtggccaggaagaggccgaggcaggaggcggtggtgagcagtgtgcggaagctgcagcgccgggagatcagctcccgccgcgaccgcgccttcaccatgagcgccgcgcaggagcgcttccgcaacatacagctgcaggaagagtttgacactcatgatccaaaggagaacgcttcgctactcccttacttgaggaaaaggtcaaaaatcattgagatagttgcagcgcgtgatatagtctttgctttatcacagtcaggagtatgtgctgcttttagtagagagacaaatcggagaatatgctttctgaacggaagtccagatgaagttatccgcagtttattttacaacaagaataatgattcactcattactgtatcagtatatggttctgaaaacttcagtgctctgcgatgcagaacaactcgaatagagtatgctttgtcattgcaattgttttttttatcatgtcatctttcttaaattttccccaaccattcaaggtacgttcggcgaggacaaccggatgctggtttccctctttttgagtctgagtccttgaaatggcctggatttgtagagtttgatgatgtcaatggaaggggtttgacttactctgctcaagacagcacttacaaggtgtttgatttgaaaaactacacattactgtattcggtgtcagataaaaatgttcaagaaataaagatcagccctgggataatgctattgatttatacaagaacaaatagc

SEQ ID NO: 71178 - DNA, 598 bp, Zea mays
  Clone ID: MRT4577_16491C.1
ccggccgggggagccatctacctaccttcctcttgatcccgaccggacagaatgcaaaagaaactgaacgtctcttccatgcccaagctcctgccggaggaatccgccctcgtgggtgactaccacgactgccaggacaagaccgagaaggggccggtcccgcgaccgtcgaggaaggaacggacctggcaactcacaccgctcatcgacctcctctgcttcctgctcctcttcctctgctccctcgccccctctccctctgacatgcacaggactgggaataaggatgggaggatgaatgacaggatgttctgatcgcggcaccttagactgtacaaactactgatgcatctttaacattcaagatatttgattctagatattcaagcatcctctcttcatacaaatcgtgaatttgtcgattacttctgagatactgattatacacacgctactctgctgatcttgaccctgtcgctgaagaactgccccgcacaccgatagcatcttaagcccaagaataacacatgtacgagagggcctcgacgtccaactattgttccctccacagatggacaattgagcacttgatgtaatc

SEQ ID NO: 71179 - DNA, 372 bp, Zea mays
  unsure (1)..(372): unsure at all n locations
  Clone ID: MRT4577_164920C.1
tgtttagtattattntttggtaggtgagtttttttttttttttgaaaaaatgttggggggggggggtattatntntgctatgggttttacttttttatggtgtggattgaaatatgttgttattacagtggacaaggtggggacactgttaatttagattgtgaatggtggtggtggataatagggaaatgttatagaatgggagatggtgtgtatgtatgatagtgcgtgattgtattattgttttaattaggatgtgatgtagattgtaggatatttgttgtttgtatatgacagggatactaaagtgatgatgtatctatatgttttatgagaagtagatagtttggtaataagagttatatgttattt

SEQ ID NO: 71180 - DNA, 282 bp, Zea mays
  Clone ID: MRT4577_164921C.1
cgacggcatctctcacatccagaagctcatcgcaggcgccgcttttagattccactaccagatctgcgacgtctacgatccgtttccgacctaggcgtcaatgaccacggggaaatcctccattgcgatgacttaaattctcagggagcagaccgtcaggaacgttgcaatgcttctcagcgtgagcatctagcgctacgagcacgaccagggtcacctccttcttgtaagctacgctattgcacttgtctcactctccgatgtcctcattaaccagctatg

SEQ ID NO: 71181 - DNA, 283 bp, Zea mays
  Clone ID: MRT4577_164922C.1
tggatgggattagtcatctgattcgtgagagagctgatgctctagatgttgcatggcataccatggcggtttcttgggaatggttttgctagtggctcggtaaccttgggttccgggaaaataagtgtgtgcgtctgtgcgtcaggctgataacggcactggttacgttctgattcatagattgctcatctagtttattttctgttcgatgctcctgtaccggttctcggctatgatcattaacagtgtgggtagtgctgctctcaagattatgtcagatgtt

SEQ ID NO: 71182 - DNA, 588 bp, Zea mays
  Clone ID: MRT4577_164923C.1
agaccatgaccacaggtgctcgctcgacttctcatctctcgctccaggccacaactcgagaccgacgaccgacgcctagacgcggctgtctcgtcgtcctcacctcgttccccctcctcccttcgtcctgctccacgtatagatctcgactcccccggcgcatcgagcgaccggtatcagatcttcaccaccctgtgccgtgcacatggataacttgatcaccctcgttcactagctgctcatgccttgcacggctctcgaacaccaccgagaggatagcgccctcccgacgctcggatactcactggcggctatccccgcccatggaggatgaagatctggaaaatcatctgagatgcatagacgaggtgttagaggatgacctaccgagagcttgaggaattgcaagccaccattggctgatgctgcacctccacagacatgatggcgatgggtgatatggacagactcgtgcatctatccgacaaaaatgttgacagattctgctgctgagacaaaggagataactgatgagactggcccacaaacaggacggtcgaagagcatatcgactgtccctatccattt

SEQ ID NO: 71183 - DNA, 294 bp, Zea mays
  Clone ID: MRT4577_164924C.1
ccaagacacatcctaagacctggcacatgttaattttaatgattatctgggtgaatgtattaataaaaggggaaagtggagccggtggcatggggggtggtgtgaatgcccaccgaggtctgaagtggggtgcagatttgttcatcagcagaaagttactcgggtcatgtctgcagtggggggctcttccctagaggccttggccggctgcctccaggtcagggggctgagttggcatccaaagactcaaaggagtgatcgtacatgtcagtcacagggttggcttgggcacac

SEQ ID NO: 71184 - DNA, 375 bp, Zea mays
  Clone ID: MRT4577_164925C.1
tgccccggtatgcctaccaccagtagccgcgcgagcttgcttcggtcggccgatagatcgatcgatcgatcgatcgctcggccatcatggcgcgggaggagcaggcgctgctgtcgacggagatcgtgaaccgcggcgtggagccgtcgggcccggacgccggctcgccggcctatctcggtgcgcgtgctcgcgtcgcctgccggacttcctgcagtgggagaacctcctattcgtggctcttacattgccacattcctaatcttccgcggatgcgtacctggccacacattcccgtcttaaccctgaacacctgattctacctccatctgcagggccatatcatcttctctagatgcattttacagattttcc

SEQ ID NO: 71185 - DNA, 181 bp, Zea mays
  Clone ID: MRT4577_164926C.1
cgccacgcgtccgaaaaaaaaaaaaaaaaaaaaaaaaaaaaaaaaaaaaaaaaaaaaaaaaggccaaatccatcgggcggcgggcaatcttacgggggcgtgcatagctaaatcttagctcttttctacccaaacctaaattcaattggctggcgcgggaatacaacggccggactgggaa

SEQ ID NO: 71186 - DNA, 539 bp, Zea mays
  unsure (1)..(539): unsure at all n locations
  Clone ID: MRT4577_164927C.1
aagctcggaattcggctcgttggcatctggccgagggggtagatgcccatcgtcggacggactatgcagggggaaatttaaacggcatcacggacattggcccgtncggcggggcgagcagcacatgcctggaaaggaagaaccgatcagctgaagctgacgagctcgacctataagcgagcttacttgctggggcgggacaaagggaacaacaactggcacggccaacgcctattcattgaatacatgccaaaggtgaatggaccggacgtgattgatacatattgagccgtgcacccatagctaacgaaagccatgagtgcccatgacgagcaatcaccggattagtgaaggccgcatgcacgggcctccgcacgggaagaacaatgggcataactgacaacacgtctaaaaccaaagctgcataggaactatccggaatggtggacactctgacgaagagtaccacgcgtatcctgcacgagcactacatgctcgatatggaggacacgatgagaataggaggctggtcaacggct

SEQ ID NO: 71187 - DNA, 1344 bp, Zea mays
  unsure (1)..(1344): unsure at all n locations
  Clone ID: MRT4577_164928C.1
ctcgaggccggccgggactagagctggacccggtgcacgcagtaacttgaatccctcagtagcagcgcgtggtccgccaggtccactgtccgtctgtcctctggcgctcacgatccttttccctgcgtacaccgagctcacgcaggacaggagggagcggacgagatagacaaacagaaagagcccgtgtgcgtgacgcacggacgccgtgactccgccgcaaagagagggagagtccacgctctgaagaagcaacggcgacgcccccgacgacgagcacagctgcccagcaaactagcagcgccctcgtcagttccgtctcgttcccaacctctcccggattcgattcgattgacccgtccgctccaaatcgaatctaatcagcagttttggagttgcggaagggagaaagagagaggagagggggcatggatcaggtgctcaacaaggtggggagctactggttcagcaaaagggccagcaaggaaatcgactccatcggcgacgacatcagctcgatctcaagcagcattggagggtcagccaaatggatggtgaacaaaattaaagggaagatgcagaaagcactgccagatctcctcaaggaatatgacatgccagcagggctcttcccacgggacacgactaactatgagttcaatgaagagacaaagaagctgacagtgtacatcccgtcagcctgtgatgttggttacaaggactcgtcagtgctgcggttcttcacctgtgtgaccggctaccttgagaaggggaagttttccgacatcgagggcatgaagaccaaagtgctggtctggaccaaggtgactgccatcaagaccgagggcccaaaggtccatttcacggcaggcgtgaagaagactcggagccgtgatgcctatgaggtcgtcagagatggtatcaccatagacaagttctagagcatatacctggcatgaaaaatgtgacgcggttattcatatatgcttctctcctctcggtacaccgaaattcatacaatatcgtgggctaattctgcatttgtatgaaagtttaatatgcttgacgtgttaatcacactgctagagcatgcgataaatcgcagttggttcattattaggaaattgcattgagctgtaatcagatgcttctctcctctcagttggtacaccgaaattcatacaatattgtgtgctaattctgcatttatgtatgaaagtttaatatgcttgacgtgttgattaaataacactgttagagaaaaaaaagagtgcgataaatcgcagttggttcattattagaaaaaaaaaaaaaaaaaagcggccnnnnnnnnnnnnaancaag

SEQ ID NO: 71188 - DNA, 212 bp, Zea mays
  Clone ID: MRT4577_164929C.1
atttctctcgaggtctgcacactcgtctgctaccgagaccgttggcggccatcgtcgcacacgctgggctgatgctaagtagcgagggtcacacgtgctactactacccggacgttgggacgagacggaagctatgcgccgggagaaacgtcttgcgagagaccgccccgcgtgacgcataggctgattcctgccgtcacggcaagaggaag

SEQ ID NO: 71189 - DNA, 621 bp, Zea mays
  unsure (1)..(621): unsure at all n locations
  Clone ID: MRT4577_16492C.1
aattcggcacgaggaaacatccgaacggacagctattcctttgcaatctaacctcatcgcggcaactgcatttatggaaccttcaaaagagtggatgtacattgataaagatggcacacaagttgggccacttgaaaaggatgcaataagaaggctgtggtcaaagaagtcaattgattggacaataaaatgttgggcttctggtatgtctgactggaaaaggttacgggatatacgggaactgcgatgggcactttctgtaagagtacctgttttgactcctacccagattggggacactgcattatctatattacacagtatggcatctgcacgctctgatcttgatgatgcaggtgaaatagtaactccaactcctagggtgaaacatatattgtcaagtccaagatgccttcctcatgtggcccaggctatgcttactgnggaacccagcatcgttgaagcagctgcctcattgcttaaggctattgttacaagaaatcctaaagctatgattcgattatatagtactggtgccttttactttgcattggcgtatcctggttcaaatctcctatcaattgcacaggntgttttcggccacacatactcatcaagctt

SEQ ID NO: 71190 - DNA, 377 bp, Zea mays
  Clone ID: MRT4577_164930C.1
cgcgtacgcgcggagatcctccgttgcagcagaggcgttgtccatggctcgccctgcacggatcgagggggacaagctgagcgtggagcagctcaccgggctcaaagagcagacggatctggaggtcaacctcctgcacgacagtctcaccatgatccgtaccgtcgccacccgacttgagaacgcctccggcgcgcttcatgacctatccctgcgcccccaatggaagaagatgctcgtgccgctcacggcgtccctctacgttaccacttcactgcacgacgcggacacggtccatatctatgtcggcaccgcttactacatctagaaaaccatggctcaagtaaaggatactgcgaacgaaaattcatttattg

SEQ ID NO: 71191 - DNA, 205 bp, Zea mays
  unsure (1)..(205): unsure at all n locations
  Clone ID: MRT4577_164931C.1
gggctctctgcctcgtctcgtctcgtctcgcttatgacggtgctggatgccctccttggtgcctgctgtgggggtgcttgtttctgtccaggaggtgcttcnggcttccccgtgtcctgtggcgtgtcttgcttggtttgtttccggcgtccttgggcctggctggcgctcttgcttcgtcatggcctccggcgttctttggctg

SEQ ID NO: 71192 - DNA, 155 bp, Zea mays
  Clone ID: MRT4577_164932C.1
cggacgcgtgggatcatacgaaaaccctctttgcgagtagcgctctccgtcccacacacgggcgccggagacttcggagtgcgcacctgccttcacgacttgtcgtgctcgtgcgctactcttctcgagcgccgcgcggagcacggggacattaa

SEQ ID NO: 71193 - DNA, 415 bp, Zea mays
  Clone ID: MRT4577_164933C.1
cctccctatctcgcttccgcccgcagcagcagcctcatcgtcctcctcgcactccttcgccgccggacgggtttccctccgccgtcgccgccgcgcctcgttcagcggctgccgctgctcctcgtcctccccctcagaaatggaggccggcgctggcacggctctgtaccccgcccaccgatgcaaaaccatatacctggtgaggcatgcccagggcgttcacaacgtggaaggcgagaaggattttgcagcatataagtcacaggcgctgcttgatgctcagcttacccctttgggctggagccaagttgataccctgcgtgatcatgtgacaaaatgtggactagcaaaaaagattgagttggttattgtttcccctctactcaggactatgcaaactgcagtgggggtcttt

SEQ ID NO: 71194 - DNA, 390 bp, Zea mays
  Clone ID: MRT4577_164934C.1
cggctcgagagctctcgaatcaacccaacaaagaaactgcaatcacaacaagaacccttaactttctgaaacaaatcaccaaaacaactctcagaatgactggcaccgagcaacagaaggagggcgagaagcaattctccatccaacccatcaaagatgaggccaaggacaaggtctctgctttcaacgctcaccccggacccgccgtgcccaaagatatgccccaagaagagggcaccaaggaggagcgcaaggccaagatggaggctctgaacaagaaataagcggtcgacttctgtggcagaagtcgctttgttgacatgactgtatgactatatctggacttgggactgggtttctttacgatttatttatacaaacactgaagac

SEQ ID NO: 71195 - DNA, 365 bp, Zea mays
  Clone ID: MRT4577_164935C.1
ccccaaaagggggggggaaaaatttagggggaaaaggccaaaaacagggggggccaaaggggcccttgttttggtccccgccccaaaaaaattaaggcccccccgtttttggccaatttgggggcaaccttccccgtttttttgggccggacaaaaaaacagggggccggccctgttttggggccttaaaaccttgggaccccttagcctttaattggggcggggcccaaaaaaaaaaaaacgctgctgggtttttaaaaaaaaggggttgggtaaccccaaaaaaaaaaggggggggggcccccaacgacccggggggggccccccggaaagaatttttaagccgaggggcttcactggggggg

SEQ ID NO: 71196 - DNA, 331 bp, Zea mays
  Clone ID: MRT4577_164936C.1
gccggcagaaaattttttttttctttcgagcaagaaccacgtggacgcacccaccatctggctgtgttatgatgccgaggcggagggcccgcagagacgcccatcctttacaagcccgagacctgcgggggcaatagagaagttaaaccacttctacttaatggagaccaccgtcacgcttgggccccagctcgagaacaaaagctacttgtgaggaccacctccgcctgatcgacgccgaaatggggatcggcgactacagcatcggctccgacgagctgagcgggaccgcccggatcgagaaggaggggatcaccaagatgctggtgct

SEQ ID NO: 71197 - DNA, 320 bp, Zea mays
  Clone ID: MRT4577_164937C.1
cgagctccagttagtgaggcctaaacggggggttaacgtcgccatggccgtagccatggccagagtgaaatcctgtgacaattacacactcccatcacaatcgcacccataatacgaaacggaagcgtctggtgtaaagactgagggccctaactaataggcataactcacactaacagtgtccggctcacagaccgtataccagccgggacacctgtgttaccaactgcaccaacgaacaggccaacgcgctatgagaggcggtttctcttccgcgcgcatcttcactgactcgttgactgactcggtgcgcttggcgg

SEQ ID NO: 71198 - DNA, 347 bp, Zea mays
  Clone ID: MRT4577_164938C.1
atctggctcgcgggctcggtgagatcgattttttggttaacgccggcgggctcagcgcactcgcaggggaagccgcactaattgacacaatcaggggttagcgcgaggctgatcttgtgcgcgaggagctggttgcgggcatggaccggaaagagggtggcaaggctgacataaagacataagctacgccttgctgccaagactcggagggagatactcttgcttactaagtggagaagcccaagagggcgcttgagatgccaccagcgaccccctggatgctcccgacagtggtgaactgtttacacgctgccgctgaccatagacatgatcgtgtcatgaataaa

SEQ ID NO: 71199 - DNA, 228 bp, Zea mays
  Clone ID: MRT4577_164939C.1
ccgacatcgagagagggacttatgtgatgcttcgaggtaagttggcgtcgttgcccctacctcgccatgctttgaggtttactcatccttcaccccccaaacacaaatggtgccgtccgtgaagccagcaaacagcatggtgccgtccgcaaaccacgcgatggacaagcattccggcgcggactttttttttttttccgacttgggcgccgtgagctcggcaatcgt

SEQ ID NO: 71200 - DNA, 392 bp, Zea mays
  Clone ID: MRT4577_16493C.1
ctcctcgccaacgccgctcgatcgctccgcgctctcccttgctcacgccctctacatggaaggcaagccggcaccggagccccgctcttccctgctctcgcgctctacatggaaggcaagccggcgcccaaatcgctgctcgcccgccctctacatggaaggcaagccggcgcccaaatcgctgctcgcccgccctctacatggaagatggagtcggtgctgctcaagatccgcctgcacagcgacggctgcgccgaccgcatcaggcgacgcatcggcaagatcgaagagtcgattgacacgaggaaggcgatccgcctgggagtggtgtcgccctacaagggccaggtccggccatcgaggagaagcttggcaagcaggtgtactcgatg

SEQ ID NO: 71201 - DNA, 340 bp, Zea mays
  Clone ID: MRT4577_164940C.1
ccagttttaacctctagtatccatgaccaaactatccctgacacatgtggacgggggcctcttctggctgtcaggagcaaagcctgaagacttggagctgcaggactggaagaacagtggagccccgtgggtctcaccctttaaggatgctgaggcctagagatgggaagtgacttgctcaaggtcacacaattggatagtgacatagctagagcgcagagttcctgattccaagtcacctgtgctttctgggaccaaagaatgggcacctgctggagtccgggcagagctttctcagttgtattgctactccagacctcaccatagttggggtccagta

SEQ ID NO: 71202 - DNA, 263 bp, Zea mays
  Clone ID: MRT4577_164941C.1
gtacaccatttgtggttttttttatttaatgggggacacaataatatatgcatgctattattaagaaaagggcatatatgcccaacatgctaaatagaaaagggacatatatgcattagggaaaaagggggtgcgcaaaccctgttggatgctaataaaccatccgctaatttacgacataacaaggctatatcaatcctctaaacctccaatgctatttcaaaagcccccccgaatgcaagggtgaaagggggcttggacag

SEQ ID NO: 71203 - DNA, 609 bp, Zea mays
  Clone ID: MRT4577_164942C.1
tctttgtggctgttgttttccgctgcaaaatcatttttttctaggtgcctggattgtcaactccaatcaagggtggccatgttacgcttgagcatcaagggatatgatccgctcgagaaatttacaatctgcaacaacgagtggtaggaagaattattcacctgtaagaaagactggtatcatctttccgctcattgatgagggttcaacttcagcaacaaggaaacaaggtgctgccacttctgttcgtgccaagatcaggagacttttgttttaatagaacatctccagacactgatggccaacagcatgagggaactggatgtggtactgaaagcgatcatgatagatctctaaatcatcacgaggtttaacgggtgttggaaaggtgcaaggggtgcatcaggagtttgcatttctcatggcggtgggcagaggttgcaacaaaggtgctgagagtcggacaacattctgcaaggctcatggaggagggagacgatgccaagagttaggctgcaccaaaagcgtggcagggaagacagagttctgtatcgctcatggtggtgggcgctggtgtgggatcaaggatgctcgagtgctgcaaggggg

SEQ ID NO: 71204 - DNA, 798 bp, Zea mays
  unsure (1)..(798): unsure at all n locations
  Clone ID: MRT4577_164943C.1
gcatgcgccgagcggagagcacacttttctgtagcacctcgcttctcatcttcatctttcaggccgcttggtcagagtaggtgtgtgagccgagagaggaagagacctgccggccggagacggagacgatggatctggtgaacggcgcgctcaactgggcggcgatgcccgccatggtcgccgccctcctgctcttctacccgccatactacctcttcaagctctgctactccttcctctcctacctcttccccgacgacctcaagcgcaaggtcgtcctcatcaccggcgcctcctccggcatcggcgagcaactggcctaccagtacgccgccaagggggcatgcctcgccctggtcgccaggaaggaatggagcctccggcaggtcgccgaccgcgccttcgacctcggtgcgccggacgccatcattctccccggcgacgtcgcagaccccgacgactgcaacagattcgttcaggccacagtcgaccactacggacgattggaccatcttgtgtgcaacgctggcattgcgagcgtgggcgcctttcaggagatccccgatgtcactaactacagctcgcagcttgatgtcaacttctggggcgcagttcagtccacttctgctgccctgccccatcttacaaggacccgagggaggatcgtggtcaccgcctccgcgaccggatggaaccccgttccgcgcatgattttctataatgccgccaatgccgcactgataaacttcttcgagacgctgcggtcggagcttggncagtggagttggcatcacaata

SEQ ID NO: 71205 - DNA, 330 bp, Zea mays
  Clone ID: MRT4577_164944C.1
aaaaataaatattttggcacccaccaaggcggcgtcacgcttaaagacaccgggcgcccaagcaaagactaaaaaaagaaaaaggcaggcaccgatacagggggagacggggcgacaaaccaagcagagggaaagggatagaaaacgggggcagggccactcgctcaaagacgcccggggggagcccccccgatccctgagcaggcgaaaggccaggtgcctaaaaaccctccagcaaaacggacgggggggatcccgcgcggacatagggctccagaaggggggggtaaacatccccagccaaaggaaccgggggggttaataccctcc

SEQ ID NO: 71206 - DNA, 345 bp, Zea mays
  Clone ID: MRT4577_164945C.1
catgacgcgagccgcgacgaagctcggaatcggtcgggcgcggacccgggggcggggagcctttggcggccatcgctcgctccgatgcgcgaatcgcctgcgggcgagacgggatctcgacggagagactcgaccatgtcctggaggccgcggacttaatccgcatctccacttacctgtccgactgcagcgggggtccatcttaaacatgattgacacgcgcactggctggaaccttaaagtgcacattgcggagatatggtgcaggaagctaggatgaacactacgagaaaaccatgctccgatgaattgctactttgcaaacacacagagaacgcgagctat

SEQ ID NO: 71207 - DNA, 662 bp, Zea mays
  Clone ID: MRT4577_164946C.1
attcgcagtcttcccggctcttgctcctaacgagacgggacggaatggacctctggagctgagtaccatcgctacctagcagctgcgtcgtgcgaccaatgggacgcgtgcacacaagccactggctccgtcggcgtgacttatgcttgccgtcagtcatgcgcgccatagctatgcacagcaaagagcagaacacgagtacagaaccgtcactcgcagaccaatactgaaccagcaccgcacacacgcgtggtatcacgcgtctccgggcattcgcaccccagggcaaagaatgcaccatcctatccggacacgcataccacgctcagtctgcgcgcacgcagactccatcatcgtcacatcccgtgaacactaggaactgccacagaacgagagaacatacgagacatgactcgctcactcctgcatcttcattcgttggaccacccatgttcgagacatcgaccagcggggtcgaccgccggactgtgcatgacataccacatcttaacgtcaaggccgtcatccatggtcgtggaaataatacggtacacgtgctcgtgactcccgactatgatgctacttgaagtactggacggcatgggaagaaactcctcgcctgcattatgcatcgtacctagaatgtggagtcctaccgccat

SEQ ID NO: 71208 - DNA, 224 bp, Zea mays
  unsure (1)..(224): unsure at all n locations
  Clone ID: MRT4577_164947C.1
ncggccnnctcgcccgnncgtnncctgccnncgtncctggnnngaccncgagagccccggnntgnnnncacctctgccttttgttcacccctgaacgcattntctgccgctnntgtntcgtgcgtgnnnnnnnnttggnnnnnnnccgcnnccgccgnnnccgnnnnncgccaggtgcgnnnnnnnncgtcggatccttnnnnnngcgaggcgacgagcaccca

SEQ ID NO: 71209 - DNA, 325 bp, Zea mays
  Clone ID: MRT4577_164948C.1
gacgtcgccaggccgcctacagcaggtatcatccagagcagccgccgttcttttttttttttttttttttttggattaactgaacatctgctatttcctatgattctgccatatataacatacaaaggagcattgtttccagcgctacaattacctggggaatacatcattgttcttttattacacaaagggtatctaggaaaactttagtcaagttgactaaatgctcgctgctcacaactcactaggatagagaaaatctcttgtaccaaatacccatcctttaagacaaggcacaggccaaggtccatttcccaaaatattg

SEQ ID NO: 71210 - DNA, 380 bp, Zea mays
  Clone ID: MRT4577_164949C.1
aaaaatatgaaaagaaacatttaatttttggttggccaaaaacaaaaaccaaaaaacttaataggggggggggccaaaaggcaaaccaaaagaagggcccccccaaagaagggggggggggaggaggccgccggggttgccaaagcaagggggacaaagggcaacaaacgggggagctgaaaaaggggggcgggggtagccccaacccgcggggaaaaaggccacaaccgggggtgggccaaaaaggaaacccggcttgccgcagcaagcgggctaaaggggagaaaaaaccgccgccgcaaaaaaaccgccggggtcagcgcggcccacgggttaaagggaaaaaccgtggcggcagagagaggcgcccacccaaccgg

SEQ ID NO: 71211 - DNA, 597 bp, Zea mays
  Clone ID: MRT4577_16494C.1
ccggccgggacacgaacaccgcatgcgatgcgcatgacctcctagcggagtctcagggagcgtacgagcgagccaatgagccgcgctttggcggataaggtgctgacggccggcctgagcgccggcggattcctccatggcgccaccgctagtcaatgagcgcgggaagagccgcccttgtgggccctgcccgatcgggaggaagagatggcagagatgagggcatgattctctcaccgtacgcgacactggttctgcttccgtagggcagtggcacaaaactcaaatttgcacgaaaggagttcatttttttgatgagtgcacgacagactagtggaagcttgaggaggacttctcgtattctgccacggtgcaacgaagttcattgattgtgagtgggtaccaacacagcacaggttatcgttctttcattcagcgcggaggaacatgtgctaaacctctcgcttgagagaaagagaccacaccgtctgagtcgtggcatactcagtcgcgatgccagtgtgctcaatgcactaaattgaagaaaaggactgtcttaaggctccatccgtggagccgtctactgacgttgatgag

SEQ ID NO: 71212 - DNA, 116 bp, Zea mays
  Clone ID: MRT4577_164950C.1
cgaacgcctccgctcatacttgggcgcacagtttttagtaatgcttttcaggaacgaaagtaggggtcgtttaaaggtcttaagatgcatatcactcctctacaacattctctaca

SEQ ID NO: 71213 - DNA, 418 bp, Zea mays
  unsure (1)..(418): unsure at all n locations
  Clone ID: MRT4577_164951C.1
gcctccctccgntggtctccttccccgcctcntctctcgccatcngtccctcgcagcgccaggccgaagcaaagcacgggagacttaaccgaccgctcatgagctactnacggccagcagcagcccgccccgtcggcgtgcctccaccgcaagggtatccagggaaagaggagtacccgccggcaggctaccctccggccgggtacccaccgccggggcagggacaggggtatcctccccagggatacccgccgcagcagggttatccgccacagcaaggggggtatccgccgcagcagggtgggtacccgccgcagcaagggtacccgcagcaggggtacccgcctcagtacgcgcagcagcctccgcggcagcagcagagcaacggcccctccttcatggagggatgcttggctgc

SEQ ID NO: 71214 - DNA, 464 bp, Zea mays
  Clone ID: MRT4577_164952C.1
ccccgtggcgggggggggggggggcccctccttctgggggagggtggggctcctggcgcccggcggcccggctgccccttgttgggaaactggctcctgctgttcggggccgactttttttctatcgcccccggattccctgcggggtgtgggtccatttttccaagaggtcggtctctccgcactaccctccgcactaccttgagcgactttgccagaccatttgttccagcctcatatgttccctgctctgtctggcctctcgcattgccgcgtctacctgccctctgtgcctgtggctttgcggtctgcttgcttattcactcacttcggagaccttctttcccgtgggtggcatccagcaggttgcccattctccatgtgtgctgcgacctgcctgtctggatcgtcttgtgagttttgtcccccctcgttcggggcctccgctggaggggcgtgattga

SEQ ID NO: 71215 - DNA, 949 bp, Zea mays
  Clone ID: MRT4577_164953C.1
caagcggaggcagggctcgactggtctggcccccaggaaggccctcaagacggaaccggcttctgcagctggtgccacaacgcgccaggccggttggctggcctccgcgcaaggcgcccttgagcggggggcccgggcggcgcatcttgccatggggcaagcttcccaagctgacccctctgtcggggcggccatcgtgccgggggagaatgctggcgcggccgtggtcccaagcccgcctgacttgttgccggcgccggcgtcgactcccgccagggccgtcgctgattcacccgcggagccgcctgtcgcgtccgacgtcgggatggttgatgttccaccgctcatggtcgtccccgacctccccgttctcagtcatgaggagagggcgaccgccgtcgccggggttggtgatcggaggcccaccacattagctgaggggggcccagaacttgcggatatgagcaccgccaagtcgctgttcatccgccagtccgtcaaggcgctcgaccaggcggccgagcataaggaggccgaccgcgtggctatgtctgaggccatctcagacttttgccgggcctttgaccttgacaacgtcccctcgagtagctccccccagagtcacctgcgggccttgggcggccatgtgcgcagcagactctacggggcgctgcaccacggcgttaggcgggccttcgccgtgcttgcttcccactacgacgtggatctggagcgggtcagcgaggggtactgcctacccgacgaagatgaggctgccttagccgaggtccagaggcttgacgtggccgcgacgggcccaagcgcggtgttggcgtcctcctttgaggtggagatccttccgctcgtgtcgccgtccgaggctgggccaggttttgccgagggtggagacgacgccgagggtgctgctgctccctctgccgatgtctga

SEQ ID NO: 71216 - DNA, 802 bp, Zea mays
  Clone ID: MRT4577_164954C.1
tatgaaactcttgtaccactttgtaggcatttgatagagaaggaaaactgagagcaatttgcggtggtggaaggtatgatagattgctttcaacatttggaagtgaagatataccggcttgtggctttggatttggagatgctgttatagtggaagtatgacatgttttatcttatgtctgcttcttttctttgtagaattattaagtaacctgcctgactggttcgtgtaagaatgagttcagttttagattgatgattaatgcaggtaaaggcaacatctgttaatgtgtacctaaaacataaccaactcacgacaccaaccatcacacgtgctaattcgtgcagcatggagcacggaaatagaagtctagtacttgacaacatgaattccttgaaaagtattattgcggtttgtacatcgttttgagtttgtgatactgcctcgagggagtggcattgatttggttgtaatttgtgttgcaactaggggtgttaatggatcacgatccaaatgtttcttcacaataagttagagcccttaataaattttagttcaaaaataaatgagaatagagttctattctaatcggattcgattcttaaattaaaattttatagagtaaaatttagagctcattaccaccctagttccaacagctgcagaaaatcatcttgagtttgtggtactgcttcattggagtagcattgattctgttgtaattttgtgttctaacagctgctgaaagaaagggtctcttgcctgatatgtcacgccaaattgatgacatcgtcttcccttt

SEQ ID NO: 71217 - DNA, 383 bp, Zea mays
  unsure (1)..(383): unsure at all n locations
  Clone ID: MRT4577_164955C.1
cggccgcgtggngaaaaaaaaaaaaaaaaaaaaaaaagtaaaaaaaaaaaaaaaaaaaaaaaaaaaaaaaaaaaaaaaaaaaaaaaaaaaaaaaaaaaggggcgggttctattatcgcgggcggcaatttttagggggtcccaagcttacttctcgggtgcttggctacttcttaagctttttttatagtgcccccgagcgttcatttcactgggccgcctttttacaacgccttggctggcaaaacccctggccttccccaacttaatccccttgcggcacttccccttttcgccggctggcgttatcgcaaaggggccccccccgttcgcccttcctatcttttgcccaccctgactcgctaatgggaccccccctttcgt

SEQ ID NO: 71218 - DNA, 143 bp, Zea mays
  Clone ID: MRT4577_164956C.1
catcaatcatcattcatcctagcatttttttctccaaatcaaacctccaacagcgaagggtctaacttcaaaaacgatgatgctgcagctcttggcttttgctcttaccacattaatatcaagtttgtttagctcacatccaa

SEQ ID NO: 71219 - DNA, 363 bp, Zea mays
  Clone ID: MRT4577_164957C.1
aaagaaagggggggaaaaacggggggggggggccctcttttttcttgtttaaaaaaaaaatttatagatgggcccctgcccaaggggtatagtcaatctaaacggctgacctaaaagagggggaaagagagaaatttccgggcttttatgaggggcactcaacaattttttgttttggaaggggctggtgtccaaccccaaataatggattgggaaaaaacaaagggcctcaggacaatttctacaaagggggggttttttttgtttggcaacaatttttttgttggcccccacccccagaagggaaatttttcccggggggcggctcatcgggcgctttttttccttttccccttttaaaac

SEQ ID NO: 71220 - DNA, 1233 bp, Zea mays
  Clone ID: MRT4577_164958C.1
ctctcatctatgccgtgtcttgtcttctagaacaagatgaatttacagcaaaacacgtgtgtacaatacaggcgcaacgacgagctcgctcacatcacatcactgctagacagctagagggccatctctgcctgaagcctggtcagctcgctcacatcactgccctgtctagaagacgccgccgccgctttcgccgatggttccacggaccgcctcgccggcggctcaggcagctcgtcctcgatctccccctcctcctcctcctcctcctccagctcttccagctccgcttctagctcgtcctgttttttttcccacctaaactagttagagaaacaaatttcttccatgcacaggactcctccaagatggctggagtctagatcgtgcatgtgtgcctgtatgtacccagttcacaacaacaagggaggcgagatcaacggtactggtacctcgtcgaagtcagcggaagcgccaatcggcgtcgcaagtgcctgctgcatctcccgcatgctctccgtctgctcgttcgcctcctcgatcgccttctcgatgtcgtccacgttgctgcacaaggattgcccttataagttggcgccatttttatcaataaataatctagcagtacgtgtacgtggctacgtgagagcgagcaacaccatgagctctgggttcagcttcagaaggcgcagatggaaccttagctagcttacactgattgctgcatcgccttgacagcagatgaccccgagcgcagagcgtcgacagtgtccgtggtcgccttggcgctttcgagcattatgatctggtcatggactcgcagctggaaattcgatagctgctcgatctgtgtctcgtacagtttcttcttctttaggcactggattgcggcgttcttgttcttcgcttttgtgtaatccttcgccttctcgatttccgcggaacatttcttctggaggaaacgctccttcttctccagcatctctagagtctcatggagccgatccaacgtcggtatggcagaggaggcagcctccttcttcttcttgctcttagtcttcgtcagcagtctcttcagcatcttcttggcagtcctcgctggttctccctctcgtctgatgatggcctgtgtacgaaggaataggacgagggtgatgaactggagacggccttctcgagggagaaagggaaagtgagagggaaaaaacccggccggcctcgaggtacccaatg

SEQ ID NO: 71221 - DNA, 1286 bp, Zea mays
  Clone ID: MRT4577_164959C.1
tttattcggcacgaggcgattctattgaggtgcacggcgtcggcagcgccacctgatccgcggccgcagccccatcatcggcgatccgcagtcctaggcacgcgggtgcggagaggcggtcatgcttgatcccttccgggaccggagttcactggtgcctgtcgatttctcattacctcgaggccggccgggactttttttcccctcactttccctttctccctcgagaaggccgtctccagttcatcaccctcgtcctattccttcgtacacaggccatcatcagacgagagggagaaccagcgaggactgccaagaagatgctgaagagactgctgacgaagactaagagcaagaagaagaaggaggctgcctcctctgccataccgacgttggatcggctccatgagactctagagatgctggagaagaaggagcgtttcctccagaagaaatgttccgcggaaatcgagaaggcgaaggattacacaaaagcgaagaacaagaacgccgcaatccagtgcctaaagaagaagaaactgtacgagacacagatcgagcagctatcgaatttccagctgcgagtccatgaccagatcataatgctcgaaagcgccaaggcgaccacggacactgtcgacgctctgcgctcggggtcatctgctgtcaaggcgatgcagcaatcagtcaacgtggacgacatcgagaaggcgatcgaggaggcgaacgagcagacggagagcatgcgggagatgcagcaggcacttgcgacgccgattggcgcttccgctgacttcgacgaggacgagctagaagcggagctggaagagctggaggaggaggaggaggaggagggggagatcgaggacgagctgcctgagccgccggcgaggcggtccgtggaaccatcggcgaaagcggcggcggcgtcttctagacagggcagtgatgtgagcgagctgaccaggcttcaggcagagatggccctctagctgtctagcagtgatgtgatgtgagcgagctcggcgttgcgcctgtattgtacacacgtgttttgctgtaaattcatcttgttctagaagacaagacacggcatagatgagagaatctggatggctgtctcgcgtcggtgtccggcggacgatgccagccggcagaagcagtttgactttgacggtctcggattgcggtccattgttccaacagatacgatgcgactatcattattcttatactctatcatgtaaaatgcaagaattgccaaaaaaaaaaaaaaaaaatccgta

SEQ ID NO: 71222 - DNA, 423 bp, Zea mays
  Clone ID: MRT4577_16495C.1
gtccggttcttgcatctgtgaggccatctaaccgtgtgatgcttgatagtatatattctctggatgatacaatgaaccagggtgcgattgtatgtgatacactgaacaaaacaacggtcaataaaccaattgcatattactgaattgagattgatgacggggatgattaacgccacatggatgagaaggattatcacgatactcctgttatttgcgcttattcggaggcactcatacattagattactgttgatggccatgtgcataaagaacgacttcatgtaggatgtcttggaaaatcttgatggcgagtctgccttaatataccgttgcaacaaaatgtctatcatcttctgactgatgatgaatacctgggtgagcattgtcctctcgagcgtactcaacatgcacgcatgttgtgat

SEQ ID NO: 71223 - DNA, 482 bp, Zea mays
  Clone ID: MRT4577_164960C.1
aaaaaaccccactggttaatgggggggggggaaaaaggggtaaaaaaaaaaaaagcccgggcggaaaccggcaaaatggacaattgggcaaggggacggaaaaaaaaggaaaccccttggggaagaaaaaaaaaaaaaaaacaccccccggggaacgaacgaaggaaaaaaccccaaaaggaaggggggtagcaaaattataaaaatcaagctccccaaaagaaaaaagaaaaattagttcgggcaaaggaacactacgaaaaaagttaaaaacgttgggtccccccccccgaaaaagaacaactggggaaactggaacccggaaaggcaaacccccccctggggggggccctccccgcggaacttgtcgggggggaaaaaacccccctttttcccaatttgggtgaaccccgggggcccaagttgttcctgggaagttgggcctccgggggggcccccttgggaaaggggctctggggcct

SEQ ID NO: 71224 - DNA, 511 bp, Zea mays
  Clone ID: MRT4577_164961C.1
tacctccagacggccgggccggggatacatcagccgcgactgggtgctattgtcacctccggaccaactccgctttgcggaagtgaaagatcgtctcttttcggacgcataagaagcgagagcatgagacacacagctcagacttgctgttgggatgaaggcgatgggtcggacggggtgcaggggtcaggtgtcccacgccagacataggatcttgtatgaccagaaccgtctcatcctaaggaatgagaatgagactgtccgccaaagcgtcatactaaccctgtctagctactgaaaggacatctacaaggactggaatgaagccctatcgtacttggaggtctcttgtctgctcttgggtgtcttccaatttgtgatatgcgagaacttctgtgaccctgttttggcagtagtaaggctggcgagagcattggagatcctcgttcatgctcgcttgaaaaagatagagaggttgagacatggcgtatctttgcgtacctcatctata

SEQ ID NO: 71225 - DNA, 282 bp, Zea mays
  Clone ID: MRT4577_164962C.1
ttttgactttgagtaaatccaaaagctcctattgaaccttaggtggagcagaggtgaaagtaacattatttgcatttttttcaaggggatatccatttgatgatgatttactgctttgcttcaatttaatcgttggatggtttgacactttgacctgcatgaatcttgtcatattctacaagcgctaacatagcgccatcctaatccatgtgcaacatgaaatatttgtttatgctgcatttggactatcatgcgttgcaagattcataaatcataatgcca

SEQ ID NO: 71226 - DNA, 315 bp, Zea mays
  Clone ID: MRT4577_164963C.1
cctcgagccggcgggcgggaatcgattggatcgccacgacgggagaagaatggatctttgtcccgcacagccgtcgccgccgtgaggtccgcagcccgctcagcaccccttaccggccgcgtcccaggtgcgccactgccttcccttgcctcgtcttccgctgcccggtccgcccggatcctccgcaggtcggcggccgcgtcgtcgtcggggctggagacgctcatgccgctgcacagcgcggtggcggccgcgcggcttaagtcctgcatcgccgttgacttctcctgctggagctcgctctcacaaggatac

SEQ ID NO: 71227 - DNA, 322 bp, Zea mays
  Clone ID: MRT4577_164964C.1
gttgtcattagaacgcaaaacccgcaaactcaaacacaattgagctacaaacgcgaggggacgattaaaacttcatgggcagactgcgatgtacacggcgtctcactaaacagaaccacggtctggcattgccagaaccctatggcagactggcacacgtgttggtcgaccacgaccagtaaagttccgaagcttcatataccaagcaaatcacagacgtgacgatccacgggggtaccgcaagcccttacaccaggattgacagtaagaaggtatcagggagcctgacgtgcttcagtggtgtgcgaacggtgccttcata

SEQ ID NO: 71228 - DNA, 266 bp, Zea mays
  Clone ID: MRT4577_164965C.1
cctggcggtagttggtgtgtcctcggtttctcggctgctgggtcggtcccgccgacagctggggcggcctatgtcgagtggcgcccatggcgaagagggctcagctcgcatgtggaagactctcagcttcttcgtcgcgctccccggggtggcagttcagcatactgaatgagtacctgaagtcgcaccacggcgagcgagagcgacccgagttcatcgcctacccccatctccgcatcaggatcaagtctttccctgaggagatg

SEQ ID NO: 71229 - DNA, 480 bp, Zea mays
  Clone ID: MRT4577_164966C.1
aagccgaaatatatcaatttgatattgtagaaaataaatgaaatattaattgtcacatgcaaacaaaagatacgtacatgcaaaaaagctacggacaggcactcggtcgaggggtgcgcgcgagccaggaatcgagcgacttctgccagacgtgacctccagcgcgcttctcagtactcgttatatttcggcttttaaacgaagcgcttcgtggagaatcccagcgaaaatctaagcgtttggtcgaggaaagctgcttttggtcaccataatcggcaaaaagccgaaccaaacacagccaacaactgttccagcccggagaaaattccaaaaaaaaatacatccctgtctcactgtctgtccgtgtccatggaagcagagcaggcaagcaagtttcttaaccgcaatcatgagttcgtcgcagagacacggacccagccaccgcgggtgcaacggaccatggaacagcgaccaactctc

SEQ ID NO: 71230 - DNA, 1068 bp, Zea mays
  Clone ID: MRT4577_164967C.1
atggcgcgactggttgatcttcagaggaagatcgatgaacttgctcaagatgaacaagaacgaaggcaccaacatagggagcttcgtcaagaaggcttattcaatgaggatggatggtatgatgaatttcatcatgatgcctttacttttgatgatgcttctcccttggcagcagaactgcaggctatcccatggccacaatcttacaagccacctcagctaccaatgtatgatgggcattcagacccaaaacaatttctgatgagttatgaggcaacaatatcctcatacggaggcaatgcggctgtcatggccaagtccttcgtcatggctatccgaaacgtggcccagacttggtattcttcccttcgaccagggacaattacgtcgtggcagaagctcaaggacatgctggtgaccagtttccaaggctttcagacgaagccagtcacagctcaggccctgttccaatgtacgcaagaccatgaagaataccttcaggcctatgtgcgaaggttcttgcgactaagggcacaagcacctacagtgcccaatgagattgtcattgaggccatgattaagggccttcggccaggacctatggctcagtacttcgcaaggaagcccccgcaaactctggagaagctgcttcagaagatggatgagtacatccgagctgacaatgacttccaccaaagaagggaggaagcttacagattctctgaaatgaccaggggcttcggaggaagagtccatccgtggcacgccaggtcaatccacaactccactcaaagtgatgacaaaggaagtcagtctcagaggtcacaatatacctcacaatcttcggggcaacaacaaagctcctttaggccaccagctccaaggggcagaggcgccaggggcttcggaggaaggtttggggatcatcctagaaagatttactgtttattctgtggtgaggacaagggccatactacaagaatgtgccatgcacactgcttcgtggcattctccttacataccagagtatgtgaacaaccatcctgcagcttctgttgcttcggctag

SEQ ID NO: 71231 - DNA, 505 bp, Zea mays
  Clone ID: MRT4577_164968C.1
atgctgttcgtagtggtcacccgttcctttttcttgttcgtcttcaacgaccatccatccgaactacatgtgcgtggtcgcacatcacgctcccgctcatgctgatgggctacggcctgctcgtgtgcagtgccacggctgcacgtacacagggggggggggaccttcaaggaggacttggaggacacaaagcctgcaacgatggctgaacaccatacaatccggccgggggcggggcccaggacctggggcaccagcttgggcgctcgggcgggcatctaggccctgacgtcgacagggtactggcccaccgtgttcaccgatttgaacccggcccagatggcgtacacctggacgtaccagcgcgccatgcggatctttacggtgacggactcgatgctcatttcggggacgtacatgggtacctcgctgtgcacgatgatggagagcgtggtacccttggactcccgggcgctgaacacgaagtgcatcaccatgaggaggc

SEQ ID NO: 71232 - DNA, 567 bp, Zea mays
  Clone ID: MRT4577_164969C.1
attgggacctcgaggcggccgggacaagcatcatacaattaactagcttcttctagctctagctaggctcgtctgctgcaagaaggtaacggcgcaggcatggaggggaaggaggaggacgtccgcctgggcgccaacaagttctcggagcgccagcccatcggcacggcggcgcagggcacggacgacaaggactacaaggagcccccgccggcgccgctcttcgagcccggggagctcaagtcctggtccttctaccgcgccggcatcgccgagttcgtcgccaccttcctcttcctctacatctccatcctcaccgtcatgggagttctcgaacgccgctccatcggggtcgccactcggacgaggtctgtgccgctggatctcgctccccaaagactctgctaggcttctatcccctcccctcttgcctctcttgttaactcttggataggcgaccggggacgcctagactttatggccgcctggacgcctaggcggtcgcctagacgacgcctttgcaaccatgaaagcagcgctaaagtaaagaaaccccttgcataagcc

SEQ ID NO: 71233 - DNA, 226 bp, Zea mays
  Clone ID: MRT4577_16496C.1
gggccaagcataatgaaccaaaaaggtgcaaagcaacagggttctccagcccggcgggtttttcttacttcctcaaagggggcaggaaaaaaaaactttgaaaaaaacaatgcctttacaattcccatttacgtgaaaccgcccaggcttattatcaattccccaaattcccactttacaattttctagaacagcaatttattggaacttacgccccaaccagttt

SEQ ID NO: 71234 - DNA, 308 bp, Zea mays
  Clone ID: MRT4577_164970C.1
gccggccgggtcgggagcgacagagttacctcccaaacggcagtgtagattaccaccattgctgcaactttgtcagcgccgccgtgcatcgctggtgtgataaattctaggacgaactgagaactgacattagtgactgtgaatacatgtcgttttagcttcttatcaataccctccatacagtaatcaccgctccttcaccacacgctgctaatgactccaatttttgcttgtgaaaggcattctaattgagttcgcgcagattgcaccaccaaacaaaaaataaacgcccctatgcccgcctacga

SEQ ID NO: 71235 - DNA, 338 bp, Zea mays
  Clone ID: MRT4577_164971C.1
atgggctgggcgcgggcgcgggcgcgcccggcgttgtggcggtgctcgccctcgtacgtcaccaccagcatggccgggtctgtcggaggggcagctccacgtgcttcctcgccgggcaccccccacggggctgcacttgtagtaaccccgagggtagggggatcccttgatgggcttctggccggacttcctggacaagtactcccccggggggatgtacaaaaaaatagactctgatcgtcaaaactgtccacaaacctctaaacccggattgttcttctctacaattacaggcattcggtgtggcccttattggccgcgaagagtgctctcctcca

SEQ ID NO: 71236 - DNA, 282 bp, Zea mays
  Clone ID: MRT4577_164972C.1
cccggctcggcgtcagtcagattcccaccggcttccctgcacaaccgggttcgcgctgcaccaccaccgtttatcgaggaggagggaggacggagaccacggacatggacagatctcaactggcagtcgtactccggcaccgatgtcgtgctcctactggttctccgtctacgcggacaccgttctcttccctaccggaaagaggcggtgggcggggaccgacaaaggcggctcctggcctaataagaggatacgtaaggacacccgccgtcctcttattgt

SEQ ID NO: 71237 - DNA, 406 bp, Zea mays
  Clone ID: MRT4577_164973C.1
aaaaaaaaaaaaagtcagcccatcaagctggttttttccgggcaagggccagcaattcttgtccaggacccgtccccagggttattaataaaatgcccaagagggggagagggtaaaagccggggggtccccggttttcctacatgcctacaataatttttgccggggcgggtaaattttggggacgagacagcagcacacagccccagcccacaaacaaagggcttaaaacccccccccccaggagattggaaacggaaaccccatgggcacccacagcgtggcccccgtgacccgacagaggaaaaagcccccgcgaacgggggtctttttgttggtacctgttggatccccgtcaacccccccccggccggtgatcaaaccggggcaatggagctttcaaact

SEQ ID NO: 71238 - DNA, 423 bp, Zea mays
  unsure (1)..(423): unsure at all n locations
  Clone ID: MRT4577_164974C.1
gtgcgagctggtaagatggatcggttggaggagcggaaggaggaggcgggggacaggaatacccaggagccaccatgcgtgacaccttcgacctcccaccgagcgcaccttaaaaaaaaccaggcagtgagaaaccgaaccacgcgtgcagctccctctcggcctcgcaccagctcatcccagctccgacctcacccttgcgttgccctcctcccaccgcctctgccgcaatccctgctactcctcgcctatgcgtccctcccctccgccggcgctgccccctcgccgccgacggtgcccgccacgcagcgagaggccgagtccgcctccgacgccccgtcctctcctccccctgcggcgcagcagcacccgcggaggcaccgtcaccggcactggaagcaccggncgccgtccccgcacccg

SEQ ID NO: 71239 - DNA, 259 bp, Zea mays
  Clone ID: MRT4577_164975C.1
gtggttatcgtcaactggcaactattgtcttaaaagaaagaccggaacattgttcgaggtccaaataaaaaaaactgtggttggcgggggctaccaggatcacccctatcattaaaaaactggtgcgggagactcacttggttgacaaccgggcagggggcatatacaatgcccttttgatcacctgccttttgagcttgtgggcaactgtgacgagggctgattaaagtgtccatggcttcggtataagctttatttt

SEQ ID NO: 71240 - DNA, 314 bp, Zea mays
  Clone ID: MRT4577_164976C.1
gcgcagagcctgattcatctccattcgaaacaccctatcacccacactctcacttcgtccgcagcctgaatcctcgtaacgatggctcgcacgaagcatactgcgcgcaagtccacgggcggcaaggcccctatgaagcagctgtcgaccaaggcggcgcgcaagtcagcccctgcgaccgtcgtgctaaagaatcctgaccgtttccgtccgcgcaccgtggcgctgctctagatccgcaagtaccacaatagcactgagcttctcatccgcaagctgtcctttcagcgcctggtccgcgagatcgcgcagga

SEQ ID NO: 71241 - DNA, 477 bp, Zea mays
  Clone ID: MRT4577_164977C.1
gtcggggggggcgatagattttaaataactttctgcctcgaacggaagaaacagctctaaatcgaccagcccaacgttgcgagcatggggcagaccctgtcccgaacaacacgagagagttgacgttaccactaggcatccatcgagcaacacacagcacgaggggggagcagcagtctttttttttcggccggcgtggccacctcggctccagttggaaccgtcttctccgcactcgcgcccactccgaggccgccgttcggctaatgccacggccagccgcgcgagcacgaggaggatcttctgaagagggctccaccaccctgggtctcacggggaaccatcgtcgccgtcccagcataagcgttcttcaggcatctgggctccttctcaagctctttgccagaccgcctaccaatcgtgggagggagctcccgcaacctgacagccttgggcgagggggggcccgccagcact

SEQ ID NO: 71242 - DNA, 2528 bp, Zea mays
  Clone ID: MRT4577_164978C.1
ttgtgatgctcgaggctcctcccaacaccctcgcatcctctcccacgcatgtcacaatcgccatgaccgacagaaaccccgccgccgcctcaagcaagcgtcactgtgacctctccctcgacgatcccacgccgtcggccaagctccagcggtgctccgagccgtcagaaccaacgccggcggggaaaccgaacggcggcgcggcgacgggagaggagagcgagatgatggccggcgcacggaaccctagggcgcagaggtacctggtcgccgtggagtacattggcacccgcttctccggctcacagaagcagcccaaccagcgcaccgtcactggggtcctcgaggaggcatttcaccgatttattgggcagccagtttcaataatcttttctagccgaacggatgcaggtgttcatgctttatcaaatgtttgtcatgttgatgttgagcggataagtaaaaggaagcctggcgaagttgtctgtacacaaaactcattttttttcttaacactgattaccgaccaggccttgtctacatctcttgacactctaaacttatttctttttttgatctttgcatgataagtatatttgtgacagttgttgttatgcctgatttaaatcttctaggttttccaaaataaaattctacaagcaatagaattaccttttctcctgaccttgcctctaaatcatctattttgtccgttccaaatcataattcactttagctttgccttaagtcatatttaaccaagtttaaataaaaatgcaccaacatctacaacatcaattagtttcattaaatttctatatgaaatgtcttgatagttcacaaaatgttgatgtcgttgaagacctggcggctggcgccactgctgaaacaagtcgctgtagtctgggcgtctggattgatgtattttggtgggagagttgtttggtaggttttgaactgtttgttgtgagtgttgttagtagttgagagtgattgttggtagttaaactatcacaatgttgattgtaagctggtaacatcagcagtggatatttgactattggtaagctttctaataaagctgggtgaatgcttttgatctaaaaaatgtcttgatagtgcacttgattggactttaagattttaatatgtttttattcctaaaaacttgttcagttagaggcatttgacttagaaccaaactaaagtgtcctataatttgtaaaagaggaaataaataaaaatatgttttctagaacagcgcctcttataactcctgctgctgatttgcttttccctttttacagttaacacctcatgagcctggagttgtaaaacgtgctgtgaaccactttctactgaagagtgaaggtgacataatggtgactgatgtctgctgtgttgcaccagattttcatgctagatacaaatctctagagcgcactcagatatcactatcgcttgcttgctggacctgaatcaacatctgtttttgagaaaaactctgtttggcatatatctgaagatttggatattcagtcaatgaagaaagcatgcagcatacttgttgggcatcatgatttcagttcatttcgagcggctggatgtcaggcaaactctccagtgcgaactctggatgaacttagtgttacagaagtattccctttcatgttttttccttcaagtgtagaaagatcagagttggaattatcaaatgtctctcttgtttattcaaggaaaccagacatggaatcttctgggaaaggatctgatggttcctgtaccagtagtgtgaaatcagattttgagaatggaaaagattttggaaagcggtcaaggcaccgttgctttgttgttactgcaagggcacggtcttttctttaccaccaggtaaggttgatggtcggtcttctaaaatctgttgggactggagatctaacaactgcagatgttgagagaattctggatgcaaagacggttactgctgcacccagtatggcaccttcttgtggtctgtaccttgctaacgttaaatatgatctgaatacctgaagacaagttttatctagtggcttctgttggtgggcctccagattttgtcagctgttggctatcaaaggaattatatgctgccacttgccaaagctttcagttgcctgttttgtccactgaatcttgcatggtgattgaaaacctagaattaagtttatctgtcagcacaagagccggcttcattctcttcttgtacacagagctcttctgcatgttcagaaacaaaataggtagcttcattttagttaagttcaactatccactctttaaatttcagctggatccacccgattttgttgggtgtacgtagatttgacctggtaggggcaaaattttatttcttggttttctcatgactgtacttggttcttgatatataattaattagccaaatgcgttgtgtgcatattgaaaatattctttactgttccttgataaattacatcgagcaagactgcaagagaactttcttccag

SEQ ID NO: 71243 - DNA, 164 bp, Zea mays
  Clone ID: MRT4577_164979C.1
gccggccgggcctgggaacgactacaactcactaaccaccactggctcgccatcgaacacaatccagatgaagatgccgcatcgagctcaaacacaagattctacaacaatcacttccacatcgactgcgaactgtacaacacgtgtgtacttcgattagcctg

SEQ ID NO: 71244 - DNA, 333 bp, Zea mays
  Clone ID: MRT4577_16497C.1
gtcgtattagataccggcatggagctctggatgtggaacattagcgaatggcagcgttcctatcaatggacaatcttcccgaacacactgttgctggacttcgtggcgaatgcccaaatccgcaggatctcactgcggagtagcaggttcttcgacatgaacatcttctcgagcaagaacgtggtgatgtacaatgtgaccatcaaggcccccggaaaaagccccaacacggccagcatcaacatcagcgactcgatcaacgtgacgatcagtggcaccatcatcaccctcggccacgactgcttctccatcggccccgggaacaagaccatc

SEQ ID NO: 71245 - DNA, 1770 bp, Zea mays
  Clone ID: MRT4577_164980C.1
cattgggacccggccgggctcccaaaaccctcgcatcctctcccacgcatgtcacaatcgccatgaccgacagaaaccccgccgccgcctcaagcaagcgtcactgtgacctctccctcgacgatcccacgccgtcggccaagctccagcggtgctccgagccgtcagaaccaacgccggcggggaaaccgaacggcggcgcggcgacgggagaggagagcgagatgatggccggcgcacggaaccctagggcgcagaggtacctggtcgccgtggagtacattggcacccgcttctccggctcacagaagcagcccaaccagcgcaccgtcactggggtcctcgaggaggcatttcaccgatttattgggcagccagtttcaataatcttttctagccgaacggatgcaggtgttcatgctttatcaaatgtttgtcatgttgatgttgagcggataagtaaaaggaagcctggcgaagttttaacacctcatgagcctggagttgtaaaacgtgctgtgaaccactttctactgaagagtgaaggtgacataatggtgactgatgtctgctgtgttgcaccagattttcatgctagatacaaatctctagagcgcacatatcactatcgcttgcttgctggacctgaatcaacatctgtttttgagaaaaactctgttcggcatatatctgaagatttggatattcagtcaatgaagaaagcatgcagcatacttgttgggcatcatgatttcagttcatttcgagcggctggatgtcaggcaaactctccagtgcgaactctggatgaacttagtgttacagaagtattccctttcatgttttttccttcaagtgtagaaagatcagagttggaattatcaaatgtctctcttgtttattcaaggaaaccagacatggaatcttctgggaaaggatctgatggttcctgtaccagtagtgtgaaatcagattttgagaatggaaaagattttggaaagcggtcaaggcaccgttgctttgttgttactgcaagggcacggtcttttctttaccaccaggtaaggttgatggtcggtcttctaaaatctgttgggactggagatctaacaactgcagatgttgagagaattctggatgcaaagacggttactgctgcacccagtatggcaccttcttgtggtctgtaccttgctaacgttaaatatgatctgaatacctgaagacaagttttatctagtggcttctgttggtgggcctccagattttgtcagctgttggctatcaaaggtatacctgaatccaatctatgaatagtgcacctcagtgagtgcaactttgaagtatctgtaccaggtcgaataagatattcaaacatgtcctttgcttatcaagaatgatacatcattatacaccttgtcgtaatctgtaatttcactttgatcaggaattatatgctgccacttgccaaagctttcagttgcatgttatgtccactgaatcttgcatggtgattgaaaacctagaattaagtttatctgtcagcacaagagccggcttcattctcttcttgtacacagagctcttctgcatgttcagaaacaaaataggtagcttcattttagttaagttcaactatccactctttaaatttcagctggatccacccgattttgttgggtgtacgtagatttgacctggtaggggcaaaattttatttcttggttttctcatgactgtacttggttcttgatatataattaattagcc

SEQ ID NO: 71246 - DNA, 505 bp, Zea mays
  Clone ID: MRT4577_164981C.1
ctccacgcactccgcaattccgcatcacgcaccccaccccaccggccggaaccggaagctcagattccctcccaccccaccccatcggcccgatcactccagcccagcccgcgtccccacagaccagtgacagcgagcaccggcggtatccaggcatgtgcggcggcggcatcctgtccgacatcatcccttcgccgacgtctgggcgggataccggcgctcacctctgggccgagaaaaagaagtcgaggagggctgcagtcggaaggacgacagcccccttgcaggaggatcaagaggaggatttctaggcctacttcgacgagctcgaggtggagccccccgaatcccagctcgagtccgaggacgatctcaagcccaagcccttcgtcgcccccaccacggcgctggccataggccggccaaaccctggcgcagcttccgtcgatgggcctgctgcgaattcagcctagcagggagaggacgtacccacttcacgggtatc

SEQ ID NO: 71247 - DNA, 305 bp, Zea mays
  Clone ID: MRT4577_164982C.1
tggattggaaaggttttttttttttttcaataggcacgtaccaaaaacacaccttttctacgtgattacttattaacagcttgcgaaccataaaccagttaaacagggtagcaagaccaagttggttttccacacagagctaccttggggggtgaacgcctggggtcgctaaactgatgacccccttttcgtatgcacaccttggcgatgtacggtacacgatctctctgcccaaaatttacctacccaattgtggttccaccatgctccggaccggttttttaaaaacacaccggacacggggg

SEQ ID NO: 71248 - DNA, 398 bp, Zea mays
  Clone ID: MRT4577_164983C.1
gcatgaagcaagttgtgcaaacttttgttatattgacagggaacacgcttcaggcatgcagccaacggcgcaagacactgctccaaatgtatttccaaaatggtaatttgccagcttgggcaaaaccagcatacgcaatattatcagaacaaaatatatgttggcaagatggcatcagaagggtaagcaggtagttgggctgcatgctgcaaacaaacgtccgcgttccacacctgagattctgagaccagcatcttgtccacttgccatgtttcaggggttacctgaactaccgatctgtgatgtcagtgctcacatataatatcgccatggaatcagattgagtaccaacaaatctctagccatggtcaaaagatgctccaaccataggttatctt

SEQ ID NO: 71249 - DNA, 523 bp, Zea mays
  Clone ID: MRT4577_164984C.1
acctcgagccggccgggaaagtgttggtgctccggcccggacctctctagctcgtctccttactaatagctagctatccgtcatggcggccaactaccaccactaccagatggcggtgcacgcggcggctgcggcggcggcgtggaggagggagccggacagcccgcagctgagcttcgtgagcgggtgcagctccctcttctccatctccacgctgcaggacgacgacgacgaccgagccgccgccgtcgtcatcgccgccggccacgcgctgccctccacgcccgtctcgctcgcgggcttcgtcgccgacgaggtcgacatggaggtgcagcaggccagcggcgacgatcggaggagcatcaggatgatgaggaaccgggagtccgcgctccgctccagggccaggaagagggtcagtatagtaaactcactacacaaaaacatgtacgtcggtctgtactataaagtatatatatacaaaacagatcgtacgtttgtatttggatacagtacgttttcg

SEQ ID NO: 71250 - DNA, 167 bp, Zea mays
  Clone ID: MRT4577_164985C.1
gggcagggagatatatatattgcttattggaagagagttgaacagagcaacacatgtgcatagtcgagtacatagagtatggatgataacaaggaattgcattgattgatccaaaccttcatggacttgtggaagccatgaggtatgtgtgatacacacgcaccaac

SEQ ID NO: 71251 - DNA, 319 bp, Zea mays
  Clone ID: MRT4577_164986C.1
gagctcactagacggcggccgccctcacttttttattaacttgtgatttgtacttttactatataactgttttggagggcggacgactacacatggggaagagtagtgtgagtacaacatggagggcgaggggaaaaaccacaaaaaaaccggtgcccggatgcagtcattaaataagaaaacgatggtcgggtgtaacgggaccaaaaacacaacttatttcggagcatgcttccaaaagaaggaaaatacttaagggacatccccccgaaaaaggaaaaagagacccactgcggaaagcggcaccaccaagcagacg

SEQ ID NO: 71252 - DNA, 683 bp, Zea mays
  unsure (1)..(683): unsure at all n locations
  Clone ID: MRT4577_164987C.1
ctcggnagcttacccttccaatctaccggcggccgaaaagggtttcaagtggtacattgagatcgtgagagtctcacttgtgaactacgagctaatatcatggtaaagctcgtctgactatcgggctacgttagctgaccagcaacagagctttggtgggatgcaccctgttactcggagaggatccaggatgaacttcaaggagggcgtctcttaccgatattgtcattgacatcaaccgcgtgccaaaaaagatgctttgatcgaggcaatggaaaacgctgatgtgaacaacaagcgggataaatagctccatggagtaggtaatgcttatctacgctaaaaacagtacggtctaacacttcaaccgatctttggatatggtatcacagatcatgtctggctcaagatcaagaaagctggtgatggtcacagcaagagcttgcactaactcaagaaggaggtcactgcctgatcaaatattatctacaatactgatgactctcttttttgattctgcattcacaaattagtggccctggaactatcaatatcagattgcgctcaagtatcaaacgttatccaaggctgaaaccttgtttgcaaaactcacagcatgttgggtactatctatgtactattattatatccaaaactatagttgtcctggctgaattgaactc

SEQ ID NO: 71253 - DNA, 443 bp, Zea mays
  Clone ID: MRT4577_164988C.1
agcttctacgggcaagcaaggtaggagttgaattgttctttttaattcgcagtggtattacttttgcttgttatttggaaaccgactaaccattttgcataaccatatgatgtaaccatgttgttttgttgtacggttgtatcatgtcattttcttaatattatttgtacatgattttctggcagtttaccctagctgctatcgtttggctacctgcaaggcacttcctagttcctatcatagttggttaccaaaagagctataatcacaatgccttttgattcttccgttttaggtaaaattgctgtagaggatgaggatgaagaactagcaagggcaatagcagcttcgctagaggtagtcattgaagcatcagacgccagtgatgatgatatggctgaagctgaacctgaggactaacacaatatgatctagagtcgacc

SEQ ID NO: 71254 - DNA, 455 bp, Zea mays
  Clone ID: MRT4577_164989C.1
gaagaatttgaggcgattgggtaagcgatgcacatcgtcttctctgtcgatgatttgaccgaatccttctggcctgttcccgctccggcgccgtcgccgggatcgtcatcgactccgtcaccgacgcagaacgtggcggatgggatgactcgaagtcaatcggagtgggcgttccacaggcttatcaatgagttgtctggttccgattcgagccctacgactaacacaatcgagagatcacctccaccggttcagtctctttcgagattagaagaaaccgttgacgaaaccgaagatgttgttgagattcagaaaccgcagaatcatcgacggctccctgttgatgatcaagggaagaatcggaatcgtgctccgtcgtctgatccggttgattcttcagctcctgttgttgtgatcctaatcagtatcatgcgattcttaagagcaagctcgag

SEQ ID NO: 71255 - DNA, 663 bp, Zea mays
  Clone ID: MRT4577_16498C.1
gccggccggttccgagtgctgaaagggggaggaagctgacgatgaagaggctgttgatcctgcaaaggtgtgagccgatcgtgcggttcagctgctgcagcgtgcgctacggggactgccgtcggaaccatacagcgagtactggaggccacgcagttgatggatgccgagagttcatcgctgaaggggaggagggcaccagtggtgctctcaagtgcgccgcctgcggttgccaccgcagcttccaccgcagggttcaggtgtatgaggttgcatggggttatggatccgacacgtcgtcgactgagtagagaggggaggtgcaagacacttggagcttggatttgtgcttcctgcagcggcaaacgcccaacaacattggcctcccttcttctctgtttccggtgacaacctgaccggccggtggatgtataggaggctaggagccttgtgattgtttgtagctccgtacgccctgatttgacacgttggaattcttatctacagtttctttgtctgctacacccgtgtattgtaatctgagtgaagtatacatgagagttcaaactatctatgtattctttccacctgaaatttcgtgttggtggaattaattcagattaccagttgatttaggaaaaaaaaaaaaaaaaaaggccccta

SEQ ID NO: 71256 - DNA, 335 bp, Zea mays
  Clone ID: MRT4577_164990C.1
tgtttatggtaatcatggtgcaaacagcaaatcctctccgttttcaaggtatggttgtctcaaactactattttcctggcagcaggtataacctcagaaagaccaataccttgataatgctgcggtagcgctgacgtcttcttctccacagagcaggaagcgaaggagcaaccttagcttcactacacgatctgcaagagcaggcaaccaaaatggagtccaaatgttgagcccctcggaaatcccacaaagggactggttcccctctgacttcaccttcggtgacgccactgcagcgtaccagaattgaatttttttttttctccccccccccc

SEQ ID NO: 71257 - DNA, 4586 bp, Zea mays
  unsure (1)..(4586): unsure at all n locations
  Clone ID: MRT4577_164991C.1
acggaaagcaccaagatgatcatgcgatatcttgcttacatgggtgggaaggctgcttccgaagggcgaactgtggagaagcaagtccttcagtccaatcctgttcttgaagcatttggaaatgcaaagactgtcaggaacaataactcaagtcgtttcggtaaattaggacttcacggatatcaacagaaagggaaaataacacgagaaccttgccttccagtttttacaggattagcgctagtgaagtcctcgagcattttatgctgctagatatcttgtcagatcatttattgatttgttgtatattttttggatcctttctaccacatgtgcctttttttagttatcttatccttttgagctagcttttgtaaaaattcatataggtatttgttagggttgggatgtggattccgcccttacagttagaaaaggccttattagttctgaagagcaggaagcaatctttcgggttgttgcggctattctccacttggggaatgtcgagtttgcagaaggggatgatggtgattcatcaaaacccaaagatgattgttctctttctcatttgagaacagctgctgagctcttgatgtgtgatgagaaagctttaaaagattcattgtgtcagcgcattattgtgactcgcgatgagaatatagtgaaaactttggatcctgaagctgctaagggaagtagagatgcacttgccaagactgtgtactcacggttgtttgattggcttgtgaataaaatcaacaactctattggccaagaccccaactcgaaatgcttaattggagtgctggatatatatgggtttgaaagcttcaagacaaacagttttgagcagttttgtatcaacctgacaaacgaaaagctccagcaacacttcaatcagcatgtgtttaagatggaacaagaagagtacaccaaagaagaaattaattggagttacattgagttcattgataaccaggatgttcttgatctcattgagaagaaacctggtggaattattgcccttctggatgaagcttgtatgttgccgagatcgacacatgaaacatttgctcagaaattgtatcaaacttactcagttcacaagcgctttgctaagccaaaattatctcggtcagacttcaccatatgccattacgctggagatgtcacctatcaaacggaattatttctggacaagaacaaagattatgttgttgctgagcatcaggctttgttgagtgcttcaaaatgtgcatttgtttcaggccttttcccttttctatctgaggattcctcaaaatcttcaaagttttcatccattggttctaggttcaagcaacaattccaatctctgttggaaactctgagtgcaactgagccacactacatccgctgtgtaaaacccaataatttgttgaagcctgcaatttttgagaaccagaacgttcttcagcaactcagatgtggaggagttatggaggcgattaggatcagttgtgctggatatccgaccagaagaacattctatgaatttatagaccgttttggtattcttgcgcctgatgttttgagtggaagttctgatgaggtcagtgctgtaaggaggttgttggacaagatagatcttcaaggttaccagattggcaagacaaaagtattccttcgtgctggtcagatggctgaacttgatgctcgtagaaatgaagtgctagggcgttcagctagcatgattcagaggaaagtgcgttcattcttggcacagaagaatttcattgcattgcgaagatcagctttacaaatccagacagtttgtcgcggtgaacttgcaagaagagtttatcacaacctccagagagaagctgcttcactcaagatccagactttgtaccgtatgtatactgccagaaaagtgtacaacgaactttctgcttcagcagttaccattcaatcaggattgcgcggcatgtgcgcgcgtaaagagctccacttcagaagacaaacaagagctgcaatcatcatccagagtcgctgccgtcaattcttggcgagattgcattattcaagaacaaagaaagctgcaattactacacagtgtgcgtggagagggaaggctgctagaaaggagctccgcaagctcaaaatggctgcccgggaaactggtgcattgcaagctgccaaaaataaacttgagaaacaagttgaggagctcacgtggcggctacagttggagaagcgcatggcagctgatctcgaggaaactaaatcacaagaaaatgcaaagttgcaagctgcattgcaggaggtgcatctagatatttgtgaaacaaaagaaatactagtacaggagagggaagcagccaaaaaggctcgagagatagctccagttattaaagaggtccctgttatagatacagagctaatgaataagcttagagatgaaaatgacaaactgaagactatggtcagttcgcttgaaaagaagatcgatgatactgaaaagaaatatcaagaaacaagcaaaatcagtgaggataggctcaaacaggcaatggatgctgagactaaaatcgttgacttgaacatggcaatgctaaggcttcaagagaaaatatccaccatggaatctgaggagaaagtgcaaagacaagcgcttctaagcacgccagtcaagagcatgtctgaacatttgtcaattccaattgctccaaaggcacatgtgctcatttggagaacggctttcatgaggttgaaggacttaaggaaccccaaagtgcacctcctgctattaaggaatatgggaacggtgatcctaagatgaaaaaatctattgttgacagacaacttgaaaacgtggatgcactcattgagtgtgtagggacaaaccttggatactgtgcagggaagccagttgctgctattaccatatacaaatgtcttcttcattggaaatcattcgaggcagataagactagtgtttttgaccgtctcattcagttaataggatctgctatcgagaacgaggatgacaatgacaaccttgcttactggctctccaatacatctagcttattgttcctactgcagagaagtctcaaggctgctggtgctcctggtagcgtttcacgaaagaaacctcctcaaccaacatcattatttggaagaatggcccaaggcttgcgttctgcatcttttgccaacatgcatgttgaagcgacagatgttgtgcgccaagttgaggccaaatatccagccttgcttttcaagcagcagctaactgcttatgtggagaagatatatggaatcgtccgagacaatattaaaaaggaattatcatctttgatttcgctatgtatccaggctccaagaacaatgaaagctagcatgctgcgagtttctggacgattatccagtcaatctcagagtcagagcaaccactggcagaaaatcattgagagcttggataagctcttgaagatactgcaagataaccatgtgcctccggttttagctcagaaaatatttacccagatattttcatacattaatgtccagctattcaacagtctattgcttcgtcgtgagtgttgctccttcagcaacggagagtatgttaaggctggtctagctgagttggagctgtggtgtgcaaaggcaacaactgagtatgcagcatcttcatgggatgagctcaagcatatcaggcaggctgttggatttttggttatattccagaagttcagaatatcttatgatgagatagtcaatgacctatgtccgatcttgagtgttcaacaactgtacagaatatgtacacaatactgggatgacaagtataatacccaaagtgtttcatcagacgttcttagtaacatgcgggtgctaatgacagaggattctaacagtgatgaaagcggttcgttcttgttagatgataattcgagcatcccgttctccgtggatgatatcttgtcagatcatttattgatttgttgtatattttttggatcctttctaccacatgtgcctttttttagttatcttatccttttgagctagcttttgtaaaaattcatataggtatttgttagggttgggatgggattccgcccttacagttagaaaaggccttatcttttaaagcggggcaaatgattctttgtagggcaacatgaaatcaatctttttacccaagggtgtggtgagaaggggtagatgcaatgtttgtagcctcccagttatagattgtgtaaattatatactgtaaatcaacagtgcaatggaaaagaaaggaaagctatatagcaagtgcagttatgttgtcaaaaaaaaaaaaaaaaaaaaaaaaaaaaaaaaaaaaaaaaaaaaggacaatataaaaaaaaaaaaaataanagaacgcgtacatgaaaaaaaaaaaaataatattttgggggggcctccataaaattcactgttcgtggcttttcaacgcagggccttggggaaccctttggttccccaacttaatataaatggcccgcgttcccccttttttagccgtggggaaaacccgagggttccccatctgattgcccttccca

SEQ ID NO: 71258 - DNA, 1299 bp, Zea mays
  Clone ID: MRT4577_164992C.1
atggagttgctttatccgaacgcgagttacttatcgcagaaggtgatgagtgaggactttggcgatgacgaatggcccctcccaggggggcgtgagcttgtgcctccctcgggcgtcctgccgcagccaaagtaccagatcgcccacctggaggtctcgggaccggacccctcgggcgtggtagcgtcgcagggactgctgaatcatgccgttggcacgctccacttgcccattcgacatgggatgagccacggcggcccagtccacccggatgtggtgatcttcgcaaaaatccaagaattttttgccggtgaactgggtaccgttgtcggtgatgatggagtttgggaccccgaagcgatggatgatgttggtgaagaacgccaccgcctgctcggacctaaagctgttcaggggtcggacctcgatccacttggagaatttgtcgatggcgaccagcaggtgcgtgtagcccccgggcgccttctgcaagggaccgacgaggtccagaccccatacagcgacgtgggggctcctccgaagctggggtcgaatttgtctttcgttgccgaggccgagtccgagcccctgggtcgggcgaggcggaagtcgttcggcagaggccagggcggagtccgagccttggggtcgggcgaggcggagttcgtcgtcttccggggccgagcccgagtccgagccctggggttgggcggagcggagttcgccgtcttccgggtcttagcccgagtccgagccctggggtcgggcggagcggagttcgccgtcttccgggtcttagcccgagtccgagccctggggtcgggcggagcggagttcgccgtcttccaggtcttagcccgagtccgagccctggggtcgggtggagcggagttcgccgtcttccgggtcttagcccgagtccgagccctggggtcgggcggagcggagttcgccgtcttccgggtcttagcccgagtccgagccctggggtcgggcggagcggagttcgccgtcttccgggtcttagcccgagtccgagccctggggtcgggcggagcggagttcgctgtcttccgggtcttagcccgagtccgagccctggggtcgggcggggcggagttccctatggcgcccctggcgaggcctgactgcctgtcagactcactctgtcgagtggcactgcagtcggagtggcgcaggcggcgctgtccttctgtcagaccgctttatgctgatgggggttacgagctgagaattaggcgtcttgagggtacccctaattatggtccccgacaataa

SEQ ID NO: 71259 - DNA, 781 bp, Zea mays
  Clone ID: MRT4577_164993C.1
cccacgcgtccggatcttgagtgttcaacaactgtacagaatatgtacacaatactgggatgacaagtataatacccaaagtgtttcatcagacgttcttagtaacatgcgggtgctaatgacagaggattctaacagtgatgaaagcggttcgttcttgttagatgataattcgagcatcccgttctccgtggatgatatcaccaactcaatgcaggagaaggacttcacggatatcaaaccggctgatgagctactcgagaaccctgccttccagtttttacaggattagcgctagtgaagtcctcgagcattttatgctgctagatatcttgtcagatcatttattgatttgttgtatattttttggatcttttctaccacatgtgcctttttttagttatcttatccttttcagctagcttttgtaaaaattcatataggtatttgttagggttgggatgggattccgcccttacagttagaaaaggccttatcttttaaagcggggcaaatgattctttgtagggcaacatgaaatcaatctttttacccaagggtgtggtgagaaggggtagatgcaatgtttgtagcctcccagttatagattgtgtaaattatatactgtaaatcaacagtgcaatggaaaagaaaggaaagctatatagcaagtgcagttatgttgtcaaaaaaaaaaaaaaaaaaaaaaaaaaaaaaaaaaaaaaaaaaaaaaaaaaaaaaaaaaaagagggagaaaaaaaacatggtcttataatgtcaa

SEQ ID NO: 71260 - DNA, 822 bp, Zea mays
  Clone ID: MRT4577_164994C.1
atggcgcctcctgttgacgtggctggcctgcgccctaggttgggcgatgtggaggctcctccgaagccgaggttgagtctgtcttccgtggccgaggccgagtccgagcccctgggtcgggcgaggcggaggtcgtcggctgaggccagggcggagtccgaaccctggggtcgggcgaagcggagttcgtcgtcttctggggctgagcccgagtccgagccctgggtcgggcggagcggagttcgccgtcttccggggcttagcccgagtccgagccctgggtcgggcggagcggagttcgccgtcttccgggacttagcccgagtccgagcccctgtcggagtggagcaggcggcgctgtccttctgtcaggccggtcagtggagcgacgaagtgacggcggtcacttcggctctgccggggggcgcgcgtcaggataaaggtgtcaggccacctttggtccttgctgacgtcctcttgcttccgttgggcgatgtggaggctcctccgaagccgaggtcgagtctgtcttccgtggccgaggccgagtccgagcccctgggtcaggcgaggcggaggtcgtcggctgaggccagggcggagtccgaaccctggggtcgggcgaagcggagttcgtcgtcttctggggctgagcccgagtccgagccctgggtcgggcggagcggagttcgccgtcttccggggcttagcccgagtccgagccctgggtcgggcggagcgaagttcgccgtcttccgggacttagcccgagtccgagccctgggtcgggcggagcggagttcgccgtcttccgggacttag

SEQ ID NO: 71261 - DNA, 270 bp, Zea mays
  Clone ID: MRT4577_164995C.1
ccttgtcacaaccccccgcgccaacggccgacgaggggactaaaaaagagaccccggaccatcccgcgagcggaaaacgacaggcaaaccccgacggaaccgcagaagcagggagagacagaaccagcaggcaacccaaaggcacaacacagggtcaaggaaaagccgggcgcaaggcacaggcgggccgtgcgggacaccgacaacaacacaacgaaggccacaagggcagaggacgatctgcgcgacaagagccaccggtcgaacgag

SEQ ID NO: 71262 - DNA, 442 bp, Zea mays
  Clone ID: MRT4577_164996C.1
gacccaagaaccctgttattaagttggctcctaggaggttcatcacaacaaacctgaacccgtacatcgccgcggacaatgatgataacgccttttttacataacaaggaaaacaatcgcagcaatatgtaaacgcccttcaccgccccaaatagttgctctaaccaacaggagggcttgcggttttgattacccacctaattgcctccactcacctttaagaggtccatctttcgcttttctggatgacagtatagcctggaggccttttgctccgaccttgccactcagaggaattggactttgtgaacgtggagaatgacaaactatcttaccattgataggggacggacgggagtgcctactaagggacccaactttctttactggattagagctaactgtcggctaactattccgcaaaactttcgcctttgcagat

SEQ ID NO: 71263 - DNA, 615 bp, Zea mays
  Clone ID: MRT4577_164997C.1
cccacgcgtccgcggacgcgtgggcagttggagaagcgcatgcgagctgatctcgaggaaactaaatcacaagaaaatgcaaagttgcaagctgcattgcaggaggtgcaacaacagtacaaagaaacaaaagaaatactagtacaggagagggaagcagccaaaaaggctgcagagatagctccagttattaaagaggtccctgttatagatacagagctaatgaataagcttagagatgaaaatgacaaactgaagactatggtcagttcgcttgaaaagaagatcgatgatactgaaaagaaatatcaagaaacaagcaaaatcagtgaggataggctcaaacaggcaatggatgctgagactaaaatcgttgacttgaacatggcaatgctaaggcttcaagagaaaatatccaccatggaatctgaggagaaagtgcaaagacaagcgcttctaagcacgccagtcaagagcatgtctgaacatttgtcaattccaattgctccaaaggcacatcatttggagaacggctttcatgaggttgaaggacttaaggaaccccaaagtgcacctcctgctattaaggaatatgggaacggtgatcctaagatg

SEQ ID NO: 71264 - DNA, 561 bp, Zea mays
  Clone ID: MRT4577_164998C.1
atggcccttcttgcgacgtggtcggtccgagtcctaggttgggcgaggtggatgctcctccaaggtcgaggtcgagtccgagccccgggtcgggcgaggcggagttcgtcgtcttccggggccgagcccgagtccgagccctggggtcgggcgaggcagagttcgtcgtcttccggggccgagcccgagtccgagccctggggtcgggcgaggcggagttcatcgtcttccggggccgagcccgagtccgagtcctggggtcgggcgaggcggagttcgtcgtcttccggggctgagcccgagtccgagccctggggtcgggcgaggcggagttcgtcgtcttccggggccgagcctgagtccaagccctggggtcgggcgaggcggagtttcctatggcgcccgaggccggacttggctgctgtcagcctcactctgtcgagtggcacaacagtcggagcgacgcaggcggcgctgtcttcttgtcaggccggtcagtggagcggcgaagtgactgcggtcacttcggctctatcgactgaagggcgcgcgtcaggataa

SEQ ID NO: 71265 - DNA, 382 bp, Zea mays
  Clone ID: MRT4577_164999C.1
tcgttagggccttcacccttcttggcggcttacttcctttgagggcgcagatccggccggttagaccaaaccgcccgcacccatggccttcggtgagcttggctggacctacgccggccttattcttagcgacgacggcattgccattaccggcgagaagatcgccaccatcgtgaaggcggccaacattaagctcgagtcctactggccggcgcttttcgcttagcttctggagaagcgcagcgttgaggatctaatcctcttcgttggatctggtggtggcgctgcttcaggtgctgctttcgccccagctgggggtgctgcagctgctgctgcccctgctgcaaaggagaagaaggtagagcccaaggaggagtctgat

SEQ ID NO: 71266 - DNA, 289 bp, Zea mays
  Clone ID: MRT4577_16499C.1
tttacgcgcgggtgcagggcaggaatgagcgtggcatctttagcacggacgcgggttttaacaaacgaaacggaccacatggctcggacgcaatctggcggagcaaaaagtcgcggcggcccccgaaactcctgctggcacacgggacgacaaccaaagaggacgatataacctacaggcacgccagcaacgcaacaaggccctgtctttcctacgcccgaggcacgggatccggaccctccgcgttactgtgtagcggggacaagaacctcaagagcgcccgcagcac

SEQ ID NO: 71267 - DNA, 1086 bp, Zea mays
  Clone ID: MRT4577_1649C.1
acctacgacaagctgctctcggaggcggccaagcccgagcccccccccccgcgcttccttccctagcgccgccgccccccagacgagccggcccggaagcccctccccgttcgcttccttccctcccgccccgccccaggaaaccctagctagcgccgccgccgctgcagactcctccttttcgatcccttcacaaagcgccgccgtcgccccatcgaacatggctccgaagaaggataaggccccgcccccgtcgtcgaagcccgccaagtccggcggtggcaagcagaagaagaagaagtggagcaagggaaagctaaaggagaaggtgaacaacgcggtgctgttcgaccaggctacctacgacaagctgctctctgaggtgcccaagtacaagcagatcaccccctccatcctatccgagcgcctcaggatcaatggctccctggctcggagggctatcaaggacctgatggcgcgtggcctcatccggttggtctcggttcactcaagccagcagatctacaccagggcaacaaatacctaaggatgggattcccttgtttgccctctctgtaggagctcgtcttctttagaacagttgccatctctgtcaagagtttgctaatgctatgttagatgagtttctcacgtggctgaaacgtttcagagagtttgcgttagtttggcttgcctattataccttatctggcctcaatagcttttttctatggaaatctgccttgaaatgtctgatccgtgattatgcaactctatctaaactactgttatgctgcaaaaaaaaaaaaaaaaaaaaaaaaaaaaaaaaaaaaaaaaaaaaaaaaaaaaaaaaaaaaaaaaaaaaaaaaaaaaaaaaaaaaaaaaaaaaaaaaaaaaaaaaaaaaaaaaaaaaaaaaaaaaagggggggcccccttttaaaagaaccaaatctttacttccccggggcttgcaaaagaaaaagttttttttttatgggccccctaaaattaaatccccgggcccgggttttaaaacacgtggaaatgggaaaaaccctggggcgtacccaaatttaaatccctttg

SEQ ID NO: 71268 - DNA, 2190 bp, Zea mays
  unsure (1)..(2190): unsure at all n locations
  Clone ID: MRT4577_164C.1
ctttngactacattttggggtgttngcagatattcttatggaagacgtcttgaatggctcacagatggtgttagcatgctaacttccttatcgcttgaggaatcctgtgagaacgatatctgtgaaggaactgcagttacagcacagaaacattatttagatagcaacacaactgatgtggataaatcatctgaatctagcaatggagtttcgtcaacggagctgtctgatactgacagcagttctgggtgtagagaaaaccagcttgactttgtttctaaagaacaacagcaaaatagttcttgtgaagaacagagtaattttaaaagagaaatagtcacttgttctgatgcttccgaagtgtctgatcattttgttccagaagatacatcatttgatcagtctggagttaagcaccatgaacttcattctgcaccaagtatcccggatgaatctggtgcaaggaactgtgatgattccccgaaggaaaatgtggatgatgaggagcttgatctcttcattatagatactattttaccacttatgcgatctcgcctttgtgaagattgtgaatcatctccaagttcacagggttctccttctgaaggcagaaattttgacacccaagaatcggattcagaggagccatcttccattggtgatggagacttagttaaacacaacaacatactgcagtgggcccaggcaaaaaaatatggttctttgcaagttgtctgtcaatactaccagttacagtgtcctgctaggggttcaacacttgcttttcatcccttggagcatttgcattctttgagttttcaccggcctggtgaaacagttcttcacattgctggttctactattgagcttaggtcacgtgatacaagcttagaggttgctgagatgcgcaatgcactctttgctgaggaggaatcgactgctttgtccacatgggcagtggcatccatttgtggatgcctcaggttggaacatgtaatgacactttttgctgccgcactcctggagaaacagattgttattgtctgttctaatctgggaatgttatcggcttcagttttgtccatcttacctctaatacgaccgtatcagtggcagagtctcctcatgacggttttgcctaatgacatgatggattttctggatgccccagttccatacatagtgggcgtacaaaacaagacatctgatgtgctcaaccggctaacaaatgccgtagtcattgatgccaacaggaatcagattaagtcctcttcagtcccacaactaccacagcacagagagttgctttctgccttgcgcccgtatcattcaatacttgttggcgaaagttatcttgcaagaaaacgccctgtttatgaatgcacagatgcccaggtggaaggggctaaaggtttcttggcagtgcttagagactaccttgacacactatgctcgaacttgagatctcatacaattaccaatgtgcaatctaacaatgacaaggtttccttacttttaaaagagagctttattggttctttcccaagccgggataggccttttatgaagctttttgtggacacccagttgttctcagtacatacagacctagttctctctttttatcagaaggactaagtgtctggcagacttgaatgtctgcctcgtcttgccaagcctttagatgttgagctaaactgtacatatcggcagctcagtgtttgtgcaaagagctcgaaggagaagccatataccgtcagaaaaaagtggtagattgccaggatccagttatgggtattgaagaagaatgcttgtagctgcttaagttagtctggtgcggtaatccaaggttttgttggctgtagttggtgcccccataagaagccttgtatggattgttcctgcaaatgcctgtgctgtaacggaaccgtgtctgtggcaaaatctccgaacatgaatgcgtccatttggcaaatctaagcgtgcaatgggacatcgaagaaaatgtaataattcgtggtactccctccaggccgaatcagttgacgctatggtatttaataacggtcgagctttcttattttaaactagatttgtagaaatattaacaatatttgtattattagaaaagtttattactaaaacagattcagagatttatataacaatactagttatgtgctttgaggc

SEQ ID NO: 71269 - DNA, 146 bp, Zea mays
  Clone ID: MRT4577_165000C.1
cggaacagaagatggcttgcgaggctgaaccccaatgtcaaagtaacctggtcattcgttctctaatctggaggttcgggcctgaaaaaatttttttttgtgggttttttttggcgggccttctgcggaaactaagacgcttgcct

SEQ ID NO: 71270 - DNA, 549 bp, Zea mays
  Clone ID: MRT4577_165001C.1
atggcctccgggcgaagcagcatgcaaataaagcttcggctagacgcacgcccggaagacgacgaactccgcctcgcccgaccccagggctcggactcgggctcagcccaggaagacgacaaactccgcctcgcccgatcccagggctcggactcgggctcggccccggaagacgacgaactccgcctcgcccgacccgagggctcggacttgggctcagctccggaagacgacgaactccgcctcgcccgatcccagggctcggactcgggctcggccccggaagacgacgaactccgcctcgcccgaccccagggctcggactcagccctggccttagccgacggtctccgcctcgcccgacccaggggctcggactcgacctcggcctcggaagacagactagacctcgacctcagaggagcctccgcctcgcccaactcagggctcggaccgaccacgtcacaggaggcgccatcattaccctaccccaagctaactcaggctacggggaacaagaccggcgtcccatctggctcgccccggtaa

SEQ ID NO: 71271 - DNA, 411 bp, Zea mays
  Clone ID: MRT4577_165002C.1
tttgccttcacccttcagcgccttcaccctggttgccggcttacttcctttggagaggtcgcagatccgtccggttagaccaagccgcccgcacccatggccttcggtgagcttggctgcacctacgccggccttattcttagcgacgacggcattgccatcaccggcgagaagatcgccaccatcgtgaaggcgggcaacattaagcttgagttctactggccggcgcttttcgcttagcttctggagaagcgcaacgttgaggatctaattcttttcggtggatcttgtggtggcgcttctccaggtgctggtttcggcccaactgggggtgctgcaactgctgctgcccctgctgcagaggagaagaaggaagagcccaaggaggagtctgatgaccacattggcttt

SEQ ID NO: 71272 - DNA, 161 bp, Zea mays
  Clone ID: MRT4577_165003C.1
agctcggaattcggctcgagacccaagcgagatctccgttgttccatgtcgatcagtccgatcgccatgtcagtgagattgatacacgagaagagaagactagaatgaggacacacgcaacctgggcatgaaggcttagggccatgactagaccgaatagc

SEQ ID NO: 71273 - DNA, 378 bp, Zea mays
  Clone ID: MRT4577_165004C.1
atggcgcctcccgttgacgtggtcggttcgcgccctaggttgggcgatgtggaggctcctccgatgtcgaggtcgagtctgtcttccgtggccgaggtcgaggccgagccctggggtcgggcgaagcggagttcgtcgtcttccggggctgagcccgagtccgagccctggggtcgggcgaagcggagttcgtcgtcttccggggctgagcccgagtccgagccctggggtcgggcggatcggagttcgccgtcttccggggctgagcccaagtccgagccctgggtcgggcggagcggagttcgccgtcttccggggctgagcccaagtccgagccctgggtcgggcggggcggagttcgccgtcttctggggctga

SEQ ID NO: 71274 - DNA, 618 bp, Zea mays
  Clone ID: MRT4577_165005C.1
atggggtcgggcgaggcggaagtcgttcggccgaggccagggcggagtccgagccccggggtcgggcgaggcggaagtcgttcggccgaggccagggcggagtccaagccctggggtcgggcgaggcggagtttcgtcgtcttccgggtcttagcccgagtccgagccctggggtcgggcggagcggagtttcgtcgtcttccgggtcttagcccgagtccgagccctggggtcgggcggagcggagttcgccgtcttccgggtcttagcccgagtccgagccctggggtcgggcggagcggagttcgccgtcttctgggtcttagcccgagtccgagccctggggtcgggcggagcggagttcgccgtcttccgggtcttagcccgagtccgagccctggggtcgggcggagcggagttcgccgtcttccgggtcttagcccgagtccgagccctggggtcgggcggagcggagttcatcgtcttccgggtcttagcccgagtccgagccctggggtcgggcggagcggagttcgccgccttccgggtcttagcccgagtccgagccctggggtcgggcggagcggagttcgccgtggtgcctttggcaaggcctga

SEQ ID NO: 71275 - DNA, 351 bp, Zea mays
  unsure (1)..(351): unsure at all n locations
  Clone ID: MRT4577_165006C.1
gttggtggtgacggccagtggcgcacggccgcatgctattcttaatgtgccctcttccacttgttgttgatgaatataatgtgaccactcgggattagaaggctatttgctatcccactgtncttagaatctgattgatcaactcttcctggcttttcctgaccgttctgcatccacggtcatgtctgggctgaaagcgcaaacttgccttcttagtaatttgtggtgagcgagccatatatgactatctgtgggagaagttgacacaacggctaatgcactcagctttagcactttgatgtatatcacataatggatagatgactgtgaaccagtggacacttcatgctg

SEQ ID NO: 71276 - DNA, 461 bp, Zea mays
  Clone ID: MRT4577_165007C.1
catctaattttgctatgtgatcattttgttgtttaattaaagccatgtgatcatgaatagcatcaatgttaacatctctacatctagtgcaaatagtagtatgttcaacggtagatgtagagggtttgcaagattttaattctacaaccttagcatgtaatatatcatttttacttctaaggtcaaaaatggaagcattgcaaacatctaattttttagccttagcaattaatttttcattttcaatcctaaggctagcaagagtaacatttaattcttcaatcttagcaagtaaatcaacattatcatctttaagattgggaattgaaacattacaagcatttgaatcaaccttagcaatcaaactagcattttcatttctaaggttgttgataacatcatggcatgtgcttagctcaccagttaatttctcacatttttcaacttctagagtcgacctg

SEQ ID NO: 71277 - DNA, 254 bp, Zea mays
  Clone ID: MRT4577_165008C.1
ggggctgagaataagaatacattggatgatgactccacctgttatagcattgcaacatgcaaacatcaagcacaactaaatttccagggagattctccagcattcttgtgcagaagaggacaaactcagttgcaaattaacttcaactgggaaaactgcatccacaccctagcagtataaaaatgttaatcatttggtcccgtttgccagacactgcgggaagtgctgcccatccatgttcccagaacatcaaa

SEQ ID NO: 71278 - DNA, 678 bp, Zea mays
  Clone ID: MRT4577_165009C.1
atgcaggcggcatgcaaccacgccagtctgacagaaggacagcgccgcctgcgccactccgactgcggtgccactcgacagagtgagtctgacaggcagccaggccttgccaaaagcgccacggtgaactccgctccgcccgaccccagggctcggactcgggctaagacccggaagacggtgaactccgctccgcccgaccccagggctcggactcgggctaagacccagaagacggtgaactccgctccgcccgaccccagggctcggactcgggctaagacccggaagacggcgaactccgctccgcccgaccccagggctcggactcgggctaagaccctgaagacggcgaactccgctccgcccgaccccagggctcgaactcgggctaagacccggaagacggcgaactccgctccgcccgaccccagggctcggactcgggctaagacccggaagacggcgaactccgctccgcccgacccagggctcggactcgggctcggccccggaagacgacgaactccgcctcgcccgacccctgggctcagactccgccccggcctctgccgaacgacttccgcctcgcccgacccaggggctcggattcggcctcggcaacagaggacagactcaacctcggcttcggaggagcccccacgtcaccccgcctag

SEQ ID NO: 71279 - DNA, 785 bp, Zea mays
  unsure (1)..(785): unsure at all n locations
  Clone ID: MRT4577_16500C.1
ttgggtacctcgaggccggccggggcgcaccatgaattctctctctcacacctcttgctactgaaaaactactgtncaatctggaaaaaaaaacaggcctacgtgacgcaagacgacaacctgatcggcacgctgacggtgagggagacgatctcgtactcggcgcgtctccggctccccgacagcatgccgagggaggagaagcaggccctggtggagggcaccatcgccgagatggggctccaggactgcgccgacacggtggtgggcaactggcacctgagggggatcagcggcggcgagaagaggcgggtcagcatcgccctggagatcctcatgaggccccggctgctcttcctggacgagcccaccagcggcctcgacagcgcttcggcgttcttcgtgacgcagacgctgcgggggctggcgagggatggcggccggaccgtcgtagcttcggtccaccagcgnagcagcgacgtcttcttgctgttcgactgcctctacctcctgtcaggaggcagaacagtctactttggcaaggcttcagaggcttgcgaggtaacaacaacatgagttttcttttttttttcctaattcgtacgtactcctgtctaggactagctactagctaggaagtgtgtttttggcttgctacaccaatggggagcatgcgtgtctactgtgcatgcacgatcgatcgagagcagttcttcgcgcaagctgggttcccgtgcccgcgatgcgcaacccgtcggaccatttcctccggtgataaactcgga

SEQ ID NO: 71280 - DNA, 296 bp, Zea mays
  Clone ID: MRT4577_165010C.1
attattagtgtttccccacaagaagaacacccccaaaacaagagcacagcccgcgaggccagccccacgcggggagccacaaaaaaaagaggggaagacaggggcgagcggaaaagagaggcgcccacacaaaaagagaggaggggccagacacaggggggagcgccaagcacagaggaaaaggcccggcccacacgaaaacacgcaccggcgcaaaaccgcccgggaagaacagcccccacgaagaagacccccccccaagggggacccccgacaaaagccgccgaccgcccggg

SEQ ID NO: 71281 - DNA, 906 bp, Zea mays
  Clone ID: MRT4577_165011C.1
atgactagggaggctcgggggctgctctcgcaaaaaccggctccggccaaaccgttgacagcgtcaacataccagcccgagaacttgggccccgaccgtgcacccgggctacggccagttcgcatgagggaacgaccagaccagccgaagcattacgcaagtctgacagaaggacagcgccgcctgtgccactccgactgtggtgccactcgacagagtgaatctgacaggcagtcaggccttgccaaaggcgccacggtgaactccgctccgcccgaccccagggctcggactcgggctaagacccggaagacggcgaactccgctccgcccgaccccagggctcggactcgggctaagacccggaagacggcgaactccgctccgcccgaccccagggctcggactcgggctaagacccggaagacggcgaactccgctccgcccgaccccagggctcggactcgggctcagacccggaagacggcgaactccgctctgcccgaccccagggctcggactcgggctaagacccggaagacgacgaaactccgcctcgcccgaccccagggctcggactccgccctggcctcggccgaacgacctccgcctcgcccgaccccatggctcggactcggcctcggcaacagaagacagactcaacctcggcttcagaggagcccccacgtcaccctgcctagggcacagacccgccacgtcaacagggagcgccatcatcatcctaccccgaatcgactcgggtcatggagaacaagaccggcgtcccatccggccagctccgccggatgggcaatgatggcgctccacaagctctgtgacgacggcggcccccagctctcttacggaagcagggcgacgtcagcaaggactcgaccgctccaatag

SEQ ID NO: 71282 - DNA, 277 bp, Zea mays
  Clone ID: MRT4577_165012C.1
tctatgcgtacgcccacgcgttggatcactggtggcgccatttaaggtgactgagagaacttggacaacacataacataggcgtttgaccatcgaacctgttcatgaacgctattctggggcacattgacaacgattataaccgtgtcctccgacatgcttaaagggataggctatcgttacgacagcctcccttaaatcactggctatatttttaccgatttctaaagggcctaaatccttagttagccttacttagatgattgcttaatgttgct

SEQ ID NO: 71283 - DNA, 639 bp, Zea mays
  Clone ID: MRT4577_165013C.1
agccgacgtgaccgccgtcactccaccgctccactgaccagcctgacagaaggacagcgtcgcctgcgccactccgactgcggtgccactcgacagagtgagtcaaacagacagtcaggccttgccaaaggcgccacggcgaactccgctccgcccgaccccagggctcggactcgggctaagacccggaagacggcgaactccgctccgcccgaccccagggctcggactcgggctaagacccggaagacggcgaactccgctccgcccgaccccagggctcggacttgggctaagacccggaagacggcgaactccgctccgcccgaccccagggctcggactcgggctaagacccggaaggcggcgaactccgctccgccctaccccagggctcggactcgggctaagacccggaagacggtgaactccgctccgcccgaccccagggctcggactcgggctaagacccggaagacgacgaaactccgcctcgcccgacccccagggctcggactccgccctggcctcggccaaacgacctccgcctcgcccgaccccagggctcggactcggcctcggcaacagaagacagactcaacctcggcttcggaggagcccccacgtcaccctgcctag

SEQ ID NO: 71284 - DNA, 336 bp, Zea mays
  Clone ID: MRT4577_165014C.1
cacacgcgtacgcccacgcgtccgcccacgcgtccggggtccttcggggctttggcccctgttgacaagggtaatctgaaacttactagaacattcgagttcattatggtcagattggtatgtctcttgtaagtcaggctggtgactggaataaatcttgcatacctgaactcaataggcaccgatgcgtatgtaaccctactacttggcatgtagaaaattaagacgatcgtgaagaagagatctgtgaacacgatctggcacgatgagctaactctgaccgtcatagatccaagactagctctgaagctggaggtgttctacaatgacacgttc

SEQ ID NO: 71285 - DNA, 809 bp, Zea mays
  unsure (1)..(809): unsure at all n locations
  Clone ID: MRT4577_165015C.1
acctataccaccacttgnaagncggagcagcagccgtcatagcaggttatttggagaaggatggatcggcggcaatcaagcagcagcgggatgatggagggaccgttccgattcttgccggccgaagtgaaagagatggaggagcgcctgtttccggtcaccaatcgcaggctggatcacatcctcatggatgagctcgctctgaaatttagctgcttccggcgccgtgctggcatggttcccgtcaagccaaagcaggtgctcaactggttttataacaaccgtaacaagacttctgccaaggtagcagccagggaagcacatgctccatgggagttttgggccaaccatcagcaagctagagctagaggaggctcatccatcagcaagctgaagccaaagaaggcgactacgcacgcaggatcttcttcaggtgatttatagatgttacctgatcacatgatcactgaagttgcttctttgtaatttgtcgctcatgtttacatgcttcctcgttactgccaggcacttctattctattgcgattttgctactgtttttcccctcccttttatatatcagtgtgaattgaaaatcattgaatatcgttatcgtactttgcggcaacgctcagtgccatacaaggccacagaatgtgcagatgttcatatttgggaccctgttctttgttacaaggtaagtgaacagagtggtctctattttnatgctgaagtgcatgctattgaaaggggaacacataattcaggtgaagaatgtgattgcaaaaaccctgttctttatgtgcattg

SEQ ID NO: 71286 - DNA, 265 bp, Zea mays
  Clone ID: MRT4577_165016C.1
attcggctcgaggacagaaacgattctcttccaaagcggacctaaggtgctgacgctaccgccttggcaacaggcggctggggatgccatcgcacggtacccgaatgtatgcaccggcctgcgagcgtgcgccaatgacgcaccatgggtacaggatccggctggcaaacaaccaacaccagaaggggttggatgcaacccagcgtccccggtgcccgtagctgaccactcgggagctgcatgtgctcgcgcgggacatcactac

SEQ ID NO: 71287 - DNA, 709 bp, Zea mays
  unsure (1)..(709): unsure at all n locations
  Clone ID: MRT4577_165017C.1
ggccgggntaagcggcggngggtggctaaccgcgatggcgcctctgtttgccgagtcgcttagggcaagaaacaacagaggggagaggggcctacacgaggcagtgaggcgaggcaacacggaagctgtcgagtccctgatctggatggatgagaatgtggatggcggcaggaccagcagaaccccatcgctggtgcagagagtagactatcaaggtgtctctcccctctacttggctaccactctacgccgtggtgacatcgtggggattcttacgcacccctcccaaaatcactactcaccatccttctctgggcctggaggaaagaccgccatgcatgccgccgttcttgccaagggagatgccaaagtgctaacgaagaagctcctcgagtggacgaccagcaagaattacccgggaggtgcacgggatcttatatgtatgggtgacaaatcagggagcactcctctccaccttttggcctcagagggaggcgcatctgtcgcagagctactgctctctcctgatgcgagagaactgtcgtgggcacgccgcttactctcaaagatatgtccatgtacatcaccagctgggaatgccgcctccgccgacgacgatgacgacgacacgagagaggggggctcttgtactgctgctgcgctgaagaagactccaatggctggtttcccatacatgtcgctgcggcga

SEQ ID NO: 71288 - DNA, 680 bp, Zea mays
  Clone ID: MRT4577_165018C.1
ccggccgggggcggcggcggcattcccagctggtgatgaacggacatatctttgagcgtaagcggcgtgcccacgacatttctctcgcatcagaagagagcagtagctctgcgacagatgcgcctccctccgaggccaaaaggtggagaggagtgctccctgatttgtcacccatacatataagatcccgtgcacctcccgggtaattcttgctggtcgtccactcgaggagcttcttcgttagcactttggcatctgcaaaatcttacatttgcctttacgtcttatcatatgaaattacccctaaatttacatctgatgaataactaaccacacgtacctcccttggcaagaacggcagcatgcatggcggtctttcctccaggcccggagaaggatggtgagtagtgattttgggaggggtgcgtaagaatccccacgatgtcaccacggcgtagagtggtagccaagtagaggggagagacaccttgatagtctactctctgcaccagcgatggggttctgctggtcctgccgccatccacattctcatccatccagatcagggactcgacagcttccctgttgcctcgcctcactgcctcgtgtaggcaggtctcccctctgttgtttcttgccctaagcgacttggcaaaaaaaaaaaaaaaaaatttgcggcc

SEQ ID NO: 71289 - DNA, 175 bp, Zea mays
  Clone ID: MRT4577_165019C.1
caaacgcagaatgcaacggatataggtcgagatcaaacctggccagccaacaggagcaactagccagtgaccaaaaaaatacagaagctgacataaaaacagaggccaagggacctaaaatcccataatgacagccccaacacagggacgacctagcaccaccagaacgcaggga

SEQ ID NO: 71290 - DNA, 550 bp, Zea mays
  Clone ID: MRT4577_16501C.1
attgggacctcgaggcggcgggacccttgcaaacagggggcgacactcgtatttttgctctgctgtggcaagaaggatcaagctatggactccctagctcttattgttagcaatcggtcactcacgcgccgcgtccagaccacctcaagtcctcctgacgcggactcccggctcccttcggccacgcgcagcaccacaccaggctgcgtgaaccaggccatcccgcgcgccgactgcgaccccacacggcgtggactgtgatagaaccttgccccgccgtacaacaaggcggccaaagaacttagccagtatagaaccagcgattcgtgtcgcgaaggaggatgctgaggacgagacgaacagtctctcgccagagataggagatacaaggattccgaccctccagatcttagaccctgggaatacaaataacgaatacaaggcccctagggagactgatcgcattctggattacttgcagaggcagggtgcccatgcctacgaggagatctagtcaccagaatgtgtggccgcccattttgatgacaag

SEQ ID NO: 71291 - DNA, 1415 bp, Zea mays
  unsure (1)..(1415): unsure at all n locations
  Clone ID: MRT4577_165020C.1
gccggccggtccgggatcagtgatgttacatccaattaaactcatccttgcactttgagctgcgcggtgaagaaaccattgggggaaagttatctgagatgctctcatgcttttgtcgtcttgtttttattcttctgtttgtattttgtggattttcgaattcttttactttgaatctgtattggtgatgcaattattatacatgttatcttttcggcaacctctaagccggccgggaataccattatctgctgagatccatgataaattcactaataatttgttgcatcagtttgaacagaaaggggaaagggcttatcgaagttcttatggaagcagaacaggcacacacaatgtcatttatttaaaaatctctacgtctaggaggccaactaatcagatgctaaaagatttggcataagtaaaccaaatatgttggcagatctttttgtggagggggagggtgcatctgtgaaggaacgttacccctttctagtaaagaaaacattgagggggatgttccaagattctcctttcatttattttttgtgcggtttggaaaatgaggcttgtgctgttgcatcaatgaagctgtttggctaccctatctacagctgcggaacagtaaaccatctcacaaatgaagtagcagcctgcagcgacagcaaaaaaaggctgccggacggcttgaataagcacaaatcaaaagaagatggtttcatacacatgaatattgcatatttgtgaaactattgtttacctgcatggttttagctcaaaatttctcctatgagggacaaattggagaagccttccatggctgcatatggggttcagtgttatttattttggaggggttttctctaattcataacatgttttaagtaattacatctccactgtaggcaaatggttgatgttgcccaggaagttgatgcagattgtttgcttgtggatgcaccgagaaaggcaatgatcaggtatcagactattggcatcgtcgcaggtgttcctgtttcatcttgcggataagacttgtcgcccacatccgtctcctcgctgagctcaatgaaattggtgggaagcatgggaggagacttcctcgtttgatgacggggaaatctataaccaggctgacgccgagggggggtcatcaggctctggtctcccgaccggggtccgggcgatgctggagaagggtatctgaatctttctttgtttgattcagagacaaaatccgttcttgggaaatcgttgttgggtcggtgatcacagacggatgggaatcatgtggaattttgtttacatgttgactaactatagttagttgaccgtgcatctgtttctatatatatcataagctaacatggtttgatgggnnnnnnnnnnnnnnnnnnnnnnnnnnnaaaaaaaaa

SEQ ID NO: 71292 - DNA, 551 bp, Zea mays
  Clone ID: MRT4577_165021C.1
cctactaacatgtagtacttctgagcaggtgtcagatggacgaaggcaaactacgcaacgaagcatacaaaagacttgtgtcaacgagtcttatgtagagacccattcacctcttgttgaagcttatatacatgtgtgtgtgttcaccagcttaatatggaacattgtagcttccgaactcgtccacagtagcttaagaagctgaagcacaacaagtgtctatttcagtctttccaacttctttatggatgtaaagtgccaacgatgctttaatatgtccaatgcgctctaggcttacgaatctcatcctaagattcaattgcaggggctgcaatgccggcgtcggcatatctggaaattcagcactgacggacaccggccgccaagatgggcctttttgatcaccgccgcaagaaccaaatgcgttggagccattcttacacctgctgctacttacaagccagcaacctaacacgccaacgacactagctcctacttataaaagtgacatctttattgtatagataacgaatggttatagttattcattc

SEQ ID NO: 71293 - DNA, 360 bp, Zea mays
  Clone ID: MRT4577_165022C.1
agaaccaatagtgcttaaagcgactgactttaataacaaacgcacatactaaagcatgaaataatgagaaggtggaaggaaacacccaaacattaaccaggacataaacaaaggattttcaacaccatagcctagatagacagtcaaacagatgcatgcaagcagattagtactagtgctcaacagacgcggaataaattgcaacctctgcggcaacctctattgtagtaaatatcaggagggtcatatactcacgtgcctacaagaacaccgcctcctacatgcccaaaccgacgtaccagtggaagaacgctctcttcgaggacatcaggtattacttgctgttgatgggggagaaca

SEQ ID NO: 71294 - DNA, 104 bp, Zea mays
  Clone ID: MRT4577_165023C.1
acctacgcgacgcaactccgcctccatcgagctcgtcgacccactacgatgttccagaccgtcacctgcatgcggaccaactctccctctacacgattcgtatt

SEQ ID NO: 71295 - DNA, 542 bp, Zea mays
  Clone ID: MRT4577_165024C.1
gagcatcaatggagaccaagatatatgccctccttatgctccttgctctttttgcatgtgttgataacccgacaattttcccttaatgctcacaagctcatatagcttgccttcttcccccataaccttccatcaatgatagcctttactgtgtgaaaacccagcttttcagacatataagctccaacaagcaatctcattaagcaacatacctttatcacccttggtgcatcaacaatcgtcagccatatctttggtgcaatcattggtacaaaccatacacggtacaatagctgtagcaactcatgctacctgtgatcaaccaagtatctatggcaaacctttctccctactctcagcaacaacaattttttccattcaaccaactgtctacactgaaccctgctgcttatttgtagcaacaactattaccattcagccagctagctactgcctactctcagacacaacaactttatttcatttaaccaattggagcatactgaacaccgctgattatttgtagccaaaaatactactac

SEQ ID NO: 71296 - DNA, 2396 bp, Zea mays
  Clone ID: MRT4577_165025C.1
acagatggatggctctaaatttacacaatcaaaatgattgagctcacgctggagattaatctcataagaagaaaaaatctttgtaagttatccagcacaatgtacaagtacaatagattgcggagtaccttcttcacacatatacaaatactcactgatgaacctctattatttgaggaagggattcatatcaagggccatataatttgaaatctctatattctcttctacgctcaaaccaatatttatttttcctttgcttaatgtgcctgcttacaagttagaagaagggtggaacatgcctagctccttgccgtgtcccttgatcgtgcttcagcttgctgacacatgcagtcaggcataggaagggtgtatatggattcctgtggtttccttaatgcgaaacctttcatctcactgtgccgacgcatgtcctgcatgtggtgcttgaatcgatcccatctacgtacaagattagctttgatactccacaactagatgatgattacgaaaaaaaaatcataaaccctttcgtgttctgcccattgcaggtgttcagaactaaaagaaagtaaccagttacagaagattcaatgtatgtcagtgtcagcatgcacataaaggattcggtatactgtaattagattagaataaacacagaggcaatcatgtttggcgaaacctttatgaaataagggtcatcagatgaccgttatcttggacacaaaaatggctacatgtggacgaatttcaagccacattcattgacagtttatgaaacttcacgaggatgaacgaaattcaatttgctgagcaagaaggccggaagttcactggagtttatggaccacagggagacgatgagaaagtgtccttcctgcaggaactcagggatatcagggcgatctacagtggcccttggctagtagcaggtgactttaatctcatctatcaggctgctgacaaaaacaatgcaaacctggatacagcgatgatggcaagtttcagacgcttcttgaatgatatggaggtcaaggagatccccctgcttggaaggaaatacacttggtctaatgagcggcagtcccgtagacccgtactttggttaggctggacagagccttttgctgtgttgattgggatggtttatttccggagtcaattctgcaaagcatgacagcaggagtgtctgaccactaccccctcatacttggcctcaaagtgaagactgctggtaagcgtcggttccattttgaaagtttttggaccaaaataccgggcttcttggatgcggtgaagcagaattaggaagctcctgtgtcttcaaattgtgcagttgagcgcctatttctgaaattgcaaaggctcagtaaagggctgcagaaatggggtcagaggaaggtgggcaacatcaaagttcagatggaaatggccaaagaaatcttacatcgactggaaattgagcgtgattcaagggatctctctgaacaggagtggctgcggaggaagcttaaactacactgccttggcctggcctcccttgaaagaaccattgcccgcttgcggtcctgtatcctctatctccaagacggcgatgctaatacagccttcttccatcagcaagcaaggttcaggaagaagaatttcatacccaagcttaatgttggtgatcagatagcagtttcccaagaggacaagcaagcagttgtgctagacttttatgaaaacctgctggggaaagctgaagaaccaatttataccgttgaccttgcagaattgggtatacagcagattgagctctctcaactagatgctcctttcatggaagcggagctatgggcaactataaaagacatgccaatggacaaggcgccagggccagatggctttactgaccacttctataaatcttgctagagtatcatcaagggagatattttgatggctttagacgctatttatctgaggtcatgtcttcaaattttgtctcctgaattcggccttcattaccttgttacctaagaaacaggatgcttctcaggttacagattttcgccatatcagcttggtgcatagctttgctaaattagtaacaaaaataatggccaataggttggcccctgttctaccgattttgatcagccccaaccagactgcttttgtgaaaggtcaaagaattcatgataattttatgtttgtccaacaaacggtcaaggctctgcacaagaataagaagaaagaagctcacatcctccttaaacttgacatatctaaagcttttgattcggtctcctggtcctttttattggaaattcttaggcatattgggtttggacagcgatggattaatctcttatgtttgctgttatctacttcctctacaccccaaaagaccg

SEQ ID NO: 71297 - DNA, 313 bp, Zea mays
  Clone ID: MRT4577_165026C.1
gccggccggtttcgtgctgctgtcagatggctgaagatctgtagttgttccttgagtgatttaagtgtcgctgatcttcaaagccttcatgcatcctttgaagaggatgttgtcaatgtatggagttacgaaacaagtattgaaaaccgtaatactcctggtggaactgcgaaatcatctgttttggatcaaattcagcgtttaaagacttggttgacgtccaagcaagcttaagctgtatgtgtgtatatgtatatttataataaaaatatttctagaaatgacccaaaaaaaaaaaaaaaaaaggccccta

SEQ ID NO: 71298 - DNA, 288 bp, Zea mays
  Clone ID: MRT4577_165027C.1
actaaggtcatgcttttatcgattcattcactgcactttccattggctttttttttctttttcggaggaaaaacaaaaggcgaaaactggtgcttattttcttgggcataatccaacccccctgcaacggcgttatccatcacgctctcaccgcgtaggtaatcgagctgaaagcctacgagacacgaccctaatgtattttcccggcccaagggggctggatgatacccacgaattttaccacacctttaaaccttttgtccagtcaaaacaaaaaacacacacctt

SEQ ID NO: 71299 - DNA, 376 bp, Zea mays
  unsure (1)..(376): unsure at all n locations
  Clone ID: MRT4577_165028C.1
caaaaaaacataactctaaagccctcacacannttattttttttttttttaaaataattggtttgtgcaaacgacttgtgcacatcaaaacacaaccaggtttgacttaacctggaaaaaaaacaattgaggacatgatagcccaccatgtgcaatgcaagaaggaacacccctcgatcgaacgattctttacaccaactgggtctccaacggccgcaccaaacggaccccgacagactcctactataaatcttaaacctcaccggacatcaaatgtagcgatttgcccttggactccggcaccaggaacctgaggaccaaacccaacatgttgctggcggcgaagacaaaaagcgagttgcgcacgcccatgccc

SEQ ID NO: 71300 - DNA, 1248 bp, Zea mays
  Clone ID: MRT4577_165029C.1
cccctgctcctgctggggcaggagcagcgcgagatggcgcggcattgtggaggcggccgtgagggtttggccggacagctcgctcgctcctgcccctgctcctgctggcctcgccggcggccacgcgcctggcgtccgccgcctgcgcgggcgagaagttcccggcggggcgtgcgtacgcgtcgtgcgaggacctgccgaagctgggcgcgtcgctgcactggacgtacgacgcgtccaagagctccctgtcggtggcgttcgtggcggcgcccgcggcggcgggcgggtgggtggcgtggggcctgaaccctacgggcgagggcatggccggcgcgcaggcgctggtggcgctggcgggggccggggccgcggcgcccgccgtgcggacgtacaacatcacggggtacgtcccgctgggcaaggcctccacgccgctggacttcccggcgaccgacctcgccgcggacgccgcgggcggcaagatccgggtgtacggcaagctgcagctgcgcaaggggatgaaggccgtgaaccaggtgtggcaggtcggcgcgtcctccacgggcggcgcccccgacaagcacgcgttccaggcggacaacctcggcgccaagagcaagctcgtcctcgccggcaaggcccccgcggcggccgaggccccctcgcccgccctcgcgcccgaggccggcggcccgtccgcgggcggcgacagcggcgcgggcgcgtcctcgtccacggcgccgtccaagtcccccaacgccgccgtgcccgcggccggcgtgtccgcgcccgcgctacttgcgctcgcgctggtggggtttttggcggcggtatggtgacgcgtgaatggtggagccatcatcccggcgaaggtggcggcggcgggggctggggacgaaatatcgcgctgttttctttttattggggttcgtttttaagctttgtttttggccgtgaaataaaaatagttgctgtacttgttgagctgttgtttggtagagtcatagtgacgatttattaaaaaaaaacaaaaaaaaaaaaaaaaaaaaaaaaaaaaaaaggaaaaaaaaaaaaaaaaaaaaaaaaaaaaaaaaaaaaaaaaaaaaccctaactgactttcgagcaatcgagcggaagccgtcgccgtaaattccaagcagcctacaccgcctcgccgatggccgccgggggacacctccgcccgggctcctacctgggggacgaataagcgttttctttgttcc

SEQ ID NO: 71301 - DNA, 682 bp, Zea mays
  unsure (1)..(682): unsure at all n locations
  Clone ID: MRT4577_16502C.1
gccggccgggtccggaatcatttttgttttgctccttttcttttcgccttccttctttttcattccccgctgccgctgcggcgctgcctgcctctgcccctccccacctcgcctttttttccatttcttttttcgttttcccattttccgccgtggattcccatggtcaccaccacagtgaagtcccgaccgccgcatgcttccttcgccatgagcggcggccgccgccgctcttcgccggtggcgccttcctgctcctccgtccccgggtgttcgttggttgcgctatgctgcttgatcttggtgctcctttctttctccatgtcgtcgtccgcggtggcggcggaggattgcgttgaggatagtgacggcgctgatggcgacggttgctgtctcagcttccgggatgtgtgtgccgaccggagctccttctgcttctcgtcctcggtggctcagatgttgcttgcaagcgaggacgccgccgaggcgccggatttggagctgccaaggggctgggaaccgtcgtctctgccattgtccttcccgatgtccggcggcggaggcatggtaacttgctcttctgttgactcgtcgctcacacgggcgcgcgatggattgngacgaggtgacgacgctagagcgaggtatgacgtcgcgtcatgcaaggcgccgcttgtgcctg

SEQ ID NO: 71302 - DNA, 315 bp, Zea mays
  unsure (1)..(315): unsure at all n locations
  Clone ID: MRT4577_165030C.1
cgtgttttaaccctgtcttgtagaggccattgtatcaacccatcgttttaggtgccatccnncagaatacatatcagatgtactcgataatggtgccctcataacgccatgtgcttcctagaaataaacaatatattgattgagatccatctcganttgaaaaaaggaaacaaaaaaaaacaaccactaacgaaaacagcaccacagcaaaaattaaaacacacgtgaccggggaggtcttgccttgcgaccctaaagacaagaacccagttttccaggaacccaaagctgacgtatcctcgtcctaataaaccc

SEQ ID NO: 71303 - DNA, 419 bp, Zea mays
  Clone ID: MRT4577_165031C.1
aacgggcgggggcaaaaaaacacaaggccagacccagaaaaaaaaataacaatttttttttagggggccaaaaagacccccggaggggaatgggaaggcccaagaaaattacaaaaatttagggccgcccccaaaattccaaaaaaggaaacaaaggaatggccttctaaaaaaagggaaaaaacaaaaatggccagcaattttggaaaaaaaaaaaaaattcagggggggaggacccccccattcagggaaaaataacccccctgcggctcgggggaggcaatgctctgctggaaaagctgggctgagcggaaaacccccatgggttaaaaaaccttaaccttggaagcatctggggactccagggggggaaaaacccccgggtgggccaattccaaaaacggccagggaccctgggg

SEQ ID NO: 71304 - DNA, 618 bp, Zea mays
  Clone ID: MRT4577_165032C.1
atgggaaactccgcctcgcccgaccccagggctcgaactcaggctaagacccggaagacggcgaactccgctccgcccgaccccagggctcggactcgggctaagacccgggagacggcgaactccgctccgcccgaccccatggctcggactcgggctaagacccggaagatggcgaactccaccccgcccgaccccagggctcggactcgggctaagacccggaagacggcgaactccgctccgcccgaccccagggctcggactcgggctaagacccggaagacgacgaactccgctccgcccgaccccagggctcggactcgggctcagccccagaagacgacgaactccgcctcgcccgaccccagggctcggactccgccctggcctcggccgaacgatctccgcctcgcccgacccgatggttcggactcggtctcggcaacagaagacaaactcgacctcggcttcggaggagcccctacgtcgcccgacctagggcgcaggcccaccacgtcaacagggagagccatcatcatcctaccccgagccgactcgggtcacggagaacaagaccggcgtcccatctggccagctccgccagatgggcaatga

SEQ ID NO: 71305 - DNA, 402 bp, Zea mays
  Clone ID: MRT4577_165033C.1
atggagcctagcggagggacagctgtcggagcggttgagtccttgctgacgtcctcgtgcttccgttgggcgacatggaggctcctccgaagtcgaggtcgagtctatcttccatggccgaggccgagcccgagcccctgggtcgggcgaggcggaggtcgttcggcagaggccagggcggagtccgagccctggggtcgggcgaagcggagttcgtcgtcttccggggctgagcccgagttcgagccctgggtcgggcggagcggagtttgccgtcttccgggacttagcccgagtccgagccctgggtcgggcggagcggagttcgccgtcttccgggaattagcccgagtccgagccctgggttgggcggagcggagttcgccgtcttccgggacctag

SEQ ID NO: 71306 - DNA, 892 bp, Zea mays
  Clone ID: MRT4577_165034C.1
ggggtacccccaagactcctaatctcagctcgtaacccccatcagcacaaagctgcaaaggcctgatgggcgcgattcaggacaaggctccgtccactcaagggacacgatcccgcctcgcccgagcccagcctcgggcaaaggcagctgacctaggaggattcacgtctcgcccgagggtcccctcaagcaacggacgcaccttcggcttgcccgaggcccaggcttcatggagaagcaaccttggccagatcgccacgccaaccgaccgtatcgcaggagcatttaatgcaaggatcgactgacaccttattctgacgcgcgctcctcagtcgacagagccgaagtgaccgcagtcacttcgccgctccactgaccggcctgacaagaagacagcgccgcctgcgtcgctccgactgctgtgccactcgacagagtgaggctgacagcaggcaagtccggcctcgggcgccataggaaactccgcctcgcccgaccctagggctcggactcggcctcggctccggaagacgacgaactccacctcacccgactccagggctcggactcggcctcggctccggaagacgacgaactccgcctcgcccgaccccagggctcggactcgggctcggccccggaagacaacgaactccgcctcgcctgaccccagggctcggactcgggctcggccccggaagacgacgaactccgcctcgcccgaccctagggctcggacccagccttggcctcggacgacagtctctgcctcgcccgacccggggctcggactcgacctcgacctcggaagacaaactcgacctcgacctcggaggagcctccacctcgcccgacctagggctcggaccgaccacgtcacaaggggggccat

SEQ ID NO: 71307 - DNA, 415 bp, Zea mays
  Clone ID: MRT4577_165035C.1
cacgcgtccggttcctgcacttacgcacgcaccgggacaccagcaacccccaaagcgccactgtccagtgcgcgcgtcaagcttgcttagctagccgccatggcctccctcgccgccctctccgtgaagcccgaggccatcaagggtctcgccggcagctccatctccggaaggaagctcgccgaccacaggccgccggcccgatccatccacaggccccacgcagccgacgtggcggccaagtacggagacaagagcgactactttgacctcgacgacctcgacatcacacaccggacagcgggacctatactgatctgacgctccctggtcctacaacccgttacagagcaagttcttccacacgaccgctgctgcggacaccaagagaggcctgctgcacaagatgatgata

SEQ ID NO: 71308 - DNA, 804 bp, Zea mays
  Clone ID: MRT4577_165036C.1
atggagcgtgcggggcgccatcattacttgtttaccgaggcaagccagatgggacgccgccctgggttgggcgaggtggaggctcctccgaggttgaggtcgagtctgtcttccaaggccgaggtcgagtccgagcccctaggtcgggcgagacggagaccgtcggctgaggccagggctgagtccgagccctggggtcgggcgaagcggagttcgtcgtcttccggggctgagcccgagtccgagccctggggtcgggcgaagcggagttcgtcgtcttctggggctgagcccgagtccgagccctggggttgggcgaagcgaagttcgtcgtcttccggggctgagcccgagtccgagccctggggtcgggcgaagcggagttcgtcgtcttccggggctgagcccgagttggagccctgggtcgggcgaagcggagttcgtcgtcttccggggctgagcccgagtccgagccctggggtcgggcgaagcggagttcgtcgtcttccggggctgagcccgagtccgagccctggggtcgggcgaagcggagttcgtcgtcttccggggctaagcctgagtccgagccctggggtcgggcgaagcggagttcgtcgtcttccggggcggagcttcctatggcgctcgaggccggacttggctgttgtcagccgcactctgccgagtggcgcagcagtcggagcggcgcaggcggcgctgtccttttgtcaggccagtcagaggagcggcgaattgactgcggtcacttcggctctgttgactgaagggcgcgcgtcaggataa

SEQ ID NO: 71309 - DNA, 903 bp, Zea mays
  Clone ID: MRT4577_165037C.1
atgcaaccgagaaaggctggtccccttgcaaaaaagtgcgacgaaagcctccaagcgagtgctaacactcccttcgaggctcaggggctactgtcggggaccataattaggggtaccctcaagacgcctaattctcagctgagtgagtctgacaggcagtcaggccttgccaaaggcgccacggcgaactccgctccgcccgaccccagggctcggactcgggctaagacccggaagacggcgaactccgctccgcccgaccccagggctcggactcgggctaagacccggaagacggcgaactccgctccgcccgaccccagggctcggactcgggctaagacccggaagacggcgaactccgctccgcccgaccccagggctcggactcaggctaagacccggaagacgacgaaactccgcctcgcccgacccccgggctcggactccgccctaccctcggccgaacgacttccgcctcgcccgaccccatggctcgggctcggcctcggcaacagaggacagtctcaacctcggcttcggaggagcccccacgtcaccctgcctagggcacagacccgccacgtcaacaggaagcgccatcatcatcctaccccgaatcgactcgggtcacggagaacaagaccggcgtcccatccggccagctctgccggatgggcaatgatggcgctccacaagctctgtgacgacggcggcccccagctctcttatggaagcagggcgacgtcagcaaggattcgaccgctccaacagctgtccctccgccaggctccgtcgcacctccgacagccacgacatcatgccagcaaggtgccaagacctctccggctgccacattggcatgtacctagggcgctagctctctctccgctagacacgtag

SEQ ID NO: 71310 - DNA, 2340 bp, Zea mays
  Clone ID: MRT4577_165038C.1
atggctgttgatagcagtgaagtagaccgaattgagattatcaaggttgtgtctgagttcccaggtgtgtttccaacggacttcccaggtatggcactagagcggaatgctgagtttgttatagagtttcagactggaaccgcccctatctttaagagatcttactggacttccagacgagcgggggttccgcttagtactcggattcatgaggagtttgtgacggggtaaaatcgtccaatctcggccccttgggtcgcttctgtcggatatgcggggcatagaaagggcccaaaaaaagaaagaattcaaaaaagaaatctgaagagcagtggaattctgaagaggtaacctaatcgcatatcacacgacctgaggtgcccgctgaaagcagccctcttcttctctctgatagctatgcgcaaggtagagtatgcaaactacacgccatcaaaaatgattttgccgccatagtatgagctgtatgcaaagctaaggatggctgagagatggagaagcgcagctatattattgttttccttcctcacctgatacggggcgcttgtactcttgtagatcgaggcacacattctgcaatggaaatagctaacggctgcacgagaaatcgagggcctcattggtgcggcgtgatattatgagctgttctttcaagttttttcgaagtttgcgaaaccgctgaaaggttcgctaggcaacgaggttgaggtcaagtggtcccagaactgtcaagaggccctttgagcgttgatagagtagttgaaaacagcgacagtattagtcttgcctgatgtgcacaagcccttctcgttgaaggttcatgagcagaattatccaatccatgacctagagttggcagcagtggttcacacattgaagacctggaggcactatctgtatggacagaaatgtgatgtttacacagaccacaagagtctgaagtacatattcactcagtcagagctgaatatgaggcaaagaagatggttagagttgatcaaggactatgaattggagattcactaccatccaggcaaagtgaacgtagtggcggatgctctgagcaggaagagtcaagtcaatctgatggtcactcgtccgatgccttatgagttggccaaagagtttgacaggttgagtctcggatttctgaataattcgcgaggagtcacaattgagttggaacctaccctggagcgggaaatcaaagaagcgcagaagaatgatgagaagattagtgagatccgacgactgattctggaaggcaaaggcaaagattttcgggaggatgcagaaggtgtgatatggttcaaagaccacttgtgtgttcccaatgtccagtctattcgagaattgattctcaaggaagcccatgagacagcctattcgattcaccccggaagtgagaagatgtatcaggatctgaagaagaaattctggtggtacagaatgaagagggaaatcgcagagcatgtggcgatgtgtgatagttgtcggtggatcaagacggagcaccagagaccagctggcttgttgcaaccattgcaaattcctgagtggaaatgggatgaaatcggtatggacttcatagttggattgtgtcggcgtttcgaccccggggggtccctggaccgacgagtaaattgtcgtcgcgtgtcccagcccagatgggtcggcgcgagacggagcacaaaggggggaaagaaggagccaggcaaaagggggaacctgcggccttcgtgttgtcctgcgaccaggtcgggtgcgcttgcaccctgggtcgggcgaggcggaggctcctctgaggttgaggtcgagtctgtcttccgaggtcgaggtcgagtccgagccccgggtcgggcgaggcagagaccatcgtctgaggccaaggctgagtccgagccccggggtcggacgaggcggagttcgtcgtcttccggagccgaggccgagtccaagccctggggtcgggcgaggcggagttcatcgtcttccggagccgaggctgagtccgagccctggggtccggcgaggcggagttcgttgtcttccggagccgaggctgagtccgagccctggggtcgggcgaggcggagttcatcgtccgaggccgagacgggggccgagccctggggtcaggcgaggcggagcttcctatggcgcccgaggccggacttggctgctgtcagcctcactctgtcgagtggcacagcagtcggagcgacgcaggcggcgctgtcttcttgtcaggccggtcagtggagcggcgaagtgactgcggtcacttcggctctgtcgactgaagggtgcgcgtcaggataa

SEQ ID NO: 71311 - DNA, 477 bp, Zea mays
  Clone ID: MRT4577_165039C.1
atgtggaggctcctccgaggtcgaggtcgagtctgtcttccgaggccgaggtcgagtccgagcccttgggtcgggcgaggcggagaccgtcggctgaggccagggctgagtccgagccctggggtcgggcgaaacagagttcgtcgtcttccggggctgagcccgagtccgaaccctgggtcggcgagcgagttcccgtcttctggggctgagctcgagtccgagccctgggtcggcgagccagagttcgcgtcttccaggactgagcccgagtccgagccctgggtcgggcggagcggagttcgccgtcttccggggctgagcccgagccctgggttgggcgaagcggagtttcctatggtgcctgaggccgggcctgactgcctgtcagcctcactctgtcgagtggcacagcagtcggagcggcgcaggcggcgctgtccttctgtcaggccggtcggtggagcggcgaagtga

SEQ ID NO: 71312 - DNA, 518 bp, Zea mays
  Clone ID: MRT4577_16503C.1
aattcggcacgagggcagaagcttaaacactctcactccccaagaaccacatacttactgttgcccttaccattacaagcggattcggacttcttgatctccgccgatttcctccttctccgccagagtatatccgcgagcctgcgccgctgctcagcctatcattttctaatcccgactgacggcacttgctccgcctctgggaataggctgtgggggaaggaactggaatggtactcacaggagcaggtgctacgctagatacgcgcccacctggtggagtgtatctcacccatgctggaccagacccgcctctggcatcaacttcaagaccacaggattgatacccgacttaaacaattacctactataaatcctgtgccgccgagatggaaaatatattgaatgaagacactcaactgccctattactaacaaacattgagcgatcgacgaacattgccttgcgatcatcatcccatattaaagtaaaatctggactatggccatgcatagggt

SEQ ID NO: 71313 - DNA, 915 bp, Zea mays
  Clone ID: MRT4577_165040C.1
cctcgaggccggccgggccgggccggccggaaaaacgcttgttcaccctccctctctgcctgaccagctaggatcagcggaagcagcaatggtgatggcgtcgtcgagcgggctgaggagctgcagggcacgccgtccccggcgggcaggccacgtacctgggcgccccggtgccgtggggcacgctgccgaccatcctggtgatcgagttcgtggccatcgccttcgccgagcaccagcgcaccatggagaaggaccccgagaagaagaagtaccccggcggcgccttcgacccgctcggcttctccaaggaccccgccaagttcgaggagtacaagctcaaggagatcaagaacggccgcctcgccatgctggccttcgtcggcttctgcgtccagcagtcggcgtaccccggcaccggcccgctggagaacctcgcctcccacctcgccgacccgtggcacaacaacatcggcgacatcatcatccccagatcaatctccccttgagctcagctcagctgctggttgctgtttcctgtgtacgactaggccctgcctgtacaacgagcgacgacggtgacttcccgcccggaaattaaaccctcgtaatgtaaagcttatgttattaagtagcggctactcttgtagtcttgtctgtatcaaatataaactggtttgttagctaaaaaaaaaaaaaaaaaagcgcaaaaaaaaaaaaagcggccaaaaaaaaaaaaaaaagaaaaaaaaaaaaaaaaaaaaaaaaaaaaaaaaaaaaaaaaaaaaaaaaaaaaaaaaaaaaaaaaaacttggggccccgactgaagcaacaaagtaagcgcccgttcccaaaccccccatgtcctttaaaaacggaaatcccgtggttgtttaataaacgaacgtgaacggg

SEQ ID NO: 71314 - DNA, 537 bp, Zea mays
  Clone ID: MRT4577_165041C.1
tcaggcaccataggaagctccgcttcgcccgacccagggctcggacttgggctcagccccagaagacggcgaactccgctccgcccgacccagggctcggactcgggctaagccccggaagacggcgaactccgctccgcccgacccagggctcggactcgggctaagccccggaagacggcgaactccgctccgccgacccagggctcggactcgggctaagccccggaagacggcgaactccgctccgcccgacccagggctcggactcgggctcagcccctgaagacggcgaactccgctccgcccgacccagggcttggactcgggctcagcccctgaagacgacgaactctgcttcgcccgaccccagggctcggactcagccctggcctcagccgacggtctccgcctcgcccgacccaggggctcggactcgacctcggcctcggaagacagactcgacctcgacctcggaggagcctccacatcgcccaacctagggcgcggaccgaccacgtcaacaagaggcgccat

SEQ ID NO: 71315 - DNA, 561 bp, Zea mays
  Clone ID: MRT4577_165042C.1
aaacgccacttgttctccctccctctctgcctgaccagctaggatcagcggaagcagcaatggtgatggctcggcttctccaaggaccccgccaagttcgaggagtacaagctcaaggagatcaagaacggccgcctcgccatgctggccttcgggcttctgcgtccagcagtcggcgtaccccggcaccggcccgctggagaacctcgcctcccacctcgccgacccgtggcacaacaacatcggcgacatcatcatccccagatcaatctccccttgagctcagctcagctgctggttgctgtttcctgtgtacgactaggccctgcctgtacaacgagcgacgacggtgacttcccgcccggaaattaaaccctcgtaatgtaaagcttatgttattaagtagcggctactcttgtagtcttgtctgtatcaaatataaactggtttgttagctgaatcccaaggttatttctgagcctaaccaggggaaatttagctcaaaacggagaaaatacatacgagacctttggtaaaaaaaaaaaaaaaaaaggggcctac

SEQ ID NO: 71316 - DNA, 873 bp, Zea mays
  Clone ID: MRT4577_165043C.1
atggggagaagagcaacagtgtcatatgggccccacagccctgggttgggcgaggtggaggctcctccgaggtcgtggtcgagtctgtctttcgaggccgaggtcgagtccgagcccctgggtcgggcgaggcggagaccgtcggctgaggccagggctgagcccgagccctggggtcgggcgaagcggagttcgtcgtcttccggggctgagcccgagtcggagccctggggtcgggcgaagcggagttcatcgtcttccggggctgagcccgagtccgagccctggggtcgggcgaagcggagttcgtcgtcttgccgggtcctgagcccgagtctgagccctggggtcgggcgaagcggagttcgtcgtcttccggggctgagcccgagtccgagccctggggtcaggcggagcggagttcgtcgtctttcggggctgagcccgagttcgagccctggggtcgggcgaagaggagttcgtcgtcttccggggctgagcccgagtccgagccctggggtcgggcggagcggagttcgtcgtcttccggggctgagcccgagtccgagccctggggtcgggcgaagcggagttcgtcgtcttccgggactgagcccgtgtccgagccctggagtcgggcgaaagcggagtttcccatggcgcctagggccggacttggctgctgtcagcctcactctgtcgagtggcacagcagccagagcggcgcaggcggcgctgtcctcttgtcaggccggcctcctatctcttaagaaggtcatgaatgtaggattccaaggtgtgaaatcaatcttgtctcagagtagaaaaggtttcgtcctacagtcaacatttcctctgataccacttctgtaa

SEQ ID NO: 71317 - DNA, 355 bp, Zea mays
  Clone ID: MRT4577_165044C.1
cggctctcaaacgccacttgttctccctccctctctgcctgaccagctaggatctgcggaagcagcaatggtgatggcgtcgtcgagcgggctgaggagctgcagcgccgtgggcgtgcccagtcggcgtaccccggcaccggcccgctggagaacctcgcctcccacctcgccgacccgtggcacaacaacatcggcgacatcatcatccccagatcaatctccccttgagctcagctcagctgctggttgctgtttcctgtgtacgactaggccctgcctgtacaacgagcgacgacggtgacttcccgcccggaaattaaaccctcgtaatgtaaagcttatgttattaagt

SEQ ID NO: 71318 - DNA, 375 bp, Zea mays
  Clone ID: MRT4577_165045C.1
atggcgccacttgttgacgtggctggtctgcgccctaggttgggcgatgtggaagctcctccgaagccgaggtcgagtctttcttccgtggccgaggtcgagtccgagcccctggttcgggcgaggcggagaccgtcggctgaggccagggcggagtccgagccctggggtcgggcggaccggagttcgtcgtcttctggggctgagcccaagtccgagccctgggtcgggtggagtggagttcaccgtcttccggggcttagcccgagtccgagccctgggtcgggcggagctgagttcgtcgtcttccggggcttagcccgagtccgagccctgggtcgggcggagcggagttcgtcgtcttccggggcttag

SEQ ID NO: 71319 - DNA, 129 bp, Zea mays
  Clone ID: MRT4577_165046C.1
ttcaaattccaccagcaaatccccaaggggggcgagttcgagcgaccaggggtgatcccagcaagggcggtaagggtctggccaaaggcggtgccaagcgtcaccgcaaggtttttcacgacatcatcc

SEQ ID NO: 71320 - DNA, 743 bp, Zea mays
  Clone ID: MRT4577_165047C.1
cctcgagccggccgggataaatgtcacttgttctccctccctctctgcctgaccagctaggatcagcggaagcagcaatggtgatggcgtcgtcgagcgggctgaggagctgcagcgccctgcccacctcgacggctcctctcccggggacttcggcttcgatccgctgggcctcgcgaccgtgccggagaactccgagcggctcaaggagtcagaggtgtaccactgccgctgggccatgcttgccgtccccgggatcctggagccggaagctctggacctgggcaactgggtgaaggcgcaggagtgggcggacgtccccggcgggcaggccacgtacctgggtgccccggtgccgtggggcacgctgccgaccatcctggtgatcgagttcgtggccatcgccttcgccgagcaccagcgcaccatggagaaggaccccgagaagaagaagtaccccggcggcgccttcgacccgctcggcttctccaaggaccccgccaagttcgaggagtacaagctcaaggagatcaagaacggccgcctcgccatgctggccttcggcggcttctgcgtccagcagtcggtgtaccccggcaccggcccgctggagaacctctcctcccacctcgccgacccgtggcgcaacaacatcggcgacatcatcatccccagatcaatctctacttgagctcagctcagctgctggttgctgtgttctgtgtacgactaggccctgcctg

SEQ ID NO: 71321 - DNA, 723 bp, Zea mays
  Clone ID: MRT4577_165048C.1
cctcgaggccggccgggccgggaaaacgccacttgttctccctccctctctgcctgaccagctaggatcagcggaagcagcaatggtgatggcgtcgtcgagcgggctgaggagctgcagcgccgtgggcgtgcccagcctgctggcgccgtcgtcccggtccggccgcctggcgccgttctgcgccaacgccaccacctctggccgcgtcaccatgtccgcggagtggatgcccggccagccacgccctgcccacctcgacggctcctctcccgggtaagcaagcagaagcaggctagctagcgactgatcgagtgacaacggcgtgctctgctctccctgtctctctgacgagtgttgacatacagggacttcggcttcgatccgctgggcctcgcgaccgtgccggagaacttcgagcggttcaaggagtcagaggtgtaccactgccgctgggccatgcttgccgtccccgggatcctggtgccggaagctctgggcctgggcaactgggtgaaggcgcaggagtgggcggccgtccccggcgggcaggccacgtacctgggcgccccggtgccgtggggcacgctgccgaccatcctggtgatcgagttcgtggccatcgccttcgccgagcaccagcgcaccatggagaaggaccccgagaaaaagaagtaccccggcggcgccttcgaaccgctcggcttctccaaggaccccgcc

SEQ ID NO: 71322 - DNA, 1328 bp, Zea mays
  Clone ID: MRT4577_165049C.1
cattgggacctcgagccggccggggaaagggctggttggaatctaaagtgtggtagaaagaactacatatagttttttctaccacactttaggaaataactcagacgccacctgttcttccttcctctcctctctgcaacgcgtcgggaagcagctgccagccatggcaatggcgtcgtcgtcgagcgggctgaggagctgcagcgcattgggcgtgcccagcctgctggcgccgtcgacgtcgtcgtcgtcccggtccggccgcctgccgttctgcgcccacgccaccacctccggccgcgtcaccatgtccgcggagtggatgcccgggcagccccgccccgcccacctcgacggctcctcgccaggtgacttcggcttcgaccccctgggcctggccacggtgccggagaacttcgagcggttcaaggagtcggaggtgtaccactgccggtgggccatgctggccgtgccgggggtgctggtgccggaggcgctggggctgggcaactgggtgaaggcgcaggagtgggcggccgtccccggcgggcaggccacgtacctgggcgccccggtgccgtggggcacgctgccgaccatcctggcggtcgagttcgtggccatcgccttcgccgagcaccagcgcacaatggagaaggaccccgagaagaagaagtaccccggcggcgccttcgacccgctcggcttctccagggaccccgccaagctcgaggagtacaagctcaaggagatcaagaacggccgcctcgccatgctggccttcgtcggcttctgcgtccagcagtcggcgtacccgggcaccggtccgctcgagaaccttgccgcccacctcgccgacccctggcacaacaacatcggagacatcatcatccctagatcgatctccccttgacaattatattggttgattattacgactaggcactagggcactgcctgcctgcgtgcaggagcagtacaacgacgacgacggcgagtcggcgacttccctcccgcccggaaagctctcgtaatctaaaggaaaaggaaattggtaccatgttgtgcaattctagcatgcatgacagcaatcgcaagcttcttcctcagccactaacctctatgtacattttcagcgcaagatcattgtcgacagtagtatacataaaagtgtacacaatatactgaacaaacaaccaagacacaagtgaatgtaatttggcaaagtacagtaagatccatgcataaacaaacaccatatggcatgtcttaaaaaaaaaaaaaaaaaaaaaaaaaaaaaaagtaaaaaaaaaaaaaaaataatggtt

SEQ ID NO: 71323 - DNA, 365 bp, Zea mays
  Clone ID: MRT4577_16504C.1
ttattttatataatatataatttttttgggattgaggaaaaagcaatactactttgacaaaaatcatattttatcagtacaaaaacccacttagcagtttaacaaacaaaaaaaaaacttcccactggtaaaaataaaaaaagttcatctcagcaaactaacttaaggcccaatcatcaccaacacaaaaccatcaacattatcaccgagtaaaaactatacattcgcaaatacatatctgggcaaacaaatttgacgcacccttactcggagtcccaagaaaaaaacctccaataataatacgaaaaggaaaaaaatctccgacccctggggcacaaccagggaaatccccgacccggacacta

SEQ ID NO: 71324 - DNA, 304 bp, Zea mays
  Clone ID: MRT4577_165050C.1
cgcaaccctatcgtcctgtggcctgccaacgtatgcgcctaccggggggtcctgagaggtgatgggtgtgtgaactacgcgcgtcgtcacagggtcagcgaagcctctgcttcgccctctcaaagtagatcgctagcaataggactaagccccatgtggagggactgtgattgtggtatgggtcattgcacacaagacatgataagggcattctatacacattgacacggggtatacctatgtcaacgccagtttttgatttcctgtgaaaagccccaccaatgaccctctgcttgtcaggcac

SEQ ID NO: 71325 - DNA, 181 bp, Zea mays
  Clone ID: MRT4577_165051C.1
cgcgcaccacttgtgcgtactcgtctcacgttttgcgccaggggcaacactatttgcttaggggggcaaatggattctattatccgtcccctcgtcacccagtacgttctaagggatacactcctgctgcacaatctgatacagcgcagattttctagccgaggtgacagccccttctcgc

SEQ ID NO: 71326 - DNA, 1260 bp, Zea mays
  Clone ID: MRT4577_165052C.1
aaaaaaaaaaaaaaaaaaaaaaaaaaaaaaaaaaaaaaaaaaaaaaaaaaacgccacttgttctccctccctctctgcctgaccagctaggatcagcggaagcagcaatggtgatggcgtcgtcgagcgggctgaggagctgcagcgccgtgggcgtgcccagcctgctggcgccgtcgtcccggtccggccgcctggcgccgttctgcgccaacgccaccacctctggccgcgtcaccatgtccgcggagtggatgcccggccagccacgccctgcccacctcgacggctcctctcccggggacttcggcttcgatccgctgggcctcgcgaccgtgccggagaacttcgagcggttcaaggagtcagaggtgtaccactgccgctgggccatgcttgccgtccccgggatcctggtgccggaagctctgggcctgggcaactgggtgaaggcgcaggagtgggcggccgtccccggcgggcaggccacgtacctgggcgccccggtgccgtggggcacgctgccgaccatcctggtgatcgagttcgtggccatcgccttcgccgagcaccagcgcaccatggagaaggaccccgagaagaagaagtaccccggcggcgccttcgacccgctcggcttctccaaggaccccgccaagttcgaggagtacaagctcaaggagatcaagaacggccgcctcgccatgctggccttcgtcggcttctgcgtccagcagtcggcgtaccccggcaccggcccgctggagaacctcgcctcccacctcgccgacccgtggcacaacaacatcggcgacatcatcatccccagatcaatctccccttgagctcagctcagctgctggttgctgtttcctgtgtacgactaggccctgcctgtacaacgagcgacgacggtgacttcccgcccggaaattaaaccctcgtaatgtaaagcttatgttattaagtagcggctactcttgtagtcttgtctgtatcaaatataaactggtttgttagctgaatcccaaggttatttctgagcctaaccaggggaaatttagctcaaaacggagaaaatacatacgagacctttgataactacaaaaaaaaaaaaaacaagagctagacacgatgttttttttttaagattaaaaaaaaaaaaaaagggcggccgccaccgcggtggagccaaaagaaaatgttacaacttagcctagtttcaaaacgtaatccaaaagatctaattatgtagttttt

SEQ ID NO: 71327 - DNA, 275 bp, Zea mays
  Clone ID: MRT4577_165053C.1
actgtttcttaaggagagccagctaattgctgtcaggataagagtagacttctctcctcagtctgggagggagaactgttcattcgtgagtcagagtttgcatgaaattgaacagtattctgtttggaaccttccagtcttgttcaggtgtccccagctgttggtggctctgtgtctaggggacttttaatcaggagatgccctcaattactgatgtttttaagtcttaggaaggagattgaggaaagttagatttcgggaagttcaatttaggg

SEQ ID NO: 71328 - DNA, 347 bp, Zea mays
  Clone ID: MRT4577_165054C.1
ctctcatttttgttccgactcaaatcgattgcctgtggaacgcttattttgtgtgatttctggttttgtcgctgcactgtaaaagaaaaatacaacttacctgatccataaaagcggggggattggggtcatgtgttgtagaacattatcctttcacatactaccgcttaatcggagcttttgtttaaaaaacgctagacattgttaacccttccagagaaaaaagtatatgtgccacatatataatgcctcaaaacgccgctggacgggaccagcttatgattctttttaccttacaggggctcgccaaaaccggacttttttacaaatttggcgttcccaaggcc

SEQ ID NO: 71329 - DNA, 383 bp, Zea mays
  unsure (1)..(383): unsure at all n locations
  Clone ID: MRT4577_165055C.1
tcgcggtgcggcttcgcgggtcgcgcgccgtcggagctgcgttggcgtctggttgtgggtgggccgatgctcgtgggctgcgggtggggggctgtcgcggtggtggggcggatcgggatgggggtcggtggggtgggcgggatcgggggggtggggggcagcggggccctgcggaggggcgacgggggggctcggggcgtggacggccccttgctcngggccggtttcgtggcctacatgctctggtctgcccctgtgctcgggcggtggtcgcgccctgaggtctgggtgggggactccgagacccttctctttggtgagaaggagggtggtgtgtctggctgcggtggccctggggagattccctgggggtcggttggcgc

SEQ ID NO: 71330 - DNA, 799 bp, Zea mays
  Clone ID: MRT4577_165056C.1
cattgggtacctcgaggccggccgggacagaatcaacgacgacttccgtggtcctccagcgaagcaggttattactgttttctggttcagtttctcaactctgttctttgcccacagagaggacacgaggagcacgctgggccgcgtcgtggtcatcatctggctgttcgtagtcctgatcatccagtccagctacaccgcgagcctgacctccatcctcaccgtgcagcagctgacgtccccgatcaagggcatcgacagcctgatcgccagcgacgagcccatcgggttccaggttgggtccttcgcggagagctacctggtgcacgagctgggcgtctccccgtccaggctcaaggcgctcggcaccccggacgagtacaagaacgcgctagagctcgggcctcgcaagggaggcgtcgtggccatcgtcgacgagcgcccgtacgtcgaggtcttcctggtgcagcacgacaagttcgccatcgtgggcgcggagttcaccaagagcggctggggcttcgcgttcccgcgtgactcgtctctggccgtggacctgtcgacggcgatcctggcgctgtcggagaacggcgacctgcagaggatccacgacaagtggctgtcgaacgggccgtcgccccagtccacgaccgacctggagccggaacggctgcgggtgcagagcttctcggcgctgttccttctctgcggcgcggcgtgcctcgcggcgctggccatccacggctgcatcctggcccggcagtactccctccacgtggcgtcccagccgcccggacgc

SEQ ID NO: 71331 - DNA, 1589 bp, Zea mays
  unsure (1)..(1589): unsure at all n locations
  Clone ID: MRT4577_165057C.1
cagagccccgagcaatcccttctcgcccttttcacttttcagatccagccagccagccagccatcccactccgcaccgcattcctcgcagtggcagagcttgcagcggtggtctcttccccttcctcctgtctcctcctcgctcgatctcctctcccaaacagcgagaagcggatggggagggcgccgtgctgcgagaaggtggggctgaagaaggggaggtggaccaaggaggaggacgaggtcctggcgaggtacatcaaggagcacggggaaggatcgtggaggtcactgcccaagaatgccgggctgctgcggtgcgggaagagctgcaggctgcggtggatcaactacctgagggcggggctcaagagggggaacatctcggaggaggaggaggacatgatcatcaagctccacgccacgcttggcaacaggtggtccctgatcgccggtcacttgcccggtcgaacagacaacgagatcaaaaactactggaactcgcacctgagcaggcgggcggccgacttccgcgacggcgtcgtcgtcgacatcgacctcagcaagctgcccggcggcgggaaacggcgcggcggccgggccagccggggcgccgtcgtggccgcggccaaggagaagaaggccaaggagaaggacgacaggggcaatagcaaggtcgcagaagcggagcagcagctcagggacacggaggacgacgacggcggcagcgtctccacgccgaggcctcagtctgatgactgcggcaccgcccagagcgaagaggagcaagcgcaggccagcgccagcgacctgacatccgatgggcatgggcccgaggaggaggaggaggaggacccgctggctctgagcgaggagatggtgagtgcgcttctggccccggaaagcccaaagctggaggtgggccccgatggctcgtgcatggacagctacagtggccctccgtcaggggaaagcggctgtgggtccagtgggccttctggcgacgtggcccaggacctggacctagacgacgacaaggccatcatggactgggacttgatggggctggacatctcgaccgccggtgacatgtgggaccagctggtgtgggactacgacgaaacgttggtcacggaaccggaaggaggtgaggaagggcaccagcagcaggacgatgtcatgtcagacctcttcttcctggacaatctctaggaggtgcgaggatagcatgggcatggctgccgtgatgctttatgctttttaatttgatccggtacttgtaggtttttgggtgtgttcagttcagagatgagtggcggtgtcagagacgagataaggggagtgctccagtgacatctttgtttgctggccggatctcacgaacccgtagaatggcaagaatgtagaaaaataagcacgcaatatcacttggaaacctttcatcagtagagcctgtctaacatctacagacggagaaatgcaaaaaaaaaaaaaggttgctgggattgccatagtctgctaatccttaggtcttttcttttgacaaacacgattgctttattaattgattcaagtcatgattacnnanca

SEQ ID NO: 71332 - DNA, 309 bp, Zea mays
  Clone ID: MRT4577_165058C.1
ggccgcttttttttttttttttttcgcataataatcaatttctgataaagagaagtgctagcgttaattctggctgaagttcaatgctgacagagaaaggtatgtactctataggggaattttttgcttttgccatataacaaattctaggaactttttgcaaaattataaccattttatcaggatgttgtgttgacactaaccattctcgcccttcttggtaagggtgtccacttcagccgttactgacgaactgccaccgttctttcccccggccggcctcgaggaacccaatcgccctatggagtg

SEQ ID NO: 71333 - DNA, 3056 bp, Zea mays
  Clone ID: MRT4577_165059C.1
atgaagtccatgctccaggtttggggcatcttctgctgtgtgtgttcctgtgcacttggacaaaatacttctgcgcggcccagtgtcgtgaacgttggagctctcttcacgttccactcgacgattgggagagccgccaaggtggccatcgctgctgcggtcaatgacatcaacagagatccaagcgttcttcaggggacgaagctggttgttcagatgcaagataccaactacagcggtttcatcagcattgttcaagccttgcaattcatggagaaagacacgatcgcgatcatcgggccacagtcttcagtcgttgcgcacgtcatatcccacgtcgcaaatgaactccaggtgcctctgatgtccttcgctgcaaccgatccgactctgacaccgcttcagtatcctttctttgtgcgcactgtccacagcgaccagttccagatggcttccgtggctgcgatagttgattactacgggtggaagatggtgacagccgtgtacatcgatgacgactacggaagaaacggcgtgtcctccttagacgacgagcttgccaagaggagactgaagatcctgtacaaagctgcgatcaggccaggggcaagaaagagcgagatggccgccgtgctggtcaaggctgcgatgatggagtcccgggttttcgtgctgcacgcgcgtgacgattctggaatcgacgtgttctcgctggcgtacaatctgagcatgacatccggtggatacgtgtggatcgcgacagattggctcaccgcgtgcctcgactcagctcctcgtcttggaactggattactgaacacgatgcagggtgttctcacgttgcgtcagcacacggagaacaccagtaggaagaaggcgttggtttcgcgatggagtgaagtggcgaaggaggaggaggaggaggacggcggcagcttgcccaatacctatggcctctatgcttatgacactgtctggatgcttgcccatgggttggatgcgtttttcaacagtggcggaaacatttccttctctccagaccccagactgcgtgcggttgtaggaggagctctgaatctggacgcactgagcgtcttcgacgaggggacgctgttgctagaaagaatccgcaacgtgagtttcatgggtgcgactggccctgtaaagttggactcagatggtaaccttatccagcctgcatatgacattgtaaacgtagtagggtctggtttgaggacgattggctattggtccaactactctgggctgtccgttgtgtcccctgagactctgtacaagaaaccattcaatgtcagtgcaaaccaggagctccacgctgccatctggccaggcgagactgtaacgaggccccggggatgggtgttccctaacaacgggaatgagctgaggattggagttcccgacaggtacccagtcacatataggtttgtgccttttggcaatggccgtgagaatccaagctacacggaacttatcggtcgaattctgacgaatgaatttgatgctgttgttggggatgtagctattgtcacgaatcggacaaaagttgttgatttcacccagccatacgttgcttctggcctcgtcatacttaccgccgtcaagacacagagctcggatgcatgggctttcctgcagccgtttaccatcagaatgtggtctgtgacaggggtgttctttctggtcgtaggagcagtgatttggttgctcgagcacagaatcaacgacgacttccgtggtcctccagcgaagcaggttattactgttttctggttcagtttctcaactctgttctttgcccacagacaaaacttggcaaacgtgctcaggagatcttggacgattttgcacagagaggacacgaggagcacgctgggccgcgtcgtggtcatcatctggctgttcgtagtcctgatcatccagtccagctacaccgcgagcctgacctccatcctcaccgtgcagcagctgacgtccccgatcaagggcatcgacagcctgatcgccagcgacgagcccatcgggttccaggttgggtccttcgcggagagctacctggtgcacgagctgggcgtctccccgtccaggctcaaggcgctcggcaccccggacgagtacaagaacgcgctagagctcgggcctcgcaagggaggcgtcgtggccatcgtcgacgagcgcccgtacgtcgaggtcttcctggtgcagcacgacaagttcgccatcgtgggcgcggagttcaccaagagcggctggggcttcgcgttcccgcgtgactcgcctctggccgtggacctgtcgacggcgatcctggcgctgtcggagaacggcgacctgcagaggatccacgacaagtggctgtcgaacgggccgtcgccccagtccacgaccgacctggagccggaacggctgcgggtgcagagcttctcggcgctgttcctcctctgcggcgcggcgtgcctcgcggcgctggccatccacggctgcatcctggcccggcagtactccctccacgtggcgtcccagccgccggacgcggtggccacgggggccgacggcgccatccgccgctccagccgcagcagcatccggtcgttcctgtccttcgcggaccgccgggaggcgcagtgcccgagggggagctgcaaggaccccgccgcggcgctgggagggtcctccagcagcggcgtcagcagcttcacgtcaagcaacgccagcgtatcgaggtagccgcgtccgatggaccggcatacgcacggcacgatacgtcgatgcctcagctcagatagtccacactactgtacgtgcgcgtaggccgtagatgccggcgtgtaaatggtcgtatcgtagagacattgattcgattttgctaccgtctggggtccatggtgcagtgaatttggatccccgtgtgctgaggaattgtatacgtacgagtaaagcagcgcgcatggggggcaggcgggcagggcagtttcgcggccttgcagttgcagcacacgttgcggagattaatgtccgatcctaggcatttgatt

SEQ ID NO: 71334 - DNA, 613 bp, Zea mays
  Clone ID: MRT4577_16505C.1
ctgcgcatttcgaagcccaccgaattccctgcgattcctctcccctcgcctcctcgtctccaaggggggaaggtagggccgaaccggtgcagcgcctgcaggaagagggttgggctcacgggattcaactgccggtgtgggaacttgtactgcgcgctccaccgctactccgacaagcacgactgcaagttcgactaccggactgctgccagggacgccattgccaaggctaatccggtggtgaaggcagacaagctcgacaagatctagggggggttccctacggttgggtgtcaggaagattgtaaaccgcggtaactcgtcatgcggaactgctgccttgccccccgcgcctttctcttccatgtttgctgctacaatcttgttgttgggcattgcagtgcacggtgcacacttgtgtagcccgcctcgagaattctcctgcctctgcatctggtcagttcaaaaatgatttgcatgttgggtatgttgtgtaagctctatttatggtggtctcggtgagacgggtatttggcttcgcagttatctagctatgtgatgtactgttgtcttgtccctgggtattatatggtacactgcagccagtaataag

SEQ ID NO: 71335 - DNA, 220 bp, Zea mays
  Clone ID: MRT4577_165060C.1
gcggccgcgcctgttttttttatatttcgtttcagggttcggtttctgtgaggttctcctgggttcgggccccaccaaaaacccccatctatttccctgaggactaaactaaaaaaaacccccggcggggggaaaacacacccaggaacccgcaacctttctttgaagacggggggcccgcctagacccaaggaaaaaccattcattacaacctgaaaca

SEQ ID NO: 71336 - DNA, 229 bp, Zea mays
  Clone ID: MRT4577_165061C.1
aagaagcgtctatgagatgtttgcattcagatttaggatgaacgcactcgtctatcaagaccaggatatcgtacaccaaaacactactactcgtcctagctcatgtggatgcctgactgtttacagggatctatacagcatgtgatcccgtactatcgccgatcttgtaggagttcttgtattcgactgattgcacttgattgattatctctcatctactgatgctgct

SEQ ID NO: 71337 - DNA, 418 bp, Zea mays
  Clone ID: MRT4577_165062C.1
aaaaccgccaattgggtccaaaaaaaaacaaacccaagggggcattttcaaacaaatttcccttaaaatttttaggcccccctaaaatttaactgtttccttttgaaattttactaggcttcccatttatttttgcccacgtgctggaggacccaattttttggggacaaaaaaagaacttttacctttcttcacatgggtaatgggccaaggaataaccccccccattgccttattttgggccccaatttttttaaaggggctaggcccccccctttttttttttttgccaagtttatttttttaaagggctttaaaaaaaaccccccattttttggggccaaggtttgccccaaaaattttttttggggtttttggagacaataactttcctttgggcaaaatttttctttttttt

SEQ ID NO: 71338 - DNA, 401 bp, Zea mays
  Clone ID: MRT4577_165063C.1
ggtcctttggctggagcacacgggcatattattaggccacattggcgcaccatatgttcatctttgttacgcagctgacatgccaccatattacgacgagaggtgtggccacaggaaattagatccgacacacctgaacggattcgagaccacagtgtgaagaacccagattgcagaaaggtgcatatacaagtcggattgaggagttacgaacattgcactatacctagagactgatgtaaggagcatccgactggctcacctgattgaatcatcacatctcaaagggatcaggaggtccgactggagctagctgacaacatcatgatgaccaagcacgatatccacttctgcatcgaagaacctagagtacaagacagactggagcagctctagatagg

SEQ ID NO: 71339 - DNA, 210 bp, Zea mays
  Clone ID: MRT4577_165064C.1
ttcttttaaagaactagtgtattaattaatggtgttttaacacctcgactaggggcatgatttaatgtttccaatcataccttttaaatgccatgcattaactagcattgagcaaatttttaagttcattctcgtaaccctttactcccacttacttatactttattatgtcttaatatcatttattaccttaataattaattctttgtc

SEQ ID NO: 71340 - DNA, 583 bp, Zea mays
  Clone ID: MRT4577_165065C.1
caaacagcagtagccatgcgtgtttccgttctcgccgattgcctcaacaacatccacaacgctgagaagcgtggaaagcgtcaagtgcttatccgtccttcctccaaggttatcgtccgattccttaccgtcatgcaaaagcacggctacgttgaggagttcgaggagatcgacgaccaccgatccggcaagatcgtcgtccaactcaacggtcgcatcaacaagaccggagtcatctctccccgattcaacattcaattgtctcaaattgaaaactgggtcaacttgttgctccccgcccgttcgttcggttacatcatcttgaccacctcggctggtatcatggaccacgaggaggctcgtcgcaagcacgttgccggaaagatcctcggattcgtctactaaactagtcaaataccgttggttgggatcctttcttgggggtatctgtgctcacactgaggggtcaaaagggattcacatcgacactcggggagccgtcgaattttgcgtttcctgtgaaaagcatctttctttggcgatttcccgcccactctccaaaaaaaaaaaaaaaaaagcggcc

SEQ ID NO: 71341 - DNA, 359 bp, Zea mays
  Clone ID: MRT4577_165066C.1
aaaaaaaaaaaaaaaaaaaaaaaaaaaaaaaaaaaaaaaaaaaaaaaaaaaaaaagagagggaaaaaaaaaaattataaaaaaaaaaaaaaacaaaaaaaaaaaaaaaaaaaaaaaaagaaaaaccaagggggggcttttttaaaagtccaaatttaacccacctttttttgaaagtttataatttttttatagggcacccaaaataaaatcaaggggccctgttttaaaaacgttgtactggaaaaacccctgcctaacccaaattaaatcgtttgggaaaaaatccttttttgcccagtggttgaaaaagaaaaaaggccagaaccattggcttttcaaaaattatgcaaatcttaa

SEQ ID NO: 71342 - DNA, 495 bp, Zea mays
  unsure (1)..(495): unsure at all n locations
  Clone ID: MRT4577_165067C.1
ccgtccgcaactcattgnnacaaacaaagtgnnaactttgtagnaatcaatttataccctttctcagatcctcggctcaagcatgccttgcaaatttattgtattaacgatacataaaggattgaattgtattttaaaatcttcatgacagcttctatttttaaccatgttgagaagtacccttgctccttaaggactacaccagcgaggtaattatgtcttacattatcatgttttccgcacgagtatgagtaagacgccattcgtcgactatgcgctatgtttttattattttttatttcctccctgaaactttctttttccgataaatttgaataggatattattctcgtatataataatttttatcccttgtcatatgaccctaatgtgccaacatggtacacttatccatgctaatgttccataagctgtagtggttgttcatcactaaatttatttatttacgaattgtagtcatgcaataaagcttgc

SEQ ID NO: 71343 - DNA, 514 bp, Zea mays
  unsure (1)..(514): unsure at all n locations
  Clone ID: MRT4577_165068C.1
anactccactctaaaagctccgtcccttggcagcagcaacaagctactagctatgtgtgtttagagcgagcgagggaaaaagaaaactctaagatatactccaacatcttcgtttgattaacccgcccagtaaagccatgggtactaattatagagcggtcaataacttcctgccgccgcctgcaatttctctagtactcctcgtgtgcatcgctagccgctcgtccttgggtgccgctgaaactgacgttgagcagaagcgctcgtcagtccctttgatgtttgtgttcggtgattcgctggtcgatgtcggaaacccccgtgctgcatctccgtacggcatcgacttcccttctggcacccccggcgccgtctcaggacggttcacgaatggctacaaccttgccgatttagtcgcgcgacgtctggggttcaagatgagtccacctgcttacctctcgttgacaccggtatcaaagtttgacctgttcacgtgccgaattggtgccaatta

SEQ ID NO: 71344 - DNA, 1584 bp, Zea mays
  Clone ID: MRT4577_165069C.1
atgacacctcttgcacgcgttgcctcacctacggtatcctttgagagcggctcgaccggccgtccttttttttacatagaaatggtgtttagcgtcattagtcacagaaaggctggaaatgtttaggaatactggaaaccaaagttgggcagcaacatggttcttcagttcacacagacagatctgcactgcactagctagaggactaggcctaggggaaaagccccaacaacacctatagttccaacaaaaatccgaagcaaccagtatcagagatcccttgacaaaactaatctggccagagccaagcaggaaccgccacagattcacgattctgagtcttctccgtcttcctcagaacgctgcggcgggacgtggtggacgaagtcctccttggagaggcaggactccgggacaacggtgccgacgctcctcccgaacgcctggcggcagtaggacgacgcctcgctcccgtccacctgggtcaggttcacgttgacgagcgacaggcgcctgcacggccgggcgtcgctgcacgagaacgtgaccgcgcgctccgacgccgacgtgcccgtgatgtcgatgtagttgatcttctccacctgcactgccgccgtcgcggtcgcggccagtgctactgcttcaggcgatgaaggtggcggatcgtcggaggagatcccctggtcgacgatgatggggttggtgacgttcctcatgacgatgctctcgaacttcaccttgcgagcgaagccgccgccgccgccgccgtcctcggtcgtcctcacgcgcacgccgttctcggcgtttgagatgaacaaggtgtcgactttgatcttctccacgtaatcgacggagctgtttactcctaaggttccaatgctgataccatggccaggtccgcatgagatggctcttagacggacatccgtgcagttgcccactatggagacgcagtcatcacctgtggagatgaggttatccatgacgtgaacattgtacgagtcaacgaggtgaatgcccttggtgtcgacgctgtgctccggcgaggtcaccctgaggtaattcgcctcgacgtcggagctccgggtgaacgtcaggtggtacgactggctgttctgcaaggtgatgcccttcacgctcggacgcgtgggttcctcgaagtgattagccttgggagcgggctgcgtgcgcgcaagcgactgcgcccaccactgctgccctctgccgtcgatgatgcccccgccggtgaccgtgaggtcccgaaccttgtggaagtggagccactggtcgctctggccttgcccccagtcctgggggctctccggcgcgaggatgtccccggaaatgagcagcttgatctcgctcctgcagggtccggcgagcgtgagcggccagatccggaatgtcccgccggcgggcacgttgaggatgacgttgtccgcggcggtgcacgcggccgtccacgcgccggccaaggccttggtgtcgtccgcgacgccgtccccgacggcgccgaagtcgtagagcgtgagcaggatacgggactcggcggcgtccggccggacgcgtggctcgaaccccgga

SEQ ID NO: 71345 - DNA, 1678 bp, Zea mays
  unsure (1)..(1678): unsure at all n locations
  Clone ID: MRT4577_16506C.1
ttgtccctcgccagttgcgaaaaccctagccgccgccagaccattcgtttctcgcgagccatcgcttctgtaattctcaggcaccccgctcgatctcatcctaatcggtgtgattttcgtcttcaccgtcaacccacccctccacttactctgattcgcactttgttggcaggcatccggaagaaatggccaagtcgaagaaccacacggcgcacaaccagtcgttcaaggcgcacaagaacggcattaagaaacccaagcgccaccgccagacctccaccaaggggatggaccccaagttcctgaggaacctgaggtattctaggaagggcaacaaaaagagtggtgaggctgaagctgaggagtaggaaggaaagcatggctttgtttcctctgtttttagctcagttccacctttaggacctggggttttgctaaagatggaacttaagtggtgttactgtatgatggcaaggaccttttgctgccgaaggttatgttttgaagttcatgctaccttttaaaaacctcgtgccgaattcggcacgaggctcgtctccccctaggggatcgtcggagaggaatcgcaaagagggccgtctcatccgagttaaggaagccatggagcacaaggaggctgggtgccaggcccccgagggacccatcctctgcatcaataactgtggcttcttcggcagcgcggcgaccatgaacatgtgctccaaaggggggaaggtagggccgaaccggtgcagcgcctgcaggaagagggttggacttacgggattcaactgccggtgtgggaacttgtactgcgcactccaccgctactccgacaagcacgactgcaagttcgactaccggactgctgccagggacgccattgccaaggctaatccggtggtgaaggcagacaagctcgacaagatctagggggggttccctacggttgggtatcaggaagattgtaaaccgcggtaactcgtcatgcggaactgctgccttgccccccgcgcctttctcttccatgtttgctgctacaatcttgttgttgggcattgcagtgcacggtgcacacttgtgtagcccgcctcgagaattcctgcctctgcatctggtcagttctaaaatgatttgcatgttggctatgttgtgtaagctctatttatggtggtctcgctgagacgggtatttggcttcgcagttatctagctatgtgatgtactgttgtcttgtccctgggtattatatggtacactgcagccagtaatagtaatctgcaactgtgcgttaaatggtccgtcgttttcctatacaaagtatctcttgtttgcacataaaatattataaagctgggaagatggagcaaaaaaaaaaaaaaaaaaaaaaaaaaaaaaaaaaaaaaaaaaaaaaaaaaaaaaaaaaaaaaaaaaaaaaaaaaaaaaaaaaaaaaaaaaaaaaaaaaaaaaaaaaaaaaaaaaaaaaaaaaaaaaaaaaaaaaaaaaaaaaaaaaaaaaaaaaaaaaaaaaaaancccccccccccnnncccncccgaaaaacaacacttttttttttttaaccccccccgttcccaaaaattggggggggaggggggtgttgtccggcacaaaaaaaaaccccccggggtggtttttaaaaagtttttttgggggaaaa

SEQ ID NO: 71346 - DNA, 423 bp, Zea mays
  Clone ID: MRT4577_165070C.1
cccacgcgtccgcccacgcgtccgcggacgcgtccgcccacgcgtccgcaaacagagctgcaactctaaaagcatccgtcccttggcagcagcaacaagctactagctatgtgtgtttagagcgagcgagggaaaaaagaaaacatctaagatatactccaacatcttcgtttgattaacccgcccagtaaagccatgggtactaattatagagcggtcatttctctagtactcctcgtgtgcatcgctagccgctcgtccttgggtgccgctgaaactgacgttgagcagaagcgctcgtcagtccctttgatgtttgtgttcggtgattcgctggtcgatgtcggaaacaataacttcctgccgccgtctgcaccccgtgctgcatctccgtacggcatcgacttcccttctggcaccccc

SEQ ID NO: 71347 - DNA, 183 bp, Zea mays
  Clone ID: MRT4577_165071C.1
gcggaaataaaacgcctccttgaaacatctattttcaccatttgtatttaaacaaaaacagcgggggtaactgaactacaaagcggggggacttacttcttgatcaacatgccgtggccctcttatccaaatatgactctttttaaggcttgctctagagtcaataaaaaagcctacgttttt

SEQ ID NO: 71348 - DNA, 330 bp, Zea mays
  Clone ID: MRT4577_165072C.1
atgggtgttacaaaggcagaggatccgctagacgccgatgtgtggctaagggctgtggagtccaagtttcccctcctcacgagagcttgccctgatgacaccaagactcgcttcgccgcacagcagcttcgtggacctgttaggacatggtgggaccatttccgcaccatgttacctgttggccatgaggtgacatgggaggaattcaagacggctttcagggaacaccatattccagcagggattctggatcgcaacctgaatgagtttctggcattaactcagggaacccgcactgtgttgcagtatgcccaggccttcaatgactag

SEQ ID NO: 71349 - DNA, 624 bp, Zea mays
  Clone ID: MRT4577_165074C.1
gtgcggcgctcgaggcggccggttccggactccaagccaacaacagagctccaactctgaattctttcgtcccttggcagcagcaacaagctactagctatgtgtgtttagagcgagcgaggggaaaaaaaagaaaacatctaagatatactccatcatcttcgtttgattaacccgcccagtaaagccatgggtactaatgatagagcggtcatttctctagtactcctcgtgtgcatcgctagccgctcgtccttgggtgccgctgaaactgacgttgagcagaagcgctcgtcagtcccgttgatgtttgtgttcggtgattcgctggtcgatgtcggaaacaataacttcctgccgccgcctgcaccccgtgctgcatctccgtacggcatcgacttccctgctggcacccccggcgccgtctcaggacggttcacgaatggctacaaccttgccgatttagtcggtatatacatatatatatttactacatgaatttatatatctatatgcatgcgcatgtttcttttttgtcatggatatggatgttctttacaaatgctaatgaaactgcactctggctgttcaaatcctgaaaaaaaaaaaaaaaaaaggccccta

SEQ ID NO: 71350 - DNA, 173 bp, Zea mays
  Clone ID: MRT4577_165075C.1
aagccgtcggagaaaacaaactatgcgaactccactacctccaacttaccaccatgggttccaaaaaatgaggccggctttgcgctctttgcccttttagggagcgcacaaaaggcgtcaatatttcaccagggttaactggttctaatggccatatttcacaagttctctcc

SEQ ID NO: 71351 - DNA, 147 bp, Zea mays
  Clone ID: MRT4577_165076C.1
cccacgcgtccggttttgccatttgccaacccaactcccgattcccgaagcccatttcgtcgtctctcgctccctcggtccttccttcacccatctcacccgcgacccgcccctttcccctaagccatctccttcctcctcacctcg

SEQ ID NO: 71352 - DNA, 421 bp, Zea mays
  Clone ID: MRT4577_165078C.1
ccggccgggaactgtcactcgcttattaatcagttattttcctttttactatctttaattcactatgaagtttttcagtactctcagcaccctcgcggtggctctcatgatgactggtgaggccgtggccggcacctacaagagtttcagcatgggcgccaacagggctgatggtgtctgcaagtgggaggccgaccggaagaaggatttccaggccatcaagagctggaacaagggtttcaacgctgttcgtctgtactctgcctctgactgcaacacactcgtcaaggccgtccccgctgccaaggccaccggcatgaagatccttgtcggcatctggtccaccgacgatgctcactttgggcgtgataacgccgccctcctccaggccatccagcagcacggcactggctggatcgcc

SEQ ID NO: 71353 - DNA, 175 bp, Zea mays
  Clone ID: MRT4577_165079C.1
ccagtgcagctccttctctctgtctacccgtcgccgctgctgccatgggacgtagtccgtcagcccagccctctcggagaatcaagtggtgtctgctcgcgaggctggagtgctagctcggtgacgagatcgccgcgctcgatcgcctcgacccggacgacatcgaggcgctctg

SEQ ID NO: 71354 - DNA, 459 bp, Zea mays
  Clone ID: MRT4577_16507C.1
cccccccggcggccgggccgatgtgtacctccgggcgggctgggcgggttcatttcgaagcccaccgaattgcctgcgattcctctcccctcgcctcctcgtctgcccctaggggatcggcggagaggaatcgcaaagaggggcggctcatccgagttaaggaagccatggaggacaaggagggtgggggccaggcccccgagggacccatcctctgcatgaataactgtggcttctgcggcagcgcggcgaccatgaacatgtgctctaagtgccacaaggagatgataacgaagcaggatcaggtcaagctgggtgcctcctctatcgacagcatcgtgaacgggagcgacgccggtatggaggcgggtgatgctggcacgaacacgggaggaggtgctgcccaagtcgagttggagaccaggaacgtgcaggaggccgctgatgttgccggagcca

SEQ ID NO: 71355 - DNA, 744 bp, Zea mays
  unsure (1)..(744): unsure at all n locations
  Clone ID: MRT4577_165080C.1
ctgcttctcccaccaccttggccgccccacctaccgccgaatcgcctcctctgcgccgctgcgctcccccctctggtggccccgccaagcgccatccctctttgccgcccgcgccatgtcagggtccgccggtagccccccgtacgccgccgagcttgcagccgccaagaaggccgtcgcccttgccgcccgcctatgccagactgtacaacaggaaattctgcaatcagatattcagtccaaggcggataaaagtcctgtgacagtagctgactatggatctcaagtattggtaagtctcgtgttaaatatggaagtaacttctggttcattttctatggtggccgaagaggactcagaagacttgagaaaggatagtgctgaagaaattctggaacatattactgatcttgtaaatgaaactctcgctgaggatggttcatacaacattactttatctaaggaaggtatcctctctgcaattgatactgggaagtctgaaggaggtccatctggccgacattgggttctggatccaattgatgggactaaaggtttcttgagaggaggccaatatgcaatcgcactggcactgcttgatgagggcaaagttgttttgngcgtgttgggatgtccaaatcttcctttgacatcaataagcaacctcaatggtagctcatcaggagatcaaacaggggnccctcttttcagctacaattgggttgtggtggctgaagtagagtc

SEQ ID NO: 71356 - DNA, 3114 bp, Zea mays
  Clone ID: MRT4577_165081C.1
ctattttcgagaagaccatgaaaccaacgaagtacccaaaaactgacaagtcccagaagtagacttgcgctccaaaaggcaacccgcaaaatcagcatcagaataaccgcacaaggacggaacagacgatgaggagtaccacagaccaaattcgggagtgaaacgtaggtacctcataatccgtttcatagccattctgtgagatgtgcgtggggaagcctggaaatgagcgcacaaacatattgcgaagtgtatgtccggcctcgtcgcagtcaagtacaggagagagccaatcatgctcttgtactccttttggtccacgggttcgccatcctcatcagtgtcaagtgtcgtcgaggtggacatgggcgtcgaaagaggcttgccctcgcccatgtcgaacttcttcaggatgtcctttgtatacttgccttgatgtacaaaggtcccgtcttgagtctgcttgatttgcaacccaagaaagaaattcagctcgcccatcatgctcatctctaattccctgctcataagatctgaaaatctagacacaagagcattagaagaaccaccaaagatgatatcatccacgtaaatctggactaagagggtgtcattattatgcttgaggagaaaaagaattttgtccacagagcccattttaaaacccttagaaagtagaaaagatttcaaacgctcataccaggctctaggggcttgtttcaaaccatacaaagctttttggagtttaaaaacatggtttggaaacttggaaatctcaaaaccagggggctgcttaacatatacctcttcctctatatacccatttaaaaaggcacttttgacatccatttgaaaaagcttaaaaccctttgaagcagcaaaggctaaaaggatcctaatggcttctaaacgggcaacaggggcaaatgtctcctcataatcaattccctctttttggcaatacccttgggcaaccaacctcgccttgtttctcactaccaaaccatcctcactttgtttgtttttgaaaacccattttgtaccgatgagatggcagttagaaggaggtggcacaaaaacccaaacccgatttctttcaaaattttcaagctcctcatgcatagcattaacccagttaggatcagataaagcatgtccaacatctcggggctcaaaagtagcaacaaaagttgagtgagcaaaatgagaaatgtgttgtgacctagagcgagtgactcgctcgtgaagctccccgatcatctgctgaggtgggtgacagcgctgaatatgctgtggagcctcccttgaggaagtggcctccccctcaacaacagcttcaactcctccagtatcagcaggagctggctcgagcggaccccaagtggtggaaggagtggggtcgagtctatcagccgtagtagtggaagcaagctcaactggggcggccggtggagttggctcgagagcaacccaatcagcgtcgtcgtgctcctcctccataaagatggtctgtcccatctgatctggacctgcaggctcaaagataggggatggacaaggtgcagtctcatcgaatgtaacctcacaagtctccataatgcggttagtctctaggttaagaacacgataagcacgagaatgtaatgcataacctagaaaaaccccatcagaagaccgggactcaaacttgtctaggttacccttgggtggccgtccaaatcgcagctcataagaagttttgttcagaaaagcccaaagaaagatgtgattggatacatggcaagcagtgttgatcgcttcgacccaaaaatgcctaggagtcctatgctcatcaagcatcgtcctggccatatcaacaagggtctgatttttgcgttcaacaataccattctgctggggcaaatacagagaggaaaactgatgctcgagtcccaaagaagcacaaaaagttgcaaattgagtatttttgaattctatgccattgtcaccgtgtatagatctcatggcatttttaggaaactcattttgcaaccgaagaatcaaatctcgagcatgagtaaaagcatcatcttcatagtcatcctcaaggagttgcgaaactgaaagcagattgaaatgcagattcgagaccaaagcaacatccttgagaataaagctctcgttcacccgaatggtgccacgagaaacaaccttacctcttgacttatccccgaatgtgatgtattccttaccaatcacggggtcgaggctggaaaaccattttgagttttcggtcatgtggcgtgaacagccagagtccatgagccatgtgttctccaggcctccgtctgcctgagacctagcggcaagaggcaaaacacctctaggcctcctaggacgtctctgaacaagctgagcatgaacaccatgagaggggcggttcatgtccttcctgctcgacttagaaacccgccgctcatctctcttcctcttaaagcaaaaagaagctagatgcccatccctctcacaatattcacaatggtacctcacctctctcttgggtggattttgtttgtggaagaggattttcttttcggatggctgaggggctctaggaaggggatcgctagagatgccgggaaaggtgtcaagtgtgttcctaagatggttaggttttggaagccacacttgtttctgaggaggatctctcataggttcatcaatcacaccatctctcataggggtgataggcttagcaaaggtggttttgataagcttgggagtggatgaaggtttctccagggctcggactcgggctaagtcccagaagacggcgaactccgctccgcccgacccagggctcggacttgggctcagctccagaagacgacgaactccgctccgcccgacccagggctcggacttgggctcaaccccagaagacgacgaactccgctccgcctgaccccagggctcggactccgccctggcctcagccgacggtctctgcctcgcccgacccaggggctcggactcgacctcggccacggaagacagactcgaccccggcttcgaaggagcttccacatcacccaacctagggcacagaccagccacgtcaacaggaggcgccat

SEQ ID NO: 71357 - DNA, 1383 bp, Zea mays
  Clone ID: MRT4577_165082C.1
atgcagatggcatgcaaccgcaccaagcgagcgcaccgtttcgactccaacgcgtccagcatggaggcccaggcccacacgtcatgtaaccggcgcgccggttgcaacgtgctagaaactgcaccgccactcgcgccactaccgtgcctcctcgactgcggaaccagtaccgcgactcgaggcaaccctgcgcatgacccaacagtgccaaccaggcacatcggacacggagtgaggctgacaacagccaagtccggcctcgagcgccataggaaactccgcatcgcccgaccccagggctcggactcgggctcagccccggaatacgacgaactctgcatcgctcgaccccagggctcggactcgggcttagccccggaagacgacgaactccgcctcgcccgaccccagggctcggactcgggctcagccccggaagacgacgaactccgcctcacccgatcccagggctcggactcgggctcggccccggaagacgacgaactccgcctcgcccaatcccagggctcggactcgggctcggccccggaagacgacgaactccgcctcgcccgaccccagggctcggactcgggctcggccccggaagacgacgaactccgcctcgcccgacccaggggctcggactcgacctcgtcacaggaggcgccatcattaccctatcccaagctaactcaggctacggggaacaagaccggcgtcccatctggctcgcccagaaaatctattggaaacaacgggcttccatcaattgggtcaccaagggggatatttgctctagattttttcatgctcacgcaacgcctaatttcgttgcaagaagatttacattggttagaggagcctttcacaaagcaagaaatcgacagcattgttgctgcccttcccaccgacaaatcgccggggcccgatggattcaacaccaattttctcaaaaaatgctggccgatcatttctcaagatttctatgacttatgtgagcaattttatcagggggatgtctgtcttcgaagtattaatggttcttttattgttctgattccgaagaaggagaatgcccaattggtgggagattttaggccaatctcacttctaaataatagtatgaaaatcatcactaagttgctggccaaccgtcttcagacagtgatgacctcccttgtccacaaaaatcaatatggcttcatcaaaggtagatccatccaggattgcctagcttgggcttatgaatacatccatttatgccatgtttccaagaaagaaatcattgtgctcaagctggactttgagaaggcctttgacacggttgagcacgatctgatccttcaggtgctgtccttcagaggatttgggcccaaatag

SEQ ID NO: 71358 - DNA, 4126 bp, Zea mays
  Clone ID: MRT4577_165083C.1
aagacagtcacacagaccccctaatctctctggcatcgcggctcgtgctaagctaatcgaggcgccccaactacctctggccaagatctcgataaggactagcccatgcgcgtatcggttggagtagataagcggcgccatgggtatgaggagcaggcacccaaaggcgttgggtttccgctgccacccggcaagccaccggtccctaactctggcactatggagcctagcggcattggtcgtcgttgtgaatttccatcttctcatccttcataaggaggacgatgagagtatgagcacacacgagatccgccgatcgattatgagggagctggaggtggtggaggacgagaagttccggctagctcctccccggagccggaggaatccccgggctgtgcgccgcaagggagagaagaagaagcctacaatagtggatgagttcctggatgagtcttcggctgtgcatgacatgttcttcccagaactgaatacggctgtagatccaatcaatggtgcaaatggcagcaagtacttctactacccaggcagaatttggttggacactgacggaaaaccaattcaagctcatgggaggaggtgtcctctatgataagaggaccaccacttatttcttctacggggagaataaggatggcaaaacctacagagctcataggaagggagcagacaggattctgttggtgaggccaaattgctagggtgcatgttggaagttatggtctattggtaaggttgacatcattggagtaagttgctattcttcgaaggacctgtgggcatggaaaaatgaagggcttgtcctccgtggtgagaagaatggaacacatgatcttcacaaatccaatgtcctagagaggcccaaggtgatatacaatgatcggactggcaaatatgtgatgtggatgcacatggatgatgctaactacaccaaagcttcagttggtgtggccgtcagtgactttccgacaggcccattcacttatctctacagcaagcgtccacatgactgtgagagtagagacatgaccatcttcaaggatgatgatgggaaggcctacctgatatactcttctgaggacaacagcgagctccacattggtccgctaactgacgactaccttgatgtcactgatgtgatgcgaaggcttctcatcgcacagcatcgagaagctcctgcgctcttcaagcatgaaggcacctactatatggtaacgtctggctgcacaggctgggctccaaacactgcgctggctcacgcagcaacatcagtgatgggaccttgggagacgctggggaatccttgtgtgggagggaacgaggtcttcagatcaacaacgttcttctcccagagcacatttgtcttgccggttccagggctgccgggctcattcatcttcatggctgatcggtggaacccatccgatcttagagattcgcggtatgtctggctgcctctgacgatagggggagtccctgatgaagccgcagactatagcttcatgttccctctctggtcccgggtgtccatctactggcacaaacggtggcgtctccctgaggagtggagggattcttgaaaaatctgaagttcttttagaataattcaagatgtggtacattgatagataccaaagtatcgacatacgacacgtcggtctacactgtataggtcagatgtagatgcagggtttgtaaatgtgcagttttttggagtttgcactgaaatcagataaaactttgtggccttttgggcgaggtgttgtggcgatccactcgtcttgctttcaagaatccctccactcgacggggagccgcgaccgatagcgccggaaggaggaccgccgggacgggcgagggagcatggggcagaagtcggcggcgggatcggggacgcgccgtatcgtggggggcggccagacatccggcgaaactctgaggccggatgggcgcggcggagcggcgatgcacgcggcatgcgcccgggagccccggcaccggccagggagacgcgcccgggggggcgagcggaggggcaccggggaccagggagggacccagacggggaagcccgcgggtcccccagggaccccccccagcggcagcggcgggcggccgcgccgcgaatggcgccgagcgggtggggcccgccgatccggcgtcaaagatgttttcgttcaaaaggagcggaggcgatcgccaaaaactacctcgcccaaaaggccacaatagttttatttgatttgagtgcaaactcaaaaaactaaacatttacgaaccctgcatctacatctgacctatacaatgtagaccaacgtgtcaaatgtcaatactttactttggtatctatcaatgtaacagcgtataagaccttcgattcttatgaaaaaaaaagaaacttcagagtttcaataatccctccactcctcagggagacgccaccgtctgtgccagtaaatggacacccgggaccagagagggaacatgaagctgtagtctgcggcttcatcagggactcccccgatcgtcagaggcagccaaacataccgcgaatctctaagatcagatgggttccaccgatcagccatgaagatgaatgagcccggcagccctggaactggcaagacaaatgtgctctgggagaagaacgttgttgatctgaagacctcgttccctcccacacaagggttccccagcgtctcccaaggtcccatcactgatgttgctgcgtgagccagcgcagtgtttggagcccagcctgtgcagccagacgttaccatatagtaggtgccttcatgcttgaagagcgcaggagcttctcgatgctgtgcgatgagaagccttcgcatcacatcagtgacatcaaggtagtcatcagttagcgggccaatgtggagctcgctgttgtcctcggaagagtatatcaggtaggccttcccatcatcatccttgaagatggtcatgtctctactctcacagtcatgcggacgcttgctgtagaggtaagtgaatgggcctgtcggagagtcactgatggccacaccaactgaagctttggtgtagttagcatcatctacgtgcatccacatcacatacttgccagtccgatcattgtatatcaccttgggtctctccaggacattggatttgtgaagatcatgtgttacattcttctcctcgccacggaggacaagcccttcgtttttccatgtccacaggtccttcgaagaatagcaacttactccaatgatgtcaaccctgtctgctcccttcctatgagctctgtaggttttgccatccttattctccccgtagaagaaataggtgttggtcctcttatcatacaggacacctcctccatgagcttgaattggttttccatcagtgtccaaccaaattcttcctgggtagtagaagtacatgctgtcatttccaccattgattggatccacagccgtgttcagttctgggaagaacatatcatgcactgcagaagactcatccaagaactcatccactattgtaggcgacttcttctctcccttgcggcgcacagcccggggattcctccggctccggggaggagctagccggaacttctcctcctccaccacttccagttccctcataatcgatcggcggatctcgtgtgtactcatattctcaccctcctccttatgaatgatgagaagatggaaattcacaacgacgaccaatgccgctaggctccacagtaccagagttagggaccggtgggttgccgccgggtaccagcggaaacccaacgcctttgggtgcctgctccgcatacccatggcgccgcttaactactccagttgacacgcgcatgggctagtccttgtcgagatcttggcgagagatggttggggcgccccgattagcttagcccgagccgcgatcccagggagattagtggggctgtcttggcttgagcggctggcaacgcgacctgatgagtggtttggtaattggtatggctgggtggctgccttccttgcgaacagttcgcgaactgcggcgttgctctggaaaggtcgcccgtcacattcccgggaggcgccccgggcagcctcgaggggatcag

SEQ ID NO: 71359 - DNA, 212 bp, Zea mays
  Clone ID: MRT4577_165084C.1
gcccgggcccggaataaatcccggggcgagccgggtttattatcggggggcggcccttttttttttgtgtggcttgggacgcgagatcataattcgtcgagcgaggcccgccacacggctacaaagcaacttgtggccgacctaaacacacgggaggctgaatgcgaggcataacatgtacatctcgaacgctaccggcatattcgatggct

SEQ ID NO: 71360 - DNA, 405 bp, Zea mays
  Clone ID: MRT4577_165085C.1
ctaagccccggaagacggcgaactccgctccacccgacccaagacggcgaactccgctccgcccgacccagggctcggactcgggctaagccccggaagacggcgaactctgctccgcccgacccagggctcggacttgggctcagcccccagaagacgacgaactccgcttcgcccgacccagggctcggacttgggctcagccccagaagacgacgaactccgcttcgcccgaccccagggctcggactcagccctgacctcagccgacggtctccgcctcgcccgacccgggggctcggactcgaccccggccacggaagacagactcgacctcgacctcggaggagcctccacatcgcccaacctagggcgcagaccagccacgtcgacgggaggcgccat

SEQ ID NO: 71361 - DNA, 610 bp, Zea mays
  Clone ID: MRT4577_165086C.1
tcgcccgaccccagggctgggcccccgtctcggcctcggacgatggactccgcctcgcctgaccccaggactcggactcagcctcggctccggaagacgacgaactccacctcgcccgaccccagggctcggactcagcctcggctccggaagacgacgaactccgcctcgcccgaccccagggctcggactcggcctcagctccggaagacaataaactccgcctcgcccgagcccagggctcagactcagccttggcctcagacgatgaactccgcctcgctcgacccgaggctcggactcgacctcgacctcggaagacagactcgacctcgacctcggaggagcctccgcctcgcccgacccagggctcggaccgaccacgtcacagggggggccatcattaccctacccctagctagctcaggctacggggaacaagaccggcgtcccatgtggctcgccccggtaaacaaataatgatggcgccccgcgtgctccatgacgacggtggctctcagccccttacggaagcaaggagacatcaacaaggactcgacagccccgacagctatccttctgcaaggctctagcgctcctccgacggcat

SEQ ID NO: 71362 - DNA, 483 bp, Zea mays
  Clone ID: MRT4577_165087C.1
atcctcttgtttggggttttttttttttttttattattttttttttcttttggggcgacattaatcaactccaaccttccaactaaaacatttcactgggggggcagggccccaggtttttttttttaaaaaaagggcaaaagaaaacggggaaaaattctgaccctatacgggataaaaaaaaaaaaagtaaaggccaaaaagggcttttttacttgccccccgaaacggggaaaaaaacaccctttggtggaaaaaaaaggggataagtttgttttttttggacaaccaaaaccttttgtggccccccgccaaggggattgggttttttggggggaaaaaaacaaaaaaaccccgggggaaaaaggtttaaaccgcacccttgggagttttttaccaaactttccccctttcttaaaatttagccccccaagggccccccttttggaaaattatcccccccaaaaaagatattcttagggt

SEQ ID NO: 71363 - DNA, 2261 bp, Zea mays
  Clone ID: MRT4577_165088C.1
tcaggcctggccgcaggcaccataggaagctctgcttcgcccgacccagggctcggactcgggctcagcccctgaagacggcgaactccgctccgcccgacccagggctcggactcgggctaagccccggaagacggcgaactccgctccgcccgacccagggctcggactcgggctaagccccggaagacggcgaactccgctctgcccgacccagggctcggacttgggctcagccccggaagacgacgaactccgcttcgcccgaccccagggctcggactccgccctggcctcagccgacggtctccgcctcgcccgacccaggggctcgggctcgacctcggccacggaagacagacttgacctcgacttcggaggagcctccacatcgcccaacctagggcgcagaccagccacgtcaacaggaggcaccatcatcaccctaccccaagctgactcgggccacggggaacaagaccggcgtcccatctggctcgctccgccagataggcaatgatggcgccccgcacactctgtgacgacggcggctctcagcccccttacgaaagcaagaggatgtcggcaaggactcgacagctccgacagctgtacttccgccaggctccagcgctcctccgacggccacgacaccacacgaacagggtgccaaaacctctccggctgccacgacgacatgtacttagggcactagctcctctctgctagacacgttagcacgctgctacacccccccattgtacacctagaccctctccttacgcctataaaaggaaggtccagggccctcttacgggaggttggccgcgcggggaagaacgggacggcacgtgcataggcctctcgctccctcccgcgcggacgcttgtaaccccctactgcaagcgcacccgacctgggcgcgggacaaacacgaaggccgcgggtttccccttcgcacgcctgtctccctccggcttcttcccccttcgcgcttcgtctcgcgccgacccatctgggctggggcacgcggtgacaatttactcgtcggtccagggaccccccgggttcgaaacgccgacaagggcccaggcccacatttcatgcacctagcgcgccggtttctgcgtacagagaagtcgcatcgccactcgcgtcagtaccacgcctccttggggccgccgcagaagacggagaagttaaattttcaagaccaatgcagcgactcgaggcaccccacgcatagcccaacaaatgcattaagtgcggaggtcacgggtcagtcagccgcggggacaggcgtggcagtcagcgtgactaagggcggaccgtcagtaattgcatcaaatgggcgagccaatcagtcaaactttggccccacctgcaggctcgtatcctcccctaaggcgggcccgggggccactgtcggtaccctaaatcaggggtaccccttactacagtatgaagacacggtgcccgtacgacgatctctagccgcacggagaacagcacccgaccctgccacgtggacagctcaaggggcaccacatggcgagaaaacaagaagcatcccaggatgtaccagttggatcggacctccgcgaggaagcaccggacccctgtacgcgcaacccggacccccgattacggtccgggactcccaagtaagcatgccgggtcccttggatggggtccagatccctccgagtaaggtccgggccacaacggggtcccgagacaggggataccctggcataagcaagggtccggtactgacacgtgtcaggccttatcctatgcgcttgcgctccccgctcaggcggagacccgctgctgccgcgtggcttgtagcccgtgacataagccagcgggcggagcctgacgtaaggcctctaaagccgcgcgatctctgcatttattgcggagaggacgcgtcgcttgcccaccctgatgacaggcgatgtgcccctcagcatttaatgcgtcctgtccactccgctggcaggcggcgccagggccatcctgcagacggcgcacctgtccagtccattgtcaaacagtgcgcccgtgccgcgcgacacactgtgctcatcatcccttatacgagaagcttcccctgcacgccgatgctacgcagatttcagaggtcagggcgcaagaagattgctccagcaacaaacattagtagctccaagtactacatctgttatgttcctaggcccacatgtcggggctcagtacccttgtgcatgcccacttag

SEQ ID NO: 71364 - DNA, 246 bp, Zea mays
  Clone ID: MRT4577_165089C.1
gtccgcctggttccacttccaccactgcgatcactagcgctacaccgaagccacgttttgtgtggtccttcaatacgcctactccgggcttcggattcggcacaacgtttgccccttgctcccggaaatctttgcaaaccggcgccgttactgtccggcaaggcaaccccgtttttcggccggcgttgatctggagatgctcttttcacggtgtttttttttggttacactcccccttccgtcctg

SEQ ID NO: 71365 - DNA, 537 bp, Zea mays
  unsure (1)..(537): unsure at all n locations
  Clone ID: MRT4577_16508C.1
gtttccttgctagcgcgcgtcctctctctcgctagctagctggttcccaccgccgcccgctgctgccgccgggcggtgataaatccgtgtgtactcgcccggaagcagggctagctcacgagcttatctagtgcctccgtgatggatcggggtcggaggcggcaatggggcgtcgtatgctcggcgctgctcctgtcggcgctgctggcggtcgccttcgcgcagtcgccgtccccggcgcgggcacccaagncagcaccgtctcttcccgcggcgctgcgggcggctccacggccgtcgtctcctgccgtgccggcgcccaaggcccctgccgcgtcgccggcgccgaagcagacacctagcccttcggcctcgccggtgccgaagccgccgactccgcgcgcgncagcgcaggcgccaaagccatcgtctccagctgcaccctcggcatcactggttccaaagccgcncgctccacgtgcgccggcgcaggccccaaagncgncgtcaccaccttcggcgtccccaccaccacca

SEQ ID NO: 71366 - DNA, 300 bp, Zea mays
  Clone ID: MRT4577_165090C.1
gcgctttatcattttagccgccgccatggtgatttccaccggtcatggttgctccgatccgagctcctccggcatgggcggtctcggattcctccccggcggcacggcccttgcagcggcatctcctggtgggcacggcctgccccggcgacgcggtagcagccgtcccggcccctgcctggctccccggcgacccacagcgtgcggccccggcggtttgggtgcggctccggcggctcgcggcgcggccggcacggacccccggtgctgggcgcgtgagcacgtaccccctcgggctaa

SEQ ID NO: 71367 - DNA, 804 bp, Zea mays
  Clone ID: MRT4577_165091C.1
agccgaagtgaccaccgtcactccaccgctccactaaccagtctgacagagggacagcgccgcctgcgccactccgactgcagcaccactcgacagagtgagtctgaccggcagtcaggtcttgacaaaggcgccacggcgaactccgctccgcccgaccccagggctcggactcgggctaagacccggaagacggcgaactccgctccgcccgaccccagggctcggactcaggctgagacccggaagacggcgaactccgctccgcccgaccccagggctcggactcgggctgagacccggaagacgacgaactccgctccgcccgaccccagggctcggactcgggctaagacccggaagacggcgaactccgctccgcccgaccccagggctcggactcgggctaagacccggaagacggcgaactccgctccgcccgaccccagggctcggactcgggccaagacccggaagacggcgaactccgctccgcccgaccccagggctcggactcgggctaggacccggaagacgacgaaactccgcctcgcccgaccccagggctcgggcttcgcctcggccgaacgacttccgcctcgcccgaccccatggctcgggctcggccacgacaacagaagacggactcgacctcggcttcggaggaacccccacgtcgccctgcctagggcaccgaccgccacgtcaacaggaagcgccatcatcatcctaccccgaatcgactcgggtcacggagaacaagaccggcgtcccatcctaccagctccgccagaggggcaataa

SEQ ID NO: 71368 - DNA, 441 bp, Zea mays
  Clone ID: MRT4577_165092C.1
atgtggaggctcctccgaggtcgaggtcgagtctgtcttccgaggccgaggtcgagtccgagcccctgggtcgggcgaggcgaagaccgtcggtggaggccagggctgagtccgagccctgaggtcgggcgaagcggagttcgtcgtcttcaggggctcagcctgagtccgagccctggggtcgggcggagcggagttcgttgtcttccagggctgagcccgagtccgagccctgggtcgggcggagcggagttcgccgtcttccggggccgagcccgagttcgagcccttggtcgggcggagcggagttcaccgtcttccggggctgagcccgagtccgagccctgggtcgggcggagcggagttcaccgtcttccagggctgagcccgagtccgatccctaggtcgggcggagcggagttcgccgtcttccggggctga

SEQ ID NO: 71369 - DNA, 545 bp, Zea mays
  unsure (1)..(545): unsure at all n locations
  Clone ID: MRT4577_165093C.1
gggtgggtgttttttttttttttttttttttttttttttttttttttttttttttttttttttttttttttggaggcaggatcaacaggggggggggcctaaatggaatcacataagccaatcttacaaaccaccaatagtccaaattgagggagaggggggggaggaaagaagtttaaataaataaacaggagaaaaagaaggggaggggaacacggcccctggcaatctcaaacaaaaagggaaatggaaaaaggggcccatgcccggccccgggcatgggattctcattttaaactagcttggcgcccgcccccccctccctaaaaacgacccacgggctcactttcacaacaggcanccaaggacgggggggaggcccgggaaactccaaccgacggccctgggcccgggggggcccgttggggcggggtcgtnggagcccgcccacccggggggagcgtccgaggaccccccctttttgggcttcccctgggacccggcgggcgcgggggggggcgccttggcccccaacagctcccggg

SEQ ID NO: 71370 - DNA, 627 bp, Zea mays
  Clone ID: MRT4577_165094C.1
atgtcgatggggcgacacatgggcaaggacgattgcgtggacgacgactcgaacgacgtcgtggacgacggtgcaacacacaagggagaacacacgggagcagcagcgcgtggtggcgctagtggcggagcacgcgatctcccgacaatggtggatggcgacgaagacaacgccgcctgcgccactccgactgttgtgccactcgacagagtgaggctgacagcagccaagtccggcctcgggcgccataggaagctccgcctcgcccgaccccagggctcggactcggcctcggccccggaagacgacgaactccgcctcgcccgaccccagggctcggactcggcctcggccccggaagacgacgaactccgcctcgcccgaccccagggctcggactcggcctcggccccagaagacgacgaactccgcctcgcccgaccccagggctcggactcggccctggccccagccgacggtctccgcctcgcccgacccaagggcttggactcggcctcgacctcggaagacagactcgacctcgacctcggaggagcctccgcctcgcccgacccggggctcggaccgaccacgtcacaggaggagtcatcattaccctacccctag

SEQ ID NO: 71371 - DNA, 375 bp, Zea mays
  Clone ID: MRT4577_165095C.1
atggcgcctcctgttgacgtggctagcctgcgccctaggttgggcgatgtggaggctcctccgaagccgaggtcgagtctgtcttccgtggccgaggccgagtccgagcccctgggtcgggtgaggcggaggtcgtcggcagaggccagggcggagtccgagccctgtggtcgggcgaagcggagttcgtcgtcttctggggctgagcccgagtccgagcccctggttgggcggagcggagttcaccgtcttccgggacttagcccgagtccgagccctgggtcgggcggagcggagttcgccgtcttccgggacttagcccgagtccgagccctgggtcgggcagagcggagttcgccgtcttccgggacttag

SEQ ID NO: 71372 - DNA, 1839 bp, Zea mays
  Clone ID: MRT4577_165096C.1
agccgaggtgaccgccgtcacttcactgctccactgaccggtctgacagaaggacagcgccgcctgcgccactccgactgcagtgccactcgacagagtgagtctgacaggcagtcaggtcttgccaaaggcgccataggaagctccgctccgcccgaccccagggctcggactcaagctaagacccggaagacggcgaactccgctccgcccgaccccagggctcggactcgggctaagacccggaagacggcgaactccgctccgcccgaccccagggctcggactcaggctaagacccggaagacggcgaacaccgctccgcccgaccccagggctcggactcgggctaagacccggaagacggcgaactccgctccgccgaccccagggctcggactctggctaagacccggaagacggcgaacaccgctccgccccgaccccagggctcggactcgggctaagacccggaagacggcgaactccgctccgcccgaccccagggctcggactcgggctaagacccggaagacggcgaactccgctccgcccgaccccagggctcggactcgggcaaagacccggaagacggcgaactccgctccgcccgaccccagggctcggactcgggctaagacccggaagacgacgaactccgcttcgcccgaccctagggctcggactccgccctggcctctgccgaatgacctccgcctcgcccgaccccgggggctcgggctcggcctcggcaacggaagacagattcgaccccagcttcggaggaacccccacgtcgcccggcctcgggcgcgggcccgccacgtcaacagggagcgccatcatcaccctaccccgagccaactcgggccacagagaacaagaccgactccgtccggcccggtcccacccatccctccgccaacctcgcccgcaccccgacgcctctctcaccacctccgcctctcacattcccacggaagctcccccgcggccccgcgctcccactcgtccgtcgcgccgcacgccgcgcctccccagtcccacccactcccaaactcttctacccacgcactcccactcacttcgtatgggcaactgctccccgtctccgcggcgccgccgcccgacggagccaggctcgccgccgctcggcagcaccgtgtccggcccatcgtgacggtcaactccatctctgtctccccctacccgctcgccagatccccctccgtctccaccgctgcggtggacgccgaggacggcggcgtcgtgcgcgtttacggttccgacgggtgccccgtcgcgtggcgcctccgcgtctcgctcctctacaaggcggcggcacccctccacttcacgccctcagaggcggctccactcggccgcccggtgctccgcctctcctccgccgacccggaggtatgcggcacccccgacgaactgctgcgccaggtggacgctcggttcgagggcaagccgcgcgtcgcgccgccggagaggccccgcacggggtcgccgtcggcggcggccgcagccgcggctgaggtcgccgagctggtgcggctgcagcaccgcagcgcggagaggcacctcgagggcgtggcggcgaaggtggtggagatggtcaagaaggggaagaagtccgggaaggggaggagcgttgtagagggtgctgaggtcaggagtctcggcaagtggtacggggacgcaatggaggtgatgctggagcacgcaaggatggaggagacccttatcttccctgacatacagagggcatcgtttccaggtcgacttgggtttgatcttatttatttgtgccgcattgcattatgctcttga

SEQ ID NO: 71373 - DNA, 190 bp, Zea mays
  unsure (1)..(190): unsure at all n locations
  Clone ID: MRT4577_165097C.1
acccacgcgttcgacatcaagaaacatanaaagtgggatacagtttcaacaatcgagcaacaatggcggacaaaatattttccatccttatgctttttggtctttatggagggggtgataacacgaccattttttctaaatactcacatgttcctattgctgttttttataccatataccttccattaat

SEQ ID NO: 71374 - DNA, 216 bp, Zea mays
  Clone ID: MRT4577_165098C.1
gatcaccctgacaaggagggggctatctataccttacatgtcatcatcatgaaccaccctggccagattggcaatggctatgccccagttctggactgccacaccttacacattgctgtcaagttagctgaactcgttaccaagattgataggctatccttctaggagctggagaaggagcccaaaattctaagaactgtgatgctggtatggtga

SEQ ID NO: 71375 - DNA, 859 bp, Zea mays
  unsure (1)..(859): unsure at all n locations
  Clone ID: MRT4577_165099C.1
cacccacgcccgtcttcctcgcctcaacgcctccacccaatccaaccgcctggacgccacaaccccgccccacctcggcgctgccgctccatccaactgcctcgacgccgccatccatccaaccgcctcggtgtctgctcctcaatacctggtcgtgtttaagatgccccctggaaggatggatggggcaaggacacacagagaccttggtgaggtgccaattactgagtatgaaaaggagagggctttaaatgtgatgaggaacaacaaaatgttgagtagccttggtataactggattaacatcacttattctatcaagtagtacaaggaagaactctatcactcgtgaagactttgatccattgtatgaacctgatcatagtgaggacaatgatcatcatgtggctgatcaggccatgcaggatgaacctttctacattgaaagaaggaacaccaacatgtctactggttttggaggaacaaaaggatccaggagagtggtagcacctaatgtagaagaccaagttggtagagtaactaggcagaagacaaaggaactatccttagttgagaaagatatacatggttcgactgcaaatacagatgagcacacattgatttctgccaattttcctgcacaccatgatgacgagattcagatgtgtgatgaaggtcaaatagatgtcaacaacaacaacaacaacaacaacaaagcctttttgtcccaagcacgttggggtaggctagagatgaaaccccgtatgaaaacctcagagctcaacccccanagaacagaaaaggggaaacaaaggcaaggagaaccgaaaacacgaacgggngaacacataaagagataa

SEQ ID NO: 71376 - DNA, 1339 bp, Zea mays
  Clone ID: MRT4577_16509C.1
cccacgcgtccgcgccccaccactggtcaacgaatctttcctgcactgtcctgtccgccgccgctcaacctcatcggaactccactcctcctcacccccacagcaactcccacctcatggagaaagctgcgcacgttgccgccggcgcgacgcaagagcaggaatcgtctccgaataggcttgacgacgcagcgaggcatcatggctctgctgaagcgattcctgaaagacttgcggtggtcacaggaggaaacaaaggagttggcctagaagtatgccgccagcttgctctcaagggtgtgacagttatccttacagcaagggatgagaaacgaggaaaagatgctgccgagacccttcgccgtgaatgccaactcccaaatatcatattccatcagctcgatgtcagagatgatgatagtgccaccacattggcccggtatgtcgaaagaagatatgggaagctcgacatcttggtgaacaatgcagctatttcaggaattgtagcagatgaggaaggcctgaaagctctcaacattgatgcagagacatggacatctggcagggcagctaatcttctgaaagaagtattccagaataccaatgatgaggcattcaactgtctgaataccaattactatggatgcaaacgggtaacagaagctcttcttccacttctgaagctatctacatcaggaggagcaaggattgtcaatgcctcctcacttgcgtcggagctgaagagactgccaaatgagaagctgcgaaacgatttgagcaacattgacatctgggacgaggaccggatagaagcagtgctcaacacattcttggaggacctgaggagcgggcggctggaagaggctgggtggcccgtgatgctaccagcctacagcgtatcgaaaatggtcatcaatctgtacaccaggatcatggcaaggaggtacccggagatgcgcatcaactgtgtgcgacctggctttgtcaagacggacatcaactggaatctgggggtcctgacgcctgaacaaggtgcgagagggccagtcatgctagctctcctccccgatgatggaccaactgggtgctattttgatcagacagaaatggtgaacgtctggtgatcagattgaatggcccttgtctgtcgtcggttatcgaatatttatcatctgctagtttattttagaactaaaccgctagaaataaaaaagagcggatggagtgttataactttcctgaattcatgatgacataaacacatacacatggtaaaacgttcttatgatcaaaaaaaaaaaaaaaaaaaactcgagactagttctctctctcctcgtgc

SEQ ID NO: 71377 - DNA, 280 bp, Zea mays
  Clone ID: MRT4577_1650C.1
gaccaaacctattcaggggggttttgtttaacaagtctgtctgattattattacatttttttttttagtttgccttcccaccagaggaagcaaccaaatccatctcttgctaggggacacagggcggggatttaaaaaccttcctcaggggtggtttttttggttaacagttctcggggaaacacaaaaaaattgccccccctttctggtggaaataggaggcccctgtaaacaccgattaaggagcttgtcttttcaaacgcgcacttaacgaggtggg

SEQ ID NO: 71378 - DNA, 362 bp, Zea mays
  Clone ID: MRT4577_165100C.1
aacaaaaacccccctccggggggttcggggggcccaaagattgaatgcgaacagcaccagcaatcctgaaacaaaaatacaacaatgcaactaggggggggcttgcccccagtccacaaaaggaaccggggatttggcaggagttattccatattggccccgggcgggggggagaaccgatacctttggtgggggcttgggggtggcccttttacagggccttgaaaagcaggcccccctgggtgggaaagaagggggcaaacaccagggactccaacgccataaacttgaaaaggatttttagggaccggcccgaggggtccttcaggggggcaccaatgggggtacccaacacaggggcc

SEQ ID NO: 71379 - DNA, 328 bp, Zea mays
  Clone ID: MRT4577_165101C.1
cggatccagatcaccatctctccacgcatcgagaggcggacaccacgacgcggatgaacccaaccattgttcagctagccaacattacctgcctctccctcctaccactgctctctgacccgagagtctcctaactcatggggaaactactccttgcgtgcttgaagaactctcgagatcaacctcttccttcaatgccctcaattcctaatgaaccgtcttttctaagagcgtcaacaaaaacacctcccacaccatcaccttcagcaccaagacttacggcttgacaaggaactacctgcaacccctcgtactgaggcggacatcc

SEQ ID NO: 71380 - DNA, 188 bp, Zea mays
  Clone ID: MRT4577_165102C.1
gttattcaagtgaaagttcactatttttctcaaactgtgagcaagcgtagttcaacaaatacacggaacaaatctgtaggaagactcttcacaagctttcgatgccccattcatcctccccgattcgtaaacagcagcctttttcccaattttgcactcaccctccccccaaaaaaaaaaaacagaac

SEQ ID NO: 71381 - DNA, 365 bp, Zea mays
  Clone ID: MRT4577_165103C.1
aagatatgctaacaagagctgctgttaatggcgtggtcataatacaaacacttccgagcgaacccgaggacgacaaacaactacgcgatctggactgccgctaccagagaagatccggatagcacacacatagccaccgagcgccgcgacacatccctgaatcggccgtggtcatcagatgaacagtgagatgaggtgctggcatcgggggacgtcacgcatggatccagatatttagaccgcgcggagcaccgaaactgtgcaagagggacaacaccaagcaatgacacaacagtgaaatcaagttacgactgctgtaccgaacggtcaggcccacaaccaggaacctgaacaccacgttcaag

SEQ ID NO: 71382 - DNA, 206 bp, Zea mays
  unsure (1)..(206): unsure at all n locations
  Clone ID: MRT4577_165104C.1
attgggggttgngttaaaagggcaaggcttttttttttttggcaggaagaattgttttctaaattattcacaggctcccctacctacaaaattcggggaaaacaaaaccagaaggggtgcacagagaccacctattatgtggggtcaggcacaccattagccctgaaatcttagaccacaggttaatgggcccccccggacgggag

SEQ ID NO: 71383 - DNA, 335 bp, Zea mays
  Clone ID: MRT4577_165105C.1
acgcacaagcgttcgctagggatagatttagatcgagcggccagcttgatggatcctggagatgatgatgaagcggagggggttgaccacgaatatcatgtaagcactataggcactaggaatgatctaaagcatgcataaccgtgtgatagctgatgacagtcgacgggtggtgacgttgctgatacatcgtgatgaaccagttcccggcgcatggccacatcacgcggatgctgcagttaggcaagcacgtcagtctctgagcctgctggtgatcttggtccacagcgagataaattatcgactgcacctgctggtgctagggctgaacgagc

SEQ ID NO: 71384 - DNA, 325 bp, Zea mays
  Clone ID: MRT4577_165106C.1
aggatgatctcatttgattaacactgacggaggacaacatatgcggtacggggcgtgatgcccacaggggcactaattgcacaccaaaaacatattgctagcttattcaccacgaccaaaatctatcactcacgtaactctttgaactacaacaatgacaaagactaacgaagcgcaacatacactgctaggagctcaggacctgtaacaacacctgcagagcacgagctggatgttcttatgacgcatgatggtgacagcactatgtttagatggttcataggcatgaggcctataagaggcccactgaactaggtctagaacc

SEQ ID NO: 71385 - DNA, 475 bp, Zea mays
  Clone ID: MRT4577_165107C.1
gctctgcctctgtcccaggcggccagcagcacgtccgcaccacaacatcacacattcacacgccgccacgcgcccacgccggagttcggacgccgccagccgcacgccgatgccggcgacgcgtctcgctctcgcctgctctctccctgtctcccagccggtcggccgcaccaggcaccacacgcggtgacgcggcatgccggacgcagacgccgccatccgcccatccgccgaacgccatccctccactgctcgtcctccagacctccactccactgctcgcccatccgcggtccgcccatccgcccatccgcggtccgcccatccgcccatccgcggtccgcccatccgccatccgccatccgcggtcctccagacctccactgctcgcccatccagccatccgcggtctccctgtctccacggctgctcacagcagtacaacaccaagctgttgtgtgctgtccaggggctc

SEQ ID NO: 71386 - DNA, 302 bp, Zea mays
  Clone ID: MRT4577_165109C.1
ccgggccctttcctcagctcaggtttttgtttttttttttctgttgtgttttgttttttataagatgttttgtgttatgttgctttttaaattaggtttttagtttttttttaaaaactgccccaattataatcaggtgttttaaaaaaaacacaaacaaaacattaatatcacgaggccctccaccaaaaggcaggacaagaatgggttataagtattctacacaacagaaaaaaaaacccgcccctttactgtctttatcgaaaaaaaagaaaatagccagaaatactaacacaagaaaa

SEQ ID NO: 71387 - DNA, 674 bp, Zea mays
  unsure (1)..(674): unsure at all n locations
  Clone ID: MRT4577_16510C.1
gccnggcccgggttcggacattatctaagcccaccgaattccctgcgattcctctcccctcgcctcctcgtctgcccctaggcgatcgtgctcagaggaatcgcacagaggcgccgtctcatccgagttgggaagcctgtaaccaaggaggctgggtgccatgcccccgagggacccatcctctgcatcaataactgtggcttcttcggaagagcgctgaccatgaacatgtgctccaagtgccacaaggagatgataacgaagcaggatcaggccaagctggctgcctcctctatcgacagcatcgtgaacggcagcgacgccgtcatggagccggatggtgctggcagcaacacggtagtagctgttgcccaagttgagttgcaaacaatgaacgtgcaccagcccgctgatgttgccggacccagcgagggggtgtaggcgatctcccaaggtcggaaggtaagggctaaccgttgcacctgcctgcaggaacaggaccggacttacagaattcaactgccggtgtgcgaacttgtactgtgcactccaccgatactccgacaagcacgactgctagttcgactaccggactgctgccaggtacgccattgccaaggctaatccggtggtgaaggcagaccagctcgacaagatctacggggggttcccta

SEQ ID NO: 71388 - DNA, 318 bp, Zea mays
  Clone ID: MRT4577_165110C.1
atggcgcctcctgttgacgtggctggtctgcaccctaggttgggcgatgtggaagctcctccgaagccgaggtcgagtttgtcttctgtggctgaggtcgagtccgagcccctggttcgggcgaggcggagaccgtcggctgaggccagggtggagtccgagccctggggtcgagcggagcgaagttcgccgccttctggggctgagcccgagtccgagccctgggtcgggcggagcggagttcgtcgtcttctgggacttagcccgagtccgagcccttggtcgggcggagcggagttcgccgtcttctggggctga

SEQ ID NO: 71389 - DNA, 744 bp, Zea mays
  Clone ID: MRT4577_165111C.1
cctcgagccggccggggcgctgcaacaaagacgacgcaagccctcgcctgtcctcactcctaaccctcgcccgactcagatctatctgccccgcgccgccgtcgccatgccgttcactccgggtccctactctggcgtcagcaccctcgcccttgtagcgagggcatcggtcttcggcttcggtgtcgtctacgggagcatcaagctctcaatcctcaaggcaacaaatcctaaaaaggaagaagcgcatgctcatcactaaggacgacagggctgctacatgttaatttctatggaaggatgatataaaaatgtggttgcactctttctccatacgtgcaatttgatttatgatttgtggacatcttgctgtaacacacctgctgagttatcttagttttgtgtcataataaaattcttagccaatgacttgaaatcaggaaggggaaaatcaaaagaacccacttttgttttgtcaaaaaaaaaaaaaaaaaaaaaaaaaaaaaaaaaaaaaaaaaaaaaaaaaaaaaaaaaaaaaaaaaaaaaaaaaaaaagcgacactatagcccttgggccgccgcctcctccgccaccaagggttcgagctcctcgcgtcctgcgagcgcgcgccgcaacgccaccatgaagttcaacatcgcgaacccttccaccgggggccaaaagaagttgaaaatcgatgacgaccaaaagctgcgggccttttttgaccgaaggaaatcccag

SEQ ID NO: 71390 - DNA, 663 bp, Zea mays
  Clone ID: MRT4577_165112C.1
atggcgtctcctattgacgtggtcggtccgtgccttgggttgggcgatgtggaggctcctccgaggtcgtggtcgagtctgtcttccgaggctgaggtcaagttcgagccccgggtcgggcgaggcggagaccgtcggctgaggccagagctgagtccaagccctggggtcgggcgaagcggagttcgtcgttcttcggggctgagcccgagtccgagccctggggtcgggcggagcggagttcgtcgtcttccggggctgagcccgagtccgagccctggggtcgggcggagcggagttcgtcgtcttctagggctgagcccgagtccgagccctggggtcgggcggagcggagttcgccgtcttccggggctgagcccgagtccgagccttggggtcgggcggagcggagttcgtcgtcttctgggactgagcccgagtccgagccctagggtcgggcggagcggagttcgccgtcttccggggctgagcccgagtctgagccctggggtcgggcaaagcggagttcgccgtcttccggggctgagcccgagtccgagccctggggtcgggcggagcggagttcgtcgtcttccggggctgagcccgagtccgagatttaggagccttgagggtacccctaattatggtccccgacaataa

SEQ ID NO: 71391 - DNA, 728 bp, Zea mays
  unsure (1)..(728): unsure at all n locations
  Clone ID: MRT4577_165113C.1
ttgggtacctcgaggccggccgggctgcacgagagacgacgcaagccctcgcctgtcctcactcctaaccctcgcccgactcagatctatctgccccgcgccgccgtcgccatgccgttcactccgggtccctactctggcgtcagcaccctcgcccttgtagcgagggcatcggtcttcggcttcggtgtcgtctacgggagcatcaagctctcaatcctcaaggcaacaaagcctaaaaaggaagaagcgcatgctcatcactaaggacgacagggctgctacatgttaatttctatggaaggatgatataaaaatgtggttgcactctttctccatacgtgcaatttgatttatgatttgtggacatcttgctgtaacacacctgctgagttatcttagttttgtgtcataataaaattcttagccaatgacttgaaatcaggaaggggaaaatcaaaagaacccacttttgttttgtcaggatgcgaagttaggacatggcttcttgaacttcggtcaagaggatctgccttgttgatcctgttttgttgcgacgttgtgcaatggattggatggcaaaaaaaaaaaaaaaaaaagcggccacttttttttttttttttttgtgcgcaattgcttgtctggcagcaaaactaacaagtgttttactccaccccagatgtatggccgtatgggaaaggcttattcagntcagcatcgatctttca

SEQ ID NO: 71392 - DNA, 283 bp, Zea mays
  Clone ID: MRT4577_165114C.1
tggtccctcgagtccggccagaacgtcggcgcgtaatgccgtacgctgccaccagtacgtgacggtcgcgccgacgcctgagccctcaccggcctacgtgccagcatacgtccccgtcccgccgacgccttggccgtcaccgccgtacgtacccccgacgccacggccgccgactccgccttaccttccaacgacgcccccatacgtcccaccgacgcctcggccatcaccacaaccgcacgtgccaccgtacgtccctccgccgcgtcgtccatcaccaccc

SEQ ID NO: 71393 - DNA, 738 bp, Zea mays
  Clone ID: MRT4577_165115C.1
atgacgcttcctgttgacgtggcgggtctgtgccctaggcggggtgacgtgggggctcctccgaagccgaggttgagtctgtcttctgttgctgaggccgagtctgagccatggggtcgggcgaggcggaggccgtttggccgaggccagggcggagtccgagtcctggggtcgggcggagcggagttcgccgtcttccgggtcttagcccgagtccgagccctggggtcgggcggagcggagttcgccgtcttccgggtcttagcccgagtccgagccctggggtcgggcggagcggagttcgccgtcttccgggccttagcccgagtccgagccctagggtcgggcggagcggagttcgccgtcttccgggtcttagcccgagtccgagccctggggtcgggcggagcggagttcgccgtcttccgggtcttagcccgagtccgagccctggggtcaggcggagcggagttcgccgtcttccgggtcttagcccgagaccgagccctggggtcgggtggagcggagttcgccgtcttccgggtcttagcccgagtccgagccctggggtcgggcggagcggagttcgccgtcttccgggtcttagcccgagtccgagccctggggtcgggcggagcggagttcgccgtggcgcctttggcaaggcctgactgtctgtctgactcaccctttgcgttaaatgctcctgcaactcggttagtcggtgtggcgatttag

SEQ ID NO: 71394 - DNA, 703 bp, Zea mays
  Clone ID: MRT4577_165116C.1
cgaggccggccggggaaaaaaaaatgcaacaaagacgacgcaagccctcggccggccgcactcctaaccctcgcccgactcagatctatctgccccgcgccgccgtcgccatgccgttcactccgggtccctactctggcgtcagcaccctcgcccttgtagcgagggcatcggtcttcggcttcggtgtcgtctacgggagcatcaagctctcaatcctcaaggcaacaaagcctaaaaaggaagaagcgcatgctcatcactaaggacgacagggctgctacatgttaatttctatggaaggatgatataaaaatgtggttgcactctttctccatacgtgcaatttgatttatgatttgtggacatcttgctgtaacacacctgctgagttatcttagttttgtgtcataataaaattcttagccaatgacttgaaaaaaaaaaaaaaaaaaggcccctagggccaaaaaaaaaaaaaaaaaaaaagtcaaaaaaaaaaaaaaaaacggcacccggagcctctccttcccggtctcctccgcccgttgccttcgtcccctccatctccggttgcgtcgccggcgagcccgacaccgcgaatcggatccgccgacaaggcgagagggaaaagatggggctcacgttcacaaagctgttcagccggttgttcgccaagaaggagatgcggatcctgatgggg

SEQ ID NO: 71395 - DNA, 419 bp, Zea mays
  unsure (1)..(419): unsure at all n locations
  Clone ID: MRT4577_165117C.1
agcagtggtaacaacgcagagtactttttttttttttttttttttttttttttaaaaggcaacatatttttttccacaaacaaataaacatgaaaggggaagatagaatacacggacatagaacaaattcaaccacaagcatgaacacagggaattacaacgtaagcaataaaggggaggcccaaagaaaaaggcagcgcatgcaataaaggggactaaaaaataaatggggagcccatgaagaacggggggcaaaaatcgtgtacccaaagaactgagcggggggggggaaaattatgataccccggggactctgcgttgttcccacgggttaggggcgaatttcggcnatcggcctcaaattgtccgccgttgaagcgcgcttcgggggggcccacttccccctataacgaagatga

SEQ ID NO: 71396 - DNA, 1357 bp, Zea mays
  Clone ID: MRT4577_165118C.1
tcatggagcttgggaggcgccatcattgcctatctggcggggctggtcagatgggacactggtcttgttctctgtggcccgagtcggctcggggtagagtggtgatggcgctccctgctgacgtggcgggcctgcgcccgaggccgggcgacgtggggctcctccgaagctggggtcgaatctgtcttccgttgccgaggccgagtccgagcccctgggtcgggcgaggcggaagtcgttcggcagaggccagggcggagtccgagccctggggtcaggcgaggcggagttcgtcgtcttccggggccgagcccgagcccgagccctggggtcgggcggagcggagttcgccgtcttccgggtcttagcccgagtccgagccctggggtcgggcggagcggagttcgccgtcttccgggtcttagcccgagtccgagccctggggtcgggcggagtggagttcgccgtcttccgggtcttagcccgagtccgagccctggggtcgggcggagcggagttcgccgtcttctgggtcttagcccgagtccgagccctggggtcgggcggagcggagttcgccgtcttccgggtcttagcccgagtccgagccctagggtcgggtggagcggagttccctatggcgcccctggcgaggcctgactgcctgtcagactcactctgtcgagtggcaccgcagtcggagtggcgcaggcggcgctgtccttctgtcagaccggtcagtggagcagcggagtgacggcggtcacttcggctctgccggggggcgcgtgtcaggataaaggtgtcaggccacctttgcgttaaatgctcctgcgactcggtcggtcggtgcggcgatttagtcagggttgcttcttagcgaaggcaaggcctcgggcgagcaggagatgtatccgccgttaaaggggggcctcgggcgagacggaaatccctcggggtcggctgcccttgtccgaggctaggctcggacgaggcgtgatcgagtcgctcgtgtggactgatccctgacttaatcgcacccatcaggcctctgcagctttatgaatcaatagccttactctatatatatacttaatttggaaatgtaactagttgaaaacggtctttagttttaatttgcatgctcctctaaagaattgattcatcagtgagcaccgggactctttcatagataatttcaggcttatatttgtcgtgtctgccccttaaccagcagggaaaatttctatcggcgatataatatccgataaacctggtttttctgtttatcggtgagctccgatatttttagccaaaatttcaaattttttgaattggcagtatcaaatgtttaaat

SEQ ID NO: 71397 - DNA, 581 bp, Zea mays
  Clone ID: MRT4577_165119C.1
ccccccggggccgccgggctgaaacaagacgaccccacccctcgccggccgggactcctaaccctcgcccgactcagatctatctgccccgcgccgccgtcgccatgccgttcactccgggtccctactctggcgtcagcaccctcgcccttgtagcgagggcatcggtcttcggcttcggtgtcgtctacgggagcatcaagctctcaatcctcaaggcaacaaagcctaaaaaggaagaagcgcatgctcatcactaaggacgacagggctgctacatgttaatttctatggaaggatgatataaaaatgtggttgcactctttctccatacgtgcaatttgatttatgatttgtggacatcttgctgtaacacacctgctgagttatcttagttttgtgtcataataaaattcttagccaatgacttgaaatcaggaaggggaaaatcaaaagaacccacttttgttttgtcaggatgcgaagttaggacatggcttcttgaacttcggtcaagaggatctgccttgttgatcctgttttgttgcgacgttgcgaaaaaaaaaaaaaaaaaagcggcc

SEQ ID NO: 71398 - DNA, 389 bp, Zea mays
  Clone ID: MRT4577_16511C.1
tttctgcccacgcctgcgcccacgcgacccagccgggcgttcgcaaaagagaagggagttattatatcaacacaagatccaactagcttagatggcggagctccaaaaggccctaactttaaagcgatggagggacggaagctgacattgaacgacgctactaccggcgagaagaaatgacataacggaaatgaacagagtgagcctgcaccaagtataatatcttgtcctcgctgaaaccgcccgtatgcttcatatgggatacgagccacaacacaactgcaagattgtctaaacagacatcgcatcggaacggccaacacctaatgcatctgccacatggccaacagaaggctcgcgggacctcccttcagaaaaactggctaacc

SEQ ID NO: 71399 - DNA, 247 bp, Zea mays
  Clone ID: MRT4577_165120C.1
atgtgcgtgggtgatgccccagcagcaaaagaggacaaaggtaacaaggatgctactgcttatcacgagcacgaagagggagaagacaaggatatggcggggggggaacaagagagactaagagaggagccatgtaatgcactacccgcatagaaggctcatgcgagccaaggagaaggggactaagaaaggcagtgtataccggctccaacaaccacgggaagaaggtccgggtcacgaccaccag

SEQ ID NO: 71400 - DNA, 181 bp, Zea mays
  Clone ID: MRT4577_165121C.1
ggttcacgggcggtctgctgtcgtgtcgagcccgctctcgtgatccgtccgtcacacgcacgaacccgggttgatgacgacccaaatttattttatgtattttataaagcgcttttgattcgattcatgtgttgtatagtttgtttgttgtaatatgaacacatgtgattccgatttaaaa

SEQ ID NO: 71401 - DNA, 1415 bp, Zea mays
  unsure (1)..(1415): unsure at all n locations
  Clone ID: MRT4577_165122C.1
ccggccgggcggcggacacatcaccggctcgcccgaggccttggcttcgctcagaagcgaccctgactaaatcgccacaccgactgaccgagttgcaggagcatttaacgcaaagagtgagtcagacagacagtcaggccttgccaaaggcgccacggcgaactccgctccgcccgaccccagggctcggactcgggctaagacccggaagacggcgaactccgctccgcccgaccccagggctcggactcgggctaagacccggaagacggcgaactccgctccgcccgaccccagggctcggactcgggctaagacccggaagacggcgaactccgctccgcccgaccccagggctcggactcgggctaagacccggaagacgacgaaactccgcctcgcccgaccccagggctcggactccgccctggcctcggccaaacgacctccgcttcgcccgaccccgtggctcggactcggcctcggcaacagaagacagactcaacctcnggcttcggaggagcccccacgtcaccccgcctagggcacagacccgccacgtcaacaggaagcgtcatcatcgtcctaccccgaatcgactcgggtcacggagaacaggaccggcgtcccatccggccagctccgccggatgggcaatgatggcgctccacgagctctgtgacgacggcggcccccagctctcttacggaagcagggcgacgtcagcaaggactcgaccgctccaacagctgtccctccgccaggctccgtcgcacctccgacagccacgacatcacgccagcaagtcaatactcaactttgaggaacaggaacgacacagtcgcaaccctcaaccttttgatgaatctgtactccacacacttctagacaattcattgcctgagacagatgaattggaccaatgcaaagcgatcatggtccccatggtaagcagggggcattggacattgtatgttgtcaacaaggtcaagaagtgcattcatattttagattccaacccatatggaccaacacttggtggaactacatggaaggactatcattttgcacatttgggctcaggtggcagaaagttaccatgggctaaggttattatgagcagattaaacaaagcaatacaacatgtacggcccagtacatgctttcccaagtttggtaacttcacaattgacttgtgcccaaattgtcctaacatggcagctggatcaaatgactgtgggttttatgtcatgggttacattctattttatcaatgcgacgaaggatctttgcggtcagacatagaagcaggcaacaccagtgagatacgttctcttgcgctgcattacatcacattccacccgaagaacaaagcattatcgctgctccaagacatccaaagattcaaggtctaa

SEQ ID NO: 71402 - DNA, 206 bp, Zea mays
  Clone ID: MRT4577_165123C.1
gcccctggagggtctttgtttacatgggggaaattccaatcctcgacggggtagaaaacagttaggaacaacacgcatgttaaaaggggccaaacattggaaacgcattgggttttagaccctcggcttcggtccatcgggtacaaaaaatatcaccaaattgtttctgtttttgatcttggtgaaccaccagacaaagctacgct

SEQ ID NO: 71403 - DNA, 1979 bp, Zea mays
  Clone ID: MRT4577_165124C.1
atggccgcctcaggctactcgggctccgcgcccattactgatcaggggttcgaaggctggcccccgaaggaaggacagcgccgcctgcgccactccgactgcagtgccactcgacagagtgagtctgacaggcagtcaggccttgccacgacgaactacgctccgcccgaccccagggctcggactcgggctaagacccggaagacggcgaactccgctccgcccgaccccagggctcggactcgggctaagacccggaagacggcgaactacgctccgcccgaccccagggctcggactcgggctaagacccggaagacggcgaactccgctccgcccgaccccagggctcggactcgggctaagacccggaagacggcgaactacgctccgcccgaccccagggctcggactcgggctaagacccggaagacggcgaactccgctccgcccgaccccagggctcggactcgggctaagacccggaagacggcgaactccgctccgcccgaccccagggctcggactcgagctaagacccggaagacggcgaactccgctccgcccgaccccagggctcggactcgggctaagacccgaaagacggcgaactccgctccgcccgaccccagggctcggactcgggctaagacccggaagacggcgaactccgctccgcccgaccccagggctcggactcgggctaagacccggaagacgacgaaactccgctccgcccgaccccagggctcggactccgccctggcctcggccgaacgacttccgcctcgcccgaccccttggctcgggctcggccgcggcaacaaaaggcagactcaacctcggcttcggaggaacccccacgtcgccctgcctagggcacagaccgccacgtcaacaggaggcgccatcatcatcctaccccgaatcgactcgggtcacggagaacaagaccggcgtctcatccggccagctccgccagaggggcaatgatggcgctccacaagctctgtgacgacggcggcccctggctctcttacggaagcaggacaacgtcagcagggactcgaccgctccaacagctgtccctccatcaggctccgccgcacctccgacagccacgacatcacgccagcagggtgcccagatctctccggctgccacattggcatgtacctagggcgctagctctccctccgctagacacgtagcactctgctacaccccccattgtacacctggatcctctccttacgactataaaaggaaggaccagggccttctcagagaaggttggccgcgcgggaccgaggacgggacaggcgctctcttggggccgctcgcttccctcacccgcgtggacgcttgtaacccccctactgcaagcgcacctgacctgggcgcgggacgaacacgaaggccgcgggacttacacctctctcacgctcgactccggccacctcgcctctccccccttcgcgctcgcccacgcgctcgacccatctgggctggggcacgcagcacactcactcgtcggcttagggacccccctgtctcgaaacgccgacagcttcggaacgccctccaacttccgaagggagactctgacgttcgaggtggtcgggttccgaggaacctaccacacggtactgggaaggccatgctacacgaagttcatggccgtccccaactacacctacctgaagctcaagatgcggggccccaacggggtcatcaccgtcggccccacgtacaagcacgcgttcgaatgtgacgtggagtgcgtggagtacgccgaggccctcgccgagtccgaggccctcatcgccgacctggaaagcctctccaaagaggtgccagacgtgaagcgtcatgccggcaacttcgagccagtggagacggctaaggccgtccccctcgaccccagtggcgacgtctccaagcaaatccggatcggctccgggctcgatcccaaatag

SEQ ID NO: 71404 - DNA, 567 bp, Zea mays
  Clone ID: MRT4577_165125C.1
ctaagtcccggaagacggcgaactccgctccgcccgacccagggctcggactcgggctaagtcccggaagacgacgaactccgctccgcccgacccagggctcggactcgggctaagccccagaagatgacgaactccgctccacccgacccagggctcggactcgggctcagccccagaagacaacgaactccgcttcgcccgaccccagggctcggactccgccctggcctcagccgacggcctccgcctcgcccgacccaggggctcagactcgacctcggccacggaagacagactcgacctcggcttcggaggagcttccacatcgcccaacctagggcgcagaccagccacgtcaacaggaggcgccatcatcgccctaccccgagctgactcgggccgcaggaaacaagaccggtgtcccatctggctcgctccgccagataggcaatgatggcgccccgcatactctgtgacgacggtggctctcagccccttacagaagcaagaggacgtcagcaaggactcaaccgctccgacagctgtccctccgccaggctccat

SEQ ID NO: 71405 - DNA, 233 bp, Zea mays
  Clone ID: MRT4577_165126C.1
ttctcacccgggcgggcaccagaaccgcgggggaaattctagaggcacacccgggccatcccacaaccaacctgcgcggtaagcatcaccccatcatcagacatgaccatccaaacaatattgaacactgactactcatggagacttgcacccaaccacgcacaggacagcagcaaagacgtgctggctgataagagggcaacatgcacgaaggagactgacgaagccgagaa

SEQ ID NO: 71406 - DNA, 1002 bp, Zea mays
  Clone ID: MRT4577_165127C.1
atgcaaccgagaaaggctggtccccttgcaaaaaagtgcgacaaaagcctccaagcgagtgctaacactcccttcgaggctcgggggctactgtcggggaccataattaggggtaccctcaagacgcctaattctcagctgagccgaggtgaccgccgtcactccaccgctccactggccagtctgacaggaggacagcgccgcctgcgccactccgactgcagtgccactcgacagagtgagtctgacaggcaatcaggccttgccaaaggcgccacggcgaactccgctccgcccgaccccagggctcggactcgggctaagacccggaagacggcgaactccgctccgcccgaccccagggctcggactcgggctaagacccggaagacggcgaactccgctccgcccgaccccagggctcggactcgggctaagacccggaagacggcgaactccgctctgcccgaccccagggctcggactcgggctaagacccggaagacggcgaactccgctccgcccgaccccagggctcggactcgggctaagacccggaagacggcgaactccgctccgcccgaccccagggctcggactcgggctaagacccggaagacggcgaactccgctccgcccgaccccagggctcggactcgggctaagacccggaagacgacgaaactccgcctcgcccgaccccagggctcgaactccgcctcgcccgaccccagggctcggactccgccctggcctcggctgaacgacttgcgcctcgcccgaccccttggctcgggctcggccacggcaacagaaggcagactcaacctcggcttcgggggaaaccccacgtcgccctgcctagagcacagaccgccacgtcaacaggaggcgccatcatcatcccaccccgaatcgactcgggtcacagagaacaagaccggcgtctcatccggccagctccgccagaggggcaatgatggcgctccacaagctctatga

SEQ ID NO: 71407 - DNA, 486 bp, Zea mays
  Clone ID: MRT4577_165128C.1
atggcgcctcctgtcgacgtggtcggtctgcgccctaggttgggcaatgtggaggctcctccgaggtcgaggtcgagtctgtcttccgtggccatggtcgagtccgagcccctgggtcgggcgaggcggagatcgtcggctgaggccagggctgagtccgagccctggggtcgggcgaagcggagttcgtcgtcttctggggctgagcccaagtatgagccctgggtcgggcggagcggagttcgtcgtcttctggggctgagcccgagtccgagccctgggtcgggcggagcggagttcgtcgtcttccggggcttagcccaagtccgagccctgggtcgggcagagcggagttcgtcatcttttggggctgagcccaagtccgagccctgggtcgggcggagcggagttcgccgtcttccggggcttagcccgaatccgagccctgggtcgggtggagcggagttcgccgtcttccgaggctga

SEQ ID NO: 71408 - DNA, 656 bp, Zea mays
  unsure (1)..(656): unsure at all n locations
  Clone ID: MRT4577_165129C.1
ccggggctagctacctatagctctcgcagccgagccctctgggctgggggggctgagcactgtgagaagacgtgtggcagacgcggggtgggcgcaggccgagcgggagcagcgccggccgtgcacggagcccatcgggatcccgggcatcgcgggggcggggcgggtcgcccagcgggagactaaccgggtggggaacgacggcgacggcgaggcggtgcccccgcacgtgctgctggcgcggcgcagggcggcgtcctcggtgtgctccggccagggccgcacgctcaagggccgcgacctgcgccgcgtgcgcgactccgtcctgcggatgaccggcttcatcgagagctagcctcggcctcggccagcggggggtgcccacgtcggcctcgcttgctgccctgccccacctcgctggtccagcatcgtactagcgtcagtaatgcagcagcaaccagcccgcccgatccaaacggttgaatatgtaacgctgtctgagtcagtacgtccctgatcggttgatttccttttgtgagagattgggtgttacagaggatggtcccatgagaatgcattttgtattcctttgtaaaattcataccaaatgggacggaggtggatttagtttttnnnaaaaaangngnntnnntnnt

SEQ ID NO: 71409 - DNA, 295 bp, Zea mays
  Clone ID: MRT4577_16512C.1
aagctgttagctgtagtatattctatgtttatcctccctcttgttgaaatgttgtacatgggccacatgggcctagacacatagcacatatactctaacacccccccgctgtctgaacttccgtcgcagcggagttcacagacaggactcaaaaaggaagacgtaaccacaccgtacagtacaccataggatccccccacagccgcaactagccactactgatgttgaggctggagcgaaaactcgcgaaggtcgaggacggaaggcccttggtgaagatatcaacaaactggga

SEQ ID NO: 71410 - DNA, 546 bp, Zea mays
  Clone ID: MRT4577_165130C.1
tcaaccccggaagacggcgaactccgctccgcccgacctagggctcggactcgggctcagccccggaagacgacgaactccgctccgtccgaccccaaggctcggactcgggctcagccccggaagacgacgaactccgctccgcccgaccctagggctcgaactcgggctcagccccggaagacggtgaactccgctccgctcgacccagggctcggactcaggctcagccccggaagacgacgaactccgctccgcccgaccccagggctcggactcgggctcagccccggaagacgacgaactccgctccgcccgaccccagggctcggactcgggctcagccccggaagacggcgaactccgcttcgcccgaccccagggctcggactcagccctggcctcagccgacggtctccgcctcgcccgacccaggggctcggactcgacctcggccacggaagacagactcgacctcgacctcggaggagcctccacatcgcccaacctagggcgcggaccgaccacgtcaataggaggcaccat

SEQ ID NO: 71411 - DNA, 417 bp, Zea mays
  Clone ID: MRT4577_165131C.1
cccacgcgttcgccggtacgttgacgaataccagcctaggctttctttccccgtgtgggcctacaaagatgtggcccgacgtcgccgttgaccgagggttattcgaaggctcccggaggttaagccgttgcggagacacgaatcttacagactggctctgcgatgaggctaatgattctgtggtccacgtgcaggacgactactgctgtggactttgagcttcacttgtagaaaggtcccgctgccacaatcatattggagtgagtgactaatagtcctgaggtgggcgcggatcgatatgatctgtgcaagtctactggactgattattgtggaccttgtgctagcatcattatggggatacccttacaactcttgatgtaggctattcacgctatgcgctgacagcgctgctttg

SEQ ID NO: 71412 - DNA, 474 bp, Zea mays
  Clone ID: MRT4577_165132C.1
actgacaatgtatgcgttttttttgttttttatccacagtaatttatgtaaaacattgcacacttgtaatagtggaacgaaaacaagggaactagtagtacatggcatgcacgctgattaacacacacacaaaaaaaaagaacttgcaaattaatcacgccagcctgacctaaacttatctggagatacccaaagcctggctgtaataagctgggcaagtgtgtagttactactactgctagataagtactccgtagtagagacagtactatatatcacagtattaattgttctatgaccaaaggctcagtgacccgtcgcgcccgacatgaactatctcgggcctggcacatgtaccgtacgtatgtttcgcgagaagatgcatgtggtgcggctgcgcactcagcaaaacggaaacccgtcgtcaggtaggtcgtcgtaggaatgggcgagacacagcgcgtccgtcacatc

SEQ ID NO: 71413 - DNA, 339 bp, Zea mays
  unsure (1)..(339): unsure at all n locations
  Clone ID: MRT4577_165133C.1
ttttgcgttcggaaatagaggctattttaggagagacatgcctttacatgatacttagcccatccaaaaaaaaacgctttgcctcgcagcgttagcccgggcttacttgtgggaacgataacaatacttggttggcttgttgacagccgacggcatcacatggaattattagagcggctcagtgaccttggatgttcaaatcccaagaatcacatagccagatattcaattacctaaacaagctcaatgtacgccataagggcatcatctccccgcctcgcgaacggngggatgatccttgagcagccgccttctgggggtccatacctgtctgcaacc

SEQ ID NO: 71414 - DNA, 1377 bp, Zea mays
  Clone ID: MRT4577_165134C.1
ttgggtacctcgaggccggccgggcaccgccgctccagcctcctctagagccttcgccgcttcgcgcctcggcggcagtcatcggatcggaacctgcacaagtagaagtacgcaacaagccttgccactaacatgccttcagtcgaggtcgaggtccaggtgggcggcgccggcgggtggaggccgaagcagcagcaccaccatccccttgagatccgtcaggtgtgggcggacaacgtggaccgcgaattcaagctcatccgcgccgccatcgagcggttcccctacgtgtccatggacacggagttcccgggcgtcatccaccaccctcccccggccgtccaccactccacgctcaccgcgccgcagcgctacgccctgctcaagtccaacgtcgacgcgctgcacctcatccaggtcggcctggccctggcgccgtcccctggctccccgcccgcgctcgccttccagatcaacctccgcggcttcgacccgcgcgtgcaccgccacgcgccggactcggtccgcctgctcgccgccagcggcctcgacctcgccgcccaccgcgccaggggcgtccccgcgcgcgccttcgccgcgctgctcgcctcgtcgggcctcatctgcaacccggccgtcgcgtgggtcaccttcagctccgcctatgacttcgcctacctcgtcaagctgctcatgggacggaagctgccaagggcgctcccggacttcctgcgctacgtccgcgtctacttcggcgccgccgtctacgatgtcaagcacatggccagggtcgcatgcgcctcccacggcgaggtcgcgctgctgggcggcctcgagcgcgtcgccgccgcgctccgggtgcgccgcgcagcgggccaaggacaccaggcagcgtccgacagcgtgctcacctgggacaccttccgggagatggctaggatctacttccccaaggaaggcagcctggagccgtgcgccggcgtgctctacggcctcgagctcccaaactgaattcttcttgttcgtgtacagtacacagcctcccaaacgaagaaataacgattctttgattacttaaattcttaaaaaaaaaaaaaaaaagcgaggaccttgcagtgcagggatcattcatactttcagaaattgcgcaactagaacgctataaaaatccacgtcattccaaaagatttcagataaatctttataaaaaaggggtactttactactctgaggccgaagcagcagcagaagcaccgccaccaccaccatccccttgagatccgtacagtgtgggcggacaacgtggaccgcgaattcaagctcatccgcgcagccatcgagcggttcacctacgtgtccatggacacggagttcccg

SEQ ID NO: 71415 - DNA, 860 bp, Zea mays
  Clone ID: MRT4577_165135C.1
ccgggatctttaactccgcccacttcggtcgattcaacgctgactctcgccctgcaaaaccaaactcgggctcttctggccgagttggatattcgcctccagtcactcgacgggaagtggaaatcacggattagtgccctggagtctcaagcggcgaagacggctcgttccatcgctggtcgggcagccgttcttcgtgccgacatcgaggcccaccttacggcctcatatgtcacgaccgagtctcgactccgatagatcgagatcgacaccggaagccgcctctcggccttggaatccaacatgcagatcttggattattggcgccccaaggttgatgcatcactcgccacgatctactcgtccaccgagtggggtcgcatcgaggcttcccgacgggagagttcgacaccgatcggtggccgcatcggtagcttcagcagcttcggcgcaccgggcatcgtcgacacaccgcctcccttcgatgcgtctggtggatcggtactggggcgacctctgggtcctcgattcagagccgacggccctcgatttgggcactgctctgacaccttcctccgggacagtggaattgggcatcccacccaaattcactgaccggtcacgggtacgtgggatgctccttcttcaccttccttcgcgtttgttcctcctggcgagttagggtcccatggtttacttattcatcatctcgggggtttacctaagctcagttttccttcgtttgatgggacaagtccgaagttatggcagaagcgttgtgaggactactttgatatgtattccatagatgaggtagtttgggtggaggttgtgaaaaaaaaaaaaaaaaatttgcggcc

SEQ ID NO: 71416 - DNA, 480 bp, Zea mays
  Clone ID: MRT4577_165136C.1
gttgtgtgtttttatggtattttatttttttttctgatttttttctttgttggttgggggccaaaagaaaccccggaagaaaaaaatgccccaggacttaaggggcggcaaggagcggggaaagaaggaaccccccgagaggcaggggggcccaaaaaaaagaaccccaagaaaagatcccgcccccccaaaaaaaaggtgaaggggaacacccgcccgagcggaaagaaaaacttgggggatggatggggccaccccagaaggggggacgccttaaaaaggacaaaaaaacggttagaccaccccctagattttgggggcagggcccccctttccagggggggggtccttgtccatgcccccggggccgcccatggtttcacccccccccggggccatttgggggaaggggggggtggaaagggcctccaactcctttattttgggctcaaacccccccgcctgggggggggggggggg

SEQ ID NO: 71417 - DNA, 209 bp, Zea mays
  unsure (1)..(209): unsure at all n locations
  Clone ID: MRT4577_165137C.1
ccccaaaccaaaancnnannnnangnggganngancaagcanggagagaacccanaacnacagcncnngcacaagcnggccngcnggaaccgaaggagggcgaccccnngaannnaaccgccaaggcaagcccngccccgccaccgngcccnnnggcacaaacagaagcngaacgggggaacnnacccanncnnaaacgaannagagca

SEQ ID NO: 71418 - DNA, 512 bp, Zea mays
  Clone ID: MRT4577_165138C.1
aattcggcacgaggaaggagcatggcattaagcctggcattcctgaacacgaccttgacgagaagaccctttttcaccttaacccatttggccggtttggcattggtggaccttacggggatgctggcccttactggccggaagaacattattgacacctaccgggggtggggagcccatggggggggcgctttcttcgggaaggacccaaccaagggtgaccggaacggaacctatggcgcaagggaagctggcaagaacattgtcgccagggggcttggttgccgggccattgtccaagtggcttaacccattggcgtgcccgaacctcttttcggggtcgtcgacacctaccggaccggcgcgaaccccgacaaggagaaccttaagaatggcaaagagaacttcgatttcaagcctggcatgaacattattaaccttgaccttaagaaaggggggaacgggcgcttccttaagaaggggggctacgggcaatttggaaaggaccaacc

SEQ ID NO: 71419 - DNA, 485 bp, Zea mays
  Clone ID: MRT4577_165139C.1
ggggggcgaccccaagatcgattaaaatgaacgggttcattttgcttggaacaggttcccaccgaacgatattggccctgttatatcccgggaatataaaccctttccctccattggccaacactagctgggcaacagcagtaactgtagcagatggatacaagctgtccggggggatgcaaaaaacaatcttccccttcacatcgctggtgtttacgtactctggatcacaactggttgtatatacccccacgttttaatactcattattatatggaccccaaatattcgttgccatattattctcagttttatttaacacatgcatattcgttggggaaaaattgacattggttaggggaccaatcaatcatatatacccctgagttcaccaagggcaccacctcggggaaatgatcttttttcccttgcgtccccacgtataaggattgaccatgcacaattctggttgtttcccaagggga

SEQ ID NO: 71420 - DNA, 1153 bp, Zea mays
  Clone ID: MRT4577_16513C.1
cattgggtacctcgaggccggccgggtgatggagatctatgaaccggtgtttcagttggtgttggaagcctccatggttacatccaggtcagtcgaaattcagagatttcctctggtggtctttttggtatttccaatttgtcaggtccaagtattatgggtgcagagcatcacaattactaactccttggacaccacctatgacattatgtttggttggtgatgaccttgttgtgatgctagttattccaagtatgctactgttatctcggtgctattttagtggagtagaatgtgtgctggcagctgcagatccgttattttctacatttcatgctgagagagagttgttctggaagccaccttggcaacatctagttcctaacaccagatctgagatacagttgttgatggagtttgtctatctcaatacaggagtctgccgttctctgcacatgattactaaattttctaagcaatactttgttggcctatttttgctaattacaagggaaaaatttatgtctgggagaataatgttggctcttcttccacttctgaagctatttacatcaggaggagcaaggattgtcaatgcttcctcacttgcgtcggagctgaagagaatgccaaatgagaagttgcgaaacgatttgagcaacattgacatctgggacgaggaccggatagaagcagtgctcgacacattcttggaggacctgaggagcgggcggctggaagaggctgggtggcccgtgatgctaccagcctacagcgtatcgaaaatggtcatcaatctgtacaccaggatcatggcaaggaggtatccggagatgcgcatcaactgtgtgcgacctggctttgtcaagacggacatcaactggaatctgggggtcctgacgcctgaacaaggtgcgagagggccagtcatgctagctctcctccccgatgatggaccaactgggtgctattttgatcagacagaaatggtgaacgtctggtgattgaatatttgtcgtctgctagtttattttagaactaaaccgctagaaataaaaaagagcggatggagtgttataactttcctgaattcatgatgacataaacacatacacatggtaaaacgttcttatgatcagttggtgtagtttcc

SEQ ID NO: 71421 - DNA, 603 bp, Zea mays
  Clone ID: MRT4577_165140C.1
gccgcggcgtccggaaggaagaaaaaaaacgcacggcagtaacgcacggtcgaccgcagtgcttgaataccagtccactccttcattccaatgtttccacccactgctcccaatggcgacgccgttcccgacggaggaccgacgagggggtaggctcggaagctcctatacaaggcgtacaactagctgcacacgctggcgtcccagctgggcggcgcagcggcggggccggcggtcgcggtactgacccaccaaacggactggaagagcgccctatgcgaggcgctcatggcgatccagttcaaccacctaagacgcggcaccaagacgcggtgccccttcgctctacacctccgtttgaacccgcgctgcgacgagtcctatttccgactgctctttgcaaccaacaatgccaaccaacatgacgaagccggggtttgcggctggcccatgtcgatcgatgacttgcaggtatatattgaagctgaaaacttgacgcttgacaatgacccatgccagttttcatagatagaaatcattactaacgttgaatacaagcattcccccaatctaatcattattgacactttagacctcatgctt

SEQ ID NO: 71422 - DNA, 492 bp, Zea mays
  Clone ID: MRT4577_165141C.1
gaacgattaaacaaaatggtgccataacatcaaaataatgcgtaccaaattatcttgtcttcctgttacaggggacgaagaagcattaacgcttccgttttcaacgcttctgtggcagcacttggtgatgaataatggattcgtgcagaacaaagcttctgcaaccagcgacaaggcggccttcatgggcggtgccgcgacgaacaacgaccatacacgcaagtgctgtcaactattctaggaagatcttgatgaacagataactgctctttcttcctactttctcagtgagtcgtgctgataacgtgttggaatatactcagtggtaacgagattgagagagaaacaaatgacagaactgtagtctttattgcagagtgtcatgtatttatacaggggatacacagtctcccaaggggtgtgtcccttaggagtaactggcagttgatcacaggacaatattttgtaacaaggtatatagcgttcgcagtt

SEQ ID NO: 71423 - DNA, 297 bp, Zea mays
  Clone ID: MRT4577_165142C.1
ttttttttttaaacttctttgatttttagtctgaattcggttgtgtatttttttttttggtttctgcgttgatttttagtctgaattcggttgtgtatttcaaaatttgctttctgtgagagatatcacaaattcaaattggtaaaccaaaaatacggccttatcgatcggcgcctccaatcactgatacaccgtccagtaagccggattagccgaccatctcggtgaaccttgttgtatccattcagtgttagcaatagtgtcccaaaccacactgcatgagccatttgctcgtgc

SEQ ID NO: 71424 - DNA, 155 bp, Zea mays
  Clone ID: MRT4577_165143C.1
cattattggcaatagcaaaattcacatctatttgtctctggataacgggtctttcttctctgcaatgcccttttttcattcttatggtctgagtggagccctcttataccgtacacggcatgtcttgcgtcttgggttttatgtttacattacat

SEQ ID NO: 71425 - DNA, 305 bp, Zea mays
  Clone ID: MRT4577_165144C.1
tgtaactaactcgatcacggtaatcttcatcaggctcatgtacttccagatcgttaccgatgaggcatggatgccactgatgatgactcccaattatggcgcgctccaatcgtggatgcgctgatcagcaactcatgccgtcacaggtcagctacgatcgggactacacggagacgtgcggaactccgatcttataacccggagagcttaagaactgattctgctaccgttccacgacctgatagatgacctcaccctgctgactgtgtgcaaacccatcgtcaacgagatgtgattctaacagt

SEQ ID NO: 71426 - DNA, 616 bp, Zea mays
  Clone ID: MRT4577_165145C.1
ttaaatattaatagagctcctgcagagatctggggggggggggggggggccccccgaggcccccggggggcgtccgctgggcatgttcgcggtggtgcctaatggtaccatacattgaccaatcagctgcgcaccaccgtgcgattgggaacactcaaaaagattgtccgcgatcaaacaattgtgagtacccaccacggaactcacggaactgggagatgcaccccgttttcccctcccccccccttaccctgtttacctaacgcacgtcacgagtaacacccccccacaaacctactaaaacagtgcccccttcagcagcaacccagttggtgaccaaagtcacccacaccctgttctcacgaccaacttcaacacaacgaagaccacgacctcgacaacacaaagacctaccagaaacgtttgaagagagcgacagtagggtaggtttgagccacgggcagttctatacacttctccccaaccagccgctcagtatcggtctagaacctaccgcctcgggaacttaccccgaactctaacggttgtctacgcagcgagttccttgggaggtattagccttcgagaggtagagggtcttatttagtcccaatta

SEQ ID NO: 71427 - DNA, 1205 bp, Zea mays
  Clone ID: MRT4577_165146C.1
ctggaacaggtgaagctggcaaactactagctgaaggtatctccagtttatggcataatgatttgctacacttgctgacttcgcttttgccaatgatttcatcacaatggtccatatcacagaacatagagatgtttggtagaggaggaccagctcctggtgttgggtttggctgggggacatgtggtggagggttttggtctcttaaatgcctacttgcacaattggattcacaattggttgtagaattgatcaaatgtttctcttcagttcaaggaagtcctatcatcctcgatgaaggtgtgaagttagataatgtgactaacacagttgtgacagcttcaaattggatcagttctaccctagggttgtctctgattgctggacctggacaaatctatatgttggagaaggttttcgatatgatttttgaaccttccattctgaagtatctcaaatcatctatacataaatttacctctaacatggaattactgaaaccttttgaatgggacttaaatgaagatgaatatatgctcttcagcagtgttctcaaatcacatttcagatccagatggttagccatcaagaagaagcattcagataaatatgcaggagataatagcagcaccaagatttcaaaaacaccagagatattggagacaattcaagaagaaacagagttgtcagaagctgtaaatcaaccttgcaacacattaatggtagagtgggcgcatcagagactgcctcttcctatccactggattctaagtgcagtttgctgcattgatgatccaaaaggcacactctcaacatcagccaactatattcttgatgtctcaagggctggtcttatcttccttttaggtctggaggccatttcagctaccccgtgccttcatgctcctttgatctggaaaattcatgcactttcggtctctatccgctctagcatgcatttgctacaggaagacagaagtagggatattttctgtgctttacaggaactgtatggcctgcatctgaacaggttatgccaaaaattctgtaaaccaaactctatcgaggaagttaagggcgttgtagtgggcacttcagaggaagcgatggagatcagtagccttgaaattctcaggtttcaggagaaaattcatggaagctatactacttttgttgagagcctggttgatcaatttgcagctgtc

SEQ ID NO: 71428 - DNA, 927 bp, Zea mays
  Clone ID: MRT4577_165147C.1
atggaaggacagcgccgcctgcgccactccgactgcggtgccactcgacagagtgagtctgacaggcagtcaggccttgccaaaggcgccacggtgaactccgctccgcccgaccccagggctcggactcgggctaagacccggaagacggcgaactccgctccgcccgaccccagggctcggactcgggctaagacccggaagacggtgaactccgctccgcccgaccccagggctcggactcgggctaagacccggaggacagcgaactccgctccgcccgaccccagggctcggactcgggctaagacccggaagacggcgaactccgctccgcccgaccccagggctcggactcgggctaagacccggaagacggcgaactccgctccgcccaaccccagggctcggactcgagctaagacccggaagacgacgaaactccgcctcgcccgaccccagggctcggactacgccctggcctcggccgaacgacctccgcctcgcccgacccaatggttcggactcggcctcggcaacagaagacagactcaacctcggcttcggaggagcccccacgtcaccctgcctagggcacaggcccgccacgtcaacaggaagcgccatcatcgtcctaccccgaatcaactcgggtcacggagaacaagaccggcgtcccatccggccagctccgccggatgggcaatgatggcgctccacaagctctgtgacgacggcggcccccagctctcttacggaagcagggcgacgtcagcaaggactcgactgctccaacagctgtccctccgccaggctccgtcgcacctccgacagccacgacatcacgccagcaaggtgccaagacctctccggctgccacattggcatgtacctagggcgctagctctctctccgctagacacgtag

SEQ ID NO: 71429 - DNA, 572 bp, Zea mays
  Clone ID: MRT4577_165148C.1
ttttcttgagataataaaaatgtactcctttcagtgttgctatcatcataaagtgttgcttgtggacttcctttttgtaatattcgtctaatgttgatgagaatcaaccggttggtgatgtgaatgaccaaataacattgctaaacactttgttaatgtaacatacatgactggtataggggatccacgagagagaaagcactgggcgctcctactgatgcttttgaaagttttgtcctccttggtttagtggaaacaagttattattctactttaatgatgccttcttagaattttatataactagacaagtgaaaatatgggatatacattgtcttttgcacccatggatgtgtaagttgtaacctcatcaatgcagttatgctctggttttaaaaaaatagtgagcttacatatgcctgcacgcggactgctgatccatgtgttcccctttcttgagcccaatacacatgctaatagcagcatcaggttttagtgttgctgacttgctgtgtggggcaaaccaaaacaaggcaggcttcaaatctaaggaatttccctcttgcctaggg

SEQ ID NO: 71430 - DNA, 2707 bp, Zea mays
  Clone ID: MRT4577_165149C.1
atgcaaccgagaaaggctggtccccttgcaaaaaagtgcgacaaaagcctccaagcgagtgctaacactcccttcgaggctcgggggctactgtcggggaccataattaggggtaccctcaagacgcctaattctcagctgagccgaggtgaccgccgtcactccaccgctccactggccagtctgacagaaggacagcgccgcctgcgccactccgactgcagtgccactcgacagagtaagtctgacaggcagtcaggtcttgccaaaggcgccacagcgaactccgctccgcctgaccccagggctcggactcgggctaagacccggaagacggcgaactccgctccgcccgaccccagggctcggactcgggctaagacccggaagacggcgaactccgctccgcccgaccccagggctcggactcgggctaagacccggaagacggcgaactccgctccgcccgaccccagggctcggactcgggctaagacccggaagacggcgaactccgctccgcccgaccccagggctcggactcgggctaagacccggaagacgacgaaactccgcctcgcccgaccccagggctcggactccgccctggcctcggccgaacgacttccgactcgcccgaccccagggctcggactccgccctggcctcggccgaacgacttccgcctcgcccgaccccttggctcgggctcggccacggcaacagaaggcagactcaacctcggcttcggaggaaaccccacgtcgccctgcctagggcacagaccgccacgtcaacaggaggtgccatcatcatcccaccccgaatcgactcgggtcacggagaacaagaccggcgtctcatccggccagctccgccagaggggcaatgatggcgctccacaagctctatgacggcggcggcccctagctctcttacgaaagcaggacaacgtcagcagggactcgaccgctccaacagctgtccctccatcaggctccgccgcacctccaacagccacgacatcacgccagcagggtgcccagatctctccggctgccacattggcatgtacctagggcgctagctctccctccgctagacacgtagcactctgctacatccccattgtacacctggatcctctccttacgactataaaaggaaggaccagggccttctcaggaaaggttggccgcgcgggaccgaggacgggacaggcgctctcttggggccgctcgcttccctcacccgcgtggacgcttgtaacccccctactgcaagcgcacctgacctgggcgcgggacgaacacgaaggccgcgggacttccacctctctcacgctcggctccggccgcctcgcctctccccccttcgcgctcgcccacgcgctcgacccatctgggctggggcacgcagcacactcactcgtcggcttagggacccccctgtctcgaaacgccgacaaaaataatttgcattcatgataatctgccgttcgactattaaggaattaaggatgatgccatcacgtttcgtaactattaatttctgtttctgcacaagatcttgcatctattgtgaattctctctttgaatttctaatgggaccaagacatctagagagattcaaatgcatttttcattttactcaactgacacttaaatatctgatacattgttttgaatgcccgatgagattgatagtgcaactacctccacattattctgtgcatttctcaggggagtcacaatcaatgaaatggaccatgagattaagggttgttctctgtcttgctgaggctttagaatattgcaccaacaggggccgtgctctctaccatgatctcaatgcctatagagctctgtttgatgatgattgtaaccctagactttcctgttttggcctcatgaagaacagtcgtgatggaaaaagttatagcaccaatttggcatttacgcctccagaatacatgaggactggacgtattactcctgaaagtgtcatacacagctttggaaccttactgattgatgttcttagtgggaaacatattcctcctagccatgcccttgacctgattcgggaccgaaacttcaatatgctcttagactcatgtttagagggtcaattttcaaatgaggaaggggcagaaatggtacgattagcttcaaggtgccttcactatgaaccccgtgaacgacctaatgtccgatcacttgtgcaagtattgactcctctacagagggatgttgagactccatcttatgtgctgatgggtgttccacgtggcggtgcatcttctatccaaccattgcatctttcccctcttgccgaagcttgttccagaaaggatctgacagcaatacatgaaattctagaaaagacaggctacaaggatgatgaggggactgcaaatgagctctcgtttcagatgtggacaaatcagatgcaagatacactgaactcaaaaaagaagggtgacaatgcttttcgacaaaaggattttactactgccattgattgctattcccaggtttgaagtttgatgtgttctgttcttctattttgtatggatgtgacagagatactggagttgcatgattgaatgtaattagagtcatacaggttcaacgtcttctaatttgttccctaatactcgtatattaaggcactatgggaaaacagctctgggttacatatgct

SEQ ID NO: 71431 - DNA, 947 bp, Zea mays
  Clone ID: MRT4577_16514C.1
aattccctgcctgcgattcctctcccctcgcctcctcgtcttcccctaggggatcgccggagaggaatcgcaaagagggccgtctcatccaagttaaggaagccatggagcacaaggagactggatgccaggcacctgagggacccatcctttgcatcaataactgcggcttcttcggcagcgcagctaccatgaacatgtgctccaagtgccacaaggagatgataatgaagcaggagcaggccaagctggctgcctcctctatcgacagcatcgtcaatggcaacgatgctgtcatggaaccagttgttgctggcaacacagtggtcgctgctgctccaatcgagttgcaaacaatgaacgtgcagcccgctgatgttgctggacctagcgagggggcggcggtgatctccaaagggaaggtagggccgaaccggtgcagcacttgcaggaagagggttggacttacaggattcaactgccggtgtgggaacttgtactgtgcactgcaccgctactccgacaagcacgactgcaagttcgactatcggactgctgctagggatgccattgccaaggctaatccagtggtgaaggcggacaagctcgacaagatctagggtttcctacggttggctcaaggaagattgcaacctgtggtacttcatcatgcggaattgctgcattgcccatgcctttccctttcatgtttgctgctacaatcttgttgttcggcattgcagtgcatggtgcgcacttccgcagcctgcctcaagaattctcgcctctgcatctggtcagttcaaatgatttgcatgttggctatgttgtgtaagcttttatttatggtcgtctcgctcagacggtatttggcttcgcatttagctagctatgtgatgtactattgtccctggtgtgttacactgcaaccagtaatagtaatctgc

SEQ ID NO: 71432 - DNA, 214 bp, Zea mays
  Clone ID: MRT4577_165150C.1
gacaaaatcagtcgcctgatttaatgcgtttaacttaatgttagctaaaatgtcacgccaagcgtcttaacttctcaattgaaggtgacacgcaaagatattgtacactgatcaacataatcacgacagtttctgatgcatatcagcaatagaggtattagtatgccaaaaattgtgcccaagaaacttcgccacccaaaatgtgtatgctttc

SEQ ID NO: 71433 - DNA, 489 bp, Zea mays
  Clone ID: MRT4577_165151C.1
atggcgcttttcccccctcctccttacggaaaggcgatgcaggggcaggacagcgtcgcctgcgccgctccgactgttgtgccactcgacagagtgaggctgacagcagccaagttcggcctcgggcgccataggaagctccgcctcgcccaaccccagggctcggactcggcctcggccccggaagacgacgaactccgcctcgcccgaccccagggctcggactcggcctcggccccggaagacgacgaactccacctcgcccgaccccagggctcggactcggccttggccccggaagatgacgaactccgcctcgcccgaacccagggctcggactcggccctggcctccgccgacggtctccgcctcggccgacccaggggctcggactcgacctcgacctcggaggagcctccgcctcgcccgacccagggctcggaccgaccacgtcacaggaggggccatcattaccctacccctagctag

SEQ ID NO: 71434 - DNA, 865 bp, Zea mays
  unsure (1)..(865): unsure at all n locations
  Clone ID: MRT4577_165152C.1
ctcgaggccggccgggcgcagttctcgcctctacaagcccccgcgaagcccgatctaccatggtggaaatcatgactatgcaacaccgcaccgctgccgatacacagctcattcgaggacttgctcttgaccacggtgcaaggcatccggatatggccaagagggtagagaatgcatacatcctgaccctgaacgtcagcttagagtacgaaaagtccgagatcaactctggcttctactactcgagtgcggagcagcgagagaagcttgtagagagtgagcgccgtttcgtcgacgagaagctgaggaaaattgtcgagctcaagaaggaggtttgtggcaacgatcccagcaaaggtttcgttataataaaccaaaagggcattgaccccctcagtctggatgtacttgtcaagaacggtatcttcgcattgaggagagctaagaggaggaacatggaacgtctacagcttgtctgtggtggtacagcgcagaacagcgttgacgacctgacaccggacgttcttggctgggcaggctctgtctatgaacaccaattgggcgaggagaagtatacctttattgaagatgtcaaagagccaaagtctgttaccctactgatcaagggaccaaactcgcacactattgcccaaatcaaggatgctgttcgcgacgggctgaggagcgtgtacaacatgattgttgacggaagcgttgttcccggaggaggcgccttccaagtagcatgtgcagctcatctagagagcgagcagttcaagaagacggtcaagggtaaagccaagtgnggagtttcggcttttgctgatgcgctttctatcattccccagacgctggcggctaactc

SEQ ID NO: 71435 - DNA, 492 bp, Zea mays
  Clone ID: MRT4577_165153C.1
atgggggttcctccgaagccgaggttgagtctgtcttctgttgccgtggccgagcccgagccaaggggtcgggcgaggcggaagtcgttcggccgaggccagggcggagtccgagccctggggtcgggcggagcggagttcgccgtcttccgggtcttagcccgagtccgagccctggggtcgggcggagcggagttcgccgtcttccgggtcttagcccgagtccgagccctggggtcgggcggagcggagttcgccgtcttccgggtcttagcccgagtccgagccctggggtcgggcggagcggagttcgccgtcttccgggtcttagcccgagtccgagccctggggtcgggcggagcggagttcgtcgtggcgcctttggcaaggcctgactgcctgtcagactcactctgtcgagtggcactgcagtcggagtggcgcaggcggcactgtccttctgtcagactggccagtggagcggtggagtga

SEQ ID NO: 71436 - DNA, 3364 bp, Zea mays
  Clone ID: MRT4577_165154C.1
atggcgcactcccccctcctccttgcggaaaggcgacgtaggggcgtatgtaaaaagtcgagtctgtccctgatcgtcctctcgccctgtgcagaggctcgggggctgctctcgcaaaaaccggctccggccaaaccgttgacagcgtcaacataccagcccgagagcttgggccccgaccgtgcacccgggctacagccagttcgcatgagggaacgaccagaccagccaaagcattacgcaagtctgacagaaggacagcgccgcccgcgccactccgactgcggtgccactcgacagagtgaatctgacaggcagtcaggccttgccgaaggcgccacggcgaactccgctccacccgaccccagggctcggactcgggctaagacccggaagacggcgaactccgctccgcccgaccccagggctcggactcgggctaagacccggaagacggcgaactccgctccgcccgaccccagggctcggactcgggctaagacccggaagacggcgaactccgctccgcccgaccccagggctcggactcgggctaagacccggaagacggcgaactccgctccgcccgaccccagggctcggactcgggctaagacccggaagacggcgaactccgctccgcctgaccccagggctcggactcgggctaagacccggaagacgacgaaactccgcctcgcccgaccccagggctcggactccgccctggcctcggccgaacgacctccgcctcgctcgaccccatggctcggactcggcctcggcaacagaggacagactcaacctcagcttcggaggagcccccacgtcaccctgcctagggcacaggcccgccacgtcaacaggaagcgccatcatcgtcctaccccgaatcgactcggagatgtcattgagcattcactcaatgtggatccatctttcaggccaagaaaacaaaggcttcggaaaatgtccgatgacaaagctgaaggtgctcgaaatgaagtgaagaggcttcttagtgctggcgttatcagagagatcttaacaaggcttgtccaaaggatgagttcacatttgccaagaatagattctctagtagatgcagcagcttcatcagagcttatgagtttactagattgttacttaggctaccaccaaatctggatgaagaaggaagatgagccgaagaccagcttcataacccctagtggaacatattgctatcttcggatgcctgaggggctcaagaatgctggaggaagcttcaacagaatgacaaccaaggagaaattggaaggacaaatcaaaaagcaagccccaatatactttgtctccgaagttctaagcttatcaaagaaaaattatacagaattggagaaggtattgtatgctgtcttaatggcctctaggaagcttcggcactactttcaagcattccatataattattccttcatctcagcctttgaaagatattatgaggaacagagaagctactggaaggattggaaagtgggctgcggaactcaacgaattcagcattgattatgtgcatagatactcaatccagtcccaggcgttagcagacttcatcgctgactggacgccaggggctcaggaagaagcaaataaagatgccgaagcttggacagtgttctgcgacggttcctggggaaccttcggggcaggtgcagctgctatcttggttgcaccttccaaagtcagaacatgctatgcagtaaaacttgatttcagctgcacaaataatattgctgaatacgaagctttgcttttggggcttcggaagttaaaggcaatggggataagaagggcggtccttaaaaccgattcccaagttatttctagtcatgttgacaagagttgtagagcaagagacccgaagcttgagaaatacctggatacagttcgaaggcttgaagcttctttcgaagggttttctgtcaagaatattccacgaggagaaaatgtgcacgctgatctgctatccaagtcagcggcacaggggttgcccttacctttggaagtattctttgagacaataagagcacctttggtggaacttcttgaaagagcagtgctcaatatatctcctgttcatagtgaagattggaggactgagattatatcttttctccaaggcaactgccttttagatgacgaagcttataataagagaatggaggcaagagcacaaccatatgtaataatagaaggggagttatacaaacacggagtctgctctccactgctcaagtgtctatccagagctgaaggtatagaattgatgaaggaaatacatgcaggattgtgtggatctcacattggatctagacctttgctggggaaagtcttcagacaaggattttattggccgaaggcagcttcggatgcagcggatctggttcaaaaatgtgaaaattgccaaaaatgcgcaagagaccagaaacaaccttcgtcgttaacccaactgatacaaccaacctggccattgcaaagatggggcctggatttgttaggtccacttccaccagcacaaggcaatttaaaatatgttgtggtggctgtagaatatttttctaagtggattgaagcgaagcctttggccacaataacttcggtcacagtccagaaattcttttggcaaaacattgtttgtcgcttcggcgtaccaaaggctataactgtggacaatgatacacagtttgatgctgaaaccttcaaggaattctgtggtcaaatcggcacgaagatccattttgcatcagtcagacatccataatcaaacggactcgttgaaagagccaatggcattataatgacaggaataatgaagttaatcttcaatcaacccaggggaaagtggccagatcaattaatcaaagtggtgtggagccacaacacaacaacatcaaggtcaacaggctttactccattcaagttattgttcggtgacgaagcaataactccggaggaagctaaaactggatcaataagagtagtagcttcggcagaatcaggttctgaagctgcttattctgtggaaaaagatgctttagaagggatcaggcttcaagctgtggagaacatcaataaatatcaagccgaaacaatcaaatggcgtgatagaaaggttcggctaaagaatattgagccaggacatttggtgcttcggagagtggccaacccagatacagtgggcaagttgcagttgaaatgggaaggaccttttttggtagtatcttcgtcaagacccggttcatacagattgaaggatatggacgacaacgacattcctagatcttggaatgcagatgagcttcggcgatattatgtataacttg

SEQ ID NO: 71437 - DNA, 375 bp, Zea mays
  Clone ID: MRT4577_165155C.1
atggcgcctcctgttgacgtggctggtctgcgccctagattgggcgatgtggaggctcctccgaggtcgaggtcgagtctgtcttccgtggccgaggtcgagtccgagcccctgggtcgggcgaggcggagaccgtcagctgaggccagggctgagtccgagccctggggtcggacggagccgtgttcgtcgtcttccggggctgagcccaagtccgagccctgggtcgggcggagcggagttcgccgtcttccggggctgagcctaagtccgagccctgggtcgggcggagcagagttcgctgtcttccggggcttagcccgagtccgagccctgggtcgggcggagcggagttcgtcgtcttccagggcttag

SEQ ID NO: 71438 - DNA, 837 bp, Zea mays
  Clone ID: MRT4577_165156C.1
atgcaaccgagaaaggctggtccccttgcaaaaaagtgcgacaaaagcctccaagcgagtgctaacactcccttcgaggctcgggggctactgtcggggaccataattaggggtaccctcaaggcgcctaattctcagctgagccgaggtgaccgccgtcactccaccgctccactggccagtctgacagaaggacagcgccgcctgcgccactccgactgcagtgccactcgacagagtgagtctgacaggcaatcaggccttgccaaaggcgccacggcgaactccgctccgcccgaccccagggctcggactcgggctaagacccagaagacggcgaactccgctccgcccgaccccagggctcggacttgggctaagacccggaagacggcgaactccgctccgcccgaccccagggctcggactcgggctaagacccggaagacggcgaactccgctccgcccgaccccagggctcggactcgggctaagacccggaagacggcgaactccgctccgcccgaccccagggctcggactcgggctaagacccggaagacgacgaaactccgcctcgcccgaccccagggctcggactccgccctggcctcggccgaacgacttccgcctcgcccgaccccttggctcgggctcggccacggcaacagaaggcagactcaacctcggcttcggaggaaaccccacgtcgccctgcctagggcacagaccgccacgtcaacaggaggcgccatcatcatcctaccccgaatcgactcgggtcacggagaacaagaccggcgtctcatccggccagctccgccagaggggcaatga

SEQ ID NO: 71439 - DNA, 873 bp, Zea mays
  Clone ID: MRT4577_165157C.1
atgccggagatatttatgtgctatatttttactataggggagaggcgaagagtgtcacaaggacagcgccgcctgcgccactccgactgcggtgccactcgacagagtgagtctgacaggcagccaggccttgccaaaagcgccacggtgaactccgctccgcccgaccccagggctcggactcgggctaagacccggaagacggtgaactccgctccgcccgaccccagggctcggactcgggctaagacccggaagacggtgaactccgctccgcccgaccctagggctcggactcgggctaagacccggaagacggcgaactccgctccgcccgaccccagggctcggactcgggctaagaccctgaagacggcgaactccgctccgcccgaccccagggctcgaactcgggctaagacccggaagacggcgaactccgctccgcccgaccccagggctcggactcgggctaagacccggaagacggcgaactccgctccgcccgaccccagggctcggactcgggctaagaccctgaagacggcgaactccgctccgcccgaccccagggctcgaactcgggctaagacccggaagacggcgaactccgctccgcccgaccccagggctcggactcgggctaagacccggaagacggcgaactccgctccgcccgacccagggctcggactcgggctcggccccggaagacgacgaactccgcctcgcccgacccctgggctcggactccgccccggcctctgccgaatgacttccgcctcgcccgacccaggggctcggactcggcctcggcaacagaggacagactcaacctcggcttcggaggagcccccacgtcaccccgcctag

SEQ ID NO: 71440 - DNA, 585 bp, Zea mays
  Clone ID: MRT4577_165158C.1
atggcgcctcctgttgacgtggtcggtccgtgccctgggttgggcgatgtggaggctcctccgaggtcgaggtcgagtctgtcttccgaggccgaggtcgagtctgagcccctgggtcgggcgaggcggagaccgccggctgaggccagggctgagtccgagccctggggtcgggcgaagcggagttcgtcgtcttccggggctgagcccgagtctgagccctggggtcgggcggagcggagttcgtcgtcttccagggctgagcccgagtccgagccctggggtcgggcggagcggagttcgtcgtcttccggggctgagcccgagtccgagccctggggtcgggcggagcggagttcgtcgtcttctggggctgagcccgagtccgagccctggggtcgggcgaagcggagtttcctatggcgcctgaggccgggcctggctgctgtcagcctcactctgtcgagtggcacagcagtcagagcggcgcaggcggcgctgtcctcttgtcagaccggtcagtggagcggcgaagtgactacggtcacttcggctctgtcgactggagggtgtgcgtcaggataa

SEQ ID NO: 71441 - DNA, 145 bp, Zea mays
  Clone ID: MRT4577_165159C.1
aatacattagtggtagctggtttgagaagcaaagactgtaagcctgtgtgtgccactgtgtgcttcagcagtatatcctactaataagcctctctatttaatccagtgagttttaagtctggatctcattcccttcttctttccc

SEQ ID NO: 71442 - DNA, 630 bp, Zea mays
  Clone ID: MRT4577_16515C.1
cctcgaggccggccgggacatttctttgccaggcgattacctgttgtccctctcccgtcgtctcgtcgtccaccgctagctcatcgttcaacaggaatcacatagagggcggtgtcgtccgagctaacgaagccatgccactacaactaggttgggcgccactccccctagggacccatgctctgcatcaataactcgtggcttcttcgtcagcgcggcgaccatgaacatgtgctctaagtgccacaaggagatgataactaagcaggatcagggcaagctggctgcctcctctatcgacagcatcgtgaacggcagcgacgccgtcatggagccggttgttgctggcagcaacacggttagtagctgttgaccaagtcgagttgcaaacaatgaacgtgcagcagcccgctgatgttgacggacccgctgaggaggtggcgatgatctccaaaggtggaaaggtaggctcgaaccgatgcagcgcctgcatagaagagaggttgtactcacgggattcaactgtccgagagagaatttggactgttaggtccactgctactccgacaagcacgactgtaagttctactaccgtactgctgacagggatctccttgccaatattaatcc

SEQ ID NO: 71443 - DNA, 937 bp, Zea mays
  Clone ID: MRT4577_165160C.1
atggaaggacagcgccgcctgcgccactccgactgcagtgccactcgacagagtgagtctgacaggcagtcaggtcttgccaaaggcgccataggaagctccgctccgcccgaccccagggctcggactcgggctaagacccggaagacggcgaactccgctctgcccgaccccagggctcggactcgggctaagacccggaagacggcgaactccgctccgcccgaccccagggctcggactcgggctaagacccggaagacggcgaacaccgctccgcccgaccccagggctcggactcgggctaagacccggaagacggcgaactccgctctgcccgaccccagggctcggattcgggctaagacccggaagacggcgaacaccgctccgcccgaccccagggctcggactcgggctaagacccggaagacggcgaactccgctccgcccgaccccagggctcggactcgggctaagacccggaagacggcgaactccgctccgcccgaccccagggctcggactcgggctaagacccggaagacggcgaactccgctccgcccgaccccagggctcggactcgggcaaagacccggaagacggcgaactccgctccgcccgaccccagggctcggactcgggctaagacccggaagacgacgaactccgcttcgcccgaccacagggctcggactccgccctggcctctgccgaacgacctccgcctcgcccgaccccgggggctcgggctcggcctcggcaacggaagacagattcgaccccagcttcggaggaacccccacgtcgcccggcctcgggcgcgggcccgccacgtcaacagggagcgccatcatcaccctaccccgagccaactcgggccacagagaacaagaccgacgtcccatctggctagccccgccagataggcaatga

SEQ ID NO: 71444 - DNA, 303 bp, Zea mays
  Clone ID: MRT4577_165161C.1
cccacgcgttcacccacacgttcggtttttttctccccctgcagttctggtggggtgttttgaggatatacagagttacattttttctggttcgcggatctagattgtggcttctaatgtttagtaccgctgctatttaggtcacttttctgggccatggactaccacttcaatcaaatcgccttgattacctacttccatgtcctttagacccatataattctctttctttataccctaaggtcccccccctttagtttcttaaccttttccatagtagagttatagctaaaatccctttac

SEQ ID NO: 71445 - DNA, 590 bp, Zea mays
  unsure (1)..(590): unsure at all n locations
  Clone ID: MRT4577_165162C.1
gtcatggtcggctactccgactccggcaagnacgccggccgcctgggcggggcgtggcagctgtacagggcgcaggaggagatggcgcaggtggccaagcgctacggcgtcaagctcaccttgttccacggccgcggaggcaccgtgggcaggggtggcgggcccacgcaccttgccatcctgtcccaggcgcggggcaccatcaacgggtccatccgtgtgacggtgcagggcgaggtcatcgagttctgcttcggggaggagcacctgtgcttccagactctgcagcgcttcacgggcgccacgctggagtacggcatcacgaccctgcgcgccatcccctggatcttctcgtggactcagaccaggttccaccttcccgtgtggctgggagtcggcgccgcctttaagttcgccatcgacaaggacgtcaggaacttccaggtcctcaaagagatgtacaacgagtggccattcttcagggtcaccctggacctgctggagatggttttcgccaagggagaccccggcattgccggcttgtatgacgagctgcttgtggcgggagaactcagcccctttggaagcag

SEQ ID NO: 71446 - DNA, 860 bp, Zea mays
  Clone ID: MRT4577_165163C.1
gccggccgggtcgaatagaccgagtacgggaggatgaacttcggcagccggccagccaagaggaggcccggcggcggcatcacgaccctgcgcgccatcccctggatcttctcgtggactcagaccaggttccaccttcccgtgtggctgggagtcggcgccgccttcaagttcgccatcgacaaggacgtcaggaacttccaggtcctcaaagagatgtacaacgagtggccattcttcagggtcaccctggacctgctggagatggttttcgccaagggagaccccggcattgccggcttgtatgacgagctgcttgtggcggaagaactcaagccctttgggaagcagctcagggacaaatacgtggagacacagcagcttctcctccagatcgctgggcacaaggatattcttgaaggcgatccattcctgaagcaggggctggtgctgcgcaacccctacatcaccaccctgaacgtgttccaggcctacacgctgtccaaggagttcgccgacgagaacaagcccgccggactggtcaagctgaacccggcgagcgagtacccgcccggcctggaagacacgctcatcctcaccatgaagggcatcgccgccggcatgcagaacactggctaggcggcttctcttcactcacctgcagagtgcaccgcaataatcagcttccggatggtggcgttttgtcagttttggatggaaatgccgaactggcagcgtctgttttccctatgcatatgtaatttcctgcctcttatattcactcttgttgtcaagtccaagtggaaaatcttgggatattatacatattgtaaataataagcatcgttacaatctgcatg

SEQ ID NO: 71447 - DNA, 826 bp, Zea mays
  Clone ID: MRT4577_165164C.1
cattgggtcccgccggccggcccgggtacgcattccgtctcctagttttggggcggcgccctctgttcacggttctttgagatttcgattgcttttccattccagttccagtagaattcctcttctcttctattgtgcgagggcttcgctgttggatctttctctgtgaagagagtgcaagcagacgggcggtctgaactgatgccgtgttgattcgtctgcagttacatgccttccttcgggcgggcatccgagagaaagcagcaaaattagtcgctacgtctgccctatttgctcttaatatctttttgagtttgtcaaagtactggtgctgtgatgaagatgctcaactatttctatgtctggacatctgagatcaatttctgtgattggtttaagcatcattctgagctccgaacaattatatcttttttatcaatttgctgttgcgcccggcttatattcttcttgggaagggctcaatcatcgattgaagcaagcccaaagatcctgagaaagcaaagctggtgcagacatcgagatggttaacttaccaaccctttgcagccttgcattgcactggagtcaaatggtttaatcgaaattacttcatgttggtttttctgattcagttcgctcgtttgtcagcgcttattatgacggcaagtgatgtgcaaatctttatcctacacacttaatggaattactgccatgtgtggactaatctccgcttattatctgatgcttttgtcaggcgctgctcctttttttctataaaaatctttttcttgaaaaaaaaagcctattttaagagcttagattttct

SEQ ID NO: 71448 - DNA, 751 bp, Zea mays
  Clone ID: MRT4577_165165C.1
gccgaactggcagcgtctgttttccgtaggcgaggtgggttcctgcctctttatattcactcttgttgtcaagtccaagtggaaaatcttggcatattatacatattgtaataataagcatcgtacaatctgcatgctgttttgtaataattaattaatatcccagcccattggatggacttgtttaaaaaaaaaaaaaaaaaaaaaaaaaaaaaaaaaaaaaaaaaaaaaaaaaaaaaaaaaaaaaaaaaaaaaaaaaaaaaaaaaaaaaaaaaaaaaaaaaaaaaaaaaaaaaaaaaaaaaaaaaaaaaaaaaaaaaaaaaaaaaaaaaaaaaaaaggccccccgggggggggggggcaaaaaaaaaaggggcccccccccgggggggaaaaaaaaaaaaatttatttaaacccgccccccccaggggggggcgggcccccaacccccccccaaaaaaagggaaaaaaaaagggcccgggggggggcgtttaaaaaaaagggggggggaaaaaaaaggggggaccaaaaaaaaaaaagtgggaaaaaaaaccccctcccttcggggggggaaaaaaaaaaaaagacggcccgaaaggccttcccaaaaaaaggggccccctgatggggggaggaaaaaaaaaagcgtaaaaatatttttaaaaaccccgcaaaatttttttaaaaaaaccccttttttttttaaaaaaggcggaatggagcaaaaaccttccggggggggggggggggg

SEQ ID NO: 71449 - DNA, 756 bp, Zea mays
  Clone ID: MRT4577_165166C.1
aacttccagaagctcaaggagatgtacaacgagtggccattcttcagggtcaccctggacctgctggagatggttttcgccaagggagaccctggcattgccggcttgtacgacgagctgcttgtctccgaggaactcaagccctttgggaagcagctcagggacaaatacgtggagacacagcagcttctcctacagatcgctgggcacaaggacattcttgaaggcgatccttacctgaagcaggggctgcgtctgcgcaatccctacatcaccaccctgaacgtgttccaggcctacacgctgaagcggataagggaccccagcttcaaggtgacgccgcagccgccgctgtccaaggagttcgccgacgagaacaagcccgccggactggtgaagctgaacccggcgagcgagtacccgccggggctggaagacacgctcatcctcaccatgaagggtatcgccgccggcatgcagaacaccggctaggccgcttccccttcactcacctgcagagtactgcacggcaataataatcacagcttccggatggtggcgttttgtcagttttggatggagatgctgaaaactgacaccacctgttttcactatatgcatgtttatgtaatttcctcggctttggcctctttatatttttcactcttgttgtgaagtccaagtggaaaatcttggcatcttaaatatattgtaataatgaacatcatataatctacaaatttactattatgtatt

SEQ ID NO: 71450 - DNA, 859 bp, Zea mays
  unsure (1)..(859): unsure at all n locations
  Clone ID: MRT4577_165167C.1
cattgggtacctcgaggccggccgggaaaaaaacgtcaaagccagccccaactcgaccacagatccaacgcggtggcaagcgagatggcagccgcagcccgcagcccacaagcgcagggtgccatgtctgaaccatgcgtccacgcctgtcaccatgatcagccgatcactgctagtgctagcagactagcatcacaccgcgacccaccggcgtgttttagctttcaaggctactctccgtcatagtagcaccatcctcttccggagggaagtcgagcccgccacctgcttgtgcaaatgcgcaagacgacggccgtaacggcagcgccactcgtcatgcaccagattactctgggaaccacagtggataacgggggaccgaggacaagattgacattaggggaaccgaattccagcactcagacgcacttctgctttactcgtagtttgaagctaggcaattcgtcaagagccaggtacatgcagctccttgctgacgaggggcgcgcaggagcagcaattttcgcatgtgcagatatgttccaatgagaccatctcatggaaccacagaagaaagaaaagaccggcgatcttctctctctcaagtggatggcacagaactagcacacggttacatgctgagctatgccccatggatcacttccgtcgtaaaggtcagaactatcaactgccagttcgtcttgtagatgtgtcactaattaggcatttagatagtagatgatgcttcagacagatagcgtcgcacttgggcaattgagctatccgtaggcatagctgggaccatagcccatagnggtgtctcgaatggtgntaagtatgaatctgattgactattact

SEQ ID NO: 71451 - DNA, 3501 bp, Zea mays
  Clone ID: MRT4577_165168C.1
catcgcagcagcacgagcagcacgtcgtgccgctccaaccgtctcgcttccgtgcttagcttcccgccgcgccatggcgtcgaccaaggctcccggccccggcgagaagcaccactccatcgacgcgcagctccgtcagctggtcccaggcaaggtctccgaggacgacaagctcatcgagtacgatgcgctgctcgtcgaccgcttcctcaacatccttcaggacctccacgggcctagccttcgcgaatttgtccaggagtgctacgaggtatcggccgactacgagggcaaaggagacacgacgaagctgggcgagctcggcgccaagctcacggggctggcccctgccgacgccatcctcgtggcgagctccatcctgcacatgctcaacctcgccaacctggccgaggaggtgcagatcgcgcaccgccgccgcaacagcaagctcaagaaaggtggcttcgccgacgagggctccgccaccaccgagtccgacatcgaggagacgctcaagcgcctcgtgtccgaggtcggcaagtcccccgaggaggtgttcgaggcgctcaagaaccagaccgtcgacctcgtcttcaccgcgcatcccacgcagtccgcccgccgctcgctcctgcagaaaaacgccaggatccggaattgtctgacccagctgaatgccaaggacatcactgacgacgacaagcaggagctcgatgaggctctgcagagagagatccaagcagccttcagaaccgatgaaatcaggagggcacaacccaccccgcaggacgaaatgcgctatgggatgagctacatccatgagactgtatggaagggcgtgcctaagttcttgcgccgtgtggatacagccctgaagaatatcggcatcaatgagcgccttccctacaatgtttctctcattcggttctcttcttggatgggtggtgaccgcgatggaaatccaagagttaccccggaggtgacaagagatgtatgcttgctggccagaatgatggctgcaaacttgtacatcgatcagattgaagagctgatgtttgagctctctatgtggcgctgcaacgatgagcttcgtgttcgtgccgaagagctccacagttcgtctggttccaaagttaccaagtattacatagaattctggaagcaaattcctccaaacgagccctaccgggtgatactaggccatgtaagggacaagctgtacaacacacgcgagcgtgctcgccatctgctggcatctggagtttctgaaatttcagcggaatcgtcatttaccagtatcgaagagttccttgagccacttgagctgtgctacaaatcactgtgtgactgcggcgacaaggccatcgcggacgggagcctcctggacctcctgcgccaggtgttcacgttcgggctctccctggtgaagctggacatccggcaggagtcggagcggcacaccgacgtgatcgacgccatcaccacgcacctcggcatcgggtcgtaccgcgagtggcccgaggacaagaggcaggagtggctgctgtcggagctgcgaggcaagcgcccgctgctgcccccggaccttccccagaccgacgagatcgccgacgtcatcggcgcgttccacgtcctcgcggagctcccgcccgacagcttcggcccctacatcatctccatggcgacggccccctcggacgtgctcgccgtggagctcctgcagcgcgagtgcggcgtgcggccagccgctgcccgtggtgccgctgttcgagaggctggccgacctgcagtcggcgcccggcgtccgtggagcgcctcttctcggtggactggtacatggaccggatcaagggcaagcagcaggtcatggtcggctactccgactccggcaaggacgccggccgcctgtccgcggcgtggcagctgtacagggcgcaggaggagatggcgcaggtggccaagcgctacggcgtcaagctcaccttgttccacggccgcggaggcaccgtgggcaggggtggcgggcccacgcaccttgccatcctgtcccagccgccggacaccatcaacgggtccatccgtgtgacggtgcagggcgaggtcatcgagttctgcttcggggaggagcacctgtgcttccagactctgcagcgcttcacggccgccacgctggagcacggcatgcacccgccggtctctcccaagcccgagtggcgcaagctcatggacgagatggcggtcgtggccacggaggagtaccgctccgtcgtcgtcaaggagccgcgcttcgtcgagtacttcagatcggctacaccggagaccgagtacgggaggatgaacatcggcagccggccagccaagaggaggcccggcggcggcatcacgaccctgcgcgccatcccctggatcttctcgtggactcagaccaggttccacctccccgtgtggctgggagtcggcgccgcattcaagttcgccatcgacaaggacgtcaggaacttccaggtcctcaaagagatgtacaacgagtggccattcttcagggtcaccctggacctgctggagatggttttcgccaagggagaccccggcattgccggcttgtatgacgagctgcttgtggcggaagaactcaagccctttgggaagcagctcagggacaaatacgtggagacacagcagcttctcctccagatcgctgggcacaaggatattcttgaaggcgatccattcctgaagcaggggctggtgctgcgcaacccctacatcaccaccctgaacgtgttccaggcctacacgctgaagcggataagggaccccaacttcaaggtgacgccccagccgccgctgtccaaggagttcgccgacgagaacaagcccgccggactggtcaagctgaacccggcgagcgagtacccgcccggcctggaagacacgctcatcctcaccatgaagggcatcgccgccggcatgcagaacactggctaggcggcttctcttcactcacctgcagagtgcaccgcaataatcagcttccggatggtggcgttttgtcagttttggatggaaatgccgaactggccagcgtctgttttccctatgcatatgtaatttcctgcctctttatattcactcttgttgtcaagtccaagtggaaaatcttggcatattatacatattgtaataataaacatcgtacaatctgcatgctgttttgtaataattaattaatatcccagcccattggatggacttgtttaccatggtgttaaaaaaaaaaaaaaaaaaaaaaaaaaaaaaaaaaaaaaaaaaaaaaaaaaaaaaaaaaaaaaaaaaaaaaaaaaaaaaaaaaaaaaaaaaaaaaaaaaaggaaaaaaaaaaaaaaaggggccccaagggccgggcccgctcaaaaaaaaggggaccccccgggtggggggaattcaatttcaagtttttcaaacccgccaaccccgggggggggcccggaacccaattccc

SEQ ID NO: 71452 - DNA, 191 bp, Zea mays
  Clone ID: MRT4577_165169C.1
tctaggtggtcatcttgggacgagcaagagacgctgatttgctgtcgttggagtaacgttatgtaatgctggcaagagaacatgtatgcgatgctagatgaaaacttgaatgtgatgttagttaaaaacgtatgtaacttgagactttgtatttgatttgatgcaaggcaaaagaataagatattgtatgt

SEQ ID NO: 71453 - DNA, 1022 bp, Zea mays
  Clone ID: MRT4577_16516C.1
cctcgaggccggccgggacaccatttctaaccccgcgaattcgctgagagtcctctcccctcagatcctcgtatgccgctacgcgacgtccggacagaaatcgcagagagtggccgaactcaaccgatggatcgcaaccatcggagcacaaggagggtgggtgccagggccccgagggacccatcctctgcatcaataactgtggcttcttcggcagcgcggcgaccatgaacatgtgctctaagtgccacaaggagatgataacgaagcaggatcaggccaagctggctgcctcctctatcgacagcatcgagaacggcagcgacgccgtcatggagccggctgatgctggcagcaacacggtagtagctgttgcccaagtcgagttgcaaacaatgaacgtgcagcagcccgctgatgttgccggacccagcgaggggggttggcggcgatctccaaaggggggaaggtagggccgaaccggtgcagcgcctgcaggaagagggttgggctcacgggattcaactgccggtgtgggaacttgtactgcgcgctccaccgctactccgacaagcacgactgcaagttcgactaccggactgctgccagggacgccattgccaaggctaatccggtggtgaaggcagacaagctcgacaagatctaggttttctacggttggtgtcaggaagattgtaaaccgcggtaactcgtcatgcgaactgctgccccccgcgcctcctccagtgcgcacaactgtgtgggcatgcagtgcacggtgcacactgtgtagcccggcctccgagaatctcctgcctctggccatctggtcagttcaaaaatgatttgcatgttggctatgttgtgtaagctctatttatggtggtctcgctgagacgggtatttgcgttcgcagttatctagctatgtgatgtactgttgtcttgtccctgggtattatatggtacactgcagccagtaatagtaatctgcaactgtgcgttaaaaaaaaaagcggccgg

SEQ ID NO: 71454 - DNA, 191 bp, Zea mays
  Clone ID: MRT4577_165170C.1
tactccctaataagagtcgtattaaatcggcatatattgggccaggttctggtatattacatgtacacataactttggcatttgaaaccgtacgttcccggacgcctgtggcgttcgggggttatcagccattgatgcaagccttgttgatccaccaaagacgtagcacagtcgcttcgccagtactattc

SEQ ID NO: 71455 - DNA, 319 bp, Zea mays
  Clone ID: MRT4577_165171C.1
agttcaggttcggaatggccgggccaaccgtcgcagctcatataaaggacaatagtgttccctcaatggcagcccaaatattttggttccctatgctccctggtccttctgcaagagttggttccgcaaccatttttccacaatgctctcaaactcctattgttttccttttttccccatacctctcaccagcggggtgttctatgtgtgtaaacccaattgttctacccctcaagctccaacaagcaatcgctgcaagcaacattcccttatctcccctgttgtaacaatcgccagccccatctttggtgcagtcatt

SEQ ID NO: 71456 - DNA, 195 bp, Zea mays
  Clone ID: MRT4577_165172C.1
atccaaaattcctcacctacataggtattattatattccaaccaacctattatctattttccattaccctttcaataatcttctactattgtatactttttcctctatatttaatacactttaacacacccacccacccttctcaacaaccattcaacaacaaatatactactctttattttcctgctgttccca

SEQ ID NO: 71457 - DNA, 378 bp, Zea mays
  Clone ID: MRT4577_165173C.1
cccacgcgtacgaggacgcgtgggcggacgcgtggttcgattgggcaagttggggctggtggatgcaagcattgttttttttacttattatggagatgacattggtaggaagaagaaaacccttgctgaaaagaaggataatgctgagggacaagaggttgaggcaacatttgatgaaacgaaaaagagcattcatgtcatgaggaagcttgagaagcgcaaggtgggacgtactcttgacccacacattgaggagtaatttggcagtggacggttggtgtgatgcattttttcccgtcctggacagtgtggccgtactgattggtacattcttgagggtaaagaagttgagtttttatgaagaagctacagaggaag

SEQ ID NO: 71458 - DNA, 595 bp, Zea mays
  Clone ID: MRT4577_165174C.1
gctcgacgacggcctgtttaatctgcatccaccagattactgattacccgttggataacctacatgggaccccaactggtccgacgacccaacaaacctgaggctatgaccccaggccccacactcggaggcatcgacacgcacagtcaacactagcccgacacgtccacttggattaagcccctaaggtccatgtttaggactaggaagttgattattaagtcaaggtatttcacatctgtttccaggtcgagacagttgtttcccagtaggttgtggtgaaagaggtacactaggtcccgtacaatgatatttaggtcgtcgagttcgtactttttcaagacacatttttatcccctaacgagacggtgcacgagtagagcactataatggactttggtttgatattgcagaaggttcacgtggttttgctaattggagtagagttgctatactaactcgtaatgctggaggtcgatgatgatttggcatagatcctcgagatggtcgttaacttcaagtcaatggtagaggaggccaaggaggaccaggaagacttcctgcaactccaggtagaggttatattcaggatggt

SEQ ID NO: 71459 - DNA, 790 bp, Zea mays
  Clone ID: MRT4577_165175C.1
cagttaaaaaaatagctttattaccatcctagtaccttatctctacttacatcggacggacgaaataatatttcaaacaccgatactgcttacaaacagaacatgttcttagtttgcaacactacatggtatacatcagtaccaaacctaatgcagaatcgatgcaacaaatggcatccaacaccatcacagacgtgagattccaagcatgaacaggtacaattgaactttttgatagcttttacaatgcatgaagatacatttgaactttatgagagttcccgtgaccatgaccatactggaagtgtgcagttgtctctagaaggcatcaccctaatagttgccaggccgtggaacttctcggaggaaggaaccatcccctattctgaaatctgacacagggacgctacgcccaccagcagtgggcatggatagcaacatggaattatgaggatcatagtatggatttagtgacaacccagaaccatactgagacaaggatagagctggcataatatgatcagcatggtagcttggcgacacgtagggtggactcaccgaggtcaaactgaaccatgaaccatagccatcccttgtggccatctcatctctgggaaatgaatctattggcaaacgaaacaaaccagcaggacctattggtaccttcacatcatcatgcggtaataccttgttaaggtagtctgttggtgttggtagtgcgagtatttcctgactgacatgggctgtcctgcagatgaaagttccacccacgcgtccgcccacgcgtccg

SEQ ID NO: 71460 - DNA, 305 bp, Zea mays
  Clone ID: MRT4577_165176C.1
ctgcgtacacaactacagtttggatcgatggacacgtacaatctgatctgaatcattggaccccgccacaccactctacgccgtacgtacagtttcgtcgtatgattttatataagcacatgagtctacaggtagacgtaaatcatggatgagctagctacggatgatatatatagcttgtgcgtttttttacaactttttttttggtccttttggtttatacatatttattagcagatacggatcgaatacaaatattaaaaatggttcgttcttttttaaaaaaaaaaaagagtatactaaaa

SEQ ID NO: 71461 - DNA, 231 bp, Zea mays
  Clone ID: MRT4577_165177C.1
cggacgcgtgggaaaaaaaaaaaaaaaaaaaaaaaaaataaaaaaaaaaaaaaaaataaaaaaggagggaaacttacacaaacttggataaaaaataactaaaacttaaatgcaacataaatatctattaatctgggcggccctttttaagcggtcccaacttgtagttccctttgcttgtacccccctttgctttccttggggggcctccagtttacttcagttggccta

SEQ ID NO: 71462 - DNA, 606 bp, Zea mays
  Clone ID: MRT4577_165178C.1
gtgtttgatcacagacagcggctacagaaaagactgactgttgttggagtcgaccttgccaaggttgccataattgacaacactccacaggtaaagtcaatgtagattctttttgtgctcttgattgagctgaaactgtttatggtctttaagtgcggtgaacttacagttgtgtttcagaacttttatgccgtattttgcgccacatgcttgctttgctgcttctttggcactttgcagctgacaagcatctaaattattctgtgtttaatcaggtttttgagctgcaagtgaacaatggtataccaatagagagttggtatagcaaccccttggacgaggcgttacctcagttgatcccattcttggagaccctcgctgtagcagatgatgtccggcctatcattgccaagaagtttggcaatataatagataatcgctaaggttcttaaataagtatagggttagtcttgtttactggaagaacctagatgacatctttaactggtcaaggtgggggcatttttctcttaagggctagtttgggaaccctattttcctaaggttttttttttccattttcccaagtaaaattagttcattttt

SEQ ID NO: 71463 - DNA, 1859 bp, Zea mays
  Clone ID: MRT4577_165179C.1
ccggccgggacccatatgaaccaattgacctcctcctgatcgtcgtgggccagcgctgggctgacgcccgtgcaccggtcggtttctgttcggttcggcagcagggtgcgctcggtcagaaatttagtcccatcggctcggatccgcccgcccgccgtgcgcgcgcgcacgcacgcacgcctcgcgagcagatggggctggcagtggcggtgggcaggcggccgacgcagcggtccggtgtctcccgttctcgctgcgctggcaagagacccactgccgccgagccccgacaccaccggcaccgcacggagggaagaaaagaaagaaatcccgggggatcacgtcgttatcagcgaccagattcagacgcgagccgagcggggaggcggaccacactagaactagaaccctctctacggctctactacgctacgccccatcccgcccggaccggaccggacccaccttcctccacctctctgcccgccgccggccgacccgaatgggggcgggaaccaataatggcctgagcaacggcgccgccgcagggcagcgcgcggacgacgggaccacggtgttccggggcacgggcgtactcgccgctacggaccacggtggcgctcgcgctgtggctcggggccatccacttcaacgccttcctcgtcctcgcctcgctcttcctcttcccgcgccgcgtcgccgcactggtgctggcgacgcagctcttcttcatgttcctgccgctcagtgataagagcagactgggccgcaagatcgccaggttcataagcaagtacgtcattgggtattttcccgtcactttgcacgtggaagactatggcgcctttgatcccaacagggcttatgtgttcggttatgagcctcattctgttttgcccatagctgttgggatcctcggggaccttgttggattcatgccgctaccaaagatgaagattcttgcaagcagtgcggtgttctacaccccgttcctaaggcaaatatggacatggttggggttggctcctgcgtcgagaaagagtttctactcctaccttggagctggttatagctgtattatagtgccaggaggtgtgcaggaaatacttcatatggatcatgattcagaggttgcttttcttaaaccaagaaaaggttttgttaagatagctattgagatgggttgccctgtagtccccgtttttgctttcggacagagctatgtttacaaatggtggaggccaggtggcaagttaattgtcaagattgctagagcaatcaaattttctccaataatcttctggggaaaactggggactcccatcccttttgcaacaccaatgcatgtgattgttggaaggccaattgaggttgtaaagaatcctcaacctaccattgatgagataaaccaagtccacggacagttcgttgttgcgatgcaagatctgttcgagaaatacaagagcagaactggataccctgatcttcagttaagagttctttgatggcgtgctgttccaatgaaaagctcttatcagctaggtttaagggataaaatggctgttcagacccatcgactcaattgatcgtagcatttgggctataatgtttttgagcacaggtccattattgaaattctgtaccccattccaaattagaagacgtttttttaatatgtagcttttctatgcagttgcatacatactatgtctaaaaatataaaaaaatatatgtctagaaagggaatatatcatctgtaaagcaagcagtcatgataattttttaaaacaacccttctatcgtactcagcgaaaaaaaaaaaaaaaaaaaaaaaaagtcgacgcggccgcgaattccag

SEQ ID NO: 71464 - DNA, 1114 bp, Zea mays
  Clone ID: MRT4577_16517C.1
cttttgatagcaccttcagtctggcattaggttgcagcatgtcttactgaatcaaggcagtaccaactttcacttagattttatgattgtttttttactactagtagcaacttttgggaagctggtgacacactatgtcgactactattctggtattgatcagttgtttcgtattattctagttaaggaagccatggagcacaaggaggctgggtgccaggcccccgagggacccatcctctgcatcaataactgtggcttcttcggcagcgcggcgaccatgaacatgtgctccaagtgccacaaggagatgataacgaagcaggatcaggccaagctggctgcctcctctatcgacagcatcgtgaacggcagcgacgccgtcatggagccggttgttgctggcagcaacacggtagtagctgttgcccaagttgagttgcaaacaatgaacgtgcagcagcccgctgatgttgccggacccagcgagggggtggcggcgatctccaaaggggggaaggtagggccgaaccggtgcagcgcctgcaggaagagggttggacttacgggattcaactgccggtgtgggaacttgtactgcgcactccaccgctactccgacaagcacgactgcaagttcgactaccggactgctgccagggacgccattgccaaggctaatccggtggtgaaggcagacaagctcgacaagatctagggggggttccctacggttgggtatcaggaagattgtaaaccgcggtaactcgtcatgcggaactgctgccttgccccccgcgcctttctcttccatgtttgctgctacaatcttgttgttgggcattgcagtgcacggtgcacacttgtgtagcccgcctccgagaattctcctgcctctgcatctggtcagttcaaaaatgatttgcatgttggctatgttgtgtaagctctatttatggtggtctcgctgagacgggtatttggcttcgcagttatctagctatgtgatgtactgttgtcttgtccctgggtattatatggtacactgcagccagtaatagtaatctgcaactgtgcgttaaatggccaaaaaaaaaaaaaaaaaaggccccta

SEQ ID NO: 71465 - DNA, 243 bp, Zea mays
  Clone ID: MRT4577_165180C.1
caattctaatgtatcatcagatagcacagggcacaagataggtgggtcaggcaagtcataactgaaaccgacttccaaaccaaagatcaacagcatggtgggtaaccgagttattaagacccggaggcaggcttatatttacgtaccaactgggctaatgattcagctaaagcgtcacactctggagctgggaattcagctcgtcctaattattcacaaccgtttcatggagatcacttaggc

SEQ ID NO: 71466 - DNA, 250 bp, Zea mays
  Clone ID: MRT4577_165181C.1
ctagatcgcgaacggccgcccttttatgattttttcctgagccaggattcattccggctattcaaaatctttataaattagagaggtaatccggttaggaattaatcggggcttccaatccggaacaccggaacagccctttacgaggctactggttggagcacttacatagcagcggccttggcctggtgctgtgcatgcaccgggccggcccaaacgacgcaacattggcaggggccgaggaggtgga

SEQ ID NO: 71467 - DNA, 329 bp, Zea mays
  Clone ID: MRT4577_165182C.1
ggtgggcgcaccgcaactgagcctgtatagcacgagcgcgcccgtgagagtggaagagggggctggccccgccggcctgagcagatcatcggaaggcacaccgagctcttgccagctgcctccactccacccaatggcgatgccgagggcggagtcactccgcttactgggcctgctgaagcagcccgagtccgacgccggcgccccattcgagctcgacgagcgcgacgtggtgtgtccggcgtgcggtgggcagcaagacggttgtgccgccccgcctacgccgaggtgtcatgcgcacgccgtgccgctgtacatcttaggactgt

SEQ ID NO: 71468 - DNA, 298 bp, Zea mays
  Clone ID: MRT4577_165183C.1
ccgtttcaaaaagcccttcttcgtccccttcttcccctgccgctaggctctccctcccctcggtcgtagccatggagaccacttcccctgcctcttcacctgggcacatctccctcccagctgctgcaggtaggactaagctagcagctctggcctcgccaccacacacatcacatgcatacatattatctatctttctatatatgtaatatgctcagatcactcttgctatgttcatctgcgtgctccaatcatatcattctttttcatggaaaaaaaaaaaaaaaaaaggccccta

SEQ ID NO: 71469 - DNA, 1424 bp, Zea mays
  Clone ID: MRT4577_165184C.1
aaatacataccaatcctggtaaccatctatatatctttgcaacgccgaatttcatagaaaccgggggaaattaaaactcggcgtacctttgctgagctgatgaaaaaaagaaatagatcatctgagacggagaaagtgaaaaagaaaagaagaactgaaaatggctcgtgaagacgagcacatgtatgcaaacaaaggccttttctatatcggccaacggattgatctcgtgaaatcgctcctctcccgtcccgtcatgcgcgcgatccatagttcattgttggatgcatgcaccatggacgaaaagcatgcatgcatttcagcatagtctagcagctagataggatatatccaggcgcaggtgatgatcatgcatgatacatccgatccatgaaaaagaatgatatgattggagcacgcagatgaacatagcaagagtgatctgagcatattacatatatagaaagatagataatatgtatgcatgtgatgtgtgtggtggcgaggccagagctgctagcttagccggatcatcgatcgcctcggaccccctccctcatgactaatcaggatgcggcggcgagcgtgcctggtttgtcggagcccgcgccgctgggcggcagcggcaccaccgggtcggacgccggcgccgtcggcggcgtggcgagcgcgcacttctccttccactcctcgatcgtgatgtgctgctgccggcactcgaggctgcagaacgccgtgtcgcccctgtacatgaaggtgtcgcggccgggtccgaggcggcggttgcagagcccgcaggcgcggaggaacgcggcggtctcggcagccgagaagtcggccgagttccggcgtagccccgccagtgccggcgccgcgcgggcgcggtacgccgccagccagtccgcgcgcccggccgccgcggcgccgccgatggcccacccgtaggggtcctcctgctcggccgcctcccctgcggcctcggcgtgcgccggcagaagctgcagctcctcgtcctcctcctcctccgcgacgtctaccagcacgtgcggtgccgcgaactccgtcatgctcgtggtccgccgcatgtgctgccgcgacgccggcgacgggcgcccagatctctttcccagcatcatgtcccctgccctgtatctaccgttcttgtatactatccagtactcctatgtatatggctaccctctcttaacgatccactcaacctatgtatatggctatttactacttagtcctacctgcagcagctgggagggagatgtgcccaggtgaagaggcaggggaagtggtctccatggctacgaccgaggggagggagagcctagcggcaggggggtgaaggggacgaagaaggtgtgtgtgccgtgtgcgtgtggtgacggtcccggccggcctcgaggtcccaatgg

SEQ ID NO: 71470 - DNA, 400 bp, Zea mays
  Clone ID: MRT4577_165185C.1
agataaaatgctgctgtttcactgcaccaactgtatgtatactgaaagtttacaaatgatgttctgtttgaaagttttcccattaatacaaccttccataagatttatttaaatgaattggctaatgaatattaattactagctggtcctcttcctggacacgcatataattcatatagttgatgcatttcttctttgttcctccagcagctgcaaccggtactgcctctgcccactttggacgacgccaatcattcgcatgacaaggtagagcggcagcaggataccagcagcacgaagtaagtacattgtgaggagactgaacgcccagtgctctgctgctttagccgtcgccactggaaccagatgccatgcgagcgtcacaatggtgaacgtgatc

SEQ ID NO: 71471 - DNA, 230 bp, Zea mays
  unsure (1)..(230): unsure at all n locations
  Clone ID: MRT4577_165186C.1
caatnncttcntacaaccncataacatttttatagggaaggttttttttaaaaaaaaagcgccccacaaaaaaaaacccaatatcaaccttcttatccttcaacaccaccaaacaaattcattcccgacctcacaaacactaccaatccatgacaaacaacttagcacaaccaccaaccacaacccaacatccctcaacccacttcacctactctaaaacccctccacca

SEQ ID NO: 71472 - DNA, 228 bp, Zea mays
  Clone ID: MRT4577_165187C.1
gatcccagataaataatcaactcctattacactgtgtgagggagaaaacgtttggcctatcaaatacgtgcggatatacatacagtaattatgaatctcgaaatgattaggtgcaagcacatcggcataccttattactacgctccatatcttaaatattacggctccttgattacataccttctattcttaaatattaaggctcacttattactaccaccgcttctt

SEQ ID NO: 71473 - DNA, 4272 bp, Zea mays
  Clone ID: MRT4577_165188C.1
ttaggcatcctgccacatactaggatggtactgtttgaggaaacgcccattcaaagccttaggcaagtccttgccttgtaatgtttgtagtaaataggcgttgccagacatcacctgttttactttataagggccttcccagcttggtgaccatttcccgaacttccggtctttattccttagaggcagaatggtcttccacaccaagtcccctacttgaaatgattttgctttgaccttcttgttgtaggccctggctaccatgattttgtccttttctattgctcccaaagctatcatccttttgtcagtcacctcatcaatattatccatcattgaatcataataatcggtagcagttagatcattttgtctggcgaacctgatagcattcaaacttattttcacaggcaacactgcttcctgcccatagacaagctcgaaaggagatactttagtagccctatgtttagatattctatgagcccataaagcctcagacaaaatcttatgccaatgtttaggattatcagatattttcttttttatcaaattaatcaatgtcctattgctagactcggcctgaccattggcctgagcataatatggagatgaattaagcagcttaattctgtataattcagcaaattcacgtacctcctttgacataaaagaagtaccttgatctgtagttaaggtctggggaatgccgaatctatgaatgatatgctcagttataaactcaatcacctccttgtgtgtcatgttctttagagcaacggcttcagtgcatttggtgaagtagtcagtggcaactaacacaaaccgatgcccctttgatgatgaaggatgaatttctccaataaagtctaatccccatcctctgaacggccaaggcttgatgataggatgtaattcggctgcagggaccaactgtaggtcgccgaatttttgacacacttggcaacccttgtagtacttgaaacaatcagctatcatactaggccaatcaaaaccagaccttcgcaacaaccacttcatctttggagctgattgatgagtaccacaaattccctcatgtacttcggccatggctaatatagcgtcatctgggcccaagcacttaagcaggatgtcattgactgttcggcggtaaagttcatcactcatcaaaacatacttgaaagttgttcgccgaatgttcttatctgtcctgatattgggatttcgtaaataattaagtataggtgtcctccaatcacttgcatcggcttcattgtcagccgaattaatgaaaagaacatctctggtaaccccggacggtccggcgtcatcacgcggacggtccacgacctgggaatttggctttgcactggttatcagattttcagctttgtgaaacttccctctctttatccgataacctgatgcatcttgtgccaaatcattagctctatgattctcaactctagagatatgtcgaatactgaattcgtcaaaagaatgaattatgctccaacatttctcaaggtaactatttagagtaccatcaaaacattgatattcttctaacacttgttggacaaccagctgagaatcaccaaataccatcacatgtcttactcccataccatttaaaagttctaaaccgaataggagggcctcatattcagcttgattattagtgcaataagttttcaatcggctagagaagtcaaaggagacattacctggtgaaacaagtacaatgccaattccttgcccttcattgcaaaccgatccatcaaaatataaagtccaaggagtaatagtgaggtatgatatgtctagctcatgaatatcattaacccgatgttctacaatgaaatccgctacgacttggcctttcatagatttcaatggttcgtaggccaagtcatattctattagtgcataagcccacttaccaattctaccactcataattgggctatgcaacatgtatttgatcacatcggcttgaccagaaacagtgcaatgactagacagtaaataacatcttgtttcagcatccaccaaccttcggcttagatatgtcaccacatgctccctcccctcagtttcttgtgtcagaacagccccaataaccttgtcttcagctgcaatgtataatctgaatggtgctcctacttgtggtgcttttaacacgggagccgaagacaagtattttttaatgagatcaaatgcttgccgctgctctgccccccaagtgaattcggcatcattcttaagccgaaggataggggtgaaggcatcaatcttcccggcagccgacactccaaaagcacatttacgtgggttcattttcaaaccataccgacgcattttatcaaaggctttgcgcaaatcagctatatgaggactaaactcagccgatttgactacaatatcatcaatgtagacttccacagtgtttcctaacaactcatggaagatcagattcatagccctctgataagtagcaccagcatttttaagaccgaatgtcatgacaacccattcaaataaaccaatgaagcctggacatataaaggccgttttagacgtatcctcttcggccatgaaaatctggttatatccggcattaccatcaagaaagctaataattctatttcctgactccttcttctccaccggcacaatattggagacccactctgcgtatctgcaaggtctaataaaattagcttctagcagccggtggatttcgtccttgattcgtgggagaagatctggacgaaatgttctagctttttgcttgaaaggtctgaaaccagacttaataggcagccgatgttcgataatctctcggcttagtccaggcatttcagtgtaattccaagcaaaacaatctgaatattccttcaatagaccgatcatctcatttctagaatcggtctccagggtcttgtttacaaaagtcggccttggagttttaccatctcctatgtcaatctcctccaaaggatcggccaatgtaaacccctgtcctagtttatcaagatctctgaattcctctatcatgtcccccacagaggaatcagatgatctttgtgtgatggcggactttccggtctcggggaccggatcatccgtaatactgtcttttcgctgtggtagatgttcggtcttaaagtccgaactgttttgtgaaagaccggaccatccggctttgagagccgaattgtccgtgatcaatgactcatgaactgggcgttctggagaagcctcgtagtcgaccaggtcttctcccagcaggtcgtcctcttccattgatgttgtcgtgtcgttggaggcttccggtctgacagaaggacagcgccgcctgcgccactccgactgcagtgccactcgacagagtgagtctgacaggcagtcaggcctcgccagaggcgccatagggaactccgctccgcccgaccctagggctcggactcgggctaagacccggaagacggcgaactccgctccgcccgaccccagggctcggactcgggctaagacccggaagacggcgaactccgctctgcccgaccccagggctcggactcgggctacgacccggaagacggcgaactccgctccgcccgaccccagggctcggactcgggctaagacccggaagacggcgaactccactccgcccgaccccagggctcggactcgggctaagacccggaagacggcgaactccgctccgcccgaccccagggctcggactcgggctcggccccggaagacgacgaactccgcctcgcccgaccccagggctcggacaccgccctggcctctgccttacgacttctgcctcgcccgacccaggggctcgggctcggcctcggccacggaagacagactcgacctcggcttcggaggagcccccacgtcgcccgacctagggcacaggcccgccacgtcaacaggaagcgccatcatcatcctaccccgagccgactcgggtcacggagaacaagaccggcgtcccatctggctagctccgccagatgggcaatgatggcgccctacaagctctgtgacgacggcggctctcagctctcttacgaaagcagggcgacgtcagcaaggactcgaccgctcctacagttgtccctccgccaggctccgttgctcctccgacagccacgacatcacgccagcaaggtgccaagacctctccggctgccacattggcatgtacctagggcgctagctctccctccgctagacacgtag

SEQ ID NO: 71474 - DNA, 552 bp, Zea mays
  Clone ID: MRT4577_165189C.1
ttattttgacgcacgcccttcagtcgacagagccgaagtgaccgcagtcacttcgccgctccactgaccggcctgacaagaggacagcgccgcctgcgccactccgactgctgtgccactcaacaaagtgaggctgacagcagccaagtccggcctcgggcgccataggaaactccgcctcgcccgacccaggtctcggactcgggctcggccccggaagacgacgaactccgcactcgcccgacccagggctcggactcgggctcagccccggaagacgacgaactccgcctcgcccgaccccagggctcggactcggcctcggcctcagccgacggtctccgtctcgcccgacccaagggctcggactcgacctcgacctcggaagacagatttgacctcgacctcggaggagcctccgcctcgccctacccagggctcggaccaaccacgtcacatgaggcgccatcattaccctaccccaagctaactcaggctacggggaacaagaccggcgtcccatctggctcgccccggtaaacaaagaaagat

SEQ ID NO: 71475 - DNA, 1717 bp, Zea mays
  Clone ID: MRT4577_16518C.1
gggaaatgtggaaagatggactgtatgttgaaaacgctgcctgatcctgcccatcggcctacgcagtgctggaacacattgatatcaggttatgcaagatatggctatttcaaggaagctgaggatacattcaagcacatggtctcagtggggcaaaagccagactatgtgacatttgttgctctcctctcagcttgtagtcatgctggtctaatagacaagggcatggattactataactctatggcacctacatttggtgtttctcctggaattaaacattgtgtttgcatagtggatctccttgggcgtttggggaaatttgcagaggcagagaaatttattgatgaaatgccagtcttgccaaatgatctaatatggaggagtttgctgtcatcaagtagaacccacaaaaatctggatattgggaggaaagcggcaaagaatctccttgaactggacccatttgatgactcggcctatgttcttttgtcaaacttatatgctacaaatgcaagatgggtagatgttgacaaattaagaagtcacatgaagactattaagttaaacaaaagacctgcctgcagctggcttaagttgaagaatgaggtgagcacctttggtataggtgaccggagtcatatgcacgcagaaaagatctatgtgaagttggatgaaatcttgctaaagctcagagaagtaggttacgtcgctgatacctcatctgcactacatgatacggatgaagagcaaaaagagcataacctttggaaccacagcgagaagcttgcgttggcatacgggcttcttgtcgtgccagaaggatctacaataaggatattcaagaatctcagggtctgtgcagactgccatttggtatttaagctggttagcatggtttttcatagggagattgttctgagagatccttacaggttccaccaattcaaacacgggtcatgctcgtgttcagatttttggtgagatagtcataaaaccaaatatgaatcggtccctgcctgtcaatttctctacttgttcttctgatgtatcatgtgcgacctgtcgctggccaagcaaggcaaactcttggacgttgtccaggcgagcactggagcagcagcacctcacccaacggtgagggaggtggttgccaactactactcccccaaccgtcatcgccgatggctcccatcatcggtcagaggaagaggagttgctgctgcaaggcagattgtacttcggtcttacgatcatgatgaagcgcactgcgtggcagcggtagctggtgcacggcaatggtagcatggggctcatgcttgacaccgactgtccatgatgcaaagggacgactaatcgaccttccttgacatggctttggctccgcagcctcatgacaggtggagggcatgctcgttatcacttaaacggctacacaacatggtcacctgcttatgcaggatactaaacgggtggcaactctccgttttgtttggtttaaggttaaagtaggatgatacggggtgacactgtccccttgattttttagaatatgctgtcacaaaatttacttcggtatttatctcgttttcacgtgactgtctcaacactatacaaactgtttatgttccctttcatcttttttgtacatccaatcaaacagatgacagatcggagaaatatggttctcaaagtatatgttattgcatcttacaag

SEQ ID NO: 71476 - DNA, 647 bp, Zea mays
  Clone ID: MRT4577_165190C.1
agggaggcgggtgccctacgtccaagcatcctcttctggcgaggagctgaccatcgcagttcgctgctctctgcacgcgctttgaaactcttctccctgcccgatctccagcaatccgaccataccgtcatacgcgcagggcgggcatggccctgtgacgggcgctcctcacatggcgatagatccgtctccaacgcaaggcgtcgctacttgagtacatatacttctttactgaacggcacagcactgctcgttctatcaatggagctggccttcgacctgctagtagatgacttatgacccaggccgccactacgtcaagcacaccacatgcctggcgacttccccaccccctcacagataacactgactatgggggcctcgaagatgaggatcgaatcgacaccaaccggtatggtgaggatgaccctttgctgaaaggcacagatgaagagaggcgactggtatacgaccaaccgatccggagatcaacgtaggcatactggacagtaagtgaaacgaaaaagtcaagtgtcataagacgagcaggagcaagcatgggcttgatgaataaagtgggactggatgcccaatgattgatatggacgcccttcgtatactggcgttaatgctgataagagtagacc

SEQ ID NO: 71477 - DNA, 1321 bp, Zea mays
  Clone ID: MRT4577_165191C.1
atgtcgcggctcgaggcgacccagcgcacgacccagcagcgccagcctgacgcggcggtcaatgcggccaaaagtgggccggcagtaatgacgatggcaggcggacgggagcagcggtcacgttatcagccaagctcacgtcccatccgggggcagcaagagaaccccctctcacggcgtgaagacaacgcgcccgtgatccgttcctcgaacggctcgcgcacgcgcaacggccgccccgccaaccgctcgccccgtcgcattaactccgcggcaggacagacggcgcttccggcgggagcacagggaccgggaaagggggataccccgaaaaggatccttccccgtgaaggaaccaggctccgagcctccctactgatcagaggttcgaaggctggccccccgaagggttcgacagctgcctcagatcgcgtgggccctacacccactactggtcagaggttcgaaggtcggccccccgaagggttccacggccgcctcaggctactcgggctccgcgcccattactgatcaggggttcgaaggctggcccccgaaggaaggacagcgccgcctgcgccactccgactgcagtgccactcgacagagtgagtctgacaggcaactaggccttgccaaaggcgccacggcgaactccgctccgcccgaccccagggctcggactcgggctaagacccggaagacggcgaactccgctccgcccgaccccagggctcggactcgggctaagacccggaagacggcgaactccgctccgcccgaccccagggctcggactcgggctaagacccggaagacggcgaactccgctccgcccgaccccagggctcggactcgggctaagacccggaagacggcgaactccgctccgcccgaccccagggctcggactcgggctaagacccggaagacggcgaactccgctccgcccgaccccagggctcggactcgggctaagacccggaagacggcgaactccgctccgcccgaccccagggctcggactcaggctaagacccggaagacgacgaaactccgcctcgcccgaccccagggctcggactccgccctggcctcggccggacgacttccgcctcgcccgaccccctggctcgggctcggccacggcagcagaaggcagactcaacctcggcttcggaggaaaccccacgtcgccctgcctagagcacagaccgccacgtcaacaggaaacgtcatcatcatcctaccccgaatcgactcgggtcacggagaacaagaccggcgtctcgtccggccagctccgccagaggggcaatga

SEQ ID NO: 71478 - DNA, 3607 bp, Zea mays
  Clone ID: MRT4577_165192C.1
ctactgccaaagctgaagccatacaggaattgtcgaatcaaaacggcctttagccctcagcatgacaagacgaagttcccttgcaaactcatttttgcaatgttgcacagtcggggctttattctgaaaaagccatgcattacgggttttccaaatgctccagttcatgagaatgacaatttccatagagaatggaacattgagttgttgcattaggtttactgcagcggcctcaggattagcaattctgggagacgtcaaaccaatagaagtccagcaagcctttgcaaagttacacttgagaaaaagatggtaaagagtttcttcgttttgccagatgcagttctcacaagtgtaggactcgaggttcatattcttccttttcagcatatctcttgtattgagtctgttttttagccaaagccaaaaaaagaccttatgctttggttgacacttgtttttccaaagcgatctgaagatctggtgaacctgggcctgacccatcaaatgcttatacgttttttttgtagagaaaatgtctgctccccaaatgagtttccaagtatcatttgtgttgtttaccatgatttggccccaggttgcgtctaagtctaaaaattgttcatgagcttgaaccgacagaggaagctggaaaatttcaataagttgctctttttggagagcctctttgatggacagtttgctattgcgggcgaaggaaaataactcagggaattgattagccgggatgcccgaattccacatatcttcctgtcggcgtttcgagacaggggggtccctaagccgacgagtgagtgtgctgcgtgccccagcccagatgggtcgagcgcgtgggcgagcgcgaaggggggagaggcgaggtggccggagtcgagcgtgagagaggtggaagtcccgcggccttcgtgttcgtcccgcgcccaggtcgggtgcgcttgcagtaggggggttacaagcgtccacgcgggtgagggaagcgagcggccccaagagagcgcctatcccgtcctcggtcccgcgcggccaaccttctctgagaaggccctggtccttcgtggcggtctgtgccctaggcagggcgacgtgggggttcctccgaagccgaggtcgagtccgtcttctgttgccgtggccgagcccgagccatggggtcgggcgaggcggaagtcgttcggccgaggcgaagtccgagccctggggtcgggcgaggcggagtttcgtcgtcttccgggtcttagcccgagtccgagccctggggtcgggcggagcggagttcgccgtcttccgggtcttagcccgagtccgagccctggggtcgggcggagcggagttcgccgtcttccgggtcttagcccgagtccgagccctggggtcgggcggagcggagttcgccgtcttccgggtcttagccggagtccgagccctggggtcgggcggagcggagttcgccgtcttccgggtcttagcccgagtccgagccctggggtcgggcggagcggagttcgccaccttccggggctgagcccgagtccgagccctgggtcgggcggagcggagttcgccgtcttccggggcctagtccgagtccgagccctgggtcgggcggagcggagttcgccgtcttccggggcttagcccgagtccgagccctgggtcgggcggagcggagtttcctatggtgcccatcaggcctttgcagctttatgctgatgggggttaccagctgagaattaggagccttgagggtacccctaattatggtccccgacaaattttatatgatattgtagccaggtcattgctagctgctaaagaggcttctcacaagatcagcagaggtatatcaatccgacggctgagagaaatcgagaagcagctctcggacagaatattggagatgtgccttcaacactctagggctcgattgtctccagatgagcaacttgctgcagaaaaaagttttgccttgtattgcaagccagttgaattgtacaatattatccagaggcgagctattaaaaatcattctccgatatatcgattcagtagggcttgtttgcttacaaattttagtgaatttggaaataaagacaaaactgaagccacattcatcatccctgatgtgaagaatttatcaacctcccgtgcttgcaaccttaacattatatttattagccgtgggcaagtaggacaaattattggtgaagatagctgttccgggaatgatgtggaaggatcttccctccaaaagcttgaagggaaatgttcctggggtaaaatgccgactaatttacttgcgccctctttggagaaatgtgtgactttaagtacaggaaatgctgtggatttgacttctacagttacaatgaacccaagcttcttagagccaaaatttctggaacaagacagttgcttgacattttgctctcataaggttgatgctacgggttcataccaattacaagtatgcatatccgcagaagaggctggcgcaagagaattacttttatctccttattattgcaattactcatataataatgtcccaccttctctattaccagaaatcataaggttgagagctggaaatgtactttttaattacaagtactacaacaatacaatgcaaaagactgaagttactgaagatttttcctgcccattttgcttggtaccatgtggaagcttcaagatatctgaagagtgccaggctgtgaatgttagtctgaaggctgatgcctggaaaactgagtttgtggcagagggagttgatccaaggcatcaaacattttcctactgctcgaggtttaagaagcgtagaaggttggaaaccacagctgagaaattcaggcatgttcacccacatattatggaatcaggatcacatgaagatgcccaggcagggtctgaagatgactatgtgcaaagggaaaatgggctttctgtagcaaatacttcagttgaccctagtcagcctgtacatgggagcaatctttcaccaccaacagtgctacagtttggaaagtcaagaaaactatctgccgagcgatctgaccccagaaaccgacaactgttgcaaaagcgtcagttcttccattcacacagggcacagccaatgccattggaacaagtcctctcagatcatgatagcgaagacgaggttgatgatgacattgccgactttgaggatagacggatgctcgacgattttgttgatgttacaaaagatgagaagcttattatgcatatgtggaattcatttgttcgaaagcaaagggtgctagccgatggtcatataccgtgggcatgcgaggcgttctccagatgccatggacaacagcttgtacaaaaccctgccctgctgtggggctggcgtttcttcatgattaaactctggaaccacagccttcttgacgcccgcgccatgaatgcttgcaacacaatccttcaaggctaccaagacggaagtgcggaccccaaatgcagtcctttgttttggccgtcgtcagtgtctagcccggtggtcagagcagaacggctgccagagcctgatctagaaccctgtcacggaaagcggaaaaagtaa

SEQ ID NO: 71479 - DNA, 452 bp, Zea mays
  Clone ID: MRT4577_165193C.1
cccacgcgtccgatctcctgatagagactaggaaacaagaagcagacgaatcacttgaagaggaaacgggacggatgacaagcgtggtgcgtcggtggctgggtagaggagcggctaacgccgactgtatgaggctgtccgcgggtggggagctggccgcgtcggtgattggggagctggccacgccggctggggtggatggaggcgcgccagtgactgcccagcagggatcgccgtgcggctcggccgctcgggatcatcagcgtttggggagggaggcagctggcatgtggaggaggctgcgcgatggaagattcgttgcctcgttggtgatcgcgaataggttcgctcaaccgaggcctcatatttacgtcctctacgttggagtcctatgttgatttggatcaaacttataaaataacagctttttttgaatgatccataagcaagtg

SEQ ID NO: 71480 - DNA, 1047 bp, Zea mays
  Clone ID: MRT4577_165194C.1
atggcgggcccctgtgcgggcaagcagcggcgaccccagggccccgaggcaggcatgaggtggcggtactcccaaggcgggcgagcaagtggtgccctcgacgtgggtaccctcaagacacctaattctcagctggtaacccccatcagcataaagctgcaaaggcctgatggcctgacagaaggacagcgtcgcctgcgccactccgactgcggtgccactcgacagagtgagtcagacagacagtcaggccttgccaaaggcgccacggcgaactccgctccgcccgaccccagggctcggactcgggctaagacccggaagacggcgaactccgctccgcccgaccccagggctcggactcaggctaagacccggaagacggcgaactccgctccgcccgaccccagggctcggactcgagctaagacccggaagacggcgaactccgctccgcccgaccccagggctcggactcgggctaagacccggaagacggcgaactccgctccgcccgaccccagggctcggactcgggctaagacccggaagacgacgaaactccgcctcgcccgaccccagggctcggactccgccctggcctcggccaaacgacctccgcctcgcccgaccccatggctcggactcggcctcggcaacagaagacagactcaacctcggcttcggaggagcccccacgtcaccccgcctagggcacagacccgacacgtcaacaggaagcgtcatcatcgtcctaccccgaatcgactcgggtcacggagaacaagaccggcgtcccatccggccagctccgccggatgggcaatgatggcgctccacaagctctgtgacgacggcggcccccagctctcttacggaagcagggcgacgtcagcaaggactcgaccgctccaacagctgtccctccgccaggctccgtcgcacctccgacagccacgacatcacgccagcaaggtgccaagacctctccggctgccacattggcatatacctagggcgctagctctctctctgctagacacgtag

SEQ ID NO: 71481 - DNA, 530 bp, Zea mays
  Clone ID: MRT4577_165195C.1
aaacagagcatgggagggggcccatttttcactaaacacaaaactagggaaaagtatgccccgaaaagttaaaacacacgttggccccatttttaaaaaactgggtggcaccatttttaacacaccgacccctgggaggggggccctaaaaaaaaaaaacggaaccctcactcaaaagggccggaccgggacaaaaaaaaacgttaaagttcgcaaaggggtaaaatacccccctcctttacacaggacaagaaaataagcatatgaaaatcaccctcagccttttttgggtttttttacccccggggcccatccataaccgaaaaaaacccaggggaaatggactcaagggtgatccgagccactccctgacctaaacaggcaaacaggggctttttctccatttccaaaaccttttcctttatttgaacaagggggggaatggcagggccaaaggttaaatgggaccttttccaatactaaatttttttaaggggcaaacccgacatctgggaaaaaaccctacacct

SEQ ID NO: 71482 - DNA, 670 bp, Zea mays
  Clone ID: MRT4577_165196C.1
atgaaagttgttcgccagacgtgtatgtcaaaagcagggtacgacaaggcaatggatgtgttggatgagctcgatggcgttctataccgattagagccagacattggatgtaatgagtcatgtgatgttagtgatgatgaggaaaaccaggttgggcgatgtggaggctcctccgaggtcgaggtcgagtctgtcttccgtggccgaggtcgagtccgagcccctgggtcgggcgaggcggagaccgtcggctgaggccagggctgagtctgagccctggggtcgggcgaagcggagttcctcgtcttcaggggctaagcccgagtccgagccctgggtcgggcggagcggagttcgccgtcttcaggggctgagcccgagtccgagccctgggtcgggcggagcggagttcgccgtcttcaagggcttagcccgagtccgatccctgggtcgggcagagcggagttcgccgtcttccggggctgagccctagtccgagccatgggtcatgcggagcggagttcgtcgtcttccggggcttatcccgagtccgagccctgggtcgggtggagcggagcttactatggtgcctgaggccgggcctgactgcttgtcagcctcactctgtcaagtggcactgcagtcagagcggcgcacgcggcactgtctt

SEQ ID NO: 71483 - DNA, 454 bp, Zea mays
  Clone ID: MRT4577_165197C.1
aatctctccttctttttttccggggggccaaaaaatccaatgccatcagcagcaaagatcctgccgcatacaaactaaaactgagcaagagccggctgactaccactcaatgcatatttgtcctggcaaagaaacaccgaggtgttcgaaccagaatacggttggcccagacagccctaactcgaacagggcgctcgcggtctaaccttatacaggtgctcgcagagcgcgccgcccttgatggcaaaaaagggggcaaacacgagggactccatctgccagaagctagaggaggatatttacggacgggccggacgtgtccccgatgggagccccaatcgtgtgacctgatcacagcggtctgtgggcactcggcatcccttgggaccgagggtcctcgcgagaacactggcaccagactgacaagtacttcatggcattgtaccatgcaccg

SEQ ID NO: 71484 - DNA, 483 bp, Zea mays
  Clone ID: MRT4577_165198C.1
gagtttgtatataggaccatcagcagcactaccacaggacggggtacctgaagctttctgggggcactctattaaggatcgtggtggactcgaccaagactacaacgttgaagatcaggaggcctgtcagccgggtatgccacaaaattgcaacgggaggaaggccaataacgactaaggatgacaaaagaaaccaccagaagctgtaaaagtgaccacatggtaactggctcgcctcaacgcagaggccatatcctaggcgactgttgaggccaaaaagagatccaaaagtcctacagccgattacaaggcggaggaaactaattaaacctgccatgagaacacacaaaagcatggtgttcctacttgtacctgaacaagcatcggatcccaagccatggacattcgcaagtggaaccgacggcaatctgagcgacatgatgatggcaacaccgcgtgcttaaacccattgtaagacgaggc

SEQ ID NO: 71485 - DNA, 1284 bp, Zea mays
  Clone ID: MRT4577_165199C.1
atggcggtggcaggcgggcgggcgcagcagtcacgtcgtcggccaggctcacgtctcatcctggggcagcgagagggcctcctcccacggcgtgaagacggagcatttaacgcaaagggtgagtcagacagacagtcaggccttgccaaaggcgccacggcgaactccgctccgcccgaccccagggctcggactcgggctaagacccggaagacggcgaactccgctccgcccgaccccagggcttggactcgggctaagacccggaagacggcgaactccgctccacccgaccccagggctcggtctcgggctaagacccggaagacggcgaactccgctccgcccgaccccagggctcggactcgggctaagacccggaagacggcgaactccgctccgcccgaccccagggctcggactcgggctaagacccggaagacggcgaactccgctccgcccgaccccagggctcggactcgggctaagacccggaagacggcgaactccgctccgcccgaccccaggactcggactcgggctaagacccggaagacggcgaactccgctccgcccgaccccagggctcggactcgggctaagacccggaagacggcgaactccgctccgcccgaccccagggctcggactcgggctaagacccggaagacgacgaaactccgcctcgcccgaccccagggctcggactccgccctggcctcggccaaacgacctccgcctcgcccgaccccatggctcggactcggcctcggcaacagaagacagactcaacctcggcttcggaggagcccccacgtcaccccacctagggcacagacccgccacgtcaacaggaagcgtcatcatcgtcctaccccgaatcgactcgggtcacgaagaacaagaccggcgtcccatccggccagctccgccggatgggcaatgatggcgctccacaagctctgtgacgacggcggcccccagctctcttacggaagcagggcgacgtcagcaaggactcgaccgctccaacagctgtccctccgccaggctccgtcacacctccgacagccacgacatcacgccagcaagcagatcaagggagagcggtgtctccgaaccatcgtcgacgttttgatgacctgtatgggtgccgacgaatcaggtttctgggaagtgcttcgtgcacgtccgctcgcgttcctccccaacatttgtggaaatcacttactggcctccaagaactgccaaaatgcaaatccaaatgaccaatccctgccctag

SEQ ID NO: 71486 - DNA, 862 bp, Zea mays
  Clone ID: MRT4577_16519C.1
ccggccgggatttcgaagcccaccgaattccctgcgattcctctcccctcgcctcctcgtctccccctaggggatcgtcggagaggaatcgcaaagagggccgtctcatccgagttaaggaagccatggagcacaaggaggctgggtgccaggcccccgagggacccatcctctgcatcaataactgtggcttcttcggcagcgcggcgaccatgaacatgtgctctaagtgccacaaggagatgataacgaagcaggatcaggccaagctggctgcctcctctatcgacagcatcgtgaacggcagcgacgccgtcatggagccggttgttgctggcagcaacactgtagtagctgttgcccaagtcgagttgcaaacaatgaacgtgcagcagccccgttgatgttgccggacccagcgagggggtggcggcgatctccaaaggggggaaggtagggccgaaccggtgcagcgcctgcaggaagagggttgggctcacgggattcacctgccggtgtggggaacttggactgggcggtccaccgctactccgacaaggacgactggaaggtcgactaccggactggtggcagggacgccattggcaagggtaatcccgtggtgaagggagacaagctccacaagaactatggggggggtccccacgggtggtggcaggaagattgtaaaccgcggtaactcgtcatggggaactggtggcttggcccccgcgcctttctcttccatggttgctggtaccatcttggtggtgggcattgcagtggacggtgcacacttgtgtagcccgcctccgagaattctcctggctctggatctggtcagttcaaaaatgatttgcat

SEQ ID NO: 71487 - DNA, 243 bp, Zea mays
  Clone ID: MRT4577_1651C.1
cttggggtttttttttattaatttataagggaacgtaactagttatggcagggcggccacatacaacatacaaaaaactttatgatcgaattcccactaaaaagccatacaaaagagggccccaccaatgatgtgtaggtggaagcaagctgctgggtcggggaagcaagctggacaaaaggcaacagttgacgtagttgaaagagggacgccgaggcacccccaaactgctggaagaaaagc

SEQ ID NO: 71488 - DNA, 558 bp, Zea mays
  Clone ID: MRT4577_165200C.1
atgtggccggagcttgcagcgagggagtggcacgccggagctgcagcggactgggagcttggacggggagcagtggacaccggagctgtagcagacgcaggagcagaacgtcggtcggccggggagcagtggagaaccgaagctggacacaggagcagaactccggagtctggacggggagcagtggagaaatggagtggaacaccggacgggagcagtggacgccggacgcaggagcgacgagcgagtagctctaggcggcggtcggacggggagcgtctagctctagggttgcctggtcgccggtcggagtggcggctgtggactcaagtctcaggaagcctaggcggactgggccgtcagctatttcctattgggctgactgctggagggaaggaagaagttgtaggtacatacattagagctgatgagttggcaatggtcattatctcagcggaagaggtaaacgcacttgtagtcgatgcagtccctggcgacaatggtgccatagacttggatggggaggtcgagatccgaggatgcaatcttgatagatag

SEQ ID NO: 71489 - DNA, 951 bp, Zea mays
  Clone ID: MRT4577_165201C.1
atgcaaccgagaaaggctggtccccttgcgaaaaagtgcgacaaaagcctccaagcgagtgctaacactcccttcgaggctcgggggctactgtcggggaccataattaggggtaccctcaagacgcctaattctcagctgagccgaggtgaccgccgtcactccaccgctccactggccagtctgacagaaggacagcgccgcctgcgccactccgactgcagcgccactcgacagagtaagtctgacaggcagtcaggcctcgccaaaggcgccacggcgaactccgctccgcccgaccctagggctcggactcgggctaagacccggaagacggcgaactccgctccgcccgaccccagggctcggactcgggctaagacccggaagacggcgaactccgctccgcccgaccccagggctcggactcgggctaagacccggaagacggcgaactccgctccgcccgaccccagggctcggactcgggctaagacccggaagacggcgaactccgctccgcccgaccccagggctcggactcgggctaagacccggaagacggcgaactccgctccgcccgaccccagggctcggactcgggctaagacccggaagacggcgaactccgctccgccctaccctagggctcggactcgggctaagacccggaagacgacaaaactccgcctcgcccgaccccagggctcgaactccgccctggcctcggccgaacgacttccgcctcgaccgaccccttggctcgggctcggccacggcaacagaaggcagactcaacctcggcttcggaggaaaccccacgtcgccctgcctagggcacagaccgccacgtcaacaggaggcgccatcatcatcccaccccgaatcgactcgggccacggagaacaagaccggcgtctcatccggccagctccgccagagaggcaatga

SEQ ID NO: 71490 - DNA, 1701 bp, Zea mays
  Clone ID: MRT4577_165202C.1
atggcgcttcctgttgacgtggcgggtctgtgccctaggcggggtgacgtgggggctcctccgaagccgaggttgagtctgtcctctgttgccgaggccgagtccgagcccctgggtcgggcgaggcggaagtcgttcggcagaggccggggcggagtccgagcccaggggtcgggcgaggcggagttcgtcgtcttccggggccgagcccgagtccgagccctggggtcgggcggagcggagttcgccgtcttccgggtcttagcccgagtccaagccctggggtcgggcggagcggagttcgccgtcttccgggtcttagcccgagtccgagccctggggtcgggcggagcggagttcaccgtcttccgggtcttagcccgagtccgagccctggggtcgggcggagcggagttcgccgtcttccgggtcttagcccgagtccgagccctggggtcgggcggagcggagttcgccgtcttccgggtcttagcccgagtccgagccctggggtcgggcggagcggagttcgccgtcttccgggtcttagcccgagtccgagccctggggtcgggcggagcggagttcgccgtcttccgggtcttagcccgagtccgagccctggggtcgggcggagcggagttcaccgtggcgcctttggcaaggcctggctgcctgtcagactcactctgtcgagtggcaccgcagtcggagtggcgcaggcggcgctgtccttctgtcagactgctttatgctgatgggggttaccagctgagaattaggcgtcttgagggtacccctaattatggtccccgacaactagtcctcgttggagcacccgcgcaagggtatcgctcccccttggtcctcgcaagaaccaagtgctcactacgagatgatcctttgccactccggcgcggtggatccctcacgaccgcttacaaacttgagtcaggtcaccaacaagatcttcacggtgatcaccgagctcccaacgccaccaagccgtctaggtgatgacgatcaccaagagtaacaagccatagactttcacttgaccaagagaagcctaatgcatgcggtgtatgctctaggtggctctcgctagcgctaataaggtccaaatgcgggattaagattctcaaataacctcactaggctttgtggtgcttgcaatgctctaccaatgtgtaggagtaaatgtgggtagcaagaccatcaatatagtgggtggagggggtataaatagccctcacccaccaactagccattaccaggaatctgctgcacatgggcgcaccggacagtccggtgcgccaacggtgcgccaacggtcgactccaatggctagttctgacagctagccgttgggcagatggcacaccggacagtccactaaaattcaactcgcgaacaacgcgctctcaggtttctgtgcgcagggaaccctcttccttgggccaggctggccctggcagagggggggggccccggacagtccggtgcacaccggacagtccggtgccccaaagccagaaaccctagtttctgttttgtgctgttttttcaattcggttttcgttctaacttgtgagtatgttctagagtggcacctagcactatatgtgagtgtgaatatgcaccaacactacactagaactctcttggtcaaactacaatataaataaaatgtttttcgtc

SEQ ID NO: 71491 - DNA, 1229 bp, Zea mays
  Clone ID: MRT4577_165203C.1
atgacgggggaaaagaagatgttcacctcctacgtcaagaataaagattcccaagattcaataatattcggtgatgggaatcaaggcaaggataagtctgaaacccaagggaccctcaagcgcttcctcaggagagctcaaaatgagtttgagctcaaggtgaagaagataaggagcgacaacgggtccgagttcaagaaccttcaagtggaggagttccttgaggaggaagggatcaagcacgagttctccgctccctacacaccacagcaaaatggtgtggtagagaggaagaacaggacgctaatcgatatggcgaggacgatgcttggagaattcaagacccccgagtgtttctggtcggaagccgtgaacacggcttgccacgccatcaacagggtctaccttcatcgcctcctcaggaagacttcgtatgagctactaaccgaaggacagcgccgcctgcgccactccgactgtggtgccactcgacagagtgagtctgacaggcagtcaggcctcgccaggggcgccatagcgaactccgctccgcccgaccccagggctcggactcgggctaagacccggaagacggcgaactccgctccgcccgaccccagggctcggactcgggctaagacccggaagacggcgaactccgctccgcccgaccccagggctcggactcgggctaagacccggaagacggcgaactccgctccgcccgaccccagggctcggactcgggctaagacccggaagacggcgaactccgctccgcccgaccccggggctcggactcgggctaagacccggaagacggtgaactccgctccgcccgaccccagggctcggactcgggctaagacccggaagacggcgaactccgctccgcccgaccccagggctcggactcgggctcggccccggaagacgacgaactccgcctcgcccgaccccagggctcggactccgccctggcctctaccgaacgacttccgcctcgcccgacccaggggctcggactcggcctcggcaacggaagacagatacgaccccagctttggaggagcccccacgtcgcccggcctcgggcgcgggcccgccacgtcaacagggagtgccatcaccactccaccccgaaccgactcgggccgcagagaacaagaccggtgtcccatctgaccagctccgccagataggcaatgatggcgcctcccaagctccat

SEQ ID NO: 71492 - DNA, 227 bp, Zea mays
  Clone ID: MRT4577_165204C.1
gcttggaccttgggctgattagtgctgagttggggtgcgtggactgcggttgctcctggggttgtgtagtgcggggggttgggacatgacgagggagtctgtcagcgatgtagtccactgtgcggcgtcgtcccggtggggttgaactgctatgttgttgctcaatcggtatgtctcgcggtcattgagattgtttcggcgctgcgctaccgtagtagaatgtgtgg

SEQ ID NO: 71493 - DNA, 541 bp, Zea mays
  Clone ID: MRT4577_165205C.1
ataaaaaaaaaaaaaaaaaaaaaaaaaaaaaaaaaaaaaaaaaaaaaaaaaaaaaaaaaaaaaaaaaaaaaaaaaaaataaaaaataaaaaaaaaataaaaaaatttatattttaggaaaaaataattttttatggggattgtgtcttattttgggggtgaatttttggggcttttttttccatttttttgggggcgctcttaattttcttttatggggggtcctttttgccctctttttgggtttttttttaaaattctttttcaccttgttaaacccctgcctttaacccattttaaacctgttgttcaaccattttttttttctttgaagcggcattattttttaaaaggctttttttaaaggggtttggccacagcggggccccttttttaactattttacaccctttttggcgagtgattaccccctgttgccttcctttttaccccctttttttgctttttattttaaggtttactattgcctttttttttccttttttcccctttttttttcccagtttttttcgttttttccc

SEQ ID NO: 71494 - DNA, 684 bp, Zea mays
  unsure (1)..(684): unsure at all n locations
  Clone ID: MRT4577_165206C.1
tattcggcacgaggtttcactccattcgcgtctcggggtttggaccagccacccggcggcggcgggcaaacacagacagggccgcagggccgagcgaccggagcgccgccgccaccggcaaagccacggcacggcacccatggagtcgcgcgccctcctgcacgcccggcctgccgccctccctgcccgcgccggcctgcgcctccctccccagctcccgcgcccgcgggcagtctccttctcccccgccgccaagcccgcgctccggtccccgctcctcgcgtcgaggggccccttcctcccgcggcacgacgcgcttctggggaacgggttcctgaagcagagagcggtcagcgttggcggtgacgtgtccttccgcgcccaggcggcggcggcggcggtgccggcgccgcagccggaggagtccgctaaaaagttcctcggcatcgacgtgaagacgctcaggnaagatcgtgccgctggggctcatgttcttctgcatcctcttcaactacaccatcctgcgggacacanaggacgtgcttggtggtcaccgccaaggggagcagcgccgagatcatccctttcctcaaacctgngttaacctgcccatggccatcggattcatgctcctctacccaagctttcaacgttctctcgcgggaggcgctctctacaccgtca

SEQ ID NO: 71495 - DNA, 202 bp, Zea mays
  Clone ID: MRT4577_165207C.1
atagtgagtcgtattaagccgaggcatgcgtgccgagcgatgcgcacgcaggctgtgcgcgcctgcccacggagttcgagcacgcacccatcgccatggagatgagaccgtgtccacagggtgagacagatccatcgatgcatgatacgagagtcgagatccacatggaccacaccaactccgagatcgactgcgtgaaccc

SEQ ID NO: 71496 - DNA, 240 bp, Zea mays
  Clone ID: MRT4577_165208C.1
ataggggggggggacaacaaataatatatgacggatcaataatggatgatcaaaggttaacaatgccccaaccacaaaatttttacttcccccacgggataaccggttttccccttcctaaaaaaaatttacagttttcccacctacaaaaaaaccttgtgctattttgtttacaggacagggccttttgtccttatcccctttttttcaagcccaaaaaaatatcttcaaacagataaa

SEQ ID NO: 71497 - DNA, 346 bp, Zea mays
  Clone ID: MRT4577_165209C.1
cgtatctggtggttgcaccgagaactgtaatttcgtccgggggcatggtggatccccattgctgggttgacaggcagtactctgattacccgacgacatcagcccccaactggccttgggcggacacccgggccggtctttccttggcactgaccttgtcttgtggggcgcccgactatcctcctggaaaaaccaccgtttccactcttgtcgttgctggccgtgtgttcctgctcctacgtccccctgttcctcagaatcggctgggccttgggatagccgaccttggctgccccttgggactgcccctgcccactggtgggcatcgcggggtgtcctcccatcc

SEQ ID NO: 71498 - DNA, 225 bp, Zea mays
  Clone ID: MRT4577_16520C.1
ctcgagccggccggggacctgcaccactacacagcacaagcactctagcaatggcttctgaggttgtccgccctagcgacgccgagctactgcaggcacaagccgacatatggcggttcagcctctcctacctcacgcccctgtcactgaagtgcgccgtgctgcttgtctccctgcggaatctaccgccatggcgtggctgcctcagtcgctgagctgatcacg

SEQ ID NO: 71499 - DNA, 432 bp, Zea mays
  unsure (1)..(432): unsure at all n locations
  Clone ID: MRT4577_165210C.1
ggacgttctacgtgtttttgctaaaacgatcggacgttctaaactctaactacgttttatcgtttaaacgacgtttaagcgacgttttaataacaatgacgctgagaacggtaaattttaccggtttctcggttacgcaaacaattagtttattacatggctaatagtttgttagctggctaggggttctaaatatatgtcgnggaagcgctaacgtcctgatgatattggcgttgttgtcgctcaggctaataggcgggggctctatgccgattgattaggttgctgctatcattattatcaaggacggctgctttgaaaaccatttcatttggtcatgtatgacatgttcaccaacttcttgctcccaccagctgctgagagcataagggcattagatttagcgatgcgattttagattttttttgtttt

SEQ ID NO: 71500 - DNA, 839 bp, Zea mays
  Clone ID: MRT4577_165211C.1
gcaaaaaaaaacgctatacgattttcaaccaaataaatacaaatattttccactcatacgaatgatgattaagatattttctctgatttgtgccgcaaatccatccgctctctcaaattctagtatacagtacaccgacatacataacatgacaacatgacccgtcacccgtcgctgcgaataccggtggtgcggtgcgcgttcttctgcacggcgacggcaccggcgagtgcgccggagtcacccacagcctctcacaggaatccgtctctgcggtcttgctcctcggcctctctgttcgccgtctgcacggccttgaaccacagaaacgcggaggtcgggatgccggtgaagacgaagaagcccaggagcggcgcgtacaggacgctgtcggggccgacgatcccgaacaccggccgctggttggtgtactcgaagatggagccgatcgcggcgatggcggtgatcgtggacgcgagcaggtacgcgtagaaggggacctgccgggcctcctgtccacgcgcggccccgccctcgcgctcccagggtggcggctcgtccgcgccgggcttggcccacgcggggacctgctcctccgcctcgcccggcgtcttgcccgtcgcggccaaggccgtctgcagcctccggcgcggcgacggcctgcctaggagcggacgggcctggggcctcacgttcggacagcccgtgctaggccttgaggacgtgcacacagaggtggagacggccaccgctgcggccgccatggagacgagacgagcttcttcgcccaggcgcggcgcggcgcttggagaatcgatacgggaatccggcccggccgg

SEQ ID NO: 71501 - DNA, 492 bp, Zea mays
  unsure (1)..(492): unsure at all n locations
  Clone ID: MRT4577_165212C.1
tcccggggtcgnacccacgcgttccgtggctcaccacttccaagcaatccttgtatcttgctagaacagctgcctatgccacttgctgctgtgaagtactcccgtgggacgttcatctttcctggtgcacagccagccccccaaggagcttctctgaggaagttgctgcacttaaccgctactttggcggcctgaactctggaggtgatgctgatgtgattgcagatccagcaagacctcgacagaagtggcacgtcttgtacgccactgagcccccagagcaaccatggttaaccttgtagatgccctcactggtctggacaagaagaatgcttctgcttttttcaagacttacgcgtgtggcatcacacgatgtgccaaggtcaatgacaaaactctctttcatcctctgatggatacccgtgctggagaactcctattgagactgtgaaccatatggttactgcttgaatgctatccatggactctgca

SEQ ID NO: 71502 - DNA, 204 bp, Zea mays
  Clone ID: MRT4577_165213C.1
cccacgcgtacgcccacgcgtccgcccacgcgtccgaccacgcgttcgcgccaaggtgtcaggacaaggaaggtattcctcctgaccagcagcgactaatcttcgcggtgaagcagctcgaagacggccgcaccttggccgtctacaacatccagaaggaggccaccctttaccttgttcttcgcctttgcggtggtattattg

SEQ ID NO: 71503 - DNA, 789 bp, Zea mays
  Clone ID: MRT4577_165214C.1
gggaggcagattgctagcaaagtgttgcaattctataattttctgaacttgaagctcagattcctgggttcgaggatctgaggacaggatggatttgtcatcccaattgatttcctggcattcattaggatacttgaattctccccctaatgtcgggaaatggtcctcgttaaagatgcaatcagcgaaacgagctgtgtacaaatcccctgtaaggggctctaggtatttgatgatcgatggggattgatatcccacatagatgcccaatttcctatgaggtcccatagctgttcgttgaggcggtgatacaggggtgtagaccgcacatccaaatttccgcagatgggatatatttggagggtttcctcgaaccagatgcaacggagatgttgtatgatatgcagttgggcgaagttgaataagatcagcagcgtgtaaaactgcatgaccccaacaggatgtaggtaaattgcattcatgaagtaaaggtcttgcgataagtttgatcctcttaataagagattcagctaaaccattttgagtatgtacataaggcacagaatgttcaatgtgtattccttgggccatacaataatcattgaatgctctagaagagaattcagccgcattatctaggcggattttctggattttatgttcaggataatgtgctttcaatcgaatgacttgcgtcatgattttagcaaaagcatggttacgtgtagacagaaagcacacgtgtgaccatcgtgtagatgcgtcaattaataccatgaaatatctgaa

SEQ ID NO: 71504 - DNA, 1005 bp, Zea mays
  unsure (1)..(1005): unsure at all n locations
  Clone ID: MRT4577_165215C.1
ggccgggccggggccactgcaggtcttctccttctgccattgcaggtcttgcagaaacatgtctcttctctatcttctctaactaccttccgagaattccttgctgggcgctcgatgttcttggaccctttatgcagacttcatcccgtgacatgaagtcttccactgatcagtttaatctgcaggtataccagcatctcttttccatatctgaaggcctgaattccaaacaagagagctcgaaacaacagtaatgggttgcttccctgtgttctggaggaagaagaattccagaagccagattgtgcaacatgaccaagacatcccaatcacgggcaatgtgaaaatctactcgtcaaaggagctgagaaaagccacaagaaatttctgcccgggaaacatgcttggagagggttctttcggccgggtctacctgggaaagttgaacaagggcgagaaagtggccatcaaggtgctctcctcagagtcgaggcaaggaacaaaggagttcctgaacgagttgagtgtcatatccaacataactcaccacaacctagtcaagctgcatggctgctgcgtcgacggaggccaaaagatgctggtctacaattacgtggagaacaacagccttgcacagacccttttcggtaattcccgcagtggcatcagatttggctggagaacgagggtggatatctgcatcggtgtcgctgacgggctcacctaccttcacgaacaagtccgcccacggatcgtccaccgcgacatcaaagccagcaacatccttctcgacagaaacctgaggccccagatagcagactttgggctggccaagttcttcccgggcaacatgacacacatcagcaccagggttgcggngacgctaggatatcttgcaccagagtacgccatccgagggcagctgaccagaaaggncgacgtctatagctttggtgtgctgctgctggagattgtcagtgcagatgccacactgatcccagatta

SEQ ID NO: 71505 - DNA, 187 bp, Zea mays
  Clone ID: MRT4577_165216C.1
gcgcctctactttcttctctctctgctcctccgcctccgcctgaaccatccaagacggggacgccatgtcagactcggtggagcaccacttacgaatcgaagccgacgctggggcgtccaagacctacccggagtaggctggcaccgagccgagagaacgggtagatcggaaatcaagaacctaccc

SEQ ID NO: 71506 - DNA, 386 bp, Zea mays
  Clone ID: MRT4577_165217C.1
ataattcggacgggaaaaaaaacaaagctgaattataaacaaaatgggtccacagatatttctccatacgtacatgctcattggggtagacgcagctgaccacctaaagctggatacttacttattcagactgaccggcatgtggcaacatcagaagttcacatgcttacagactacaaatttttataacaatagcctggattgggtggtttacagaataaccaaacggcagccacgaaattgggacgatataaaataaacaactcataagcaaattgacaccagaagcccggcttactcattaaggactcccgccttctattgcatgggatccggttactgctccaaagagagaaaataaggtggtttggagtgcttctttatag

SEQ ID NO: 71507 - DNA, 1008 bp, Zea mays
  Clone ID: MRT4577_165218C.1
atgcaaccgagaaaggctggtccccttgcgaaaaagtgcgacaaaagcctccaagcgagtgctaacactcccttcgaggctcgggggctactgtcggggaccataattaggggtaccctcaagacgcctaattctcagctgagccgaggtgaccgccgtcactccaccgctccactggccagtctgacagaaggacagcgccgcctgcgccactccgactgcagcgccactcgacagagtaagtctgacgggcagtcaggcctcgccaaaggcgccacggcgaactccgccccgcccgaccccagggctcggactcgggctaagacccggaagacggcgaactccgctccgcccgaccctagggctcggactcgggctaagacccggaagacggcgaactccgctccgcccgaccccagggctcggactcgggctaagacccggaagacggcgaactccgctccgcccgaccccagggctcggactcgggctaagacccggaagacggcgaactccgctccgcccgaccccagggctcggactcgggctaagacccggaagacggcgaactccgctccgcccgaccccagggctcggactcgggctaagacccggaagacggcgaactccgctccgcccgaccccagggctcggactcgggctaagacccggaagacggcgaactccgctccgcccgaccccagggctcggactcgggctaagacccggaagacgacgaaactccgcctcgcccgaccccagggctcggactccgccctggcctcggccgaacgacttccgcctcgaccgaccccttggctcgggctcggccacggcaacagaaggcagactcaacctcggcttcggaggaaaccccacgtcgccctgcctagggcacaaaccgccacgtcaacaggaggcgccatcatcatcccaccccgaatcgactcgggtcacggagaacaagaccggcgtctcatccggccagctccgccagagaggcaatga

SEQ ID NO: 71508 - DNA, 999 bp, Zea mays
  unsure (1)..(999): unsure at all n locations
  Clone ID: MRT4577_165219C.1
gggcaactgtcggggaccataattagggaatccccccaagactcctaatctcagctggtaacccccatcagcacaaaactgcaaaggcctgatgggcgcgatttcggtcaaggctccgtccactcaagggacacgatctcggggggcccgagcccagcctcgggcaggaactgtagaccaaggcagattcacgcctcgcccgagggtctactcaagcaacaggcgcaccttcgactcgcccgaggcccagctccggcaggcttcacggagaagcaaccttggccagatcgccacgccaaccgaccgtatcgcaggagcaatcaatgcaaggatcgcctgacaccttatcctgacgcacgctcctcagtcgacaaggccgcagtgacagcagtcacttcgccgctccactgactgacctgacaggaaaacagcgccgcctgccctgctccgactgctgtgccactcgccagagtgaggccgataacagctaagtccagcctcgggcgccataggaagctccgcctcgcccgaccctagggctcggactcaacctcgacctcggaagacggactccgcctcgcccgaccctagggctcggactcaacctcgaccttgngaagaggactccgcctcgcccgaccccagggctcggcccccgtctcggctccggaagacgacgaactccgcctcgcccgaccccagggctcggactcagcctcggctccagaagacgacaaactccgcctcgcccgaccccaaggctcggacttagcctcggctccggaagacgacgaactccgccttgcccgaccccagggctcggactcaacctcggctttggaagacgacgaactccgcctcgcccgaccccagggctcggactcgacctcgaccttggaagacagactcgacctcgacctcggaggagcctccgcctcgcccgatctagggctcggatcgaccacgtcacaggaggggccatcattaccctacccctag

SEQ ID NO: 71509 - DNA, 1386 bp, Zea mays
  unsure (1)..(1386): unsure at all n locations
  Clone ID: MRT4577_16521C.1
cctcgaggccggccgggcgggaccctacaagctgcgctgccagtgccagcgctcacacgaacgccgagacccgagaggagcaaacagccaaaaagaacggaaaggggagagcagttaccttgcgcgcgcgcgcgcgacagggtccaatactcgaaggggaatctccggaggatggaggtgggcaggactccgcggcgacgggcgtccccagcggcggctgtgccttcgctgcttctgttcgccttgctattcgtgtgccgggcggcggcagcgttgggcggcccggcgccggcgctatacaagcacgcgtcgttcttcgaccgcgacggcgacggcgtcgtctccttcgcggagacgtacggcgcgtttcgggccctcgggtttggactcggcctgtccagcgtcagcgccgccttcatcaatggcgcccttggcagcaagtgcagacctcaaaacgcgacgtcgtcgaagctggacatctacatagaggacatccggagagggaagcacgggagcgactccggctcgtacgacgcccaaggaaggttcgttcccgagaagttcgaggagatattcgccaggcacgcgaggacagtccccgacgccctgacctcggacgagatcgaccagctgctccaagcgaacagagagcccggggactacagcggctgggctggcgcggaagcggagtggaagatcctgtacagtctcggcaaggacggggacggcctcctccgcaaggacgtcgcgaggagcgtctacgacgggacactgttccacatgctcgcgcccaactggaaatctcccgacgaggaggaggagcgctaagcgtgatccgggagagctgaaccgagaggtacaagcaaagtccgattgagagataaggactctgggaccctctgaacatgctgtcaagcaacatgtactactagcggtgtgaacgggtggtgtgaacactcttttcatatcacatcataaaaaaagggtgtgaacagatatgatgtccttgtgcggtggtgtgtttgtataccggccggcggatagtggctggcctagtatttagcgataggatatttcaatgtacattatcataaaataagataaattcataattcaaaaaaaaaaaaaaaaaaaaaaaaaaaaaaaaaaaaaaaaaaaaaaaaaaaaaaaaaaaaaaaaaaacaaaaaaaggccccnaaggccccccctttataaaatataaaaagggggccctgggggccctgggcccccattttttttcccttttaggggggggaaattgggccttgggggaaaacggggcaaaatttttcccctggggaaattgtttttcgtttcaaatcccccaaaaaatagagcgggaagcttaaatgtgaaaacctgggg

SEQ ID NO: 71510 - DNA, 3222 bp, Zea mays
  Clone ID: MRT4577_165220C.1
atggtgcctcctgttgacgtggtcggtccgtgccctaggttgggcgatgtggaggctcctccgaggtcgaggtcgagtctgtcttccgaggccgaggtcgagtctgagcccctgggtcgggcaaggcggagaccgtcggcggaggccagggctgagtccgagccctggggtcaggcgaagcggagttcgtcgtcttcaggggctgagcccgagtccgagccctggggtcgggcggagcggagttcgtcgtcttccggggctgagcccgagtccgagcccttggtcgggtggagcggagttcgccgtcttccggggctgagcccgagtccgagccctggcctcactctatcgagtggcacagcagtcggagcggcgcaggcggcgctgtccttctgtcaggccggtagtattgatgtgggtgatttctatgtgaagttccatctacgaaacaaggatgatggctttagttgggttctggtggcggtctatggggctgcacaagatgaattgaaggaatcttttctagctgaactggtgcaaacttgtgccaaagaaaacctacctcttattgttggtgtcattgatagcttggatctccgggaattgggattgtcaaatcggaaattcacttgggctaactctagaagcgtacccacctttgagactcttgaccgtatcttggttactaccgagtgggagtcaaagtatcctttgacaacggttcaagctttgacgagagaaatttctgaccacactccactgctcatgaacacgggaagtggaacccactcaaacaatcagcctccttttaaatttgagctcgactggtttctgagagaaggtttctcggatatggtgacacaggtttggaaaaatgagaatagagggcctctttggtgcatcagaacccaccatttttccatggttgaatcggtcagagatgatatcccacaggtaactgacctggaaaatgaaattcttacttcaccatttatgatggatgaagtcaagaaggcaatcttccagatggaacataataaggcaccaggacctgatggcttcccagctgaattttatcaagtcttctgggacgtaatcaaagacgatttactatgcctctttcttgagttccataagggaaatttgcccctgtactgtctcaactttggtataattactttactccccaagcaaaaagaggccaaacaaattcaacaatttagacctatatgcctgcttaatgtgagctttaagattttcaccaaggtaatgacgaaccgtgtggctctagtagcacagaaagtcattaagccttctcaaactgctttcatgtcaggaagaaacattatggagggagtcattattttacacgagacgatccacgagttacacaggaagaagcttgatggcgtcgtactaaaaatcgaccttgagaaggcctatgacaaggtcaattggtcctttctccaacaagctttgcgcatgaaaggcttttccccccagtggtgcaattggatcagccaaattgtcaagggaggtagtgtcggtatcaaagtcaatgacgacataggccactactttcaaacaaagaaaggacttagacaaggggatcctctgtctccgatcctctttaatatcgttgcggacatgttggctattttaattgagagagcaaagaataatgttgacttagtaggattagtaccacacttagtggacggagggctctctatacttcaatatgctgatgatactatcctatttatggaacatgacctcgataaggccaaaaatcttaaactagtgttaagtacttttgagcagctatcgggtcttaaaataaacttccataagagcgagctatattgctatggagaggctaaagattttgagcatgaatatgcaaatctttttgggtgcaatactggttgtgttccctttaaataccttggaatccccatgcaccataggaagttatcaaacaacgactggaagataattgaggaaaaatttcagaaaaaactcagtagttggaaaggaaaattgttgtcagtagggggtaggctagttctaattaattctgtgcttactagccttgccatgtatatgttgtctttctttgagataccgaaaggcatcctgaatttggaaacccaaaacaaatgtcttttgagtaagtggcttttcaagttaattaatgaggaaggcatttggcaaaatcttctaagaaggaaatatttgtcacataaaaaccttgcccaagctcaaagacagcccggggattcacatttctggtctggactcatgaaagtgaaagaccaattcttacattacagacgtttcaaagttcataatggaaaagaaactagattctgggaggacaattgggttggtgataggcgtcttaaaatcgcctatcctaacctctatcagattgtgcgcaaaaagtctgcaacggtagccgaggtgctaagcaccacgccgctaaatgtgacctttcgaagggcgttaacgggcgttaacttggagtcgtggtacaaattggtggcatgtgtcctcaacactagccttacaggtgatagggacattttcatttggaatttacacaaaagtggggtattctcaacacgctctttctatagggtattgatttgtgatggtattgttccacttaagtccccaatctggaagattaagataccacttaaaattaaaatttttctgtggtacatcaaaaatggagttactctcactaaggataaccttgcaaagcggaattggaaaggaaatctaaaatgttgtttgtgtagttctctagagactatcgaacatcttttcatccaatgtcacttcgctcgctttatttggaatacaatacatatcacctttggaattaaacctccctctagcatctacgacttgtttggttcttggcttgctggttttcggccagcatttagaaatcagatttgtgtaggtttatctgctatttgttgggctatatggttgaatagaaatgatatggtgtttaattgcgccaaggctaacactttcatgcaggttattttcagggcgacatattgggcacgttcttggtcgctgctgcttagagacgaggacgcgaggaccgatctaaacagggcatgccgcttattggagtcggtcgttatggaggtgttcgctaagtttgggtggaagttctcaaatagaattgcggcctag

SEQ ID NO: 71511 - DNA, 1419 bp, Zea mays
  Clone ID: MRT4577_165221C.1
ctaaccggatactcatgcatgataatggcataatataaaagtctcacactagcattctcatcatatttatatgttgctaaggcatccccactctgactaagcatttgttgacctttcaaaacttgatgcttcgtccttaaatggttactaaaagcctttgtgccattataactatctgccttagctttatgtgaacatcttaggcatttagcccacttttgcttaacaatagaaccatcatgtcggcgtttcgagacaggggggtccctaagccgacgagtgagtgtgctgcgtgccccagcccagatgggtcgagcgcgtgggcgagcgcgaaggggggagaggcgaggtggccggagaccgagcgtgagagaggtggaagtcccgcggccttcgtgttcgtcccgcgcccaggtcgggtgcgcttgcagtatggggttacaagcgtccacgcggtagagggaagcgagcggccccaagagagcgcctgtctcgtcctcgtccccgcgcggccaaccctctctaagagggccctggtccttccttttataggcgtaaggagaggatccaggtgtacaatggggggtgtagcagagtgctacgtgtctagcgggggagagctagcgccctaagtacatgccgatgtggcaaccagagagattttggcacccagctggtgtgatgtcgtggccatcggaggagcgacggagcctggcggagggacagctgtcggggcggttgagtccttgctgacgtcctcctgcttccgtaagagagctgagagccgtcgtcgtcacagagcatgcggggcgccaccattgcctatccggcggagctagccagatgggacaccggtcttgttctctgcggcccgagtcagctcggggtagggtgatgatggcgcttcctgttgacgtggctggcctgcgccctaggttgggcgacgtggaggctcctccgaagccgaggtcgagtctgtcttccatggccgaggccgagtccgagcccctgggtcgggcgaggcggaggtcgtcggcagaggccagggcggagtccgagccctggggtcgggcggagcgaagttcgtcgtcttctggggctgagcccgagtccgagccctgggtcgggcggagcggagttcgccgtcttccgggacttagcccgagtccgagccctgggtcgggcggagcggagttcgccgtcttccgggacttagcccgagtccgagccctgggtcgggcggagcggagcttcctatggtgcctttggcagggcctgactgcctgtcagtctcactctgtcgagtggcactgtagtcggagtggcgcaggcggcgctgtccttctgtcagaccggtcagtggagcggcgaagtgacggcggtcacttcggctctgccggagggcgcgcgtcaggataa

SEQ ID NO: 71512 - DNA, 220 bp, Zea mays
  Clone ID: MRT4577_165222C.1
accgcacaagagccgattacatctcgcattggacagggggggcacaagccccaaaaacctccaaaaaggggggccccctagtaccatatttaataaccgggcggggggggggaaaaaaataatgcaacacgtgatttaacacccaagggtttttggttcttgaaagaaaggggtgaacccccttggcaaaaagcctggggggcctccgaaaataaaaacc

SEQ ID NO: 71513 - DNA, 1170 bp, Zea mays
  Clone ID: MRT4577_165223C.1
atgaggggggcgcgggcgggagtgggcgctggctgcagcggcaggaggtgggacggcaagcctataattttcgggcttcagaactttgataggagcagtgttgcatatgttgtcacaactgtagataagacttctttgagactatatgatgtgaaaaagagaggtctctgttacactgtttttgtctgttgttttcttctagagggaggtgcaacccatgttgacatagcatgtgacaaggacttagtaaagcttgccatggatcttaccaaccttccgatctgtgtctcatctgtagatccttcagggttccattctgcagtacaagcaggagctaaaatggttgagattggaaactatgattctttttatgagatgggcattgagttctcctctgagcagatactgaagctaacaagggaaacaaggaagatgcttccagtcatcaccttatcagtaacagttcctcacacacttagtttgccagatcagggtgacgtgggggctcctccgaagccgaggttgagtctgtcttctgttgccgaggccgagtccgagccacggggtcgggcgaggcggaggtcgttcggccgaggccagggcggagtccgagccctagggtcgggcgaggcggagtttcgtcgtcttccgggtcttagcccgagtccgagccctggggtcgggcgaggcggaggtcgttcggccgaggccagggcggagtccgagccctggggtcgggcgaggcggagtttcgtcgtcttccgggtcttagcccgagtccgagccctggggtcgggcggagcggagttcgccgtcttccgggtcttagcccgagtccgagccctggggtcgggcggagcggagttcgccgtcttccgggtcttagcccgagtccgagccctggggtcgggcggagcggagttcgccgtcttccgggtcttagcccgagtccgagccctggggtcgggcggagcggagttcgccgtggcgcctttggcaaggcctgactgtctgtcagactcactccgtcgagtggcaccgcagtcggagtggcgcaggcggcgctgtccttctatcagactgctttatgctgatgggggttaccagctgagaattaggcgtcttgagggtacccctaattatggtccccgacaagtttgtgcgggttga

SEQ ID NO: 71514 - DNA, 280 bp, Zea mays
  Clone ID: MRT4577_165224C.1
ctccttttagcagcagcatgaacccttcaccggggtattcttacacatggggttcgacctccttgccggtgggaggaacaagaagaccaagcgtcacatcgcctgtattacgaccgttgtttaatatcaagctcccttgtcaaagctctaaccgttttcttggtcaatgaggaccaaagagcaaccttcaatgcctgtctttctcaaagaggcgtcttcaatgagcaataaccaattcgcccaccaatctttcaagcgccgtctttgtaaagttcatgga

SEQ ID NO: 71515 - DNA, 687 bp, Zea mays
  Clone ID: MRT4577_165225C.1
atgggacgccggtcttgttccctgcggcccgagtcagctcagggtagggtgatgatggcgcctcccgttgacgtggctggtctgcgccctaggctgggcgaggtggaagttcctccgaagctgaggtcgagtctgtcttccgtggccgaggccaagtccgagcccctggtcgggcgaggtggaggtcgtcgtctgaggccaggacggagtccgagccctggggtcgggcggagcggagttcgccgtcttccgggacttagcccgagtccgagccctgggtcgggcggagcggagttcgccgtcttccgggacttagcccgagtccgagccctgggtcgggcggagcggagttcgccgtcttccggggttgagcccgagtccgagccctgggttgggcggagcggagttcgccgtcttccggggctgagcccgagtccaagccctgggtcgggcggagcggagttcgccgtcttccgggacttagcccgagtccgagccctaggtcgggcggagcggagtttcctgtggtgccttctgcaggacctgactgcctgtcagcctcactctgccaagtggcactgcagtcggcgcggcgcaggcggcgctgtccttctgtcaggccggtcagtggagcggcgaagtgacggcggtcactttggctctgccggggggcgcatgtcaggataa

SEQ ID NO: 71516 - DNA, 803 bp, Zea mays
  unsure (1)..(803): unsure at all n locations
  Clone ID: MRT4577_165226C.1
taaatacccccaccagtgcccttaagagtctagatcacagaacttttgccctctcgtgcgagtaacccgtttacgtcaactctcacccccgttggatccccttgcacctggtagcaagttccacaaacgctagttggtgggtgagggctatttataccccctccacccaccatattgattgtcttgctgcccacatttactcctacactttggtagagcattgcaagcaccacaaagcctagtgaggtgatttgagaatcttaatcccgcaattggacctcattagcgctagcgagagccacctagagcacacaccgcatgcattaggcttctcttggtcaagtgaaagtctacggcttgttactcttggtgattggcatcacctanatggcttgatggcgttgggagctcggtgatcaccttggagatcttgttggtgacccgactcaagtttgtaagcgatcgtgagggatgcaccacgccggagtggcaaaggatcatctcaaagtgagcacttggttcttgcgaggaccaagggggagcgatacccttgtgcggggtgctccaacgaggactagggaagagtgccgattcttcgatacctcggcaaaaaaattggaggagtcttctcaaccttgctttacattccacatttaattcaagcattttactttgtgtatttgtttagcaagtatttgaagtattgccttagcattattggatttctaggtttattctcttagtgctagttgttgggggtgaaagtgagctcttgcttangctttattactggtgatttttag

SEQ ID NO: 71517 - DNA, 444 bp, Zea mays
  Clone ID: MRT4577_165227C.1
ggtgggagacaagagggcttgcgagagcggacgcggagcatggcggaggagcagatcgaagaggcgtccatggccatcgccggacgcggagcatcgtggaggagcagatcgaagaggcgtccatggccacggcggcggccacgccgttccagctccagttcgacaagcccatcccgttccagggcaacggctggttcacggatgggcaagctaggccattgccccatctcaaattttacgatctacacaggatcagaagagggagtcaggaaagaaggcgctcaaaagtcgggacaaaaatatctgagtgaatcggacctgcagaatgcggacggtcacccagagattgatcttgcgttcgtgctgctgctgccccgccggtcactgataaaaatggcagaatggaatccagagaaggatctgcttgctatggttactgatgac

SEQ ID NO: 71518 - DNA, 2148 bp, Zea mays
  Clone ID: MRT4577_165228C.1
atgacttctcacggatcctcggacgaagggaatgcacagtcccacactgacggacttgcacgagagggtttcccccgtatcttgtgggaggtacttcagggagctggatacatgacgccttcccagtacgcggtgcagcagttcgagaagcaccgagtgccccgctgtagggtgaggatgaccctagagcctcatcccctgcagccaggctggcgttcgctagactctgagtcttttggataccgggctgaggatactatggaggcaattgctgttcacggactgaccaccttctgcggattccaccccttggagctgtccactcaccccattggcttgttccccgctgagaaggaggacgacccaatgcggaaggaccgagtggagcatgccaaggatatctgggctatctacccaggtcagactgctcacttaacagtgcagtgcatgaatgccctgtatcgtctgcaagtgatgcgtggtgaggcaatgtctcatctaatggcattattggaggctaccaagatcaccttagataacagagaggaactggtagtagacctatccactgagatggtggaaaaggacctgcaggtggaacagatgtctaacgagatccaggagcttgaggagctagtgggaaccagggagaacaccattgaagttctcgaagatcagctaatcaacactcagcagcaacttgcggaagctaaccaacatttggatatgcaccaccaggagatccaggacatggaggccaacgaggatgtcgacatcgagggaggagaggagtcggagcctgcatctagcttggacactgctggctcagggagaccaccttcccccgagtcgagcatggcaggaagagcgcgtcgtggacagaatgaacgcattcctccaccaccgccaccgcctcctaccatgcaagaactgatggctcagcagaacgagattctgcgacaattggctcagcgtcagccgccacctcatcattatggtggtggtgatcaccatcggcgtcccccagcagcagccacttatcaggagttcctcagtacccagccaccattgttcaccagggcagaggacccacttgatgctgatgtatggttgagagtagtggaatccaaattcccgctactccatggagtttgttcagaggtgactaaggtcaagttcgccacccagcagcttcgcggacccgcgtggacatggtgggaccattttcttgctatgcagccagatgaccgtgaggtggaatggagagagttcaagtcagctttcagggggcaccatataccagcgggcattatggaccgcaagctcaatgagtttctggcactcagtcaagggaaccggacagtgttacagtatgctcaggccttcaatgacttgtgccagtatgacggatatcatgcagacaccgacgagaagaagagggacaggtttaggagggggctcagcactaagctccgtgaccgtctcaacacagtcagggccaacagctataatgaactagtcaacatggccatttctcaggaggattgtatcacagctcatcaggcagagaagaagaggaagacccctgttgcaggacctttagctcagccacatcgcttcaggatcgtgtctgacactcagaacagaggaccccagcagcaacaaggatgttgggtgatccaaccccagcagcagcagcagcaggcacccaaccgcacccagtttccagttcagcggaacattcagccacagcaacagcagtaccgtcaggccaatgacaacagggctgagcccgagtccgagccctggggtcgggcgaagcggagttcgtcgtctttcggggctgagcccgagtccgagccctggggtcgggcgaagcggagttcgtcgtcttccggggctgagcccgagtccgagccctgggtcaggcgaagcggagttcatcgtcttcgggggctgagcctgagtccgagccctgggtcgggcgaggcggagcttcctatggcgctcgaggccggacttggctgctgtcagccgcactttgccgagtggcacagcagtcggagcggcgcaggcggcgctgtccttttgtcaggccggtcagaggagcggcgaagtgaatgcggtcacttcggctctgttgactga

SEQ ID NO: 71519 - DNA, 1681 bp, Zea mays
  Clone ID: MRT4577_165229C.1
ttatcctgacgcacgccctccagtcgacagagccgaagtgactgttgtcacttcgccgctccactgacaggcctgacaagaggacagcgccgcctccgccgcttcgactgccgtgccactcgacagagtgaggctgacagcagccaagcccggcctcaggcgccataggaaactccgcttcgcccgaccccagggctcggactcgggctcagccccggaagatgacgaactccgcttcgcccgagcccagggctcggactcgggctcagccccggaagacgacgaactccgcttcggccgaccccacggctcggactcggggtcagccccggaagacgacgaactccgcttcgcccgaccccagggctcagactcgggctcagccccggaagacgacgaactccggctcgcccgaccctagggctcggactcgggctcagccccggaagacgacgaactctgcatcgcccgaccccagggctcggactcgggctcagccccggaagacgacgaactccgcctcgcccgaccccagggctcggactcgggcttagccccggaagacgacgaactccgcctcgcccgatcccagggctcggactcgggctcggccccggaagacgacgaactccgcctcacccgatcccagggctcggactcgggctcggccctggaagatgacgaactccgcctcgcccgaccccagggctcggactcgggctcggccccggaagacgacgaactccgcctcgcccgacctaggggctcggactcgggctcagccccggaagacgacgaactccgcctcgcccgacctagggctcagactcgggctcagccctggaagatgacgaactctgcctcgcccgacccagggctcgaactcgggctcagccccggaagacgacaaactccgcctcgcccgacccagggctcggactcgggctcagccccggaagacgacgaactccgcctcgcccgacccagggctcggactcgggctcagccccggaagacgacgaactccgcctcgcccgacccagggctcggactcgacctcgacctcgacctcggaagacagactcaacctcgacctcggaggagcctccgcctcgccctacccagggctcggaccgaccacatcataggaggggccatcattaccctacccctagctaactctggctacggggaacaagaccggcgtcccatctggctcgccccggatgtttgcactaagcaaaaagctcaacttaaaactttgaaaaataagttgattagctcccaaaattattataaaggtttgctagaaaaaaatgaaacttttgcaaatttaaatagtgagctatcaactaaaattgagctattagagtctagtgctccatccactgctaccgatgatggccttattaaaaagaatgaaaaacttaaggctaagttagctagctctcaagaagctattgaaaatttgctagggaaaatggaaattcttagcatacacaacaatgagctaactactaagatagaaaacattggtagcaccccagaagtatctgtcgatgtttcgggtccgaccgcgcacctagggttaccccccaaggttcgggccgctttgagatgcgtaacaccctacgtcctggctgcaatgctttatgcgatgggttacaaaggagttctctag

SEQ ID NO: 71520 - DNA, 1125 bp, Zea mays
  Clone ID: MRT4577_16522C.1
cctcgaggcaggccggccgagacggcacccgcacaagctgcgctgccagtgccagcgctcactcgaacgccgagacccgagaggagcaaacagccaaaaagaacggaaaggggagagcagttaccttgcgcgcgaagactcgaaggggaatctccggaggatggaggtgggcaggactccgcggcgacgggcgtccccagcggcggctgtgccttcgctgcttctgttcgccgtgctattcgtgggccgggcggcggcagcgttgggcggcccggcgccggcgctgtacaagcacgcgtcgttcttcgaccgcgacggcgacggcgtcgtctccttcgcggagacgtacggcgcgtttcgggccctcgggtttggactcgggctgtccagcgccagcgccgccttcatcaatggcgcccttggcagcaagtgcagacctcaaaacgcgacgtcgtcgaagctggacatctacatagaggacatccggagagggaagcacgggagcgactccggctcgtacgacgcccaaggaaggttcgttcccgagaagttcgaggagatattcgccaggcacgcgaggactgtccccgacgccctgacctcggacgagatcgaccagcttctccaagcgaacagagagcccggggactacagcggctgggctggcgcggaagcggagtggaagatcctgtacagtctcggcaaggacggggacggcctcctccgcaaggacgtcgcgaggagcgtctacgacgggacactgttccaccggctcgcgcccagatggaaatctcccgacagcgacatggagagaagctgataagcgtggtccgggagaactgaaccgggtctggacatgctgtcaagcgacatgtactggcggtgtgaacgggtgtgaactcactttcgggtcagattattaacaagaagggtgtgaccgtgtgagtgtgaacagaatcggccgaggaggtccaccagaccagacgacgacgaatgcttcggttgcgtgcggtgcggtctgtctgtttgtatcccgtgagcgcgatggttgcaataatctctactcctacatgcaaagtggctggcaatggatttgaataaaaaaaaaaaaggaaggtcggccgc

SEQ ID NO: 71521 - DNA, 3414 bp, Zea mays
  Clone ID: MRT4577_165230C.1
atgtcgggagatcacgccaagaaggaaatggtgaccggcgagaagcccactacaagccacgggaaagcttcatcggaagagtcccgcaacaaagggaaagggaaggagaagaaaccctcttcccacaaatcgcatcggagtggcgataagaaaaagaagatgaggaaggtggtctactacgagaccgatacttcatcaccttccacctccggctccgacgcgccatccattacttctaagcgccatgagcgcaagaagtttagtaagattcccttacgctatcctcgcactcctagacatacgcctctactttccgtcccattaggcaaaccaccaacatttgatggtgaagattatgctaggtggagtgatttaatgcgatttcatctaacctcactccacaaaagtatatgggatgttgttgagtttggtgtgcaggtaccatccgtaggggatgaagattatgatgaggatgaagtggcccaaatcgagcacttcaactcccaagccacaactatactcctcgcctctctaagtcgagaggagtataacaaggtgcaaggattaaagagcgccaaggaagtttgggacgtgctcaagaccgcgcacgaaggagatgagctaaccaagatcaccaagcgagagacgatcgagggggagctcggtcgcttccgtcttcgccaaggggaggagccacaagacatgtacaaccggctcaaaaccttggtgaaccaagtgcgcaacctcgggagcaaaaaatgggatgaccacgaaatggttaaggttattctaagatcacttgttttccttaaccctactcaagttcaattaattcatggtaatcctagatatacactaatgactcccgaggaagtaatcgggaattttgtgagctttgagttcatgatcaaaggctcaaggaagatcaacgagcttgatggtccctccacgtccgaagcacaaccggtcgcatttaaggcgacggaggagaaggaggagtctacatcgagtagaacacccatcgatgcctccaagctcgacaacgaggaaatggcgctccaaaggagggggaaagattacaagccccgctccaagaaagtatgctacaaatgtggtaagcccggtcactttatagcaaaatgtcctatttctagtgacagtgacaggggcaacgacaagaagggaagaagaaaggagaagaataaatactacaagaagaagggtggcgacgctcatgtatgccgcgagtgggactcggacgagagctcctccgactcctcctccgacgaggacgccacaaacatcgccatcaacaagggccttctcttccccaacgtcggccacaagtgccttatggcaaaggacgacaaaaagaagaaggttaaatctaaatcctctactaaatatgagacctctagtgatgataatgctagtgatgaggaagataatttatgtaccctttttgccaacctaaacatgcaacaaaaagaaaaattaaatgaattgattagtgtcattcatgagaaggatgatctcttagacactcaagaggacttcctaattaaagaaaacaaaaagcatgttaaggtgaaaaatgcttatgctctagaagtagaaaagtgcgaaaaattatctagtgagctaagcatttgcaatgagaccattgacaaccttagaaatgaaaatgctagtttaaatgctaaggttgattcaaatgtttgtaatgttttaattcccaatcttaaagatgataatgttgatttacttgctaagattgaagaattaaatgttactcttgctagccttaggattgaaaatgagaaattaattgctaaggctaaagaattagatatttgcaatgcttccatttccgaccttagaagtaaaaatgatatattacatgctaaggttgtagaattaaaaacttgcaaaccctctacatctaccgttgaacatactactatttgcactagatgtagagatgttaacattgatgctattcatgatcacatggctttaatcaaacaacaaaatgatcatatagcaaaattagatgctaaaattgccgagcatgacctagaaaacgaaaaatttaaatttgctagaaccatgctctatagagggagacgccctggcattaaggatggcattggcttccaacagggagacaatagccgaagtgaccgccgtcactccaccgctccactggccagtctgacagaaggacagcgccgcctgcgccactccgactgcagtgccactcgacagagtgagtctgacaggcagtcaggccttgccaaaggcaccacggcgaactccgccccgcccgaccccagggctcggactcgggctaagacccggaagacggcgaactccgctccgcccgaccccagggctcggactcgggctaagacccggaagacggcgaactccgctccgcccgaccccagggctcggactcgggctaagacccggaagacggcgaactccgctccgcccgaccccagggctcggactcgggctaagacccggaagacggcgaactccgctccgcccgaccccagggctcggactcgggctaagacccggaagacggcgaactccgctccgcccgaccccagggctcggactcgggctaagacccggaagacggcgaactccgctccgcccgaccccagggctcggactcgggctaagacccggaagacggcgaactccgctccgcccgaccccagggctcggactcgggctaagacccggaagacgacgaaactccgctccgcccgaccccagggctcggactcgggctaagacccggaagacgacgaactccgctccgcccgaccccagggctcggactcgggctcggtcccgaaagacgacgaactccgcctcgcccgaccccagggctcggactccgccctggcctctgccgaacgacttccgcctcgcccgacccggaggctcggactcggcctcggcaacggaagacagattcgaccccagcttcggaggagcccccacgtcgcccggcctcgggcgcgggcccgccacgtcaacagggagcgccatcaccactctaccccgagccgactcgggccgcagagaacaagaccggtgtcccatctgaccagctccgccagataggcaatgatggcgcctcccaagctccatgacggcggcagctctcagcttcgtcggcttagggaccccccgatctcgaaacgccgacagcgctggaggttgtactagctccgttccagcttttgcggagattttcgaggaaggcttcttctccggtggatccgctatacgatgcagaatcccttcttcgtctgccacggacgagatggttccgaagcaaaacacggatccagagcggagagcaatcttatgctggaaaatgatggccat

SEQ ID NO: 71522 - DNA, 653 bp, Zea mays
  Clone ID: MRT4577_165231C.1
ccggccgcctcttctcttccccactctctactcctaaagatgctttttgtttacgcgatcgggaagcggcgcccgagaatctcgtgctgcggaagcgcaagaggcaggagcgatgagaagggcacgagaaggagaaagggctcgcggacagaaaaaagcgctcgacagcgcgcctacaatctccgcccgcacctccccgtacgccgaggagtaccacacccaaaaaaaggacgttgcgcacatcaagcatgagcgcccggcctcgcacaggctagctcctatgtgacccgcaaagagccacagcgttctgtgtgcgtctcgctccccgggaatcaatgccatgacccccaaaacacgcaagatcttcgcacgtcctgcgatcgacgccaactcttcaacggaggattccccaagggcagctgggcgaccattaccttgctgaccagggtggactcccatgcattccacacgtgatgactcctcccctgaagagcgttacggagatgatctacaagagaccatacaggaagctgaacccccagagagagtccactatagcatactcctgtgtcataaaagatgacctctagaagcccagtatcatctgcatagcgggcctagtgcacaacatcatggcgctcgtccctgacttc

SEQ ID NO: 71523 - DNA, 411 bp, Zea mays
  Clone ID: MRT4577_165232C.1
cggagcacgacgagatcgacttcgagttcctgggcaaccggacggggcagccctacatcctgcagaccaacgtgttcaccggcggcaagggcgaccgcgagcagcggatctacctctggttcgaccccaccaaggagtaccactcctacttcggcctttggaacctttacatgaacccgtaagcccccccattatattcaatggaattggggttgggtccgcacacataatcactctgcatttgcaatgcaatgcaatccttcgctgctccgtcctctttggaaccttacatgaaccaagtaggattccctaaaatttaccgcgggaaaaggttactggtcttggttaccggggccggggagggtacaactgcagcacgacggcagcggcactacagtcgagtactgaaaa

SEQ ID NO: 71524 - DNA, 349 bp, Zea mays
  Clone ID: MRT4577_165233C.1
gacaaaatctatgatcttgctctaagaaggacctctgaaactaacaaagcacacttcattgtcatatactgaaaataccatcgatccaattgctaatgcatgaggatcatgatcggatgtcgagattattgaaacagaatgagcacatttatcacattgattatttaatttccctgcactttgtacatatctagggtcgacaacacatgggaaaagcttgtacattcccatgagacgctggtgctagctggttgaccatttccataaaaagcttgacccacactagaacttctgcttcctgtcacactcaatatcaaggtcgtcgctgatgaaggggactttattctgt

SEQ ID NO: 71525 - DNA, 3242 bp, Zea mays
  Clone ID: MRT4577_165234C.1
aattcggcacgaggccgtttcggcattcggggcgattctgtcttcgtcctcgcgtctgctccggtcgcaggaggcaggatcgctcggatgctccgtcctccatccgcacggccccgctccctgctgccgccacgcgaccatcgccgcagccacctcaccgagtacccccgcgcgcgggtcctgccaccgagccctccacgaccccgtggccgcgcccggcccggtcgcaccgcgctccgctggaccccagtaccatgtctccaagatccactctgaccttgtaggaacaccaattccaacgattctgacggctcgcgctttcatcgaagagttgatccttgtcaggcttgtgatccgcagccgcctctgcctgatcctgctcagctccggccagccgccgctccgccggaggcctcacgctcctcaccgcgcccgtgcttaccctgaccccaccctcactttgctcccttgaactacggcgtcatcatcgacgccgacagcaggggaagcgcgtctccgcctgatgcccggatgatagtttgaccatgttcgcaatccgttcgacgaaatgccctgtggcatttgtgggcgtagctggcaccttggtggtgcttatcaccgctgtccatgtgttcatggtgccaatacttcctgcctccttctattacttcggttctcgcagcagtataagccacccaaagaatgtcctcccggccgtcgaggtggttgactcgcgcctcaaggggtgtttcccttctgattcatatgtgttttttgtattccgaggcgcgccatggaaggctgagattggtcgatggcttgctgggtgtcatgctaactcttcgtctgttgatgttactgaggccatgggtgcaaaacgctgcgagaaagactgcagtgctcgtggtgtttgcaactataatctgggagagtgcagatgctttcatggatattctgggaaaggatgtgaggaggttctgaacttggaatgcaaccttccaagttccccagaatggcctgtaggtcaatggatagtttccatctgtgcagctcactgtgataaaacaagggcaatgtgcttttgtgggcctgggacaaaatacccagatcgtcctgtggcagaagcttgtggttttaaaacaattttacctgcaaaacctgatggtccaaagcttactgattggaaaacacctgacctggaaaacatacttacaacaaacagcagtaagttaggatggtgtaatgtggtccctgaggacgcgtattcatccaaagtgaagtttaaagaagaatgtgattgcaaatatgatggtctctgggggcagttctgtgagacacgtgttgaatgcagctgcatcaaccagtgctctggacatgggcattgccgtggtggtttctgtaaatgtgacagtggatattttgggattgattgcagtatcccatcagcatattcgcttgcatatgactggccctcgtggctccagacaccagtgaatttaccagatctgaaaactttgaacagtaccaccattggtgttaaggccgttgttcagaaaagaaggccactgatatatgtatatgatttgccagctgagtttgacagtcatcttcttgaaggacgacattacagattccagtgtgtaaacagaatatatgatgacaagaatagaactatatggacccagcaattgtatggtgctcagatagcacttcatgagagcattcttgctagccctcaccgcactcttaatggggacgaagctgattatttctatgtgccagtgcttgactcatgtctaataactagatccgatgatgctccacatcttctattgccgagggacctgcgccgaaggagctaccatgcacttgagtactatagaatggcacatggtcacatagctcagcagtatccttactggaaccgcacttcgggaagagaccatatctggttcttttcatgggatgaaggtgcctgctatgcaccaaaagagatttggaagagcatgatgcttgtccactgggggaacactaatacaaaacataagaattcaacgacagcttattgggcagataactgggatgatattcctttggataagagaggcaaccatccatgttttgatccaagaaaggatctagtgcttccggcatggaaggaacctaacccaggggccatatggttaaaactgtgggcaaggccaaggaacaaccgtacaacacttttttatttcaacggtaatctaggttcagcatacgaaggaggccgtccagaagacatgtatagcatggggattcggcaaaagctagcagctgaatttggttccacaccaaacaagcagggaaggcttggacggcagcatgcggggcgatgtgacagttacctatctacgaactgaaaaatattatgaagaactagcaagctctgttttttgtggtgtcctgccaggggatggctggagtggccgtatggaagatagcatgcttcaaggatgcattcctgtaataattcaggatggaatttttctgccatatgagaacgtgctcaactacaatagttttgcagtccgcatacaggaagatgacatcccaggcctcataagcacactccgaggaataaacgatacgcaagtagagtttatgctgggaaatgtccgccagatgtggcagaggtttttctatcgagactctatattgttagaggcgcaaagacagaaaagactcttctctgaagaggcaccctggtctgttgaggtatcgaaacttcctgatgacgacgatgtctttgcaacgtttatacaggtattgcattataaactgtacaatgacccttggcgtcaagatttcctgcaaacaaaggatactcggctgccgaacatctgctcaagaacatcctgaagcgtttagtcaggcagcattgcaaccgtaaagaataagcatatattcttaggaacaaaagtacaaaactgtagatatttcttgcattctggacaattgttcttctgactgatagcccaatttaattagaccatttcctgaaaaaaaaaaaaaagcaaaatgcactgttttcatctatcaaaaaaaaaaaaaaaaaaaaaaaaaaaaaaaaaaaaaaacgctaatacaggtattgctttataaactggacaatgacccttggcgtcaagatttcctgcaaacaaaggatacttcggttgccgaacatctgctcaagcacatcctgaagcgtttagtccggcagc

SEQ ID NO: 71526 - DNA, 310 bp, Zea mays
  Clone ID: MRT4577_165235C.1
ccaaatcccgcccaacccatgtttaaggggaaaacccgaacaaagccttatgggtactattttatggaccaaaacagtttattattttttggacggaacgggcaacgttccggaaccccacaattttccaaatgcttgcaatggccgtataaggaacctaaaaaccaaaaatttgttgggaattggggcggaaaaaagaaatcgcccctaccagggggtgaaaaaaaaaaaacggggggctttgaatcgtttttaacaaataaactaaacacctaagggggcgggggggggcccaccacgtaaaaataaa

SEQ ID NO: 71527 - DNA, 970 bp, Zea mays
  Clone ID: MRT4577_165236C.1
cagcaaacaagataaacatgtctcgattagcaaatctggatttttcatgacaacctgacatgcggcttaagtcactgtcgcaagcacttgaagttcctcgggttcgctcaacaaatttagcggcaaagatagcaggttaatctctcaaatgccctctaaaataacgaatcgctgctatcggcttgatgcagagcgcagagcatccttgcacagtttctccccgtgacccctgatatccatgaaggctttgcgcagcacttcctttgcaactctgaaggcgccggccgatacagttcccttctctgcacacttgatcgcatcacgaacgagatcattatatcttgatgccacagaatctggactgctacttccatttccaacgttaagcccgatgagttcaggccctgacttagccttctttgtccatcgctttgtgatgcaaggctctggaagcatgatgacaccggccaagaggaacacactaaggacatgcctgcacagtatcgccgagaaagcgaatctgcagcactcgcaccatgccttcttctcagcaacgttgtagaaaacggtgtgcctggtaggaggatcaccgtttctttcgacgtagtatttcatgtatgatccatcctgaaccttgacggcataatgttgcattgcttcaaccaattccagctggaatgtttcaaatgcagctctggtgtagatactcctcgcttgtttttccaagaccatgtcggttttcagaaactgttcaggagaaaaagaagtgatgtctttctgggcttcacttgcatacagaccatctatatattgatcaaatctacttataaaagtattcagagaaactcttgaactgaagttattcctataaaacttactggctgtttctgctctgtgagttaaggaaagctcagcgaagaagaagcctggtagctatgcaggaacccatttgtgcctaatttcatacagt

SEQ ID NO: 71528 - DNA, 181 bp, Zea mays
  Clone ID: MRT4577_165237C.1
gtggacagcagccccttaggcatgcaaaaacttggttacagcacaaacaggaaaggaaaatctcgagggggtgtagtaagacatattggttacaatcagtggactctgtggtgtaccgatatatgacagaagccttgtgatcttgtgacgctagaacaaaaaaggggaccgctaaatacca

SEQ ID NO: 71529 - DNA, 249 bp, Zea mays
  Clone ID: MRT4577_165238C.1
cacatatacacatcacacatcacaatgtctggacctggtgtcggcttcgagtaccctgctcagtcagtttcttggctgaagcgcgacctcttgctcttcgccaactccattggagccaccgccgatgagcttcacttcctttacgaacttcaccccaactttgccgcctttcctacctaccctctcatcctacctttcaagggcgatacacaagaagtgattgacttctacgccgccaacaagaagacc

SEQ ID NO: 71530 - DNA, 1140 bp, Zea mays
  Clone ID: MRT4577_165239C.1
atggggtgcacctgtgttgccttcttcttgctgctgttggaggagcgcgacctcgtgggggttggcgctctccagtcaccgctcggcttcaaggattttcatcacgcagccggctgcagtcccccgtcggcggtcacccaggatgatgaccgcaggcctcgtggtggggaagagcgagccgggccgtggcctcccccctaccctcagcttcaagggcgttcatcatccgtgctggggaggagggtgcgccgaatcggggcctacctccgcgtgggcatcggcccgctccttcccttagtgatcgggggagaagggcgtccgccgtccgtggtgctggcagttgccgcgtgtctggctccccggcctgagcggctctggcgctgcttctggtgccacctcctaacgctggggcggagcgcggctgcccgtccgccgctcgggtgtcggtcgcaccgtgcgcgggccagccatgtccaggtcctccttgcgctgtcggctgcaccggggggtcgcacaacacgtcggggcttcctcctttctagacccgaggcgaccgcttgggccgagacccttgcggagggtctggccgtggtcgtcgggtctacccagtccgccaaagccgaggcctcgcagcagcgtgcctgggccggagggttcaagacggctcttggcgaggccgtcaagaactgcaaggcactggccgaggcggctaagcagaaggaggccgagcgcgtggccatgtctgaggccatctcggctctttgccaagccttcggcctcgacgacgtcccctcgggtagctccccccacagtcatctgcgggccttgggcggccatgtgcgcaacagactccacggggtgctgcaccacgacgttaggcgggccttcgccgtgctcgcttcccactacgacgtggatctggagcgggttagcgaggggtactgcttacccgacgaagaggaggctgccttagccgaggtccagaggcttgacacagttgtagagggcccgagtgcagcgctggcttcctcctttgaggtggagatccttccgcccatgtctccgtccgaggccgggccagattctgccgagggtggaaacgacgccgagggtgctgctactccccctgccgatgtctga

SEQ ID NO: 71531 - DNA, 1588 bp, Zea mays
  Clone ID: MRT4577_16523C.1
caaacagccaaaaagaacggaaaggggagagcagttaccttgcgcgcgacagggtcgaaggggaatctccggaggatggaggtgggcaggactccgcggcgacgggcgtccccagcggcggctgtgccttcgctgcttctcttcgccgtgctattcgggggtgaactgggccgggcggcggccgcgccggcgtggcccggcgccggccctgcgcaagctcgcgtcgctcttcgaccgcgaccgcggcggcgccgtcgccggcgcggagacgtacggcgcgttccggcgcctccgctatgcacgccggcgtcccggcgctcccgcgcctcgagcccggccgggacggccgtccgcacaataatctgcgctgcgcggaagaagggaaggggaaaagcagttaagcttgagcgcgcgcgacagggtcaagtcgagggccggggaatcgccggagaatggaggtgggcagggctccgcgacgacgggtgtccccagcggcggcggcggcggctgtgccttcgctgcttctgttcgccgttctattcgcgggccgggcggcggcgttcggccacctgcaagccggcgccggcgcgacggcgctgtacaagcacgcgtcgttcttcgaccgcgacggcgacggcgtcgtctccttctcggagacgtacggcgcgtttcgggcactcgggtttggattcggcctgtccagcgtcagcgctgcgctcatcaatggcgcccttggtagcaagtgcagacctcaaaatgcaacgtcatcgaagttggatatctacatagaggacatccagaaagggaaacatggaagcgattcagggtcatacgacgccgaaggaaggtttgttcctgacaagttcgaagagatattcgccaagcacgccaagactgtccccgacgccctgacgtcggacgagatcgaccagctgctgcaggcgaacagagagcccggggactacagcggatgggctggcgctgaagcggagtggaagaccctctacagcctcggcaaggacaaggacggcctcctccgcaaggacgtcgcgagaagcgtctacgacgggacactgttccacatgctcgcgcccaactggaaatctcccgacgaggaggaggagcaggaactaagcgtgatccgggagagctgaaccgagaggtacaagcaaagtccgattgagagataaggactctgggaccctctgaacatgctgtcaagcaacatgtactactagctgtgtgaacgggtggtgtgaacactcttttcttatcagattataaaaaagaaggtgtgaacagatatttcaatgtacattatcataaaataagataaattcataattcaaataaaaatattctgtgtcttccccaaaaaaaaaaaaaaaaaaaaaaaaaaaaaaaaaaaaaaaaaaaatgtgaccgcttgagtgtgaacagataatgataggacgatctgatgagttctgtttaggggccgtatgatagtggctggcctagtatttactgatagaggagtgaaacagtcagcattctgatatttcaatgagccatatcaggatataaaaaaaaaaacataattggtccc

SEQ ID NO: 71532 - DNA, 138 bp, Zea mays
  Clone ID: MRT4577_165240C.1
agtgatatggcgcgtacacgtgcacagacggggtccgaatcgagctgctggcgagcctggctgatcctccactccgctgccctagcttcaagaggcagatgttgtgagaagaccctcacgggaccgactgtgagcctg

SEQ ID NO: 71533 - DNA, 208 bp, Zea mays
  Clone ID: MRT4577_165241C.1
cacacgcgtgcgtcgacacacgcttcttagaccccttaatgatgacttacatgagctgggtatatagtgtgctacagtgagactctctagctagccaagatgactaccaatgcggaggacttcacaatcaacctcatactgtatcatctctctgcctcacattacaacatcttaccactggcctatctagggactattctgctaatca

SEQ ID NO: 71534 - DNA, 263 bp, Zea mays
  Clone ID: MRT4577_165242C.1
ctacgcgtacgggcaaacattgttgccttcttacaacatcaacaattgctaccatttagccagcatgggttgactaatcctacgaccttattgcaacctcccaccattggtggtgccatcttctagatcttatacgattaatactgtaataatcaaactctcatgctgatatgtgcgacctctcaataataaagcattaaagatctatattttaaaacacacatctatgcaagcttatacgctacaacaagcaatatggtcgg

SEQ ID NO: 71535 - DNA, 617 bp, Zea mays
  Clone ID: MRT4577_165243C.1
ccggccgggatcgcagtcgcaacgaagcccccccacacacaaaaaagcaaaagcatcatcacaataatggcccgcgcgtgcgtgttcctcgtggtgctcctcctggccgccgtcgcggtggcgccgtttgcgggggctgcgcgcgtggatgtcgtggagggcaggtccatggcgtccgccgacgcgcctgaggcggcggctgacgcgcccgctcctggtcccgactccgcctcatctccggactcgtcgtcggaggcgccctccagcagcagctcatccgactagccgcgcacaacgcagttcttgtcatgatctatctagcaaataaaaaagatcatgtctcatttgattatctggaataactaatagtatatatgctgtgccccggatgatatttaaatatgtgcatgaaatgcgtgcggcaaacgcatggaatgtgcttgccgcctagctaattgttgttgtttcttttttcttctttacttttcttcatatctgtctctctctctcggttgtttaatttttcttcatgcatgtaatataataatgtgatatacccaatatatgcaacgcgctttaattctgtggggaaaaaaaaaaaaaaaaaatttgcggcc

SEQ ID NO: 71536 - DNA, 672 bp, Zea mays
  Clone ID: MRT4577_165244C.1
cctcctgtgggcgattggggcccgcgagcccggccgggatcgcagtcgcaacgaagccccccacacacaaaaaagcaaaagcatcatcacaataatggcccgcgcgtgcgtgttcctcgtggtgctcctcctggccgccgtcgcggtggcgccgtttgcgggggctgcgcgtgtggacgtcgtggagggcaggtccatggcgtccgccgacgcgcctgaggcggcggctgacgcgcccgctcccggtcccgactccgcctcatccccggactcgtcgtcggaggcgccctccagcagcagctcatccgactagccgcgcacaacgcagttcttgtcatgatctatctagcaaataaaaagatcatatgtctcgtttgattctctggaataactaatagtatatatgctgcgcccggatgatatataaatatgtgcatgaaatgcgtgcggcaaacgcatggaatgtgcttgcctagctaattgttgttgttattgttgttgttgttgttttttctttacttttcttcatatctgtctctctctctctcgggtgtttaatttttcttcatgcatgtaatataatgtgatatacctaatatatacaacgcgctttaattctgtgaaaaaaaaaaaaaaaaaaaagggcccaacgcggcagcccccagctttttg

SEQ ID NO: 71537 - DNA, 438 bp, Zea mays
  unsure (1)..(438): unsure at all n locations
  Clone ID: MRT4577_165245C.1
cggaatncccgggtcgatcccatcgcgtccgcggacgcgtgggctactttcatacagcccactggcggtggtcactgcccctccatgcctacaaccccaggggttgctaccaagtggaccacctctgactcaaggaggtgtggcaaaccctgctggccacttacaacagncactgacatggaaccaactggctgggtcaaactgtgatgcgtacctacaacaacgacaactgacactcaatccataggcagcagctaacccatcgtgggctaccttgctgccacagctacaacaagcgctagcacacaaccagggatgtctgataaaccctgccttgcaagatcccatagcgggaggagagatctcttagacaagatatgtgaagcactcgacagtcgagccctaataccgacatgggctgcctagaaaccatatgta

SEQ ID NO: 71538 - DNA, 402 bp, Zea mays
  Clone ID: MRT4577_165246C.1
ggtcactcttgcagctcgatcattctttagctgctctagctctagccctagctagtagctagccactcggtcgtgtagtcatcagccttctgatcgtcacccatggccactgccgaggtccagaccccgaccgtcgtggcgaccgaggaagcgccggtggcggataccccggtgctcgttcgtgtggtgctcctggacgtgcgtccgcttcctgggtgcgggtcccccggttcgctcgcgatgactgggtgggggttgctgccactatcaccattgcctccgcggatgccggatcctcgtggagaggcgaggtacggtacagaggggcatgccagcgtgccgacgctgaggtaggcggatctgggttggtagggctggcctgtgcatgaggaggaggtctag

SEQ ID NO: 71539 - DNA, 538 bp, Zea mays
  Clone ID: MRT4577_165247C.1
caatccaacagggtaagatgtccaaatcatgcaggggttgaccccctccagttttttgggggaaaaaccttgggacccagaaaactagcagttaaaatcctgtattctaatcccaaaaaaaacctccatttcaccccagtttccgggaaaaataaagggggggggccaaccccctatagcagttcatggacggattttttttttttaaaccccccgacccaaatcctttaagttggccgcccttgggggagagcctccttagtttcaaaaaaaaaaggacccatctcctttttgggggtttggacggcccatttcacgccagaaacaccaaccacggttgtaccctttttaaggaaggggattccacggggctttttcggggaaagatacaaaacatccatgttcgcatttttccgttgggttataaaaaacacatttgaagctgcaaagcgctcaacagtaccatttatgctgttgatgacaaaccccggaaatttttttgaaaattcatggccatcaggcaaagatttccaggcct

SEQ ID NO: 71540 - DNA, 282 bp, Zea mays
  Clone ID: MRT4577_165248C.1
ctgacgcgtgcgctgacgcgtgggctctacattggcatctgatgctgactacgagttcctggggcaggccatgggtcatggtgcgtggtcgaacactcagacgctgacgctgctgctgatcggactacctaccgtactagtgctggtagctgattatcgccaatagcacgtatcgtgtatcggtagtgggcaagccgccggttactacatcgtcgacgggcacactggccatattggggcacctacaccacatttgtccctagacacacatatctttcaagg

SEQ ID NO: 71541 - DNA, 454 bp, Zea mays
  Clone ID: MRT4577_165249C.1
taaacaagctaagaagaccacaagggtgtataattgtaaattttagtctgccctattacagcaatgacctgaaatccagaaggcatcagttcaaaggccagcttctttgtaacatagagaaaacaggcattagttggaacgggcccatttaccctttgactgagatctcttatggcatgccccccaccccaccccatgcggaacgcgacggttactgttgatggttactttctgtttgctgatactgtcgataaggtctgccaaatcaggaacaacgagtgacaagaaagcgagcacatgcccacctataaaaaactatcgactggtgtctctccagaatcacgatagcttgcattcctgagtaactcccatcgctggtgccgttttttttagacgcgccacagccacagctcatcattgtacaagttgaaatctgttcttggtcgctaatttg

SEQ ID NO: 71542 - DNA, 1677 bp, Zea mays
  Clone ID: MRT4577_16524C.1
gccaatattgctctgatgatcggtggcatggttgagactaggatcgctatgggcttcgctggtcacttagctgctggccttggttgctttagtttcattgacctggacacacctcttttactgtctgaagatcctgtatatggtggctatgaagctttcggacctctgtacaagtttacaaatgctcgtggccatggcggtttccttcacttggacaatgaagcctcgaaatgaagatgaaatacaagtgatagaagtgagcttcatcgaagcattgctgtgcattccgtaatgcactgttccactggacaatcatcacataaccggaatcacacaagcgatcgcaagcatatagccatataggaccatttagtcagcctgtagatagacattcagaaggctgttgcaagtccagtcaggcctggagcactggactatttggtcagcctgtagatatagatattcagaaggctgtttccgctggctctgttgttttatccagacattctatgcaataaatacatctggttgtaaatgtcaacacatgcaaccgtgacccgtcgtaagcctttgttgttctatagctgttcagtataaataaggctttccttaattacgctgaagcgaacgtatgtaggagcaaatttaacaatagagccaactattggctgcaaaaaaaaaaaaaaaaaaagtccgcacaataatctgcgctgcgcggaagaagggaaggggaaaagcagttaagcttgagcgcgcgcgacagggtccagtcgagggccggggaatcgccggagaatggaggtgggcagggctccgcgacgacggctgtgcccagcggcggcggctgtgccttcgctgcttctgttcgccgttctattcgcgggccgggcggcggcggcgttcggccacctgcaaggcgccggcgccggcgcgacggcgctgtacaagcacgcgtcgttcttcgaccgcgacggcgacggcgtcgtctccttctcggagacgtacggcgcgtttcgggcactcgggtttggattcggcctgtccagcgtcagcgctgcgctcatcaacggcgctcttggtagcaagtgcagacctcaaaatgcaacgtcatcgaagttggatatctacatagaggacatccagaaagggaaacatggaagcgattcagggtcatacgacgccgaaggaaggtttgttcctgacaagttcgaagagatattcgccaagcacgccaagactgtccccgacgccctgacgtcggacgagatcgaccagctgctgcaggcgaacagagagcccggggactacagcggatgggctggcgcagaagcggagtggaagaccctctacagcctcggcaaggacaaggacggcctcctccgcaaggacgtcgcgagaagcgtctacgacgggacactgttccacatgctcgcgcccaactggaaatctcccgacgaggaggaggaacaggaactaagcgtgatccgggagagctgaaccgagaggtacaagcaaagtctggttgagagataaggactctgggaccctctgaacatgctgtcaagcaacatgtactactagcggtgtgaacgggtggtgtgaacactcttttcatatctctactacctattaagacggtaaggggtaggctgccccattccgtgttctgccattcct

SEQ ID NO: 71543 - DNA, 124 bp, Zea mays
  Clone ID: MRT4577_165250C.1
acggcataatctgactcgtatcgtctgatactgagtgatctcgcatcttttattgttgcgacatgggtatgttatatatgtgtacacgcgaaccgaaacttacgcaataattatttttggactc

SEQ ID NO: 71544 - DNA, 774 bp, Zea mays
  Clone ID: MRT4577_165251C.1
atggccgcctcaggctactcgggctccgcgcccattactgatcaggggttcgaaggctggcccccgaaggaaggacagcgccgcctgcgccactccgactgcagtgccactcgacagagtgagtctgacaggcagtcaggccttgccaaaggcgccacggcgaactccgctccgcccgaccccagggctcggactcgggctaagacccggaagacggcgaactccgctccgcccgaccccagggctcggactcgggctaagacccggaagacggcgaactccgctccgcccgaccccagggctcggactcgggctaagacccggaagacggcgaactccgctccgcccgaccccagggctcggactcgggctaagacccggaagacggcgaactccgctccgcccgaccccagggctcggactcgggctaagacccggaagacggcgaactccgctccgcccgaccccagggctcggactcgggctagcacccggaagacgacgaaactccgcttcgcccgaccccagggctcggactccgccctggcctcggccgaacgacttccgcctcgcccgaccccttggctcgggctcggccacggcaacagaaggcagactcaacctcggcttcggaggaacccccacgtcgccctgcctagggcacagaccgccacgtcaacaggaggcgccatcatcatcctaccccgaatcgactcgggtcacggagaacaagaccggcgtctcatccggccagctccgccagaggggcaatga

SEQ ID NO: 71545 - DNA, 899 bp, Zea mays
  unsure (1)..(899): unsure at all n locations
  Clone ID: MRT4577_165252C.1
actttctcattgagcagcgagttaagtaccgatcgagagtggcatatatagcacttagtttgcagaggaacacaagcatggagaagctctccattgcggcgaccatgttctgcgccttggtccttgcggctctggcggcggcggccggcggtgaggccgccgtcgtggaacacacctttgtcgtgcacgagatgaaccagacgcacctgtgcaacaccaccaagatttacgtggtgaatgggcagctgccgggccccaccatcgacatcaccgacggcgacacggttgttgtccatgtcatcaaccgtctccctcacgggctcaccatccactggcacggtgtccggcagatgaggagttgctggtccgacggcgccggcttcgtcaccgaatgccccatccctcctggcggcgaccatgtgtaccacttcaacgtcactggccaggtcggcacgctatggtggcacgcccacgtcacctgcctccgcgccaccgtcgccggcgccttcatcatccgtcccaagggagggatgtacccgttcccgacgcccgccaaggacgtgcccatcatcatcggcgagtggtggcagctcgacctcgtcgagctagacaggaggatgcatgatggtaacttcgacgacaatccgctgtcggcgaccatcaacggcaagctgggcgacctcagcaattgctctggcaagccggaggagagcttcgtcctcgacgtggtgcgcgggaagacatacctgttgcggatcgtgaacacggcgctcttctccgagtactacttcaaggttgctgggcacacgttcaccgtggtgggtgccgacggatactacctgacgccgtacaagacggacatggtgacagntgctccaggggaggccatcgacgtgctc

SEQ ID NO: 71546 - DNA, 2077 bp, Zea mays
  Clone ID: MRT4577_165253C.1
atggccgaaaggacaggcggcgcctctggcaggagaagcgggcgacgcttcgccttcgccataataaccgcgccaaaaaagggaccgggaaagggggataccccgaaaaggatccttccccgtgaaggaactgggctccgagcctccctactgatcagaggttcgaaggctggccccccgaagggttcgacagccgcctcagatcgcgtgggccctacacccactactggtcagaggttcgaaggccggccccccgaagggttccacggccgcctcaggctactcgggctccgcgcccattactgatcaggggttcgaaggctggcccccgaaggaaggacagcgccgcctgcgccactccgactgcagtgccactcgacagagtgagtctgacaggcaattaggccttgccaaaggcgccacggcgaactccgccccgcccgaccccagggctcggactcgggctaagacccggaagacggcgaactccgctccgcccgaccccagggctcggactcgggctaagacccggaagacggcgaactccgctccgctcgaccccagggctcggactcgggctaagacccggaagacggcgaactccgctccgcccgaccccagggctcggactcgggctaagacccggaagacggcgaactccgctccgcccgaccccagggctcggactcgggctaagacccggaagacggcgaactccgctccgcccgaccccagggctcggactcgggctaagacccggaagacggcgaactccgctccgcccgaccccagggctcggactcgggctaagacccggaagacggcgaactccgctccgcccgaccccagggctcggactcgggctaagacccggaagacggcgaactccgctccgcccgaccccagggctcggactcgggctaagacccggaagacggcgaactccgctccgcccgaccccagggctcggactcgggctaagacccggaagacggcgaactccgctccgcccgaccccagggctcggactcaggctaagacccggaagacgacgaaactccgcctcgcccgaccccagggctcggactccgccctggcctctgccgaacgatctccgcctcgcccgaccccctggctcgggctcggcctcggccacggaagacagactcgacctcggcttcggaggagcccccacgtcgcccgacctagggcacaggcccgccacgtcaacaggaagcgccatcatcatcctaccccgagccgactcgggtcacagagaacaagaccggtgtcccatctggctagctccgccagatgggcaatgatggcgccccacaagctctgtgacgacggcggctctcagctctcttacggaagcagggggacgtcagcaaggactcgaccgctccgacagctgtccctccgccaggctccgttgctcctccgacagccacgacatcacgccagcagggtgccaagatctctccggctgccacattggcatgtacttagggcgctagctctccctccgctagacacgttagcactctgctacacccccattgtacacctggatcctctccttacgcctataaaaggaaggaccagggccctcttacagaaggttagccgcgcggggacgaggacgggacaggcgctcgcgtgaggccgctcgctccctctcctgcgtggacgcttgtaaccccctactgcaagcgcacccgacctgggcgcgggacgaacacgaaggccgcgggatttccacctctctcacgcccgtctccggccacctcacttccccccttcgcgctcggcctcgcgccgacccatctgggctggggcacgcggcgacattcactcgtcggcttagggacaccccggtctcgaaacgccgacaggtacaatcatgataagttggtaacagctagatcatgtatttgtaattaaacaatccccaatgtcatgtcacatatttctatgctacctactaatttattaaaaatgtgatatcttataggtcaaataattttttaatctggttaaggtgtgccaggttatattattttctgcgcacata

SEQ ID NO: 71547 - DNA, 1124 bp, Zea mays
  Clone ID: MRT4577_165254C.1
atgcaaccgagaaaggctggtccccttgcaaaaaagtgcgacaaaagcctccaagcgagtgctaacactcccttcgaggctcgggggctactgtcggggaccataattaggggtaccctcaagacgcctaattctcagctgagccgaggtgaccgccgtcactccaccgctccactggccagtctgacagaaggacagcgccgcctgcgccactccgactgcagtgccactcgacagagtgagtctgacaggcaattaggccttgccaaaggcgccacggcgaactccgctccgcccgaccccagggctcggactcgggctaagacccggaagacggcgaactccgctccgcccgaccccagggctcggactcgggctaagacccggaagacggcgaactccgctccgcccgaccccagggctcggactcgggctaagacccggaagacggcgaactccgctccgcccgaccccagggctcggactcgggctaagacccggaagacggcgaactccgctccgcccgaccccagggctcggactcgggctaagacccggaagacggcgaactccgctccgcccgaccccagggctcggactcgggctaagacccggaagacggcgaactccgctccgcccgaccccagggctcggactcgggctaagacccggaagacgacgaaactccgcctcgcccgaccccagggctcggactccgccctggcctcggccggacgacttccgcctcgcccgaccccctggctcgggctcggccacggcaactgaaggcaagactcaacctcggcttcggaggaaaccccacgtcgccggcagcaggacaacgtcagcagggactcgaccgctccaacagctgtccctccatcaggctccgtcgcacctccgatagccacgacatcacgccagcaggatgcccagatctctccggcattagcaagaatggcatcaacaacatttgggtaagtcactaagtttatctccaaaacctgctttgagtatatcagtgtcttgtcaaactccctcctttcagcaaaagcagcaacaactttaggggttgccctagcctttatgtatattttcagtgcaagatcattgtccacagtcat

SEQ ID NO: 71548 - DNA, 222 bp, Zea mays
  Clone ID: MRT4577_165255C.1
aatgaataattggcatagaccaaacgtagagggtgacacaaacccacacagatcaatacaaaaaacggaggcaactgaggctgagcacagcatgaaaagggggcacgggggaatattgccgaggaaagcctgcaccatcgcgctctagggttaaaggaggataagacaactgcaagcggtgctctacaggacaggcctagggaagagaggggcggtgcttat

SEQ ID NO: 71549 - DNA, 2546 bp, Zea mays
  Clone ID: MRT4577_165256C.1
atgccgatgtggcagccggagagatctgggcatcctgctggcgtgatgtcgtggctatcggaggcagggcgacgtggggtttcctccgaagccgaggttgagtcttgccttcagttgccgtggccgagcccgagccagggggtcgggcgaggcggaagtcgtccggccgaggccagggcggagtccgagccctggggtcgggcgaggcggagtttcgtcgtcttccgggtcttagcccgagtccgagccctggggtcgggcggagcggagttcgccgtcttccgggtcttagcccgagtccgagccctggggtcgggcggagcggagttcaccgtcttccgggtcttagcccgagtccgagccctggggtcgggcggagcggagttcgctgtcttccgggtcctagcccgagtccgagccctggggtcgggcggagcggagttcgccgtcttccgggtcttagcccgagtccgagccctggggtcgggcggagcggagttcgccgtcttccgggtcttagcccgagtccgagccctggggtcgggcggagcggagttcgccgtggcgcctttggcaaggcctaattgcctgtcagactcactctgtcgagtggcactgcagtcggagtggcgcaggcggcgctgtccttctgtcagactggccagtggagcgctttatgctgatgggggttaccagctgagaattaggcgtcttgagggtacccctaattatggtccccgacagcagcattactcagagttgcctgatatcaagcgtgccattgcaaatacccatcccattaacaacttccttggacaggcacttgttgagttctttggcacattgtcaagagagtgggctttggaatgcatgaaagaccttctactggttaatctgaggggaaatcttcagattgttgtgcaggccacgaaagaatactctgagcagctaggggttgatgcttgcatcaaattatttgagcaattcaaatcttatgaggacctttactttttcttgggatcttatctgagctccagcgaggacccagatatccatttcaagtacatagaagcagcagcaaggactggacaaatcaaagaagttgaacgtgtaaccagagagtcaaacttctatgatgctgagaagataatgaactttttgatggaagcaaaattacctaatgcccgtccactgattaatgtttgtgatcgctttggttttgtgccagatctcactcactatctgtacacaaacaacatgcttcgatatatcgaaggctatgttcagaaggtgaatcccgggaatgctccattggtagtggggcaattacttgatgatgaatgccctaaagattttatcaagggtttgatcctatttgttcgttctctcctccctgttgagcctttggttgatgaatgtgagaagagacgtgggcagtgtgacgatgaacttattaacgtcactaacaagaattcgttattcaagctgcaagctaggtatgtggttgagagaatggatggtgatctatgggataaagttcttcagcccgagaatgaatatagaaggcaactcattgaccaagtggtttcgactgcattacctgagagcaagagccccgagcaagtgtctgctgctgttaaggctttcatgactgctgacctgccacatgaactgattgagcttcttgaaaagattattcttcagaattctgctttcagtggaaatttcaatctgcagaacctgctcatcttgactgccaaagcccagttacgtgaaggtctggtcagtgaagcaattgagtccttcattcgtgtagatgatgctgcacacttccttgatgttatccgtgcagccgaggaagctaatgtgtacaatgatttagtgaagtacctagatcaactcacttgttatgattgttgaaagagccaaagagaaggaggagaaagatcttgtggctcagcagaacatgtatgcgcaactgcttcctcttgccctgcctgctccgccaatgcccggcatgggtggccctccacctccgatgggcggaatgggcatgcctccgatgggcgggatgggcatgccgccgatgggccctggtccgatgccagcattcgggatgccaccaatgggaagctactgagatgttttttttggcagagagcttagatgatgatttgatatgttcctgtgtaagcagaggcggaaacctcattggagttgtagatggttacattttggaattaatattctttatggtaccaggaaatttttggcgagtgaaatcttggccagagtcatcggataggacggggatgattaggttggttgagcatgagctggtgaaagctggtaccatttgtatagtgtgatgaaatctttgtagacattttgcttgtgtaataataatacttgttcgcacagcgaaggacaaacaaatgtatgctgacttgtgacgtcctgttcattgcaatttgttagtatgtgttttctggaaagaagacaaaaaaaaaaaaaaaaaaaaaaaacgagaaaggggccggtagccc

SEQ ID NO: 71550 - DNA, 1740 bp, Zea mays
  Clone ID: MRT4577_165257C.1
ctctctcttgcaacagggactgggaaagggggatcccgaaaagggtccttccccgtgaaggaaccaggctccgagcctccctactgatcagaggttcgaaggctggccccccgaagggttcgacagccgcctcagatcgcgtgggccctacacccactactggtcagaggttcgaaggccggccccccgaagggttccacggccgcctcaggctactcgggctccgtgcccattactgatcaggggttcgaaggctggcccctaaagggttcacagccgcctcagacgccgagcgagggatgaccatgggtacgttcgatacataaccaaggctcgggctgtgctcccgaggtaccctaggacatttccgagaccagcgggagcgatcttgtaacggaatcccatcagagggaggcatcgagccctcggaccccgtcgccaggggaccgggtccggcagatcacccgcaggtacttttgggcgtgcctctgggcccctagccgacccctaacgaacggggcacggacgtccactcggattacccgcttgcagctcaccggagacaccatgttcggtgcccatcgagggtaacatggcgctctccccccctcctccttgcggaaaggcgacgtaggggcgtatgtaaaaagccgagtctgtccctgatcgccctctcgccctgtgcggaggctcgggggctgctctcgcaaacccggctccaaccaaaccgttgacagcgtcaacataccagcccgagaacttgggccccgaccgtgcacccgggctacggccagttcgcatgagggaacaaccagaccagccaaagcattacgcaaggcactaagacctcgaaggagtgaaaccactccttcgaggcctcgggggctacacccggcgggtgcgctcgcgcgcaccccacccggaacaaaatgcaaccgagaaaggctggtccccttgcaaaaaagtgcgacgaaagcctccaagcgagtgctaacactcccttcgaggctcgggggctactgtcggggaccataattaggggtaccctcaagacgcctaattctcagctgagtaagtctgacaggcagtcaggccttgccaaaggcgccacggcgaactccgctccgcccgaccccagggctcggactcgggctaagacccggaagacggcgaactccgctccgcccgaccccagggctcggactcgggctaagacccggaagacggcgaactccgctccgcccgaccccagggctcggactcgggctaagacccggaagacggcgaactccgctccgcccgaccccagggctcggactcgggctaagacctggaagacggcgaactccgctccgcccgaccccagggctcggactcgggctaagacccggaagacgacgaaactccgcctcgcccgaccccagggctcggactccgccctggcctcggccggacgactaccgcctcgcccgacccgatggcccgggttcggcctcggcaacagaagacagactcaacctcggcttcggaggagcccccacgtcgcccgacctagggcacaggcccgccacgtcaacaagaagcaccatcatcatcctaccccgagccgactcagtgtctggactgcgcgtgctaataatagataactcagggtttaatatgcaaatgttcccaagactcaggacgtacccgtggaggactgcaggtttaattctaaaaaccccaggggctctttactaa

SEQ ID NO: 71551 - DNA, 915 bp, Zea mays
  Clone ID: MRT4577_165258C.1
agccgaagtgaccgccgtcactccaccgctctactgaccagtctgacagaaggacagcgccgcctgcgccgctccgactgcagtgccactcgacagagtgagtctgacaggcagtcaggccttgccaaaggcgccatagcaaactccgctccgcacgaccccagggctcggactcgggctaagacccggaagacggcgaactccgctccgcccgaccccagggctcggactcgggctaagacccggaagacggcgaactccgctccgcccgaccccagggctcggactcgggctaagacccggaagacggcgaactccgctccgcccgaccccagggctcggactcgggctaagacccggaagacggcgaactccgctccgcccgaccccagggctcggactcgggctaagacccggaagacgacgaaactccgcctcgcccgaccccagggctcggactccgccctggcctcggccaaacgatctccgcctcgcccgacccgggggctcgggctcggcctcggcaacggaagacagactcgacctcggcttcggaggagcccccacgtcgccctgcctagggcacaggcccgccacgtcaacaggaagcgccatcatcatcctaccccgagccgactcgggtcacggagaacaagaccggcgtcccatccggccagctccgccggatgggcaatgatggcgctccacgagctctgtgacgacggcggctctcagctctcttacggaagcagggcgacgtcagcaaggactcgaccgctccaacagctgtccctccgccaggctccgtcgctcctccgacagccacgacatcacgccagcaaggtgccaagacctctccggctgccacattggcatgtacctagggcgctagctctctctccgctagacacgtag

SEQ ID NO: 71552 - DNA, 298 bp, Zea mays
  unsure (1)..(298): unsure at all n locations
  Clone ID: MRT4577_165259C.1
gatacacaactctcgtgcatgttcgagaaaaaaaaatatataacaagctttttttttctcgaacacgcaagaaacatgcgcatcttttcattaagaaggaagagaaaagggatccaaaagggatcagtacaggaagacccccattacgggggtcgaaaacaagnaacaaaaatacatctataaataaaaggaagcagaaactactttgacctaaagacctgggatgggggctgttaagagatctaagtttggggcccctcctaacacccacaggtccctttcctcctcggttctcttg

SEQ ID NO: 71553 - DNA, 274 bp, Zea mays
  Clone ID: MRT4577_16525C.1
attctcattaagggcaacgtagtcgagtctctttcaagccatctgaataaactgaaaggcaacataaggatgatcgatagtcatctggatggaacgaagcaagcttttatttcaaatatacaagataaattgaatgaaggaattaatcttgccagtttggaaaaggaagtagaaactgctgaaaaatgttgtcaggcaatgaaggatgaagtagctgcaatgagaatgaggtacttggaccgtggaatttagattgttccagtgtccgctatct

SEQ ID NO: 71554 - DNA, 374 bp, Zea mays
  Clone ID: MRT4577_165260C.1
atggcgcctcctgttgacgtggtcggtccgtgccctaggttgggcgatgtggaggctcctccgaggtcgaggtcgagtctgtctttcgaggccgaggtcgagtccgagcccctgggtcgggcgaggcggagaccgtcggctgaggccagggctgagttcgagccctggggtcgggcgaaacagagttcgtcgtcttctggggctgagcccgagtccgagccctgggtcgggcggagcggagttcgccgtcttccggggctgagcccgagtccgagccctgggtcgggcggagcggagttcgccgtcttctggggctaagcacgagtccgagccctgggtcgggcggagcggagttcgccatcttccggggctga

SEQ ID NO: 71555 - DNA, 1347 bp, Zea mays
  Clone ID: MRT4577_165261C.1
ggtggaaatcccgcggccttcgtgtttgtcccgcgcccaggtcgggtgcgcttgcagtaggggggttacaagcgtccacgcaggtgagggaagcgagcggccccaagagagcgcctgtcccgtcctcggtcccgcgcggccaaccttctctaagaaggccctggtccttccttttataggcgtaaggagaggatccaggtgtacaacgggggcgtagcggagtgctacgtgtctagcggagggagagctagtgccctaagtacatgccaatgtggcagccggagagatcttggcgccctgctggtgtgatgtcgtggctatcggaggagcaacggagcttggcggagggacagctgttggagcggtcgagtccttgctgacgtccccctgcttccgtaagggagctgagagccgccgtcgtcacagggctagcggggcgccatcattgcctatctggcggagctagccagatgggacatcggtcttgttctctgcggcccgagtcggctcggggtagggtgatgatggcgcttcctgttgacgtggctggcctgcgccctaggttgggcgacgtggaggctcctccgaagccgaggtcgagtctgtcttccatggccgaggccgagtccgagcccctgggtcgggcgaggcggaggtcgttcggcagaggccagggcggagtccgagccctggggtcgggcgaagcggagttcgtcgtcttctggggctgagcccgagtccgagccctgggtcgggcggagcggagttcgtcgtcttctggggctgagcccgagtccgagccctgggtcgggcggagcggagttcgtcgtcttccggggctgagcccgagtccgagccctgggtcgggcggagcggagctcgtcgtcttccggggctgagcccgagtccgagccctgggtcgggcggagcggagcttcctatggtgcctttggcagggcctgactgcctgtcagtctctctctgccaagtgacactgcagtcggagtggcgcaggcggcgctgtccttctgtcaggccggttagtggagcggcgaagtgacggcggtcactttggctctgccggggggcacgcgtcaggataaaggtgtcaggccacctttgcgttaaatgctcctgcgacttggtcggtcggtgcggcgatttagtcagggttgcttcttcgcgaaggcagggcctcgggcgagccggagatatgttcgccgtcggaggggggcctcgggcgagacggaaatcctccggggtcggctgcccttgtccgaggctaggctcgggcgaggcgtgatcgagtcgctcgaatggactgatccctgacttaatcgtacccat

SEQ ID NO: 71556 - DNA, 1871 bp, Zea mays
  Clone ID: MRT4577_165262C.1
atggagcctggtggagggacagctatcagagcggttgagtccttgctgacgtcctcctgcttccgtaagggggccgagagccgccgtcgtcacagagtatgggggcgccatcattgcctatctggcggagcgagccagatgggacgccggtcttgtttcctgcggcccgagttagctcggggtagggcgatgatggcgcctcctgttgacgtggctggcctgcgccctaggttgggcgatgtggaagctcctccgaagccgaggtcgagtctgtcttccgtggccgaggtcgagtccgagcccctgggtcgggcgaggcggaggccgtcggctgaggccagggcggagtccgagccctggggtcgggcgaagcggagttcgtcgtcttctggggctgagcccgagtccgagccctgggtcgggcggagcggagttcgccgtcttccgggacttagcccgagtccgagccctgggtcgggcggagcggagttcgccgtcttccgggacttagcccgagtccgagccctgggtcgggcggagcggagttcgccgtcttccgggacttagcccgagtccgagccctgggtcgggcggagcggagttcgccgtcttccgggacttagcccgagtccgagccctaggtcgggcggagcggagttcgccgtcttccggggcttagcccgacgccgagccctgggtcgggcggagcggagttcaccgtcttccggggcttagcccgagtccaagccctgggtcaggcgaagcggagttcgccgtcttccaggacttagcccgagtccgagcccggggtcgggcggagcggagttcgccgtcttccgggacttagcccgagtccgagccctaggtcgggcggagcggagttcgccgtcttccgggacttagcccgagtccgagccctgggtcgggcggagcggagttcgccgtcttccgggacttagcccgagtccgagccctgggtcgggcggagcggagttcgccgtcttccgggacttagcccgagtcctagccctgggtcgggcggagcggagttcgccgtcttccgggacttagcccgagtccgagccctgggtcgggcggagcggagcttcctatggtgcctccggcggggcctgactgcctgtcagcctcactctgtcaaatggcaccgcagtcggagtggcgcaggcggcgctgtccttctgtcaggccggtcagtggagcggcgaagtgacggcggtcacttcggctctaccggagggcgcgtgtcaggataaaggtgtcaggccacctttgcgttaaatgctcctgcgatttggtcggttggtgcggcgatttagtcagggttgcttcttagcgaaggcagggcctcgggcgagccgaagatgtgtccgccgctggaggggggcctcgggcgagacggaaatcctccggggtcggctgcccttgtccgaggctaggctcgggcgaggcgtgatcgagtcgctcgaatggactgatccctgacttaatcgcacccaccaggcctttgcagctttatgctgatgggggttaccagctgagaattaggagtcttgagggtacccctaattatggtccccgacacccgtattcttcagcatctggctccggtagcacaggtaaaccctaaccctagatctcacttgcgtcgtttctaaaccctaatcctgctaaccctagattgttttgctcttttgtaggtcagttgttgatgcctcgtcttcctcctctggggtagatcgggcacggcgactacgtgcaccgttgagggacggtgctggggatcggccgtccgcggtgaaggtcgccatggcggatgatgacgatgtcaattcagtcaccggcaacgacga

SEQ ID NO: 71557 - DNA, 898 bp, Zea mays
  Clone ID: MRT4577_165263C.1
agcgtggcgggctgctaactgaacacgttctcgttcgcctcggattaatttaaccccacccccgctcccgctttcacttccgctttgatgagtggaagtgttgcactttaatcccagatttggctcgccgttccagatctccgttggcgtgtgtccccgtcaaggtggagcgatgacggaagtggaggcgccgttcatcaccgaggtggagcaggaggagggccgtggcttacgcggttccgcgttcgccggaggggcccgctctggtctcggcaacggcgtgcggtgcacgaggcagtaccaccgccgatcggacgcgctagcctacggagaccgttaccagaaggcggcagcactcgtcgacctcgcataagatggtgtccgaatacccgaggatgtcttgaatgacacaaggtttgagagggccatgcgattttatttcgtgtatctccgattggattggctctggtcacttaacctatttgctttgattctattgaatttcctagagaagcctctctggtgtcaaaagtatgccccacatacttgtgatcaaagggatctttactttcttggacagttgccatacctaagcaaaacagaatcactcatatatgaggtaacgcttccttgacatgtgtagtgcttgtgcttcagtgcccaggcaagaacttaatgactcaaaccttaaagcgttattatggtcagtagtgtgtttcagggcatgtatatttaccttcagtttccctgaagcattcttttacaagttttctgactttcagttggagttggagctatcatagtatgcaattgtgcatgttttgaatgaaaatatatagcttcttataaggagtttgaaagtcagagctttatgtttcttactcttaatttcaggcgc

SEQ ID NO: 71558 - DNA, 367 bp, Zea mays
  Clone ID: MRT4577_165264C.1
aaaaaaaaaaaaataaatttttaaaaatgatgtacatgggtaaattaattcgcaaatgaacagtaaatgggccaaaaagcccaacccaaccaaaaaaaaacacatgctaacggtacaagaaaaagaggcgggaaacaggagggaaccacgagggcccaaggggggaccaacatccgaccggaaccagaaacaaccccgggagcccgggaaaagaaaaccacaaaaaaaggggggggaaagccaatggccaggggaggaacattttttcacaaaggacccggaaaatgggggagcacgggaacaaactggggaaacaaaagggggaaaaggccccccaccggcgggggggccttggggcttgaaaaag

SEQ ID NO: 71559 - DNA, 1926 bp, Zea mays
  Clone ID: MRT4577_165265C.1
accatgacgcaggaaaagacggtggtgctgtacccctccctgggcgttggccatctgaaccccatggcgcagctggccaaggccatcctccgccacggcagcgtcgccgttaccatcgccgtcgtcgacccgcccgagaagcacgccgtgctagctgctgcgctggcccgcctggcagcggtcagtccctccatcacggtccacctcctccccatcccgccctgcgccaccagcaagcagcattcccaccccatcatgcccatcctggatgcgctccgcgccgcgaaccccgcgctccgggcgttccttgccgcgcgagtccctgccgtcgccgccctcgtggtcgacatgttctgcaccgacgcgctcgacgtcgccgcggagctcgcgatccccgcgcacttcttctacccgtccgcggccggcgacctcgcggtctacctccaggttccagatctctgccgcgccgcgccgtccccgctaagggacatgggcaaggcggcgctgaacttcgccggcgtgccggcggtccgcgctctcgacatgcccgacaccatgcacgactgggagagcgacgtgggcagcgtacggctgcggcagctcgcccggatgccggaggccgcgggcattctggtgaacagcttcgagtggctggagtcgagggcgctggaagcgctacgtggcggccactgcctgcccggccgctcgacgccgaaaatctactgcgtcgggccgctggtcgacggtggcggcagtggcaccgaggggaacggcgagaggcacgcgtgcctcgcgtggatggacgggcagcccaagcagagcgtggtgttcctctgcttcggaagcctgggcgccttctcggcggcgcagctgaaggagacggcgcgcgggctagagcgttcaggacacaggttcttgtgggccgtgcgaagtccaagcgaggatcaggactctggcgagcctgatctggaggcgttgcttccggatgggttcttggagagaaccagaggcagaggactggttctgaagaactgggcgccccagacacaggtgctgcggcacgaggccgtgggtgcctttgtaactcactgcggctggaactcggtgctggaggcggccatgtccggcgtgccgatgatctgctggccgctgtacgcggagcagaggctgaataaggtgcacgtggtggaggagatgaaggttggggtggtgatggaaggctacgacgaggagttggtgacggctgacgaggtggaggccaaggtacgactagtgatggagtcggaggaagggaagaagctcagggagaggacagcgacggcgaaggaaatggctgctgatgccatcaaacaaggcgggtcgtcttacgtcgaacttggcgccataggaaactctgcatcgcccgaagggctcggactcgggctcagccctggaagacgacgaactccgcaccgcccgccccagggctcggactcgggctcggccccggaagacgacgaactccgcttcgcccgacccaagggctcggactcgggctcagccccggaagacgacaaactccgcatcgcccgaccccagggctcggactcgggctcagccccggaagacgacgaactccgcctcgcccgaccccagggctcggactcgggctcggccccggaagacgacgaactccgcctcgcccgaccccagggctcggactcagccctggcctcagccgacggtctccgcctcgcccgacccaggggctcggactcgacctcggcctcggaagacagactcgacctcgacctcggaggagcctccacctcgcccaacccagggctcggaccgaccacgtcacaggaggcgccatcattaccctaccccaagctaactcaggctacggggaacaagaccggcgtcccatctggctcgccccggtaa

SEQ ID NO: 71560 - DNA, 342 bp, Zea mays
  Clone ID: MRT4577_165266C.1
ctatttatatttttttaatacaacacatccaaaagaaatacttgtatagtagcaatccataagaaggtaaataaaccgtgacatccaacagacaaacaaactgacgacgacacatgcagccatataagagtttatgctgcgccacacgacaattaacagttttaaacaccgacaccaggcaagcaaaacaaacttattgaaataatattatcaagttcggccattagcagcgtggcctcttcactcgtcgtcaccctctttatcagactcggcactctggagccactcgacgaacggcttggcattcttgacaacctgggagtccttccagctgcgacagca

SEQ ID NO: 71561 - DNA, 388 bp, Zea mays
  unsure (1)..(388): unsure at all n locations
  Clone ID: MRT4577_165267C.1
ccatcttaatttttattctcatggataaccactttccataccgttacctgttccatttcatgtctaacaaccactcccnatcctaatctgaaaagttcactattaaatcccacatcaaaattaattttgatatcctctccagaagattcaacccatacttctttattcacctctctgtccataatccccaaatagagacacataacactcgttgctctaatttttatcatacactaaaagcccaatttatctataatttgtttaccatttttttttgcatttttttcaataattaaatcaccctctataaatcaatgtacattcctaactcgtttaaaaaaatatcttcttaaatgctctatttttcttccacatttccaattttttt

SEQ ID NO: 71562 - DNA, 429 bp, Zea mays
  Clone ID: MRT4577_165268C.1
atgggcaaggacaagaagggtcagggctcgtcgtgtcgctccggcgacaaacggaaacgtgaactgagtccttcgtcgaagggcttcggtgactccgagtactcggaggaggagttttcctccgagtccgagggatcgccggggatagccgccgaggtgtggacgtacatccggtctgtcgagcgtgccgggctcgagggctcggatgagtcggaggtctcctcggacgaggagaactctttcggctcgtccgaggaaaggagcggcggtgacggcgacgacgaaggtgacggcagcggtgggggtggcggcgatgacgacggcaagggcgacggtggcgatggcggcgatggcagcgacagtggcggcgacgacggcaaggacggcagcatcagcagcacggccagtggcaaagcaccactggcttaa

SEQ ID NO: 71563 - DNA, 2234 bp, Zea mays
  Clone ID: MRT4577_165269C.1
aacctaggtctgtggttgatccccaacacctcctgccctcctataaaagccgcccgcctccgtttctcgcccgcaccgcatcgcctcgccgctgttccccgcaacctatcgacccaatctcgtccgacccggcgcgtcgtcccctccagatctccgtcgccctctccaggtagcagaaactgttctgctgcagtctgacaaagtggagggcttaggagcttctgcttcttttatgtctgaacaatctttgctttatttgggattgttgggagagtactctcgtgcaacgaggaaaaggcacaaggttccgtcccactgcatgcgtcaagagcctgtctggttttcttgttctgatttgtcatttgctggtgctcagagccggcttggtttcctcgaaggatcagcaactactcttgattgtggactttgtcacatctgatatcaacttcatagatttttatccaagatggcgctgcaaaacattggtgcttcaaacagggatgatgccttctacaggtacaagatgcccagaatgattactaagatagaaggccgtggtaatggtatcaagacaaatgttgtgaacatggttgacatagcaaaagcacttgccaggccagcttcgtacaccaccaagtactttggatgtgagcttggtgcacagtccaaattcgatgagaagacagggatttccttggttaatggggctcatgatactgcaaagctggctggtctccttgaggtattcatcaagaagtatgtccaatgttatgggtgtgggaatcctgagactgagattctcatctcaaagacccagatgatatcactgaaatgtgcagcctgtgggtttgtctcagatgttgatatgagggacaagctcacaaccttcatcctgaaaaacccaccagaacagaagaagggcggaaaagacaagaaggccatgaggagagctgagaaggaacgcctgaaggaaggtgaggctgctgatgaggagcagaagaaactgaagaaggatgcaaagaagaagggttccaaggattccactgctaagggtttgaagaagaaggctactactgctactggctctgatgaggaccactcatcctctccaactcgcagccatgatggtgacaaagcagctgcagatgatgatgacgatgatgtccagtggcagactgacacttcaattgaggctgcgaagcagcgcatgcaagagcagctgagtgcagcaactgctgaaatggtgatgctgtcgactgaggagactgagaagaagatgaaacaggcaacccacaaagatggaagcactaatggttcagcaaaagaaatccctaatgacaagcctgccgtcactaagcctagtccctatgaagaactgattggagacatcaaggctagcctaggaagtgctccgaccccttcccagctcaaggctgtgctggcctcatcaacccttcccccccaggacgtgatgaatgctcccctggaggctctctttggtggtgtgggtaagggattcaccaaagaggttgtgaagaacaagaagtaccttgcagttgctgtgccagatgagggtgcccagacccttctggttcaggccattgaggcttttggtgggaagtgcaaccctgaggcgctgaaggaggttcccgttgtcctcaaagccctctacgatggagatatcctggacgaggaaaccattgtggactggtacaatgatgctgtcgcagctgggaaggactcccaggttgtcaagaatgccaagccgttcgtcgagtggctccagagtgccgagtctgatgaagagggtgacgacgagtgaagaggccacgctgctctactgctaatggccgaacttgataatattatttcaataagtttgtttgttttgcttgcctggtgtgtcggtgtttaaaactgttaattgtcgtgtggcgcagcatactcttatgtggctgcatgtgtcgtcgtcagtttggttgtctgttgggtgtcacggtttatatcttcttatggattgctactatacaagtatttgtttcggatgtgttgtataacctttcggggtgtaacattttattattgcactgttgcttctctaccttataagggttgaggattatgaaatccttagccggtaaaaaaaaaaaaaaaaaaaaaaaaaaaaaaaaaaaaaaaaaaaaaaaaaaagaaaaaaaaaaaaaaaaaaaaaaaaaaaaaaaactcgagagggg

SEQ ID NO: 71564 - DNA, 1061 bp, Zea mays
  Clone ID: MRT4577_16526C.1
cggcctgtccgcctgtattttagggggcccgtggggcgtgggggcacgggcacccgcacaagctgcgctgccagtgccagcgctcactcgaacgccgagacccgagaggagcaaacagccaaaaagaacggaaaggggagagcaaacagccaaaaaaggacggacttgcgcgacagggtcgaagactcagaaggggaatctccggaggatggaggtgggcaggactccgcggcgacgggcgtccccagcggcagcggcggcggcggcggcggcggctgtgccttcgctgcttctgttcgccgtgctattcgtgggccgggcggcggcagcgttgggcggcccggggccggcgctatacaagcacgcgtcgttcttcgaccgcgacggcgacggcgtcgtctccttcgcggagacgtacggcgcgtttcgggccctcgggtttggactcggcctgtccagcgccagcgccgccttcatcaatggcgcccttggcagcaagtgcagacctcaaaacgcgacgtcgtcgaaactggacatctacatagaggacatccggagagggaagcacgggagcgactccggctcgtacgacgcccaaggaaggttcgttccggagaagttcgaggagatattcgccaggcacgcgaggacggtccccgacgccctgacctcggacgagatcgaccagctgctccaagcgaacagagagcccggggactacagcggctgggctggcgcggaagcggagtggaagatcctgtacagtctcggcaaggacggggacggcctcctccgcaaggacgtcgcgaggagcgtctacgacgggacactgttccaccggctcgcgcccagatggaaatctcccgacagcgacatggagagaagctgataagcgtggtccgggagaactgaaccgagaggaccgtcctattgatgtcgtcttgcgctgggctgctctgaactgaacaagtctggacatgccgtcaagcgacatgtgggtgtgaacactctttcgggtcagattattaacaagaagggtgtgaccgtgtgagtgtgaacag

SEQ ID NO: 71565 - DNA, 2337 bp, Zea mays
  Clone ID: MRT4577_165270C.1
acctcgaggccggccgggccgggaccgcatcgcctcgccgctgttccccgcaacctatcgacccaatctcgtccgacccggcgcgtcgtcccctccagatctccgtcgccctctccaggtagcagaaactgttctgctgcagtctgacaaagtggagggcttaggagcttctgcttcttttatgtctgaacaatctttgctttatttgggattgttgggagagtactctcgtgcaactaggaaaaggcacaaggttccgtcccactgcatgcgtcaagagactgtctggttttcttgttctgatttgtcatttgctggtgctcaaagccggcttggtttcctcgaaggatcagcatctactcttgattgtggactttgtcgcatctgatatcaacttcataaatctttatccaagatggcgctgcaaaacattggtgcttcaaacagggatgatgccttctacaggtacaagatgcccagaatgattaccaagatagaaggccgtggtaatggtatcaagacaaatgttgtgaacatggttgacatagcaaaagcacttgccaggccagcttcctacacaaccaagtactttggatgtgagcttggtgcacagtccaaatttgatgagaagacagggatttccttggttaatggggctcatgatactgcaaagctggctggtctccttgaggtattcatcaagaagtatgtccaatgttatgggtgtggaaatcctgagacagagattctcatctcaaagacccagatgatatcactgaaatgtgcagcctgtgggttcgtctcagatgttgatatgagggacaagctcacaaccttcattctgaaaaacccaccagaacagaagaagggcggaaaagacaagaagaaggccatgaggagagctgagaaggaacggctgaaggaaggtgaggctgctgatgaggagcagaagaaactgaagaaggatgcaaagaagaagggtgcatcttccaaggattccactgctaagggtttgaagaagaaggctactactgctactggctctgatgaggaccactcatcctctccaactcgcagccatgatggtgacaaagcagctgcagatgatgatgacgatgatgtccagtggcagactgacacttcaattgaggctgcgaagcagcgcatgcaagagcagctgagtgcagcaactgctgaaatggtgatgctgtcgactgaggagactgagaagaagatgaaacaggcaacccacaaagatggaagcactaatggttcagcaaaagaaatccctaatgacaagcctgccgtcactaagcctagtccctatgaagaactgattggagacatcaaggctagcctaggaagtgctccgacccctacccagctcaaggctgtgctggcctcatcaacccttcctccccaggacgtgatgaatgctctcctggaggctctctttggtggtgtgggtaagggattcaccaaagaggttgtgaagaacaagaagtaccttgcagttgctgtgccagatgagggtgcccagacccttctggttcaggccattgaggcttttggtgggaagtgcaaccctgaggcgctgaaggaggttcccgttgtcctcaaagccctctacgatggagatatcctggacgaggaaaccattgtggactggtacaatgatgctgtcgcagctgggaaggactcccaggttgtcaagaatgccaagccgttcgtcgagtggctccagagtgccgagtctgatgaagagggtgacgacgagtgaagaggccacgctgctctactgctaatggccgaacttgataatattatttcaataagtttgttttgcttgcctggtgtgtcggtgtttaaaactgttaattgtcgtgtggcgcagcatactcttatgtgtcgtcgtcagtttgtttgtgtcgtcagtttggttgtctgttggatgtcacggtttacttatgttcttatggattgctactatacaagtatttgtttcggatgtgtcatgtgttgtataacctttcgggatgtaacattttattattgcactgttgcttctctaccccgctatgaagaccatgtgtgaagctctggtctcgaggtgcatgtcagcatgtgagtcgtcctttcttccatgttgattgtatagagatgaactctagatatagcgttcgacgaggttcatctaaattttagaggcttatttagcgggtgttattggacatgtttagtacgccttcgatcggaggagaggaggaagcggtttgttgggtgagaaaagaacatagttaaaaagaaataataaaatatatagtttctctcggtctt

SEQ ID NO: 71566 - DNA, 686 bp, Zea mays
  Clone ID: MRT4577_165271C.1
tccgagatgaagcggctcggcgcgatgcggcatgccaacctgctgccgccgctggcctaccactaccgcaaggacgagaagctcctggtctacgagtacatccccaagggcagcctgctgtacgtcctccacggcgaccggggcatggactacgcggcgctggactggccgacgcggctcaaggtggccgtcggcgtcgcgcgcggcacggcgttcctccacacggcgctcgccggccacgaggcgccccacggcaacctcaagtcggccaacgtcctcctcgcgccggacttcgagccgctcctcgtcgacttcgggttctccagcctcatcagccacatgcagtccccgaactccctgttcgcgtaccgcgccccggagtgcgccgccggccaccccgtgagcgcaatggccgacgtctactgcctcggcgtcgtcctactcgagctcctcaccggcaagttcccggcgcagtacctccagaacgccaagggcggcacggacctcgtcgtgtgggccacgtcggcgatggccgacggctacgagcgggacctgttcgacccggccatcatggcggcgtggaagttcgccctgccggacatgacgcggctcatgcaggtggcggtggactgcgtcgagacggacctggagaagcggccggagatgaaagaggcgttggtgagggt

SEQ ID NO: 71567 - DNA, 537 bp, Zea mays
  Clone ID: MRT4577_165272C.1
gactagttctagatcgcgagcggtcgcccttttttttttttttttttttttttttttttttttttttttttttttttttttttttttttttttttttttttttttccccaagggaccattttttggaatttcaaccaaggacccccctggtggcttgtggcaaaggaaaaaagggaaaaaaaaaggtggggggggaaaacggggttgccgttgcttccaaaaattccccagattttcccctcctggggggttccaaaaaaaaatggggatttttgccctatatttaagggggcccccagggaaaagtaaatcacctttttttagaggcgggcaacccatcgggggttttggaaacctccctaggggggcagggacaggggaacatgcaggcaagctgttaaaactttaggccttttggggagactttgggacccctttccttttggcttagccaccccccaaaaaaaacccaaggattgttttgcccctccaaacgataaacccctttgccctcaccagtagcttttggttatccaa

SEQ ID NO: 71568 - DNA, 678 bp, Zea mays
  unsure (1)..(678): unsure at all n locations
  Clone ID: MRT4577_165273C.1
gagcttgggaacggcggcgcgcggagcacagcaggcagcagccgaaccagcgaggtctggaaaaaaacatgtgccacaaagccaaacaaaagcatagctgagaggagcttcggtgtgatctccgtccaccctcgcgcatcggccatgggagatcccaggccgaggagaagcccagcagcccccactctcgccgacaagctgcggaagcactccacgtggctcctcctcctgctctggttcgccgtctccctcgccctcttcctctccgccacgccgcccgccgctgctccgctccgccgctcctccttcctccgctccaagccccgcgccctcgccgccaccggcgcagccgcggcgccccccgtccgcatctacgtctacgacctccccgcccgcttcaaccgcgactgggcggtcgccgacgcgcggtgcgcgcgccacctcttcgcggccgaggtggcggtgcatgaagcgctgctcgcctacaccggccgcgccgcgcggcccgaggacgccgacctcttcttcgtccccgtctacgtctcctgcaacttctccacgcccaacggcttcccctcgctgtcgcacgcccggggcatgctcgccgacgccgtcgacctcgtccaggcccggatgccgtattggaatcgctccgncggagccgaccacgtcttcgtc

SEQ ID NO: 71569 - DNA, 345 bp, Zea mays
  Clone ID: MRT4577_165274C.1
tcgagcggccgcccgggcaggtacacagctgtccagctacgggaccacccctgtggcgtctccgttgccatgccgccctactgctgattcatgctttccgggaaatctactctatccatctctctctgtctatctatgtcattgtgcgctaccgcccacacgggttattttgtcttggtttccaccaatcttatctgcctggctcatcttgcaatggtttagggtcctattgtatccctatggccggtcgttgtccggttcactgtctcgtcgttctgctatcggggtgtctggttgagccctgcctttccccagcttaatcgccttgcgcccctccccctttcg

SEQ ID NO: 71570 - DNA, 737 bp, Zea mays
  unsure (1)..(737): unsure at all n locations
  Clone ID: MRT4577_165275C.1
cggggcgacaccggcacggcgcctattcgcccgctcgcgttcggtcggtccgtggcgtggtcctgaagccatcctcctcacaggctcgcacagccttcgacttctctcatcctgcgtcagagctcctatgctccgccttcacctgacttgttcgtcgctcgctcccggcccgctggtttcctcaggccttgctgctcgctagttccgtggcttaggcggcgcctgagctggtgaggctaggcaggactcaggagtgcccccgccccgcgaggctgttcgaagcgacccagctgccgggcggcggcggattcctggataaagttgattaatgtctgctgttttcttctggttggtaggacattccaacctgccaggcttccttgtggttataaggctttgttaacacacctgggaatgtttggttacgttgaggaagttgctcaatacaccacatcagggtgacagttcagcaggaatttgttcagcttttctgattggatgggtttggttctgaaatattgttctgaatttatgtgatgctttagattgacgatatagtgaatgcaaactccagaccaacttgtcacaaggttttgacttttgagtgatgaagaaatggcatggaggctttggcattgtatctntgttcatcatcttgatggtaagatatgtgatattggataggctacttgcagaaaaatcgcttcagtatgttttccggcaaaacaagacagcag

SEQ ID NO: 71571 - DNA, 650 bp, Zea mays
  Clone ID: MRT4577_165276C.1
gcatagcaaaatctgctcctcaggctggcaaatccgagtcgttgactcgtttgccgttcattggctcgccacatcggctgattggcatacacgaatcccaggcccagcggcttacagctcagctcatcacaatgcgggccccgggagtcagagtcagacacacacccgggtcctggcctcctgggcgtccggatagcggtgcatgctcgcgtgcgtaatctacacgcacagcctgtcgcgtactagtattctacgtacacaccagatgcaagatggactgcatttcttttcctacacggctactacacctacactacactagcattagtcaaagcgtccagtagatcagtttttacgcgtagctacagatggatgtgttttttttttcattttcatgtcgccgcgggctgccgacgcgactgctgttaattaggttcccccgttctcctagctggctgccacggacggttgcggacgcgtgggtggacttgcgtttcacccactggatggtattctgcaagcaatgccgcatgtgcttgcgctcttcctcttcccaacgcacttcaggacgcacatcgctctcgtgttcttggagggcgtgtggacgacaaacatccatgactggccataacttgccgtgaatgcagtcg

SEQ ID NO: 71572 - DNA, 394 bp, Zea mays
  unsure (1)..(394): unsure at all n locations
  Clone ID: MRT4577_165277C.1
aagtaaaacactcaaantattgtctggnctttgcggtctacattaggagcagacagtcacatattttcctctctctaatcttcacatctctccggctctacatcgtttagagacgtcttgggtggtctgccgatcccaagacaaactctaggatctctcctccccgacggggttccttccgggagcgaaatccaggtgctgttggcgatatccgtcgcctctgcgcacgcgtggaccatacggccatcagacgcggaccgtccagcttgtctgcagaaaccctagctcctgcgtcaggtcacagaccgtccggccctcggtcgcagaccgtccgcgctgcagcagagagcaccgctcccggtgcacatcgcaatgattggcgccggacgcgtgg

SEQ ID NO: 71573 - DNA, 1016 bp, Zea mays
  Clone ID: MRT4577_165278C.1
agaacatgcaggagaagatcaggagcatgcctaaggactttaggccagccactcctaaagggccggacccgaaatggcgatacatgtggagagtgggtcctcgccctacaaacacccgttttaaggagctgaactcagaacctgttatccctgagggattacctgagtgggaagagatgatggattcctggggttctaaaatgatttctgcaattgaggttgttgctgagatggctgcaataggctttggcctatcgaaggatgcatttacttctttgatgaaagagggaccacatctcctcgcaccaactggaagtgacctgcagcgtcatggttctgagggcacccgtttttgctggattccaccctatgtatcttaaattttcttgacgaatacatggccgaagtagagttcccaggcccttaacatctggttaaggaattgtaaaaagatggaggtgaaaagtccctgttggtgtgccctctaattcagtctggaaaacagcttgattggcttactggtggcgattgtttggctggaatgcatgaggtagtggtaactaagaggacactagaggccatagcgctagcgaaagaacagaatagaagcttggtggagggtttcatcaacactgttcgcgcacattgcttcggatgcaattcttaagccgctcggccactttgctgaaacacctgatgctcattcctatccacctatatgcgctggggattatgtcgagcaggagctttcagtgattaacctgaagggaaaggattaagtatagactctatgcagctggtgcatctggatatcttatgaattgacagatatcaggatgcaacactaaatcaccccaactgacaattgggtatccgtttccaaatgctgctgtactgaaggtggttaagttggcccgaagacatgcttgttcattgcttgctcttgttaagatagtggatacccttctttgtgaaccacatatcacttatgaaaataaaatgtatagcttcctcat

SEQ ID NO: 71574 - DNA, 516 bp, Zea mays
  unsure (1)..(516): unsure at all n locations
  Clone ID: MRT4577_165279C.1
ggccgcnttttttnnnnnnnnnnncggggggggcagggggcccgccanggcccaaacagggggaaacagaaggnggcgggcggggggggggaaacnacgnangaccgnaaccgcgagcaagacacagcagagggggcaagcagcacaagggcacaggaaacaacaggccggaaaacacacggggggggggaacaaagcaggaaccacanncgccccnncagcaaccacaaccagcggaaggcnccaccagaagccgagggaacaaaaaggggcaccgggaccaagaggcaacgcacaagcngcncggcccccagaagagggcncgggggcgcacccggccancaggacccggacaaacnccncgcaggggaccgggccancaccagcgacagcagccccacggagcancgcggccaccngcgcaacagngagcggcncaccaaganncgncaggacacggcggagcccggcggccgagaggaagccgnncggggccnggggaaacacacggaaggc

SEQ ID NO: 71575 - DNA, 415 bp, Zea mays
  unsure (1)..(415): unsure at all n locations
  Clone ID: MRT4577_16527C.1
cggactcnattnaaattttatttttttttgaactttttagaaaggttttacaaggttctacgttgtgcccttgcatccgctggaatttcattaagaaagcactgccgacttggctacggatacagcggccggctaaaagtgctgcagaggtggtctgatatcaactccaataaaaatccctggacgtctattcctctacaggcttactggaccttgcctgccatttgactgctaacgaggcaagctatcacaccagaacttaccactgaagtctgcctctggataattgcactttacaggtggctccccgttaccggcatgctagaaaagacttgtagaggagcggacctttactattggcgaaggaacgatcgactctgcgccatcggaggcagtacaccgcgtctgcgcgatg

SEQ ID NO: 71576 - DNA, 614 bp, Zea mays
  Clone ID: MRT4577_165281C.1
cgggtatttcagaacttaaaaactgtgcacaagttggggacaacatcatactatatactatgtctatattgcattgcattgcgtttgcagagtgcttgccgcagtgcagcgtcatactatatattatgtctacttgaatatgcacacacaagtaaaatgttaaaacgaattgtatattagaacagaggctagagagagtacttttttgttatactagcaccttcttaattttagtcatgcgttcgccactggggatgagggtgttgatacgtgataggtagtgtatgtagggatacgtggtggtgagatcgatcagagaagcgaggaagagatagagcgatggagagacaaagatgaggaaagacgatgacagggctgagaaggcggtgcgcgtgctatacgctgggagtccgacaccaagagccatggtgcttaaacatgttcaaacgtcgggttgaggtcgggtcaaggtcgggtcgtgggtcgtttggcatggcccgtgcctccctgttgggcacgttgggtcaggtttttttcgggttgaatcatgttttgggtaaaaaatcacgctcgtaccccgctagtggattgttgtggggtaaaaactttggccc

SEQ ID NO: 71577 - DNA, 293 bp, Zea mays
  Clone ID: MRT4577_165282C.1
ggggggctataatgggagagaaccgacccaaccaacaccaaacgcacggccaagaaccaaaaataagaaaaacaacacaacaaagcatccaacagcaaagagacccagaagccccaaaggcatgctgaaacagaccccaaaagaaaacacccagcacccaaaagcacaagccgaccacttacgggaacccacagaataaatccggaaagcgcggacggccaaacaggaggggcaagccccaccaaccgagcctaaacccacgctcaccaaagcaccacaaaagagccgaaaca

SEQ ID NO: 71578 - DNA, 363 bp, Zea mays
  Clone ID: MRT4577_165283C.1
acgctccttcgtccctctatctagctagccttcccgttcctgcatcgcggcggagatgggcaccggcaccacgccgatcgcgtcagcggtggatctgcatctgctgctgctcgcgccgctagccgcggcgagtgacagcatgtccatcgtcatctacggcgagcggagctaggaggatgctctacggatgtactctcagtggatttctgcgcacggtcggacctacaacgctactaatgaagaagagctctattgcgaggagctcatgaacaaaatcgggtacttaaacacttaaaatgcattcgagaacgcggtagtacaaagctaatgataaaacatcaactggtttaatatcttaatttg

SEQ ID NO: 71579 - DNA, 442 bp, Zea mays
  Clone ID: MRT4577_165284C.1
gctgcgagcgggtggcaggcggctactacgtcccggggctccgactgctcggatctgggcacaggcgcctacggcgaggcgggccctgccgcggctgcagcggcggtgagggcgtaccacgcagcggctggaggaccactacaacaacccgcgaacacgtaggttccttcgacaaggacaacgccaacgtgggaactgggttggacggtgcgccacggctgcgggacgtcagaagcttcactacacgtctacaagaactacggcatgatcgaagacggctgctttaagtacttttggctgacgttccgccataacttgctagtacgaggatactgaatggatgaatggaaaaccaatggatgaagctcagacaatcaaaaacacgtcaatatgcccaaacactagggccttccaccagcagagctccattgcagaatgcttg

SEQ ID NO: 71580 - DNA, 1779 bp, Zea mays
  Clone ID: MRT4577_165285C.1
ttagcaaaagaaatttctagaatcaagaatattgagctcatgcctaagtttggtaaaagtttgttcatcaagaggcttggtaaagatatcggctaattgatctttagtattaatgtatgaaatctcgatatcccccttttgttggtgatccctaagaaaatgataccgaatggctatgtgcttagtgcggctatgctcgacaggattatccgccatcttgattgcactctcattatcacatagcaaagggactttggttaatttgtaaccgtagtcccgcagggtttgcctcatccaaagcaattgcgcgcaacaatggcctgcggcaatgtactcggcttcggcggttgaaagagcgaccgaattttgcttctttgaagcccaagacaccaaggaccttcccaagaactggcaagtccccgatgtgctcttcctattaattttacaccccgcccaatcggcatctgaataaccaattaaatcaaaagtggatcccttttgatccacggacttacctcccgtgtcgaggtcgagatgcccatttgttcccatgggagtcttgatgggcttggcatccttcattccaaacttggttagaatgtcttgagtgtactttgtttgaaaaaagaaggtgccctcttggagttgcttgacttgaaatcctagaaaatacttcaactcccccatcatagacatctcgaatttttgtgtcatgatcctactaaattcttcacaagtagattcgttagtagacccaaatatgatatcatcaacataaatttggcatacaaacaaatcattgtcaagagttttagtgaacaaagtaggatcggccttgccgactttgaagccattagcaataaggaaatctctaaggcattcataccatgctcttggggcttgcttgagcccataaagcgccttagagagcttatagacatgattagggtactcactatcttcaaagccgggaggttgctcaacatagacctcttccttgatcggtccattgaggaaggcacttttcacgtccatttgataaagcggtctgacagaaggacagcgccgcctgcgccactccgactgcggtgccactcgaaagagtgagtctgacaggcagtcaggcctcgccaggggcgccatagggaactccgctccgcccgaccccagggctcggactcgggctaagacccggaagacggcgaactccgctccgcccgaccccagggctcggactcgggctaagacccggaagacggcgaactccgctccgcccgaccccagggctcggactcgggctaagacccggaagacggcgaactccgctccgcccgaccccagggctcggactcgggctaagacccggaagacggcgaactccgctccgcccgaccccagggctcggactcgggctaagacccggaagacggcgaactccgctccgcccgaccccagggctcggactcgggctcggccccggaagacgacgaactccgcctcgcccgaccccagggctcggactccgccctggcctctgccgaacgacttccgcctcgcccgacccaggggctcggactcggcctcggcaacggaagacagattcgaccccagcttcggaggagcccccacgtcgcccggcctcgggcgcgggcccgccacgtcaacagggagcgccatcaccactctaccctgagccgactcgggccgcagagaacaagaccggtgtcccatctgacctgctccgccagataggcaatgatggcgcctcccaagctccat

SEQ ID NO: 71581 - DNA, 513 bp, Zea mays
  Clone ID: MRT4577_165286C.1
ttcgattcccagtacctgcttcggatctcgcgttcagcgcacctcaggtgtgaaggaagggggacgccatgcaagatggggctagcgttcgggaagctattcaaccgggtctaaggcaagaaggagatgcggatcctgatggttggcctcgacgccgtcggtaaaaccaccattctctacaagctcaagcttcgcgagatcgtcaccaccatcctcaccatcggtttcaatgttgaaactggtgagctcaacaacattagctccactgtctgggatgtcggaggttaggacaagattagacctctttggaggcattacctacagaacacccagcgtcttatctttgttgtggtccgcaatgcccgtgaccgtgttgttgaagccagagatgaggtcctcaggattctgaaccatgatgagctacgtgatgatgtgcttgctggttatgccaaccagcaagaacttcccaatgccatgaatgctgctgagattactgacaagcttggattactc

SEQ ID NO: 71582 - DNA, 2496 bp, Zea mays
  Clone ID: MRT4577_165287C.1
atgggtgcccgcttggcccacgggtttgcggcatttttctccatgtgccggaacattgctgcggatgtccatgaggtggcaagacgtcagcgggagacggacgacaaccttcgtcgtcaagcttcctctctgggtactctcttcgccccccgctcgcctgatgtgcctctccatcctcctcctccggagatcaacgagtggtaccagcaggcatacggggtgccttttatgacagcagacgacgtcgaagaagaagaagaagcttattttgatgatcaaggacagcgccgcctgcgccactccgactgcagtgccactcgacagagtgagtctgacaggcaattaggccttgccaaaggcgccacggcgaactccgctccgcccgaccccagggctcggactcgggctaagacccggaagacggcgaactccgctccgcccgaccccagggctcggactcgggctaagacccggaagacggcgaactccgctccgcccgaccccagggctcggactcgggctaagacccggaagacggcgaactccgctccgcccgaccccagggctcggactcgggctaagacccggaagacggcgaactccgctccgcccgaccccagggctcggactcgggctaagacccggaagacgacgaaactccgcctcgcccgaccccagggctcggactccgccctggcctcggccggacgacttccgcctcgcccgaccccctggctcgggctcggccacggcaactgaaggcaagactcaacctcggcttcggaggaaaccccacgtcgccctgctcgtcggcttagggacccccctgtctcgaaacgccgacaactccagtttgttttggcatcaatcaccaaaaagggggagattgtaagtgcaatcaaccctagttgagggttttggtgattaatgacaaaacaaactgagatcctaacaagtttgctcctgccatctctgctctgacctgtctgacagtcagagctgtcagaaaagtcgctgcagatattttttgaaaaccggttgagccgaaatttttccttactcaaccggttttgaaaccggttgagtctccggctgagtagctcagtggaccgggatccccctggtagaaaccggttcaaccggtctgaaaaccggttcaaccggtttttacttgttttctcccaacggctgccagcttttgggggatcctttatataccccctcacacactctctctcatttactcctgcctctctcacgaattcttggctgaccaacctgaggatcgacgaggatttgttccagccgttgagccccatgcacatagatcggctagagcaagcgagagatagtggagggggggcgatgagccgatgatggagaggcgggtgcttgccgaggtcgaacgagtggtgcttggcgtcgctgacgtggtgtgcgccggtgtccgacctagatcttgggagttggaacctgctgcacgtgagttgggtggaggccatggcgggcggcggaggtgggtggagtgcatcgtcggtagcgaacgcggcaggctggatgatgtagccgcgggcgcaggcggctgggcggggaagcatcggccgggggtggagtgcatcgtgggctgcgacagtttcaatgccgagacgggatcgatggaggagacatcaagcggaggcgccatccacgccggtcatccatggatccgggggcgggggctctgcccgcgcatggctggtgctggcgtgcgcgagatctgggggcgagggagcggtggcctcgtgccgaattttttttttttttttttttttttttttttttttttttttttttttttttttttttttaaaccgggcaagagttgaaaaccccagtttcgagcacaatttgggggggcaagcctattcaactgtatacgcagggggaaacaagctttcgtttacgtcgcacaggtcgaaaagcgccccgcaaaaaaggaatacccatatttgtatgccctgccatgtttgcccccgatgaaatgcagcatcaccgtacctgcacgagcctacaagttcctaacaaaattggcaatctaaggtaatttttttggcaggtttaaagcaggcgactccgggagcaccaaggggggccaccagccacatgatacgtttaggggggggaaagcgtccacacgtacactggagggcacgttcctgtccattgagtcgccaaggccaagctgcataaacgaccacagattcgatagaccacagttaattttacaatccaatatgtttatgcaaaaggtatgttaaggggcccccacctggccatacttgttccatccccagaaaaatacctcaccttcatttgttataaaagcactatggggagctccacaaaaaacggatctggggtttttattctccaggcttgtagcatctaccaattttggaagagtctcagcctgatcaaaaccagtgccaagctgtccaaactggtttcctccaaacg

SEQ ID NO: 71583 - DNA, 461 bp, Zea mays
  Clone ID: MRT4577_165288C.1
acccactcgtccggccacgcgtccgaccaaatcagctcttgtgtggttagtttacaggaatgttcttgtgtggggctcatgttgagttttccattttatttatgtagccaaagtagatgtattatgcatgtcgtcgtttggaaacttgacaaaccgattatacttgtttaggttgcttcagaaaagatgcttgagaaactgaaacataaatctggaagatgtgagcctgctttagaaaaggctattgtggaactggagcatggtataaacggtttgaagtattttgtttgccttgatccacggttgtaggtttgttctgccactgataccaggtgaagcttcacccttcagatccctgtcgtgacgaatggttcgtgggtgctggggagggattggatccgttggattcatgagatgtgtggattgttcctgccagatatcgtgacatgtgtttagatcta

SEQ ID NO: 71584 - DNA, 564 bp, Zea mays
  Clone ID: MRT4577_165289C.1
cgaaccacgacggggacccaccaagggaccgacacgaccagcagccacggacacgacgccagacgaccacgaacgcggacgcaccggaggggaacgacaacgacgcgctgacagagaggccacccggccccagcctgcgggaggaccaccaccggaccgacaaggtggggcacagcacgcgcgagcgcatcccggagagcgtggcgcacgcgcgcggggccaccgcccaggacgactgcgagtgcacccacgacgagacgacccagacgtgcgccgacataccgcgcgcgcccggcgcgcggacacccaagagcgggcgctgcgcgaccgcgatccacgagcggccctgcccggaaacaatccgcgacccggaggcatcgccaagaagctcgacacccgcgagagcaacggggacctgctgaggaacaacctcaccgtctacttcatccgagacggcggcaagttcgccgaggagaaccacgcgatcaagcccaacccgcggccgcaccggcaggagtaccgaagggagaacgacaacctggcgcaccacccccagagcctgca

SEQ ID NO: 71585 - DNA, 466 bp, Zea mays
  unsure (1)..(466): unsure at all n locations
  Clone ID: MRT4577_16528C.1
ctcctcgtctcttcgcctcccagtcggccagtcgccaccgcccggggagccgagcccgcagccaccgggtcccagcgggcatcgccacccaccccgctctccatggtggcacgcgagagcgagacctaaccctaccttaaccttactacctcacaatggccgccgcgggggagcgccgcaagctttgtgggtgcggaggcgccgtggtgtccatccccggcggggacgtcgcggcggcggcgtctatccttccgctgtccccgtgcacgctctccgcgtgcggggccgtggcccttgcgccgntccccgacgacgtgcgggcccagccgcggtggcccaggtcgcgcgcccccggtgtngtgcgcctgtttaggacgcttgtggcgaaccgntgcgtggaggtggagggtacgcttttncgggtcgtgaccaggaggaggtttggggaaggggatggggaagggga

SEQ ID NO: 71586 - DNA, 569 bp, Zea mays
  unsure (1)..(569): unsure at all n locations
  Clone ID: MRT4577_165290C.1
cccagcgtccgccccgcgtccgctcagnacaagctagcgcacctgacacccaccacctccctcccatatccaccaccccagccatggccaccgcctttgactccccgacctcctcccccgccgccgcgcccttccacgacgaccctttcctccatttcgacggctcggcccccgccgcccaccgagatgggcccccgccgccgccgacggcttcccggcctccccggacgcctacgcgccctcccccttcggcatgccccactccaacggcgacctccacgacgaccctttcgccgcacctgctgactccaacggtgggcccatccttcgaggagggattcctgctccgcgagtggtgccgacaaaatgctattcaccttgaggaaaaagagaagaaggagaaggagctgaggagccaaatcatcgttgatgctgaagagtttaagaaagcttttgttgagaagagaaagctcaatgctgagacaagcaagggccaaaaccgtgacagggagaagcttttcctagcaaaccaggaaaagttccatgctggtgcagataagcaatactgg

SEQ ID NO: 71587 - DNA, 1379 bp, Zea mays
  Clone ID: MRT4577_165291C.1
ggtaccctggccgggaccaagggtaagcgcctcgcggccgtttcggccgggcctcgcgttccatttgcttcggctcatctcagatcaagctagcgcacctgacacccaccacctccctcccagatccaccaccccagccatggccaccgcctttgactccccgacctcctcccccgccgccgcgcccttccacgacgaccctttcctccatttcgacggctcggcccccgccgccgccgacggcttcccggcctccccggacgcctacgcgccctcccccttcggcatgccccactccaacggcgacctccacgacgaccctttcgccgcacctgctgactccaacggtgggcccatccttccgccgcccaccgagatgggccgcgaggagggattcctgctccgcgagtggtgccgacaaaatgctattcaccttgaggaaaaagagaagaaggagaaggagctgaggagccaaatcatcgttgatgctgaagagtttaagaaagcttttgttgagaagagaaagctcaatgctgagacaagcaagggccaaaaccgtgacagggagaagcttttcctagcaaaccaggaaaagttccatgctggtgcagataagcaatactggaaggcgatatctgaacttatcccacatgagattgctaacatcgagaagagaggggcaaggaaagacaaggagaagaagcctgggatcgtggtgatccagggaccgaagcctgggaagccaacggacatggcacggatgcggcagatattgctgaagctgaagcacactcccccaccacacatgaagccacctccgccacctgccgcagctaccggaaaggatggagcaccagctgccgccgggaaggatggagctaagccagcaaccgttgccaacggcagtgtccctgagatggaaaaggctgctgcggaggcatcagtgccagcggcagcaccaccagcagcaactgagccgatcgcagctgcttaatctaatcatctgtggtaggaggatgtgaaaaatctcttattggagttgttgcagaggcggtggtggtgagtgaaactgaaaacgtgtgaatttccggcatggtggaggcatgcactgtgtatttgttacctcgattcatttacattactgctactatatattgttattgcattttgtagagaaggggcgggcgtatcctggttcatggtaataataaggttgtattaggaggatgtttggctgtattatgtttcttcttccaagtgtttgtaaatttcccttttgttattaaaactgattgtattgttaaatttttctttgttattaaaactgattgtattgttaagctactatctgctgcatatacggagtatgttttttgatc

SEQ ID NO: 71588 - DNA, 558 bp, Zea mays
  Clone ID: MRT4577_165292C.1
tttttttttttttttttttttttttttttttttttttttttttttttttttttttttttttttttttttttttttttttttttttttttttttttttgggaaaagggcccctaatttaacgcaagcctttggaacacgaaaaagggggggggggaaaaggtgaaacgcccaaacgggggggaatttagtactccccactagttacccaaaaaactcatgctaaaaaccggagggggtccatgctcaaagggggggaccttatttgggtaacgttgcgaagaagagccgggggcccaacaacatggtgacaagattagtcaccggtgggaaaacccctggagccggaggggacaaattttatcaccgggtcctccctcaaaagcttggggacccgggaaacccatgtcgttgcaaaattgggggcacgtgtttgtatgcaccggggggaaaaaaggggcttgaaaccggggtttttccactttgaaaaaagggtacgggctgaaaaaccctggtttagggaaaactcaaaaaggccccgggaaaactccttccttctgg

SEQ ID NO: 71589 - DNA, 284 bp, Zea mays
  unsure (1)..(284): unsure at all n locations
  Clone ID: MRT4577_165293C.1
agatcgcgagcngcagcnctttatngtgnnatncncnaacttnaatactacngtatggcccancataantttccccattactnccttancactattcctcatcaccnaactanaaatatgaaacacaaactaccacnnacctccctcaccaaagcccatantantannnaattataacaaaccctgagaaccaanatgaacganaatctgttcgctgcattcatgcccccacnatcctaggcctacncgccgcagtactgatcattcgattnccccctctattg

SEQ ID NO: 71590 - DNA, 1329 bp, Zea mays
  Clone ID: MRT4577_165294C.1
atggagatgcttcatcaacaggtgcagaggaagaaggaaaagatggccaggctagctgaactgcaaaggcagataaacgaagcctctgaagaagttcgtcatcttactcaagatgagcagaaccgaaggcctcagcacaaagaccttcatcaggagggtttcctcaacgaagatgactggtatgacaatttccatcatggaaattttgcttttgatgatgcttctcctctgtccgctgagctgcaggctacatcttggcctccgtcctacaagccgcctcagcttcccatatttgacggccattcagacccgaagcagtttttgatgagctacgaagcaacagtatcttcgtatggtggcaatactgcagtcatggcaaaatcttttgttatggctgtcaggagtgttgctcaaacctggtattcctcccttcgaccaggaacgatcacttcatggcaaaagctgaaggacatgttgttaaccagcttccaagggtttcagacgaagccggatcacgaagaataccttcaggcgtatgtccggaggttcttgcgtttgagggcacaggcaccaacagtgcccaacgaaattgtcattgaggccatgatcaagggacttcggccaggaccttcagctcaatactttgctaggaagcctcctcaaactttggagaagctgctccagaagatggacgagtatattcgtgccgacaatgattttcgtcaaagaagggaggaggctttcaggttttccgaaatgaccaggggcttcggaggaagattttatccaaggcacgtcaggtcaattcacaactctactcaaaatgatgataaggggagtcagcaacaaaggccacagtgctcctcacaggcttcggggcaacagcaaagctccttccggccgccagctccaaaaggcagaggtgccaggggcttcggcggaagatttggagatcaaccaaggagaatattttgcttgttctgtggtgaaaacaagggccataccaccaggatgtgccatgttaccatccagaagcaaaaggagatagccgaagctgcagcacaacagggtcagccgaagcaggtcatgcacactgcttcgtatcattcgccttatatcccagaatatgtaggcaaccatcctgcagtttctgttgcttcggcgagtcaacctcaagcttcctggcaacagcctccgcctccaccaccgatgcagcaaggccagcagccagaagggggccaatatgctcaacaacaaagggacttcagagaacagtccgaagctcgcacagtcaatagcactgtgctagagtcgaagcacatttattga

SEQ ID NO: 71591 - DNA, 266 bp, Zea mays
  Clone ID: MRT4577_165295C.1
attcggctcgagcgagtacccagcgcttttttttgatctaatgccgcaccccatatgggcgggagggactagccctgtgcgcgcactacactgcacgcagtggccaccactgagaccgaagccgcacatccgctggagcaccaggccaacggtgacggctagcataagaggctctactccgaggacacacgcaagagctggcgcaagagcgacgacctctaccagcacatcctggacacgagcgtgtgcccgagggagccagcgag

SEQ ID NO: 71592 - DNA, 1720 bp, Zea mays
  Clone ID: MRT4577_165296C.1
tcgaggccggccgggacatgccaattgccagcaacccatccatactttcagctgttgatacaaaaagagaagagagaatggcggagccaaacccagagttgagtggtcttattactcaaacaaagaagaaaaatatagtgccaaagttcaccgaaatcttccccgtggaggacacggcctacccttacagcgccttcatcacctccgtccggaaagaagtgatcaaatactgcaccaaccatacaggcatcgtccagcccgtgctgccgctatggcgccgaagaaagcttcagcaactggggctgcagctctgcaaccgctggaccacaatcaggagactgtctcccttcgggaggcccgaagccagaaaaggaaggctgtgcagaggaagaaggaaaagatagccaggctagctgaactgcaaaggcagatagacgaagcctctgaagaagttcgtcatcttactcaggatgagcaacaccgaaggcctcaacatcaagaccttcatcaggagggtttcctcaacgaagatgactggtatgacaatttccatcatgggaattttgtttttgatgatgcttctcctctgtccgctgagctgcaggctacaccttggccttcgtcctacaagccgcctcagcttcccatattcgacggccactcagacccgaagcagtttttgatgagctatgaagcaacagtatcttcctatggtggcaatgctgcagtcatggccaaatcttttgtcatggctgtcaggagtgttgctcaaacctggtattcctcccttcgaccaggaacgatcacttcatggcaaaagctaaaggacttgttgttaaccagcttccaagggtttcagacgaagccagtcactgctcaagctctattccagtgcacccaggatcacgaagaataccttcaggcgtatgtccggaggttcttgcgtttgagggcacaggcaccaacggtgcccaacgaaattgtcattgaggccatgatcaaggggcttcggccaggaccttcagctcagtactttgctaggaagcctcctcaaactttggagaagctgctccagaagatggacgagtatattcgggccgataatgattttcgtcaaagaagggaggaggctttcaggttttctgaaatgaccaggggcttcggagggaggttctatccgaggcacgttaggtcaattcacaattctactcaaaatgatgatagggggagtcagcagcaaaggccaaagtgctcttcacaggcttcggggcaacagcaaggctccttccgaccaccagctccaagaggcagaggcgccaggggcttcggcggaagaattggagatcaaccaagaagaattttttgcttattctgtggtgagaacaagggccataccaccaggatgtgccatgttaccatccagaagcaaaaggaaatagccgaagctgcagcacaacaggctcagccgaagcaggtcatgcacactgcttcgtatcattcgccttacatcccagaatatgtaggcaaccaccctgcagtttctgttgcttcggcgagtcaacctcaagcttcttggcaacaacctccgcctccaccaccgctgcagcaaggccaacagccagaagggagccaatatggcccacaccaaagggacttcagagaacagtccgaagctcgcacagtcaacagcactgtgccagagtcgaagcacatctattga

SEQ ID NO: 71593 - DNA, 186 bp, Zea mays
  Clone ID: MRT4577_165297C.1
tttcacacaacccttaagcgagaggcggctgaggatgttcatgcatccatcgctatttgtgtgcctgcaggaccgacactaaccaccttactgcctcatccaaactctttagaccctagcataacgacattgatcctatggaacctgtggtgcacacccagtggaatattcagtccactgaagaac

SEQ ID NO: 71594 - DNA, 1782 bp, Zea mays
  Clone ID: MRT4577_165298C.1
tgttgatacaaaaagagaagagagaatggcggagccaaacccagagttgagttagcttattactcaaacccagaagccgaatatagtgccaaagttcaccgaaatcagaaccgtggaggacacgactgacccttacagcgccttcatcaccaactaccggaaagacgtgatcaaatactgcaccaaccatacaggcatcaaacagcccgtgctgcataaagggaagaatgtccccgagctctgacccgacaccggaagaaggcttcagcaccaggggctggcacgctgcagccgctggaccccaatcaagacgtcctttctctcagagaggcacgaagccagaagaggaaggctaccagtccaacacctccggaggatgatctagatcaggagattcaaaatctggaaatccttcagcagcaggttcaacgcaagaaggagaagatggccaggctagctgaactgcagaggcagatagacgaagcctctgaagaagttcgtcatcttgctcaggatgagcaacaccgaaggcctcagcatcaagaccttcatcaggagggctttcacaacgaagatgactggtatgacaatttccatcatgggaattttgtttttgatgatgcttctcccctgtccgctgagttgcaggctacaccttggcctccgtcctacaagccgcctcagctccccgtatttgatggccactcagacccgaagcagttcttgatgagctacgaagcaacagtgtcttcgtacggtggcaatgcttcagtcatggccaaatctttcgttatggctgtcagaagtgttgctcaaacctggtattcctcccttcgaccaggaacgatcacttcatggcagaagctgaaggatttgttgttaaccagctttcaaggatttcagacgaagccggtcactgctcaggctctgttccagtgcactcaggaccacgaagaataccttcaggcatatgtccgaaggtttctgcgtctgagggcacaggcgccaacagtgcccaatgagattgtcattgaggccatgatcaaggggcttcggccagggccgtcagcgcagtattttgccaggaagccaccacaaacgctggagaagctgctccagaagatggatgaatacattcgagctgacaatgattttcgccaaagaagggaggaggctttcagattttctgaaatgaccaggggcttcggaggaaggttctacccgaggcatgtcagatcaattcacaattctactcaaaatgatgataaagggagccagcagcaaaggccacaatactcctcacaggcttcggggcaacagcaaagctcctttcgaccaccagctccaagaggcagaggcgccaggggcttcggaggaagatttggcgatcaaccgagaagaatcttttgcttattctgcggtgaaaacaaaggccatactaccaggatgtgccatgttactattcagaagcaaaaggaaatagctgaagcagcagcacaacaggctcagccgaagcaggtcatgcatacagcttcgtatcattcgccctacatcccagaatatgtgggcaaccatcctgcagtctctgctgcttcggcaagtcagccttcagcttcctggcaacagcctccgcctccacctccgttgcaacaaggccagcagccagaagggagccaatatgctccacatcaaagggacttcagagaacagtccgaagctcgcacggtcaacagcaccgtgccagagtcaaagcacatctattgaacaaatatcctaccttaa

SEQ ID NO: 71595 - DNA, 1380 bp, Zea mays
  Clone ID: MRT4577_165299C.1
atggcgctgaagaaagcttcagcaactggggctgcagctctgcaaccgctggaccccaatcaggagactctctcccttcgggaggcccgaagccagaagaggaaggctgtcagcccgacaccgccagaggatgagctagaccaagaaatcagagacatggagatgcttcatcaacaggtgcagaggaagaaggaaaagatggccaggctagctgaactgcaaaggcagatagacgaagcctctgaagaagttcgtcatcttactcaggatgagcagaaccgaaggcctcagcataaagaccttcatcaggagggtttcctcaacgaagatgactggtatgagaatttccaccatggaaattttgcttttgatgatgcttctcctctgtccgctgagctgcaggctacaccttggcctccgtcctacaagccgcctcagcttcccatattcgacaaccattcagacccgaagcagtttttgatgagctacgaagcaacagtatcttcgtatggtggcaatactgcagtcatggcaaaatcttttgttatggctgtcaggagtgttgctcaaacctggtattcctcccttcgaccaggaacgatcacttcatggcaaaagctgaaggacatgttgttaaccagcttccaagggtttcagacgaagccggtcactgcccaagctctattccagtgcacccaggatcacgaagaataccttcaggcgtctgtccggaggttcttgcgtttgagggcacaagcaccaacagtgcccaacgaaattgtcattgaggccatgatcaagggacttcggccaggaccttcagctcaatactttgctaggaagcctcctcaaactttggagaagctgctccagaaaatggacgagtatattcgtgccgacaatgattttcgtcaaagaagggaggaggctttcaggttttccgaaatgaccaggggcttcggaggaagattttatccgaggcacgttaggtcaattcacaactctactcaaaatgacgataaggggagtcagcagcaaaggccacagtgttcctcacaggctttggggcaacagcaaagttccttccggccgccagctccaagaggcagaggcgccaggggcttcggcggaagatttggagatcaaccaaggagaatattttgcttgttctgtgaatatgtaggcaaccaccctgcagtttctgttgcttcggcgagtcaacctcaagcttcctggcaacagcctccgcctccaccaccgatgcaacaaggccagcagccagaagggggccaatatgctcaacaacaaagggacttcagagaacagtccgaagctcgcacagtcaatagcactgtgccagagtcgaagcacatttattga

SEQ ID NO: 71596 - DNA, 1216 bp, Zea mays
  Clone ID: MRT4577_16529C.1
gatgaatttatggaagaagattccaaaattacagatgaagaagatgaagatagctttgttgtgcctgatggctatctatcggacaatgagggaatacaaattgaaagcctattggatgataaagatgaggaagccagtagctcaccaactggtcagtgtgcagaagttgaagagttcaggtctctactgcgccaacaaagagtcctgaacattttaaccgagcaagctctccggaagagccaacctcttattatatccaacctaaatcatgaaaaagctgaattactgactgccgaagacctcaaggggacagcaaagatcgaacagctatgtttgcaagttctttcaatgcacatctgtccaggaggcgcagttgttgatgtgcctctaactgacagctcatctgcaactgttgaagaaattagacagcccaatccgaaggatggttctcctggggctgcatctgctataccagaaacagatctgccagaaattgtccaggtgataagatcatgtcgagatggtatccataaggtggtggaattactgcagcacaagtttccaaatgttccaaagactcaactgaatcgcaaagtgagagagatatctgacttcattgacaatcattggaaggtaaagaaagagattcttgacaagctagggttggattcgtcaccagtgaaacccaagaagaataaaagcatagctatgtacttctcgaagagatgtttacctccggaagaggctgtcaatgctctggctgcttctcctgagttgcggttgaaatctagaaatggtggccgcgaagctccccagatcaatctgttcccctcagagcagtaaagtttctaataaaggtcccctgaaagttggattaggggtcaatgaagctacgaacccagatgagcagaaagctcagctatccatgtaaaggctaggaagtgcaactcggttttgcatcgtcaccaatggaagatggtcttagtgcaacatgggtttttgtcaacatctggattatgttttcagtgctggacatgtaattttagcctgaaagtaggtttttattcaattatttggccttgatgtgattaacatgtatgtgtcctgttgttagcgcaaggaattgctacaaagttggccatctgccgcttgtgtgttgttaacattattctgattctggcaaggcaaataagcaaacatgtcttgtgactgctcc

SEQ ID NO: 71597 - DNA, 360 bp, Zea mays
  Clone ID: MRT4577_1652C.1
gggtaacccaaaagggaaacctgttaaaaacattgaacaccacggggcttaattttccacaatttaacccgaagggtgacaaaaaaaacgggggctttcctacttatcccctttgaaactttaaagggggaacaaggcttgattggaaaaaaccccaaccttttcaaaattttttttttgacaaaacaaactggacatgggacatttccatatcggttatgttaggccgttcccaaacccccaaaaagggggacaaataggcccgcaatgcccccaaaggaactatttcctggaaccattatccctaaaatgggtggagctaacttaattgctggccccaaaaactggggcttggggggg

SEQ ID NO: 71598 - DNA, 469 bp, Zea mays
  Clone ID: MRT4577_165300C.1
ttcttcacgcgtccgaaattacaggaaaaggtgcataacaaccatctgcatctagaacgttgccctgtctttgtcatctctagatcacatgtacccgatttttagaatttccatcgaaccgttgccctgtactagcaaataatctgtactttatttggcttgaatttgctgatggagacagttttcctgtctcaactgctagagaaaaagtaggctggcattattgtcgattaaaacagaaggcactttttgcttcaggcattaaacctttgattttaatgcacgtctatgctgggacctaacaacttgtgttctctcattcaggttttgccaaacaactgcctagggcatgttgtggggctccatcgactcctgagaaagcagcttacaacttcaatgtcacggccaaatgcggtgagcctggtgcgactgcctgtgctgatccgacaacccattggagctgggatgg

SEQ ID NO: 71599 - DNA, 1881 bp, Zea mays
  Clone ID: MRT4577_165301C.1
ggcggccgggtagcgaatgccaattgccagcaacccatccatcctttcagctgttgatacaaaaagagaagagagaatggcgaagccaaacccagagttgagtgatcttattattactcaaacaaagaagaaaaatatagtgccgaagttcaccgaaatcttccccgtggaagacacggcctacccttacagcgccttcatcacctccgtccggaaagaagtgatcaaatactgcaccaaccatacaggcatcgtccagcccgtgctgccgctggagaagaatgtccccgagctctggttctacaccgagctcaaaacgaagaccaggtccatcacgctcgccatacgtatggacaacctctacctggtcggcttcaagacccccggcggggtgtggtgggagttcggcaaggacggcgacacccacctcctcgacgacaacgccaagtggctcggctttggcggccggtaccaggacctcatcggcagtaagggcctggagaccgtcaccatgggccgtgccgaaatgaccacggccgtcaactacctggcgaagaagacgacgacgacactagcagaggcggcggaggaggaggaggagctgctgctgctgcaggcagcggctgaccccaaagccgaggagccaatcaggagactctctctcttcgggaggcccaaatccagaagaggaaggctgtcagcccgacaccgcaagaggatgagctagatcaagagatcagagacatggagatgcttcatcaacaggctacaacttggcctccatcctacaagccgccccagcttcccatattcgacggccattcagacccgaagcagtttttaatgagctacgaagcaacagtatcttcgtatggtggcaatgctgcagtcatggcgaagtcttttgttatggctgtcaggagtgttgctcaaacctggtattcctcccttcgaccaggaacgatcacttcatggcaaaaactgaaggacatgttgttgaccagcttccaagggtttcagacgaagccggtcactgctcaggccctgtttcaatgcacacaggaccacgaagaataccttcaggcgtatgtcaggaggttcttgcgtttgagggcgcaggcgccaacggtgcccaacgaaattgtcattgaggccatgatcaagggacttcggcctggaccttcagctcagtactttgctaggaagcctcctcaaactttggagaagctgctccagaagatggacgagtatattcgtgccgacaatgattttcgccaaagaagggaggaggctctcaggttttccgaaatggccaggggcttcggaggaagattctatccgaagcacgtcaggtcaattcataactctactcaaaatgatgataaggggagtcagcagcaaaggccacagtgctcctcacaggcttcggggcaacagcaaagcttctcccggccaccagctccaagaggcagaggcgccaggggcttcggcggaagatttggagatcaaccaaggagaatattttgcttgttctgtggtgaaaacaagggccataccaccaggatgtgccatgttaccatccagaagcaaaaggagatagccgaagctgcagcacaacaagctcagccgaagcaggtcatgcatactgcttcgtaccattcgccttacatcccagaatacgtaggcaaccatcctgcagtttctgttgcttcggcgagtcaacctcaagcttcctggcaacagcctccgcctccaccaccgctgcaacaaggtcaacagccagaagggagccaatatgctccacagcaaagggacttcagagaacaatccgaagctcgcacagtcaatagcactgtgccagagtcgaagcacatctattga

SEQ ID NO: 71600 - DNA, 323 bp, Zea mays
  Clone ID: MRT4577_165302C.1
aacgcgcaacagaggcagaacatatcatttattgtcaattaaaaacaaacatctctacatttatccaactcacgttacacttacacttgagatatataccactatgttcatactgtacctgctagcgctgaataatgccagcaaccacccatatattaaccccatataccacacggacagaccaaccaattaaacattcatcacacctcaagagtacaaactcaacccattccacaccacaaactaggatcactattcattcatacatactcatagccacaattaacacaaggctttcataaaaagaccacattcaggattca

SEQ ID NO: 71601 - DNA, 1287 bp, Zea mays
  Clone ID: MRT4577_165303C.1
atggagatgcttcatcaacaggtgcagaggaagaaagagaagatggccaggctagctgaactgcaaaggcagatagacgaagcctctgaagaagttcgtcatcttgctcaggatgagcagcaccgaaggcctcagcaccaagaccttcatcaggagggcttcctcaacgaagatgactggtatgataatttccatcatgggaattttgttttcgatgatgcttctcctctgtccgctgagctgcaggctacaccttggcctccgtcctacaagccgccccagcttcccgtattcgatggccactcagacccgaagcagtttttgatgagctacgaagcaacagtatcttcgtatggtggcaatgctgcagtcatggccaaatcttttgttatggctgtcaggagtgttgctcaaacctggtattcctcccttcgaccaggaacgatcacttcatggcaaaagctgaaggacttgttgttaactagcttccaagggtttcacacgaagccggttactgctcaagctctattccagtgcacccaggatcacgaagaataccttcaggcgtatgtccggaggttcttgcgtttgagggcacaggcaccaacggtgcccaatgaaattgtcattgaggccatgatcaaggggcttcggccaggaccgtcagctcagtacttcgctaggaagcctcctcaaactttggagaagctgctccagaagatggacgagtacattcgggccgataatgattttcgccaaagaagggaggaggctttcaggttttctgaaatgaccaggggcttcggaggaaggttctatccgaggcacgcttcggggcaacagcaaggatccttccgaccaccagctccaagaggcagaggcgccaggggcttcggcggaagatttggagatcaaccaagaagaaccttttgtttgttttgcggtgagaacaaaggccataccaccaggatgtgccatgttaccatccagaagcaaaaggaaatagccgaagccgcagcacaacaaactcagccgaagcaggtcatgcatactgcttcgtatcattcgccctacatcccagaatatgtgggtaaccaccctgcagtttctgttgcttcggcgagtcaacctcaagcttcctggcaacagcctccgcccccacctccgctgcaacaaggccagcagctagaagggagccagtatgctccacaccaaagggacttcagagagcagtccgaagctcgtacagtcaacagcactgtgccagagtcaaagcacatctattga

SEQ ID NO: 71602 - DNA, 1395 bp, Zea mays
  Clone ID: MRT4577_165304C.1
atggcgccgaagaaagcttcagcaactggcactgcagcccttcaaccgctggaccacaatcaggagactgtctctcttcgggaggcccgaagccagaaaaggaaggctactagcccgacaccgccagaggacgagatagatcaagaaatcagagacatggagatgcttcatcaacaagtgcagaggaagaaagaaaagatggctaggctagctgagctgcaaaggcagatagacgaagcctttgaggaagttcgtcatcttgctcaggatgagcagcaccgaaggcctcagcaccaagaccttcatcaggagggtttccccaacgaagatgactggtatgataatttccatcatgggaattttgttttcgatgatgcttctcctctgtctgctgagctgcaggctacaccttggccctcgtcctacaaaccacctcagcttcccgtattcgacggccattcagacccgaagcagtttttgatgagctacgaagcaacagtgtcttcgtatggtggcaatgctgcagtcatggccaaatcttttgttatggctgtcaggagtgttgctcaaacctggtattcctcccttcgaccaggaacgatcacttcatggcagaaactgaaggacttgctgttaactagctttcaaggatttcagacgaagccggccatgatcaaggggcttcggccaggaccgtcagctcagtacttcgctaggaagccccctcaaactttggagaagctgctccagaagatggacgagtacattcgggccgataatgatttccgccaaagaagggaggaggcttttaggttttctgagatgaccaggggcttcggaggaaggttttatccgaggcatgttagatcaatccacaactctgcccaaaatgatgatcgagggtgccaacagcaaaggccacagtgttcctcacaggcttcggggcaacagcaagggcccttccgaccaccagccccaagaggcagaggcgccaggggcttcggcggaagattcggggatcaactaagaagaattttttgcttgttttgcggtgagaacaaaggccataccaccaggatgtgccatgttaccatccagaagcaaaaggaaatagccgaagccgcagcacagcaagctcagccgaagcaggtcatgcatactgcttcgtatcattcaccttacatcccagaatatgtgggcaaccaccctgcagtttctgttgcttcggcgagtcaacctcaagcttcttggcaacagcctccgcctccacctccgctgcaacaaggccagcagccagaagggagccagtatgctccacaccaaagggacttcagagagcagtccgaagctcgtacagtcaacagcactgtgccagagtcaaagcacatatattga

SEQ ID NO: 71603 - DNA, 319 bp, Zea mays
  Clone ID: MRT4577_165305C.1
gaaccaccaatccccaaacactagagttaaaaactttcgaacaggacgcagtccctggggatttcgaggtgaaaccaaacagcgagacttgtatacaagcttgcgatgacgcatatcccacaaaggaccgggtgctcttaattgaacatattggcatgaagcactctgttaccacccaaaatctacttgggcgttttaaaaaatttcttggggcgggcgaaaacctacattacagtgtgcacaaaatccttgtgtgacaccgaattgcttggggcgcaaatggccaacatcctttgttctctgcaggacactccttata

SEQ ID NO: 71604 - DNA, 367 bp, Zea mays
  Clone ID: MRT4577_165306C.1
aaccagaaggttgatctttgctttttttttttttttttttttttttttttttttttttttttttttttttttttttttttttttttttttttttttgtttggggggggggaaaatttaaaccccgcgcaaaatgcttattatggggccaaaaattccatccgccgaaattaataattgagcgtacaccccaggactagggttccccattggtggagatttactttgcagctgactagaccttggtttttagaattgggagggaaaaaaaaaaggggggcccccccccaaaaaaggggtctttgagaatttgccggcacccaaaaacccccccgtttcccgttttaaaaaggaaacccaaattccccc

SEQ ID NO: 71605 - DNA, 1371 bp, Zea mays
  Clone ID: MRT4577_165307C.1
atggcgccgaagaaagcttcagcaactggggctgcagctctgcaaccgctggaccccaatcaggagactctctcccttcgggaggcccgaagccagaagaggaaggctgtcagcccgacactgcaagagaatgagctagaccaagaaatcaaagacatggagatgcttcatcaacaggtgcagaggaagaaggaaaagatggccaggctagctgaactgcaaaggcagatagacgaagcctctgaagaagttcgtcatcttactcaggatgagcagaaccgaagacctcagcacaaacatcttcatcaggaggatttcttcaacgaagatgactggtatgagaatttccaccatggaaattttgcttttgatgatgcttctcctctgtccgctgagctgcaggctacaccttggcctccgtcctacaagccgccccagcttcctatatttgacggccattcagacccgaagcagtttttgatgagctacgaagcaacagtatcttcgtatggtggcaatactgcagtcatggcaaaatcttttgttatggctgagcacgaagaataccttcaggcgtatgtccggaggttcttgcgtttgagggcacaggcgccaacagtgcccaacgaaattgtcattgaggccatgatcaagggacttcggccaggaccttcagctcagtactttgctaggaagcctcctcaaactttggagaagctgctccagaagatggacgagtatattcgggccgacaatgattttcgtcaaagaagggaggaggctttcaggttttccgaaatgactaggggcttcggaggaagattttatccgaggcacgtcaggtcaattcacaactctactcaaaatgatgataaggggagtcagcagcaaaggccacagggctcttcacaggcttcggggcaacagcaaagctccttccggccgccagctccaagaggcagaggcgccaggggcttcggcggaagatttggagatcaaccaaggagaacattttgcttgttatgtggtgaaaacaagggccataccaccaggatgtgccatgttaccatccagaagcaaaaggagatagccgaagctgcagcacaacagggtcagccgaaccagatcatgcacactgcttcgtatcattcgccttatatcccagaatatgtaggcaaccaccctgcagtttctgtagcttctgcgagtcaacctcaagcttcctggcaacagcctccgcctccaccaccgctgcaacaaggccagcagccagaagggggccaatatgctcaacaccaaagggacttcagagaacagtccgaagctcgcacagtcaatagcactgtgccagagtcgaagcacatttattga

SEQ ID NO: 71606 - DNA, 1947 bp, Zea mays
  Clone ID: MRT4577_165308C.1
atgaacaaaaaaccctggcatttgaagtgccattacaaacggaactccggttccgtccccgcgggtacggacaacctccacaccggggaacctgcggagcgacaagctccgggcgaatcaccagcaaacgcgggtcgcccccaagcgcaccggcaggtcctcgctgccgtcctcgccgcgaatgcgagggagagggcggaatgttgcatcctagctgggcagcaacagttcgccttccccggcatggctggaggacatctccgccgtagggctggaaggcgattgccaccaccagaagctggaagaagaggtggcccgccgacccgcgcaggagcatttgagaacaagtccccaacattagcgcccacctccggtgaactcacttccactcctcgagttttgaacatcttcggcaatcataaaccttcgttatggcgccgaagaaagcttcagcaactagggctgcagttctgcaaccgctggaccccaatcaagagactctctcttcgggagacccgaaaccagaagaggaaggctgtcagcccgacaccgcaagaggatgagctagaccaggaaatcagggacatggagatgcttcatcaacaggtgcagaggaagaaggaaaagatggccaggctagcagaactgcaaaggaaaatagacgaagcctctgaagaagttcgtcatcttactcaggatgagcagaaccgaaggcctcagcacaaagaccttcatcaggagggtttcttcaacgaagatgactcgtatgagaatttccaccatggaaattttgcttttgatgatgcttgtcctctgtccgctgagctgcaagctacaccttggccttcgtcctacaagccgccccagcttcccatgttcgacggccattcagacccgaagcagtttttgatgagttacgaagcaacagtatcttcgtatggtggcaatactgcagtcatggcaaaatcttttgttatggcagtcaggagtgttgctcaaacctggtattcctcccttcgaccaggaacgatcacttcatggcaaaagctgaaggacatgttgttaaccagcttccaagggtttcagacaaagccggtcactgctcaagctctattccagtgcacccaggatcacgaggaatatcttcaggcgtatgtccggaggttcttacgtttgagggcgcaggcgccaacagtgcccaatgaaattgtaattgaggccatgatcaagggacttcggccaggaccttcagctcagtactttgctaggaagcctcctcaaactttggagaagctgctccagaagatggacgagtatattcgggccgacaatgattttcgtcaaagaagagaggaagctttcaggttttccgaaatgaccaggggcttcggaggaagattttatccgaggcacgtcaggtcaattcacaactctgctcaaaatgatgataaggggagtcagcagcaaaggcctcagtgctcctcacaggcttcggggcaacagcaaagctccttccgaccgccagctccaagaggcagaggagccaggggcttcggcggaagattcggagatcaaccaaggagaacattttgcttgttctgtggtgaaaacaagggccataccactaggatgtgccattttaccatccagaagcaaaaggagatagccgaagctgcaacacaacagggtcagccgaagcagatcatgcatactgcttcgtatcattcgccttacatcccagaatatgtaggcaatcaccctgcagtttctgttgcttcggcgagtcaacctcaagcttcctggcaacagcctccgcctccaccaccgctgcaacaaggccagcagccagaagggggccaatacgctcaacatcaaagggacttcagagaacagtccgaagctcgcacagtcaatagtactgtgccagagtcgaagcacatttattga

SEQ ID NO: 71607 - DNA, 235 bp, Zea mays
  Clone ID: MRT4577_165309C.1
acaacacatgccaccctggtctccggcaaactatggccaagctgagctgcttccccgctctgctccccggcaagaggaacaagaagacacgcaagatcaccgatgcatctttgttcctgaaaataaaccactactcccaatcaaaaagacaaaacaataaaagccaaaaaaaaaaaacataaaaaacaaacatggctcgccgcattaggcggataaaccataaaaagcgctgaag

SEQ ID NO: 71608 - DNA, 452 bp, Zea mays
  Clone ID: MRT4577_16530C.1
tttttttttttttttttttttttaaaagcacaggagcgacacatagatatttattattgcgtatatcatacaattgcatacactaatcacagcgagcctcctcaatgtctggagtgcagagtagcaaaaaaactcatggcagtttatttatttcatcaggtgcgccaaaatgaatagaaagttcacagactgaataatggtacagcaggtctagctttcattctgtttaatgaagagacagagctcactctccgctcaggatggggttgatcaatggcttcatctgagcaaggtaaacgattgcatacatcatccaacaacaaattacagctgtagtcaccaaggtcaaatggaataggtttgtggagggcccgcggttgctgcagaggcgcgtgttgagggttgcggcgaccccggcgtggtggaagatgagcgtggtgtcccaggaaccc

SEQ ID NO: 71609 - DNA, 250 bp, Zea mays
  Clone ID: MRT4577_165310C.1
acgacaacgagtgcagatacaagacacgagtggaatacctgatccatcacatgaacagcaccaagtaaatgaacaagctgatgaaagtattgaaagagggatgaaagcatgcatagagagctgaggctcttacccgcaggtgctaccgagagggaatgtttattatatgattgcctaaaacctataataggcgtaagggtaacatatcgatggatagagcattgagtgactcatattttggcatgcctat

SEQ ID NO: 71610 - DNA, 322 bp, Zea mays
  Clone ID: MRT4577_165311C.1
gatctttttagtcggcgccccccttttatttttgggtgggtttttaaaaaggcttgggggccactacaattattattcaaggagcaacatcctatccaggaaacaaatggagcaccacaccctactgcacacacaccatcaccaccaccgttccctcttaaccgacccagctcaaactactaacagtccatcatactactaaaagcgacaccctgatcaatgatggaacaagaccttgacaaggtaggtaaatttaactcttgaatcaaatagcttctacaaacgcctttcgtctatcataagcagactcttttttttttgc

SEQ ID NO: 71611 - DNA, 205 bp, Zea mays
  Clone ID: MRT4577_165312C.1
aaaaaccggccgacccacacctcggatcaataagctcaatgaaagtcgaagtctttacccacaaatcttcaacgatgacgatcatgaatatttgcatgctgatactcatctatcttactacgggtcctgaaatactacgaccatatttttgattaatggctcgacaagctgcatattagcaacgccttcttatctcatataccta

SEQ ID NO: 71612 - DNA, 237 bp, Zea mays
  Clone ID: MRT4577_165313C.1
gaatcacatccaatccatttggtgtaggaataactgaacaaatgtgtggtaaccattaggccttgctcggatcttcctacacctaatggattgtgccacctccgtaccatctggctacattacaatattcttgacttagtacaggaagcaatttctttttttggatcccgtctcgtgcttgcgtcgttcttgaagtgttattattctaatgactatcaagtgtcaccctggagtgcc

SEQ ID NO: 71613 - DNA, 1319 bp, Zea mays
  Clone ID: MRT4577_165314C.1
gggacctcgagccggccgttggatccctgcgcttcatgctacggatcaggcgcatactgtagcctcgaggcattgggtacctcgagcccggccgggccggggtacccatcgctcactacgcgaccgctagctactccgatcggatcctgaccacgcccgcctaccaggccaccaccaccaccaccacccacaaatccccaatggcgaggcgcatcgccgtggcggcagcgttcctggcgctggccgtggtggctcccgccgcgctggcgcaggctcccgggcccgcggcgacgcctagcgggccgccgaacgtgacggcgatcctggagaagggcgggcagttcaccatgttcatgcggctgatgaaggagacgcagcaggacacgcagctgaacagccagctgaacagctcgtacgccagcagcggcggcgggtacacggtgttcgcgcccaccgacaacgccttcaacaacctcaagcccggcacgctcaactcgctgacgcagcagcagcaggtggcgctggtgcagggccacgtcctgccccagttctacagcatggactccttccagaccgccagcaaccccgtccgcacccaggcctccggccgcgacgggccctacacgctcaacatcaccgccaccgccaacaaccaggtcaacgtctcctcgggcgtcgccgaggtcaccatcaacaacgcgctcagcgccgtcaagcccctcgccgtctactccgtcgacaaggtgctcctgcccctggagctgttcggggccaaggcgcccgccgccgcgcccgccgcgtcccaggggaagcccaagaagggcgggtcctcggacgctccctccgggtcggccggttccgacgacgccgcgcccacgggcgccgccggcgccagggtcgtcggctggagcttcgccggcctcgccgccgtccttggctgtctgttgtgagagtgagaccgtgcgtcgtttctagggacggacggacgacaagctagttgaagatgagaatgctatgcccgggttcccttccccttctttctctctgtttatttaaacttctttcatctcgctagtttctttaatttgtactattggtggtttgtaagattggcttatgtgattcaatttatgcgcctgccgctgttgatactgcataaaaaaaaaaaagtcatttgtgggtacaaaactacaaatccttgtaagaggtcacatccagtgatccatcattttcttagctgcagtgaaacgtggtgcttttctcttgttcggtgggaaacaatgacgcagaaaattgacgcaacgtttattagttggtcc

SEQ ID NO: 71614 - DNA, 1431 bp, Zea mays
  Clone ID: MRT4577_165315C.1
ctcgaggccggccgggactaggagtgggagggagatctcaggagtcaggtcaaatgcctcggtcctctgccagactgttccctctcacgtgctggctgacaactccgcgccgatcgatccacgggcgttattagtatatatcgccgtcagagccatcaccccgatggatccctgcgcttcgtgctcaggttcagcggaaactgagccgtgagcaccgccgccgccaccacctttgcgtttgcggtgacgacacgacaccaataatggcggcggcaaggacaaggagcctgctcgcggcggcgttcctggcgctggcggcggtgccggcggtgctctgccaggcgccaggccccgcggcggcggcgccgcccaacaagggcccgccgaacgttacggcgatcctggagaagggcgggcagtacacgacgttcatgcggctgatgaagtcgacgcagcaggacacgcagctgaacggccagctgaacaactcgttcggcagcgggtacacggtgttcgcgcccaccgacagcgccttctccagcctcaagcccggcacgctgaacaagctgtcgcagcaggagcaggtgtcgctggtgcagtaccacgtcctgccgcagttctactcgctcgactccttcgagaccgccagcaaccccgtgcgtacgcaggcgtcgggctccgacgggccctacacgctcaacatcaccgccgacagcagcggccaggccaacgtgtccacgggcctcgtcgccacccgcgtcggccaggccctgcgcgcgcagcagcccctcgccgtctactccgtcgaccaggtgctgctggccaacgacctgttcggcgtcaagcccccggcgtccgcgccgcccgccgccaggaagccggccaagggcgggtccgtcgccgaggcgcccgccgccggctcggctgacgcgccgcccaccggcgccgccggcgccagggccgtcggctggagcttcgccggcctcgccgccgtccttggctgcctgttgtgagagtgagaccgtgcgtcgtttctagggacggacggacggacgacaagctagttgaagatgagaatgccatgaccgaggccgggcatgggcgccttcttccatttccatctttgtctgagattgtcagtggccgtgttcccttgcccttctttctctctgtttatttatttaaacttctttcatctcgctagtttctttaatttgtactattggtggtttgtaagattggcttatgtgattcaatttatgcgcctgccgctgttgatactgcatcactacttgggtacaaaactacaaatccttgtaagaggtcacatccagtgatccatcatttttcttagctgcattgaaatgtggtgcttttctcttgttaggtgggacacaacgatccagaaaattgacgcaacgtttattagtt

SEQ ID NO: 71615 - DNA, 1145 bp, Zea mays
  Clone ID: MRT4577_165316C.1
ccccgcgtccggctcagctgacactaacagcagtgaccgtgagcaccgccaccgccaccacccaccacctcatcaatggcggcgttggcgttggcgttcctagcgctgacggcggtgccggcggtgctgtgccaggcgccggggccggcggcgcccaagggcccgccgaacgtgacggcgatcctggagaaaggcggtcagtacaccaccttcatccggctgatgaagtcgacgcagcaggacacgcagctcaacagccagctgaacaactcgttcgggagcgggtacacggtgttcgcgcccaccgacaacgccttcgccagcctgaagccggggacgctgaacaagctgtcgcagcaggagcaggtgtcgctggtgcagttccacgtcctgccgcagttctactgcctggactccttccagaccgccagcaaccccgtccgcacccaggcctccggccgcgacgggccctacacgctcaacatcaccgccaccgccaacaaccaggtcaacgtctcctcgggcgtcgccgaggtcaccatcaacaacgcgctcagcgccgtcaagcccctcgccgtctactccgtcgacaaggtgctcctgcccctggagctgttcggggccaaggcgcccgccgccgcgcccgccgcgtcccaggggaagcccaagaagggcgggtcctcggacgctccctccgggtcggccggctccgacgacgccgcgccaacgggcgccgccggcgccagggccgtcggctggagcttcgccggcctcgccgccgtccttggctgcctgttgtgagagtgagaccgtgcgtcgtttctagggacggacggacggacgacaagctagttgaagatgagaatgccatgaccgaggccgggcatgggcgccttcttccatttccatctttgtctgagattgtcagtggccgtgttcccttgcccttctttctctctgtttatttatttaaacttctttcatctcgctagtttctttaatttgtactattggtggtttgtaagattggcttatgtgattcaatttatgcgcctgccgctgttgatactgcatcactacttgggtacaaaactacaaatccttgtaagaggtcacatccagtgatccatcatttttcttaaaaa

SEQ ID NO: 71616 - DNA, 798 bp, Zea mays
  Clone ID: MRT4577_165317C.1
cctcgagttttttttttttttttttattttttttttttttttaatttctaggtaatgttggtatcatggaagcgccatgagctccgtaaactggggcctgtttatcaagttacaattacaattacgaacctgcgtgaaggactgaattacgaaaacactaaaaaaaatcctacaccctgtggactgattacatgggtgaatgtattcccttttttatcgagcaaacgcgatcgaaaagaaaaataagtatatatacgtactctctcaacaggggaacaacaaaaatgaagcctccctgtggatcttcctatctaccaggacgatcttgtcgagcttggccttgcaccactgaagctgctcgctggtgatcctcggcatcctcagcaccctcgccaccagcttcatgtccacctgcgagaagaagaggttctggttcgacctgtcctccttgggcttcttgaacttcttcacgatgcagttgccggtcctgaggaggtccttgagcctcttctccttcttctgtagcgtggagtggatgtgcgccatgagatcatggtccgaagggtcctggagctcgacgtgagcgctcgacaggcccttgagcacggacgccgccgtcgtcgtcgtctcgaccctgtcggccttgatgaactcccacaggatgtgcatcgcctcttccatgacgtcctccagctcctcgctcgttatcacgtagttccccttgcgctggtcctccatcccgcgtggcgggcgcgtcggtttgatcacgcgagcggccaggagggtgcgaagattagt

SEQ ID NO: 71617 - DNA, 525 bp, Zea mays
  Clone ID: MRT4577_165319C.1
cagcacatcaactccttcccacgctgtgcacttatgctatttgtcaaccagataccttactttattagtcaatcactatctctacgtgcagatatagtacagcctacactttatcaaccaatatcaaagcagaacctttcaccagaaatcctcacaggaacattggccatccttgaaatgatggaaccgatacaaatctcgaacaacaatctcccgatctgtggctcgggttataaacttgattgcctcgtggcagtcctcacaaacacgcagattcttgaagatccgaagtgccgtcccaacaggcgtgctgatgatcccgaatgcaatagcaagtttctcgctgtggaacttcagagatgtttctctctgttcctcctcgatatcgtgtacaacaagatcagttctacttgtgtaccccatctccttcagcctctccatcagcttctccaagtaagcataaatttcagccgatcttgggtgagatgtgtccagtgcaacaaatctatgcacaacgtttttcag

SEQ ID NO: 71618 - DNA, 157 bp, Zea mays
  Clone ID: MRT4577_16531C.1
tcttcctaaaatattttcacaaataaatttccctcatacaataatggttcaaatggtataagtatcaatctatcttatgtgtgcccaaataccacctctcaaataaatagtttcacaataaacttcatatctactttatcctcgtcagcgtctctct

SEQ ID NO: 71619 - DNA, 242 bp, Zea mays
  Clone ID: MRT4577_165320C.1
gagaagcaaatgatttgctgctgcaacatgattgatgcatccactccaaaatactccatggcacgttatgatgtgattgtgaaggacgtctcatcctacctgaagaaagttcggctccaccctgatcagattgccttcgttcccatttctggttttgtgggctacaacctgattgagaggtccacctacctctgctgtttcaaaggcccaaccctgcttgcgggtattgacctgattaccgg

SEQ ID NO: 71620 - DNA, 301 bp, Zea mays
  Clone ID: MRT4577_165321C.1
tgccactctcttgtttcttttatttactttttttgagaaaaaaactcgtcatgcctgttagtccctaattgatagtatggttgaagaacagaggtttgaaccatggatcacttaggaatgctttacatgacttggggaaaaaaaggacctgggattagatacttttatgatgcctgctacttagcaatgcatacataaactggctatggattaatggtgtagatctccaggacctgatacatattaccttatggatcatatacgaggatgggggttttcaaattaaaaaataatttagcct

SEQ ID NO: 71621 - DNA, 494 bp, Zea mays
  unsure (1)..(494): unsure at all n locations
  Clone ID: MRT4577_165322C.1
gcaagcgcagacagacagagcgggagagagcgcgcgcngagaggcagccnccatgagcacctcgccngagggggcgccgacgagcgncccctccctctcccgccggggggcctccttcgccgtcgtctgcagcggtggcaagaagatcaaggtcgacaagccccttggacttggaggcggcttgacagtcgacatcgacgccaacggcaggaaggtgggcaagaagggcgtgtgccagttcgttgacaagtacggcgccaacgtcggcggctacagcccagcctacacgccagaggaatgggctggatgtggtgaccgctgcgccggcgggccggccgggctggttatgtggggcggggccctcggggagctgctcgggggggggggggcgctggggtgcgggaccgggggggggggggcggggtggggggcgtggggcggggggcggggggggggggggcgctggccggggtcgcgccaggggcggggggggg

SEQ ID NO: 71622 - DNA, 357 bp, Zea mays
  Clone ID: MRT4577_165323C.1
gcaaaatcccaattgtaaacaggaaaaggtgttttatttccaaacattacaactgttagggaaggggtcatggaacctggagttatgatcctacttttgtccctaaccaagggttacgtctagtcttctctcctgggtgcttgatatctcatgccatatcaatgtatcagtacttactattgtttgtcgatataaggaattgctgacgtgcacataaaaatgttattctatatggactcagacacacacgttgttaagacaggttcatttggtaataactaatcattatcttccatgacttaccatttatgttactcatttgccatataagcccactctaaactaagggacagttaa

SEQ ID NO: 71623 - DNA, 380 bp, Zea mays
  Clone ID: MRT4577_165324C.1
atttctaaaaaaaaaaaaaaaaaaaaaaaaaaaaaaaaaaaaaaaaaaaaaaaaaaaaaaaaaaaaaaaaaaaaaaaaaaaaaaaaaaaatttaaaaaaaaaaaaaaaaaaaaaaaaaaaaaaaattttttccctccccggggggccctttaaaaggggaaatttttcaaatttccttaaaactggggggcgttttagcttttttttaaagggcccatttccccctttaggggggggttttaaaattaactgggcgccgttttaaaaaggtgtgattggaaaaaccctggggttccccaatttaatagctttgggaaaaatccccttttttccaattggggttttaacaaaaaggcccccaccaatcccctttcctaaaa

SEQ ID NO: 71624 - DNA, 252 bp, Zea mays
  unsure (1)..(252): unsure at all n locations
  Clone ID: MRT4577_165325C.1
gttgggggtgttttttttgtggtgtgggttttttttttaaaaaaaaggccgggtttaggatatatttttaggatcaaatcatattatgggggaccaattaatatttgggtacancgnacgggggggggtcaagcaacatggatgtggacacactttcatgagcccaaagactggccccaaacatgcagaggggggttgcaaactgaagaactttgtttttttttttctcacacacaccccacacaattcctt

SEQ ID NO: 71625 - DNA, 312 bp, Zea mays
  Clone ID: MRT4577_165326C.1
aaataaaaaaaaggaaacgggccagggtatatatttatgcacgtacatatacattacataaataacaattttggatgagggacttatttatatagacatgctttctttatttatataccattaatgatcatgttcttcaactcctactcgaggggttatgcattcatgcatgatgaacttttgagcccctttgattctttgtttttgggtattatttctcggaagcgaaccataaaaaagagagagagagaatattccatgaggggacacacaaggtttgttttataaggaaacgcgagaaaaactcccctc

SEQ ID NO: 71626 - DNA, 361 bp, Zea mays
  unsure (1)..(361): unsure at all n locations
  Clone ID: MRT4577_165327C.1
gggggggggggggggggggggggggatttttggggggcccctacgggtaggtgcccccctcttggtgcccggcgccgaaattccgggcgcgcccccgcccccgctcgagcgagaagaagaaatccccaagccctagcttccggtctcaagggcgagccctcgcggcttcttgagcatgaccgcccgcggagccccagcggnccggatcgcgagggagctgtacgccaacgagggggccaagaccagcgaaaacttccgcgcgctgagcacgggcgagaagggcgtgggcatgtccgggaagccgctccactaccagggctccaccttccaccgtgtcatcccggagttcatgagccagggc

SEQ ID NO: 71627 - DNA, 989 bp, Zea mays
  Clone ID: MRT4577_165328C.1
tccactcgtccgcccacgcgtccgcccacgcgtccgcccacgcgtccgcccacgcgtccgattcaaggcactgggaagaacagtctgatgaaaggaacaacaattgcctcatcttatctttcagatctgacaactcttgctgttggatacatgttcatcttctgtcttgtgtttttgtacattggatcactggctttacttcgatatgccaggggagaacgttttaccattggaagactctacggtatagctactatattagaggccatcccttctctatgcagacagttctttgctggaatgaagcaccttatgactatggtcaaagttgcattccttctggtcatcgagcttggtgtatttcctctaatgtgtggttggtggcttgatgtttgcactctaaagatgctgggcacaacaattgcacagagggttgaattctttacagtgtcacccttagcgagctcatctatccattggctagttgggattgtgtatatgctccaaataagcatatttgtcagccttcttcgaggggttctgcgcaatggagttctttattttctgcgggaccctgctgatccaaattacaatccatttagggatttgattgacgatcctgtgcataagcatgcccgacgagttcttttgtcagttgcagtgtatggaagtttgattgtgatgttggtcttcttacctgtaaaactggccatgagagtagctccttcaatttttcctctggacatcaccatatttgacccatttactgagattccagttgatgtccttctgttccaaatatgcatcccatttgctattgagcatttcaagcctcgtgcaaccattaaatctcttctgcatcattggtttgctgtggttggttggggccttggcttaaccgatttcttgctgccaaaacctgaagaaaacggtgggcaggaaaactggaatggcagggcagaaaggaaagacaggggacatggtgggcc

SEQ ID NO: 71628 - DNA, 844 bp, Zea mays
  unsure (1)..(844): unsure at all n locations
  Clone ID: MRT4577_165329C.1
actcgagtggggccgggacgtcccctcgatctctctctctcgtggtcgtgcgcttccttcccgagactccaatgcccctgcctcccctgctcccgcgcctttaccccacgccgcctccacttcgcggcggggacaggggtaacgccgtccctctctctcctggaagaagaaggccggcgcttctcgctgtcgtccgcgcaaagagaaaggacgaggcaagcttcaccgaccgcatccttgactacatcgagggagggccaaagttaaggagatggtatggagcacccgatttgcttcccaaggatggggctgcggaggatgaggaggacgagtctcaagatggtgatattagcactaattctgaaaagggctagaacaaaagcacttgttaaggataaacgaaccactgaagaagcttttggaacttatgtggagtgcatggttggtgatatcggagataagtccttcacaaagagagcactaaggggcgttcgtgctataatttgtccagctgatgatggttttttctctgaaccgatcgacctcaagggtgttcaacacattgttctgctatcacagaaatagtggtggtttgcaagctattatgaacagcaagctgaagacgctagcagagaaggatgaagaagtggttcttgcatctggcatcccatgtacaataatcagaacaggttctctgcaaagcactcctggtcgcgagagaggttttgattntactgaggtctcagcgatgaaacccagcttacccccagtgcatattatttattgtgcagtttctcttcccagcattcagaaaatgaactaatgaatatcatgcaattaggac

SEQ ID NO: 71629 - DNA, 409 bp, Zea mays
  Clone ID: MRT4577_16532C.1
cagcacacctggtgattatgttcgcgcccggatcttggtgcccctgaaatctgggtgtgacattgataactagtgcccgtgagcctgtctgtctcgcacactaatttaacaatgtcatgttacttgctgcaccacccgttcggccacaatctatcgctaatcgctactggctggcgcctggcggtctagcccgtggacgcaactgccagtcgagatttgtcgagcagcgggcgcaggacgccctgattctgattgcgggctcaatcacaataagcccacgggcaagttggggagggcccgcgcttaataaaactctagtaattcccaaaaggtgcaactccccggagggtccactcgaggtgacgcatgtcaagccggacggtaaagcttgtgggccacgtctgactgt

SEQ ID NO: 71630 - DNA, 849 bp, Zea mays
  Clone ID: MRT4577_165330C.1
atcgagggagggccaaattaaggagatggtatggagcacccgatttgcttcccaggatggggctgccgaggatgacgaggacgagtctcaaggtacatagagaaagcactctgtaaatttgaactccttggcggctgtgtcttcttatttgttggcagatctggggtgacaaatagatattgaggagtctcgggacgctgtgctagtcaccaatggcgacagtgagattggacagatggtgatattagcactaattctgaaaagggctagaacaaaagcacttgttaaggataaacgaaccactgaagaagcttttggaacttatgtggagtgcatggttggtgatatcggagataagtccttcacaaagagagcactaaggggcgttcgtgctataatttgtccagctgatgatggttttttctctgaaccgatcgacctcaagggtgttcaacacattgttctgctatcacagctggctgtctacagaaatagtggtggtttgcaagctattatgaacagcaagctgaagacgctagcagagaaggatgaagaagtggttcttgcatctggcatcccatgtacaataatcagaacaggttctctgcaaagcactcctggtggtgagagagggcatagcaagcaagggaagaataagcaaagaggatgctgctacaatatgtgtggaagctctgaatagcattcccctaaagacacacatttttgaggttgcaaatggtaatgagaaggtgatagactggaaagcatggtttgaagagcagatcaaaagagaagaagaaatacagtaaaacacaatttggaagtgtttttcgcttgttggcccatgag

SEQ ID NO: 71631 - DNA, 407 bp, Zea mays
  Clone ID: MRT4577_165331C.1
aattcggcacgaggcttcgctgcaccattaggctccgttctacttctacctaataacagtttgaagggtgtagttgtttaatttgaaatggactctgaagccagtatgttcgatcacattgagctcatgctacttgatgaaagtgtggagccgtcagacatgccattatcatttgtggggggggtcaccaataatttctcagaggatcagacaattggcccgtggtgggtttgctgtggtttacaagggactgctgcgaaatggactatccgttgcggtaaagaagttctatgataccattgaactatctgatgaaatgtaccgtaaagaggttcaatccatgatgaggttgaaacatgcaaatatagtacgctattatggatactgtgctgacacacagtgcaaaa

SEQ ID NO: 71632 - DNA, 250 bp, Zea mays
  Clone ID: MRT4577_165332C.1
accatccgtcaaaagaaagacttggggggattacgcttaaaagtcgggggaacaccactcggatgggacacaggtcggttaggcttgggagacacgggtgacccttaatggggctccacagcaccgactattgcctacacaatccggtagggttcttttttacatacatgcctggaaacatcctgggctagtagcagggcccgtggaaccgtgagaagtgggacgcgggacataatttgcctggggggga

SEQ ID NO: 71633 - DNA, 381 bp, Zea mays
  Clone ID: MRT4577_165333C.1
aaccccaggaaaaaaaagggggtcaccgttttgaaggggggggtccccaacaataaagggcctaaatatttttttaggggcccggaacccggggggggacaccaaaaaaaaaatgtccccccaattaagggtccccggggggagccaaaatactttattttaatgaaccgaaaccggggacctaaattccccaacttttggttttttttggccctacaattggtttggttaaaaaaagggggggccccctccaaaaaccccccaccatttggtgggttgtttttcccccggggtgtggatgacttatgaagcccggttccccttggatggcaaacaagtggcctcccgggggggaaactgaatgccccccggcgcttttgg

SEQ ID NO: 71634 - DNA, 132 bp, Zea mays
  Clone ID: MRT4577_165334C.1
tcgcgataccaaatccattactggataggatggagatcattgctatagctgggtatataactgatagagggggcagatcagtatgcagaagttattttacacaccttacggtaaattttccccacgcgtccg

SEQ ID NO: 71635 - DNA, 382 bp, Zea mays
  Clone ID: MRT4577_165335C.1
acaaaaggggggctaggagcatttttggccttcattccttgttaccttcacctttaccttcatcaggttaatattaaggtggtcaaaccccggtgcgccggtctattgaccaccccaacccatacccttttttttttgtatcaacaagaaatcacccaacgcgactcctctgttgtcacagccacagggcgcgcccggcacgcgttttccacgcccgcccccacctaaccaaaaaacacataccagccgttttaccccatgccttgcacggtccttccggcctttgtgcacgttgaagcagcgcttacaggagctgtatgaggcgggacgcgggcctttttttgcgcaggccgactagcgaggcgtcttttactagcgggcc

SEQ ID NO: 71636 - DNA, 274 bp, Zea mays
  Clone ID: MRT4577_165336C.1
gcgtacaaaactcccatctcgcggcggaaagagagagagtttggagaggtgctagctggtcagatggaccggttggaggagcggaacattaacaagggggagagggagatggaggaggcgcgcatggaataggtgcttctggaggatgtcatggacaagaatacccaggagccgtagcagggccaaggactcagcctgtcactcaccacggcaagtacagcggcaggtctgcaatgctgacgatgtggaaccctttagctaatgcctcacagat

SEQ ID NO: 71637 - DNA, 642 bp, Zea mays
  Clone ID: MRT4577_165337C.1
cttcccccccttttggcacacgattacaaaatatatagccaatggcttaaccgaatggagaaggatctccttaattgggggggcggccataaccgactggagaagattctccttaattcaagggattaccaaaacagctctccttaattctaggaattaccaaaacagcttactactctaagtttccttccagccactaggggatggctcatgcagcgcccgctcggggcactcagccgcgcggggtacgtaacaggcgcgtttgcccctaacgtatgtgcggccacacatgacacacttaatgtccaattttcgcagccaaataatttacctgggggtggacttaacagtttacagtgcaaaatgatcaatatccattgatggaaatcctgactgtaacctttttatcccttgcaacatatttttagcagtctccttctctgggccagtgtaatctaagagccttgtacaatagtgctctgcatcctcaaacctgcctatgctcttgtaatgcttagcaagaaacagcagagcttcaacaaaattctggccttgactttactcaacctgcattctctctaaatccttcttgtagtacaatgcagcttcctcggattgccccatcatgccctgcagtttttc

SEQ ID NO: 71638 - DNA, 490 bp, Zea mays
  Clone ID: MRT4577_165338C.1
gggggttgttttttttttttttttttccatgcgggggtggtctctttgccacgcccgcggagacccgtggggtgccccggggaataccggccgggccctggggggggaccatcttagcctggagtgagcatggttaaagcttggccctggggggggggggggtgctctcagagtgaaacagacatacgatcacaaaagcacaaaacgtaaaagccggggggcctaaagggaaagcctggggagcctaatgggggagcgcacacagaccaattgccaggcgggaaacggcccgtgcccaatggggaaaacaatcgggccacccgcattaagaaaccggtcaactctcggggagaaggggggttcttatttggacccagggggggggcaatttttaacagggatacagggaacagccctttgagagttaccgcctgggccccacaagtaggtttggccaacggggcaaaaatgcttgccccaggaggggaaa

SEQ ID NO: 71639 - DNA, 226 bp, Zea mays
  Clone ID: MRT4577_165339C.1
cccacgcgtccgcggacgcgtgttcttaagtacgggtgcggccacgagtggtgggtctgcctcctcctcaccttcctcggctacattcccggtatcatctacgccttctacgccatcaccaaaaacaactagctagtcatccttgcctactacgatccatgtctctgtattttcgtcttgtcatatgccttatgccaacttgtgctgtttgtagttgcttgaattc

SEQ ID NO: 71640 - DNA, 781 bp, Zea mays
  Clone ID: MRT4577_16533C.1
cccacgcgtccgtggctcgactggtcgggacgggccgggcgggaactccatctccttttccggtcttcccgaccgagcgatccagccagcgagaggttgcgagaagtagccgccgccggaggagcacgccaaggccgccgcctacgaggacggccatggggttctgggtgaccacgctcatctttctcctcgccggcgtcgccgcatccctcttcacgctcctctgctgcaaccgcgggccctccacaaacctattccatttgaccttggtgactacagctgtaatttgttgttggatgatgtatgctatcgtttaccttgctcagatgaagccattgatcaaccccatcctgagcggggagtgatctctcctctgcattaaaaagaatgaaagctaggtctgctgtaccattattcagtctgtgaacttcctattcatttggccccacctgatgaaataaataaactgccatgagtttttttttttttgctactccttcactgcagacattgagaaggctcgctgtgattagtgtatgcaattgtatgatatacgcaataataataatagtatctaaatatatgtgtgccgctcattggaatgtctgggtgcgtgtacccaactttgttcgtcacgactcaggtgtttgtctgcttgaaatggaattatgaacgtaaaacaatgtagcacaattttctgctttcagtgggtgttttgacttttgagcaaaaaaaaaaaaaattttgagcttacaaaaaaaaaaaaaaaaaatttgcggcc

SEQ ID NO: 71641 - DNA, 551 bp, Zea mays
  Clone ID: MRT4577_165340C.1
atactgaaagacgctgctgctcctctcctcccatctcaccatacactggactcccagcaagatcgcgcggaggacatggggaagcccaagacttgcctccgacggcgacaagccgaccgactatgccactgagcctgagccgacggttacagcgcactcggggctggacaactacgactacatgatcgcgctcctctccctctgcccgcacttcggaatcctcctgtgctacacgatgtagcgcgccgacgtatcggagtcgccgacttacttacacctcatgaaacacggcgcactagagggattaaaggatatctggcccatgcccaccgtcgtcgcgtggaagatcatctctctcattcgggctcttcgaggccggactacagctgctgctcactggaaagcccttataagaggccatctcgtctgccgggaacgtgcctgtctacatggcaaatggcatacaagcatatgtagcgaccttgataacttaccttaggatgcaggtggctgcggcacattctagccctgcaatagtgtatgatcacttg

SEQ ID NO: 71642 - DNA, 194 bp, Zea mays
  Clone ID: MRT4577_165341C.1
ccaaacaaacattgtttatttcagggttgctgcataaacaagcttgtgtttggttgtttgatgtacaaaccgaagatttgtctttttgcaactttcatttttttccaataacgcatttttatttggatggcccttttttgtaggagccaatctttgtagttggcccattgccaatcagagatttgggataaata

SEQ ID NO: 71643 - DNA, 458 bp, Zea mays
  Clone ID: MRT4577_165342C.1
caaaaagccgcactacttgctctacatctggcagggcagccaggccagtcaggatgaaatcagagcctctgcctatcaagccgtcatcttggaccaggagtacaacaatgaaccggtccagatccgggtcccgatgggcaaggagccacctcacctcatgtccatcttcaagggatgcatggtggtctaccagggaggcacatcccgggccaacagcgtggagcctgtgccctccacccggctattccaggtccgaggaaccagcgccaacaacaccaaggcctttgaggtctcaccccgggccgcctccctcaactccaacgacgtcttcatcctcaagactcagtcctgctgctacttgtggtgtgggaagggttgcagtggagatgagcgggagatggccaagatgggtgctgacactgtctcccggactgagaaacaagtggtggtggaagggc

SEQ ID NO: 71644 - DNA, 157 bp, Zea mays
  Clone ID: MRT4577_165343C.1
cttgttcacatttctttttggttttggtttcttgggcaagcaaccaatccatgttgggcccaaattcaaactggatctctctttgtgggggcaggggatcttactctggctgcttattggccgtggttttacttaaacccttggatagcacccccca

SEQ ID NO: 71645 - DNA, 254 bp, Zea mays
  Clone ID: MRT4577_165344C.1
attcggctcgagcagaaatcgaagcgagttttttttgagatcagagccgacaacgacctagtgggactacaaaacagtgtgtagcagtcccacaccttgatgggctcactgggtgggccaaaccatgcgagcacataccgaaaatgttagtagaggcaggccactgtgaggttgccaatgtcaagtatgcgcttgcccatgctgactcggcgtgaaaggacgcctctgcgtttcactgtcgcgcgccgcgataa

SEQ ID NO: 71646 - DNA, 1282 bp, Zea mays
  Clone ID: MRT4577_165345C.1
attgggtacctcgaggccggccgggattcgggcgtgagcgcacctcgtatcgtcgtctagctccgtttcgtttccgggaagcaaccaaccttcgttcccgggcagccgacgacccttgcgccgtcttcgtctgtcaagagtacacacagtttgacgcgagcagctgccggttccttcttctctcgtgcgcctttgctagctttgggatcgatcaaagccggtgagcgagcgagtgaggaccggaacatctgccagcatcatggcctccgagcatgcgcagctgtctgccaaggccgccggcggcagcaggttcgcggtgacgtacggcctgctgaggcagtacatgaaggagcagggcggcagcggcgccaccaggtgcctcgcgccggccgtgggcgtgggcctcatgccggaagccgacgctgctgctgctgcggcggaggcgaccgaggagaggaccaccgtgctggagctcttcccgcagcaggctggcacgctcaaagacgagcagcaaaggaagaggaaggagcgcgctgacgggagagcgccgctgaccatcttctacggcggcaagatggtggtcttcgacgacttccccgccgagaaggccgaggagctgatgcagctcgccggctccggcaacgccgcccaggacgcgctggcgggacagcccagcctcacagacatgcccctcgcgaggaaggtgtcgctaaagaggttcctggagaagaggaagaaccggctcaccgcggcagatccgtacccggcagcggcggcggcggcggcggcggcaagcgagtcgtcgactaagcctccggcagtgaaagacgagggcgcgccgtgggtcggcgtgaactcggcgctcagcctcagctgaacaatctcatcgacggcagcctgcctacctatcgctatagggaaaaactagctatttcccggccgtaaaaatatgtacgtgtttggccccccttgacatttacaccagtaaaatggctgcttcagttcaggggaattattagctgggtagctaattaccatgatcggtttatttagttgtctgtttgagaattctttggccagaacgaagaagaattctttttttcttccttgctggtattcatcatatctgcgaggatacgaactgattaattagacctagtcgaactcatatatatacatagtgtgtaaattcaaataagatgatggaacaggttatatgcaattctttcgcttcagattcaacaggttatatgcaattctttcaaaaaaaaaaaaaaaaaaa

SEQ ID NO: 71647 - DNA, 587 bp, Zea mays
  Clone ID: MRT4577_165346C.1
cacagtttgacgcgagcagctgccggttccttcttctctcgtgcgcctttgctagctttgggatcgatcaaagccggtgagcgagcgagtgaggaccggaacatctgccagcatcatggcctccgagcatgcgcagctgtctgccaaggccgccggcggcagcaggttcgcggtgacgtacggcctgctgaggcagtacatgaaggagcagggcggcagcggcgccaccaggtgcctcgcgccggccgtgggcgtgggcctcatgccggaagccgacgctgctgctgctgcggcggaggcgaccgaggagaggaccaccgtgctggagctcttcccgcagcaggctggcacgctcaaagacgagcagcaaaggtgtgttaactcgccgttgccttcagtcagtgcctcaccgtgcgcgtgtgaacttctgatcgcggatctccgtcgtcgtccccttaggaagaggaaggagcgcgctgacgggagagcgccgctgaccatcttctacggcggcaagatggtggtcttcgacgacttccccgccgagaaggccgaggagctgatgcagctcgccggctccggcaacg

SEQ ID NO: 71648 - DNA, 295 bp, Zea mays
  Clone ID: MRT4577_165347C.1
aacggccggaatcccggtcgaccacacgcttccggcactagttttagatcgaagcggttccttattttttgaaattttcaaccgttttaccagtggacagtattagtggtcggggtgggaacccattcaagttaagggcttgggttgcgtttggactccagggcaaaattgtcttaaggatttaaaggaaaagcggactttatttgagctgggcataattaaaggacacccttgttgttattgttagggggccaattgctcacttgaaatttaggtattgttgtttcccattgta

SEQ ID NO: 71649 - DNA, 1075 bp, Zea mays
  Clone ID: MRT4577_165348C.1
cgcgcgcccgccgccacccagggtggagcgcgacatggaggagaacaggaacctgccgcaggaggcgttcgacacggtggagctcgccaaggctgccgtggagagcaagtgccccgggatcgtctcctgcgccgacgtcctcgccctcgccgcccgagactacgtccagctggtgggtgggccgtactacgcggtgaagaagggccggaaggacagcaaggtgtccctggcggggaaggtccgcggcagcctgccgcgggccaactcgacggtggacgagctcctgcgcgtgttcgcgggcaagggcctgggcgcggcggacctggtggcgctctccggcgcgcacaccgtcgggttcgcgcactgcgtccacgtgctgggccgcatctacgacttccgcggcacgcggcggccggacccggtcatggacgcccgcctcgtgaaggcgctccgcatgtcgtgcccgtcgtcgggcggcagcgcccgcgtcgtggtgcccttcgacgtcagcacgcccttccagttcgaccacgcctactacgccaacctgcaggccaggctgggcctgctggcctccgaccaggcgctgttcctggacgcgcgcaccaggccgctcgtgcaggacctcgccgccaacaagacccgcttcttccaggcgttcgtggccagcatggaccggatgggctccatccggatcaagaaggggaggaaaggagaggtcaggaaagtctgtagccagcacctgttttcagcctgatctgcgtctgcattcagcagcatgcgtccgtacgtcgtcgtcggtgtcagctcatcagcgtgccagcaccagcatacacacgggactagctcgttcgtggttactacgtttgggcctcgcgttgcgtgattagagctatctttgatgcatgtgacggcagtttagtttagagaggagtagcttgcccattggttttagggtcgcgtgtgtttgtgcaagaaaatgtgtaattgtgtatgcatgcaactatgcaagtacagtgttctgttgtgagtttttatttaggcgtgcctaggaatttatccccccaccccggct

SEQ ID NO: 71650 - DNA, 253 bp, Zea mays
  Clone ID: MRT4577_165349C.1
gcgtaagggaaatcaaagcctgtcgcgtaggacagttcggctaagccatagacctgccagtttaacgaagagttgatgcagatctgatcacgcagcaacgtctatgtagagcgtgctgataacgtgttgagaactacgtcaccacggatcaccagatccgttcctttccctgccgtcagcagattatgcgcgagaagatttggatgacccgtatccctttccataagcacgacagattgcacatgagacacat

SEQ ID NO: 71651 - DNA, 370 bp, Zea mays
  Clone ID: MRT4577_16534C.1
ggttatttccttttttttttttttttttttttggggttttttttagttttttttctctttttctccccctcttttttttttggggggcaaaatattcaaatatggggcatccggggggccaaaaaaatattccgggggggctttcggtgggaaaaaaccccgatataagacctggggtttttttttggaggaagactttgggtccccccccatatagggggatttagcaaccctcacaggggggggggggaataaaattctttgccttggacacatccaacaaaaatttcccttttattggatcccccaaagaccggaaaaaaacaacccccccttttggccgggtccctgacccgggtaatttaaaatc

SEQ ID NO: 71652 - DNA, 602 bp, Zea mays
  Clone ID: MRT4577_165350C.1
acgcaacaaaaggcaattcaattttttgtttatgactctctcaagcaccaattgttattacagtgactgagttttattgaaatgttgtttttcggagtgctctcaagctatcataacggtcttgtttagatgtacttagagaggatagattcaacaactccctgagctatggggtgataagtttctcgagcttctgcaaacacctgttttgccagctgcttctcttctgttccaccagattgtgcaagagcagtgaagagtggacgcaggtacttcatccttcctacctcttttagtgttttcttcacttccccatggtactctctgcacttggatgtgactgcaagttgcagaaacgagaccttcacttcatagtctttcgattctgccagtctgtaccgcttgtccaaggccatgacctgagaaggttcacatgatttaggaagattctccaagtacagctcccattcctgtccgttccactcagcaacatcatcctcacttggcatctttccttccttaaactctttcgccagggatatgatctttgtgtaaatggttgagactgggtcatatgcatcctctggtatacccacgccctc

SEQ ID NO: 71653 - DNA, 363 bp, Zea mays
  Clone ID: MRT4577_165351C.1
gccggccgggcctgagagttcgaggcgacaggcatcgtcgtcccacccagcagtgcagagactctctctccctccctctccccggccacctctcgctcacgagcctgccgctggggtcgtggtgcctccacctcctgctcctcctggcgctccgctcgctcaccttccagctctggttctcctacggcaacatgctcttcttcacccgccgccgccgcgtcgtcaaggacggcgtcgacttccgccagatcgacgccgagtgggactgggataacatggtgatcctgcaaaccctggtcgcggcggtggcgatgggcagcgcggcgttcccggccgtgtcggagctgtttgtgtgcgacccgc

SEQ ID NO: 71654 - DNA, 295 bp, Zea mays
  Clone ID: MRT4577_165352C.1
attacaaaagaattggactatcttatacgaaaagggcggagaggcccatatatatttgaatccgacattatttgggaggaaccacagaccggaaatgtccgcttaaaaaactcgggtgctgcacaaacaaataatggcaagtggcggaattgaaaataaaaattaactcgtgtgcaagaacatcaagcatgaggaaaagacaaccatgcattcgaaacgaaggttaaaatctgaccaatcaagtacttcactcaatgcttactttgtaggcgcccattgccttgatccaaactgg

SEQ ID NO: 71655 - DNA, 459 bp, Zea mays
  Clone ID: MRT4577_165353C.1
gcacgaggtcgtattttaaaaaaatataaataaaatttgatcggatatttatcgaatcatgttcggattcggatgtattcgaaaaatgtatcggatatttggtatccgatgtcggataatatttgttcaaattacacccctgcgcacgcaggaactgaaccgggtacccgctaaccgggtacctgtatcctacccgtacttctcgggtatttgccgggtagtggtcatcctgtatcctacccgtatccgatgtatatccgggtagtatccgtatccgacccgtatacaaaattacccgtatccggtacctgaaaaactgggtattttaagtacccgtatccggtatccgccgggtaatctcgtcccgttttcacccctactttcaggcgggcaccagcctatgtgggaggcaaagccgcggctcagctcgctccccaccaccaaaaaaaaaaaaaaaaa

SEQ ID NO: 71656 - DNA, 1319 bp, Zea mays
  unsure (1)..(1319): unsure at all n locations
  Clone ID: MRT4577_165354C.1
gccggccgggccgggcatgggagttcgaggcgacaggcatcgtcgtcccacccagcagtgcagagactctctctccctccctctccccggccacctctcgctcacgagcaccccatcttcccggccagggcctgggtatgggtgctccgctcgcctcctggccatgggcaagcctcggatcatacaagtacctgctgtacgggcctctggtggcgaaggtggcgcacgcgtggagggagacggggagcctgccgctggggtcgtggtgcctccacctcctgctcctcctggcgctccgctcgctcaccttccagctctggttctcctacggcaacatgctcttcttcacccgccgccgccgcgtcgtcaaggacggcgtcgacttccgccagatcgacgccgagtgggactgggataacatggtgatcctgcaaaccctggtcgcggcggtggcgatgggcagcgcggcgttcccggccgtgtcggagctgcgggcgtgggaccccgcgcgggtgggccctggccttgctcctgcacgtggccgtctcggagcccgccttctactgggcccacagggcgctgcaccggggcccgctcttcagccagtaccacgccaggcaccactcgtcccccgtcacgcagccggtcacggcccgggttcggcacgccgctggaggcgctgctcctgacgctggtggtggcgcccatcatcggcttccggcgggactgcacctacggcaagctggccgccatgaggctgcccaaggacgtgcagggcctcagctcctgcgagtacacgatggagcgcggggtggtgcacgcgtgccacgccggcggcgtggtgcacttcctggaaggctggggccaccacgaggtgggcgccatcgacgtcgaccggatcgacgtcgtttggaaggcggcgctcaagcacgggctggcgcctgtgtgatcgcatcgtcgagccgcaccgcgcgcgcggtttgttttgcagcggctacctacctactagctgcctgcatatatgcttgccaggccggggtccagccgccgcggttctgtgtgcatgcaacagcccagcagaccacgggctaccgtgcgtggctattcttgtactagtactactcctgctgtatgtaccgtgccgttggggcgatgggttaattaagtcatcgactacgctacgacggtgcatggcctctttcgtgccaaaacgctggtttaaatcttcaccagaataagaaattaaacacagaggcttaagaaccccaaaaaaaaagtaagggcggccgcagncaggtgagctcgtcgaaccgggaaat

SEQ ID NO: 71657 - DNA, 2317 bp, Zea mays
  Clone ID: MRT4577_165355C.1
aattcggcacgaggggcatcgtcgtcccacccagcagtgcagagactctctctctctctccccggccacctctcgctcacgagcaccccatcttcccggccagggcctgggtatgggtgctccgctcgcctcctggccatgggcaagcctcggatcatacaagtacctgctgtacgggcctctggtggcgaaggtggcgcacgcgtggagggagacggggagcctgccgctcgggtcgtggtgggaccacgtcctgctcgacctggcgctccgcccgctccccgtccagcactacttgtcctaccacaacgtggtcttcttcccggggtgtgcccgcgccgtcaaggacgatgtcggctccctgcagtacgacgccgagtgggagtgggataatttgggaaacgtgcccaccagcgtggcagaggaggagacgggcaacggggcatctactaacgagtacaggggaacggcataggactctggcagctgtgcgcaggatgttctgttacacagaacaagttcatactgaatcagctactggattcccacggcgctgcaccggggcccgccctacagagagtaccacgccaggcaccactcgtcccccgtcacgcagccgttcacggccgggttcggcacgccgctggaggcgctgctcctgacgctggcgatgggggccccgctggcgggagccttcctggcgggcgccgggtccgtgagcctggtctacggccacgtcctcctcttcgactgcctccggtgcatggggtacagcaacgtggaggtcatctcgcacagggccttcgccgccttcccgccgctcagatacctcgtctacaccgccacgtatttgagcctgcaccacagggagaaggactgcaacttctgcctgttcatgcctttgtacgacgccctcggagggaccctcagctccagatcgtgggggctgcagagagaggtcgaccaaggcatgaacgaccgggtgccggacttcgtgttcctggcgcacgtggtggacgtggtgtcgtcgatgcacgtgccgttcgccttccgctcctgcagctcgctgccgtgggccatgcgcccggtgctgctcccgctctggcccgtcgccttcgccttcatgctcctccagtggttcttctccaagagcttcaccgtcagcttatccttgctccgcggccggcgccaccggaaatggagcgtcccgaaatatagctgatggtacttcatcccgtcggtcatttagggcatcaaccaccagcaagcgctcgcaatcgactcgactgccaagttagggcgacaggagcgtcaaccttgctgcgctgaacaagaccgaggttctcaacggcggcggcacacttttcgcgaacaagcacccaaccctgaggttgagggtggtgcacggcaaaaccctgacggcttccgtgatcctccacgagatccccagcagcgtgagggaggtgttcctcaccggcgccacgtccaagctcggcagggccatcgcgctgtacctctgcaggaagaggatcagggtcctgatgcatgacgctttcgacggagaggtttctgaagaatcagagggaggcgccgccagagttccagcagtacatcgtgcaggtcaccaagtaccaggcggcgcagggctgtaagacatggatcgtgggcaagtggctgtcgccgcgggagcagcggtgggcgccgccgggcacgcacttccaccagttcgtagtgccgcccatcatcggcttccgccgggactgcacctacggcaagctcgccgccatgaggctccccaaggacgtcgagggtctcggctcctgcgagtacacgatggagcgcggggtggtgcacgcgtgccacgccggcggcgtggtgcactgcctggaagggtgggagcaccacgaggtgggcgccctcgaggtggaccggatcgacgtcgtgtgggaggcggcgctcaagcacgggctcacgccggcgtgagcgggagggcgcccggagcgggagaccgagacggccggcgcgcgcggcccccgcccggaaataacgcgtcgtctattcgttgtcgcatggctgttgcgacgggtgggtcggtgtgctaccgtgtactactactaccagctactagctaccatagtccaagactgctgcaagcgcaatgcaacagagttgataggctggttcgcatataccaatactcttatgtacgtaccgaatactgcaatattgcacgaggcatgggcttccgttacttatggccaggcctgcgacctagtatactactcctgctgtatgtaccgtgccgatggggcgatgg

SEQ ID NO: 71658 - DNA, 1204 bp, Zea mays
  unsure (1)..(1204): unsure at all n locations
  Clone ID: MRT4577_165356C.1
ttgtctcccttctactgccgccgcaacctgaccaacctcccttctactgcccgcctagggtctcccttctactgccgccgcaacggcgcaacctcccttctactgccggcgcaacctcccttcttcgaatcccatctgacctagccctgcaacccgtcggacgacgagcagcgaggcccgcggccgagatggaccggtacctgagggtggagcggccacggaacgagtcaaccatcgaggagaacgggatccgcatcaccgcgcagggcctcatctgcaactatgtctcctacgctacctccctcctccaggtgcctgggnctttgtcctcaccatcgtcgtcgtatcgtattgtacttaggatgcgacggcaacacgctgacggcggccgtgatccttaacgagatccccagcaacgtgagggaggtgttcctgaccggcgccacctccaagctcggcagggccatcgcgctctacctctgcaggaagaagatcagagtcctgatgttcacggtgtcgtcggagaggttcgtgaagatccagagggaggcgccgccggagtaccagcagtaccttgtgcaggtgaccaagtaccaggccgcacagaactgcaagacttggatcgtgggcaagtggctgtcgccgcgtgagcagcggtgggcgccgtccgggacgcacttccaccagttcgtggtgccgcccatcatcggcttccggcgggactgcacctacggcaagctggccgccatgaggctgcccaaggacgtgcagggcctcagctcctgcgagtacacgatggagcgcggggtggtgcacgcgtgccacgccggcggcgtggtgcacttcctggaaggctggggccaccacgaggtgggcgccatcgacgtcgaccggatcgacgtcgtctggaaggcggcgctcaagcacgggctggcgcctgtgtgatcgcatcgtcgagccgcaccgcgcgcgcggtttgttttgcagcggctacctacctactagctgcctgcatatatgcttgccaggccggggtccagccgccgcggttctgtgtgcatgcaacagcccagcagaccacgggctaccgtgcgtggctattcttgtactagtactactcctgctgtatgtaccgtgccgttggggcgatgggttaattaagtcatcgactacgcttaaaaaaaaagaaaacctgaataactaa

SEQ ID NO: 71659 - DNA, 1051 bp, Zea mays
  Clone ID: MRT4577_165357C.1
aattcggcacgaggccgcaacctgaccaacctcccttctactgcccgcctagggtctcccttctactgccgccgcaacggcgcaacctcccttctactgccgccgcaacctcccttcttcgagtcccatccgacctagccctgcaacccgccggacgacgagcagtgaggcccgcggccgagatggaccggtacctgacggtggagcggccacggaacgagtcaaccatcgaagagaacgggatccgcatcaccgcgcagggcctcatctgcaactatgtctcctacgctacctccctcctccaggtgcctgggcttgtcctcaccatcgccgtcgtatcgtattgtacttaggatgcgctgttctgttcgagtcccgtccctgtcgattcgaagagatccccagcaacgtgagggaggtgttcctgaccggccccacctccaagttcggcagggccatcgcggtctacctctgcaggaaccacctcgcagtcctgtccagtcgtctgtcgccagcaggagcacgacgcgccgcccagaggcagcacggccataccagcagcgcccgcatcctgcctcttctcctctgctactggagcctctactgctaggagcacggctaggaggacgacgcccgcatccagcaggagcaccagcaggaggaggatgcccatgctgctgccattgagcgatgatctgatgcgcccccatcatggctcttctcctccctcgcggcctcgcctcgatctgctgctgcggtgatctgctgctgccggatccgagcaccgtgcccacgggtcacggccagcgatatgtagggatcaagaatccaactttgagaaaaattgctcgagatgtaaatggtgccgccggagtaccagcagtacctcgtgcaggtgaccaagtaccaggccgcacagaacttcaaggctcgagaggtggactcaaacatccaagttttgcaagttttgatgttggatgttaaatttctatgctcacccctcgtttggttattgatgtactatttcatctcatgtcacaaatttggcata

SEQ ID NO: 71660 - DNA, 2412 bp, Zea mays
  Clone ID: MRT4577_165358C.1
aattcggcacgaggggacttgaggcgaagagagcagcccaaacacgactactgcattacacacacacacaggataggagtacgtgtctgcttctctctccccgctggcctcctcctccagtacttcagacagtgcaccgtgctgcggcctctttcatccctcaaggccggccgcccccagaaccagagtcggagcgaatccatggctcctccgcccctctcctcctggccatgggcaagcctcggccagtacaagtacgtgctgctggggcctctggtgtggaaggtgctgcaagaatggcgggagcaggcgggcctgccgctcggctcctggtggctgcacctgctgctgctgttcgcggcgcgcggcctcacctaccagttctggttcagctacggcaacatgctcttcttcacccgccgccgccgcgtcgtcgccgacggcgtcgacttccgccagatcgacgccgagtgggactgggacaactttctcgtgctgcaaacgctgattggggccacggtggtcaacagcccactgctcccgggcctgcggcagctctgcctgtgggacccgcgcggctgggccgtcgccctgctgctgcatgtgggcttctcagagccggtcttctacctggcccaccgggccctccacagggccccgctcttcgcccgctaccacgccgcgcaccactcctcgggcgtcacccagccgctgacagccgggttcgggacgccgctggaggtcctgctgctgactctggtgatgggggccccgctggcaggggccttcctggtgggggccggctccataggcctggtctacgtgcacgccctcgccttcgactacctgcgcgccatgggttacagcaacgtggaggtcgtgtcgcccagggtcttcgaggcgttcccgctgctcagatacatcctctacacgccttcgtacctgagcctgcaccaccgcgagcggtgtcgcaacttctgcctgttcatgccggcgctggacctggcgggcgggacgctggacgagcgggcgtgggcgctgcagcgcgcggcgtacgacggggggccgggcggcggcgcgctggggacgccggagttcgtgttcctggcgcacgtggtggacatgatgtcgtcgatgcacgtgccgttcgcgctccggtcgctcagctccaccccgttcgccaaccacttcatcctgctcccgttctggcccgtcgccttcggcttcatgctgctcatgtggtgctgctccaagaccttcgtcgtcagcttctactacctccgcggccacctccaccagacctggtccgtgccccgctacggcttccagtacttcctgccggcggcgaagaagggcatcaaccagcagatcgagctggccatcctgcgggccgacaggatgggcgtcaaggtgctcagcctcgccgcgctcaacaagaacgaggctctgaacggaggcggcaccctgttcgtgaacaagcacccagacctgcgtgtgagggtggtgcacggcaacacgctgacggcggccgtgatccttaacgagatccccagcaacgtgagagaggtgttcctgaccggcgccacctccaagctcggcagggccatcgcgctctacctctgcaggaagaagatcagagtcctgatgttcacggtgtcgtcggagaggttcgtgaagatccagagggaggcgccgccggagtaccagcagtacctcgtgcaggtgaccaagtaccaggccgcacagaactgcaagacttggatcgtgggcaagtggctgtcgccgcgtgagcagcggtgggcgccgtccgggacgcacttccaccagttcgtggtgccgcccatcatcggcttccggcgggactgcacctacggcaagctggccgccatgaggctgcccaaggacgtgcagggcctcagctcctgcgagtacacgatggagcgcggggtggtgcacgcgtgccacgccggcggcgtggtgcacttcctggaaggctggggccaccacgaggtgggcgccatcgacgtcgaccggatcgacgtcgtctggaaggcggcgctcaagcacgggctggcgccggtgtgatcatatcgcatcgtcgagccgcaccgcgcgcgcggtttgttttgcagcggctacctacctagctgcatatgcttgccaggccggggtccagccgccgcggttctgtgtgcatgcatgcaacagcccagcagaccacgggctaccgtgcgtggctaattcttgtactagtactactcctgctgtatgtaccgtgccgatggggcgatgggttaattaaagtcctctcgactacgctacaaaaaaaaaaaaaaaaaggcccctagggccgctggtttaaatcctcaccagaataagaaattaaacacagaggcttaagaaacctcgtgc

SEQ ID NO: 71661 - DNA, 1642 bp, Zea mays
  Clone ID: MRT4577_165359C.1
tgcctctgtacgacgccctcggaggcatgaacaggcagaagttgcagtccttctccctgttcatgcctctgtacgacgccctcggagggaccatcagctccagatcgtgggggctgcagagagaggtcgaccaaggcatgaacgaccgggtgccggacttcgtgttcctggcgcacgtggtggacgtggtgtcgtcgatgcacgtgcctttcgccttccgctcctgcagctcgctgccgtgggccatgcgctcggtgctgctcccgctctggcccgtcgccttcgccttcatgctcctccagtggttcttctccaagaccttcaccgtcagcttctacttcctccgcggccggctccaccagacgtggagcgtcccgagatatggcttccagtacttcatcccgtcggcgaagaagggcatcaaccgccagatcgagctcgccatcctcagggcagacaagatgggcgtcaaggtcatcagccttgctgcgctgaacaagaacgaggctctcaacggcggcggcacacttttcgtgaacaagcacccgaacctgagggtgagggtggtgcacggcaacaccctgacggcggccgtgatcctcaacgagatccccagcagcgtgagggaggtgttcctcaccggcgccacgtccaagctcggcagggccatcgcgctgtacctctgcaggaagaggatcagggtcctgatgctgacgctttcgacggagaggttcctgaagatccagcgggaggcgccgccagagttccagcagtacatcgtgcaggtcaccaagtaccaggcggcgcagggctgcaagacatggatcgtgggcaagtggctgtcgccgcgggagcagcggtgggcgccgccgggcacgcacttccaccagttcgtagtgccgcccatcatcggcttccgccgggactgcacctacggcaagctcgccgccatgaggctccccaaggacgtcgagggactcggctcctgcgagtacacgatggagcgcggggtggtgcacgcgtgccacgccggcggcgtggtgcactgcctggaagggtgggagcaccacgaggtgggcgccctcgaggtggaccggatcgacgtcgtgtgggaggcggcgctcaagcacgggctcacgccggcgtgagcgagcgggcgcccggagcgggagaccgagacggccggcgcgcgcggccccgcccggaaataacgcgtcgtctattcgttgtcgcatggctgttgcgacgggtgggtgggtgtgctaccgagtactactactactaccagctactagctaccatagtccaagactgctgcaagcgcaatgcaacagagttgataggctggttcgcatataccaatactcttatgtacgtacgaatactgcaatattgcacgaggcatgggcttccgttacttatggccaggcctgcgacctagtataaatcgtcatgtcggtctgtactgttcattgagctctaaactggattgaaagtctgggccggaccaactgggcccacccaagcatggtacaaaagcaatagcccgaaaaacgatcggacacacgaaatacatagcgtaattagaactcaattttgcaagcgtcctgaattcctgatagcaggcaacttctttaaatat

SEQ ID NO: 71662 - DNA, 571 bp, Zea mays
  Clone ID: MRT4577_16535C.1
ggggggggggtgggggttttaaaaaaaatttttttttttttttttttttttttttttttttttttttttttttttttttttttttttttttttggacgaggaggaggaccccatttctattattggcaaaaaaaaaaacaaaggggttcaaagggggggcacactcccaacccaaaaaaacaggaaaaacccccaaacaaaagcgcggacaagccaaaccgcttgggaaaactaaaaaaaaccggggcccctaccaggcaaaatgccaaccgaaaagtttaaagttttacatcaaaaaagtcccaaaccataccaaaaaacaaacgggagcaaaaaaaaacgagttcctgacaaaactaacaccaggcgaacagtcacgttaaaactaaacccccgggggggtgaaaaatcccttccatttaatcgcccaacccaaggaacccatttcctttaacacttgcaaaacccaccaaaattttggcccccttttgaaaaaaggcccgaaacttttttttgctaaacccttttaccaagccccaatgggaaaaacaaaactattttccgggtacct

SEQ ID NO: 71663 - DNA, 309 bp, Zea mays
  Clone ID: MRT4577_165360C.1
attttgagcattcagaaacacaccaagcgaattacattagcatcaacctaacaacaatggctaccaagatatgatacctccttgcgcttattgtgcttgatgcgagcgcaacaaatgcgtggattattacacaatgctcacttgctccaagatccattattacacagattctaccaccaactacttgaatgggctgcgaacacccagatgtgcaagcctatacgctacaacaagcaattgcggcgagcggcttactacaaccaatttcctaagtgcaacaactatccttggcacattgaacaatacaaa

SEQ ID NO: 71664 - DNA, 291 bp, Zea mays
  Clone ID: MRT4577_165361C.1
agcaaaaggacatcttgatgaggggaacaggcaatactactttgaaaaatccctagatacagatctggtgtctgaccgatgcttcgatttacagcttgttggagatagtcagcgtgaggagcttccgaagttacctccagtgaggctcaagtccgctctaagctagtcaacatgaactgggaggacaagatcaatcaccatggatctggggccaagcaatctagtgctgatcatgcttttatgattgggtcttatctcgatgttcccattgggcaagagataacatcttca

SEQ ID NO: 71665 - DNA, 359 bp, Zea mays
  Clone ID: MRT4577_165362C.1
tgactttgaatcatgacacaacatagcacaagattagttggttaaggctgtctccagtagatcctcgattttatcccctattctattttctattttaaacttcattatatctatagttttatgtcccatattttacactacctactggagacagtctaaagactgtttgtttgagctagaacttttctaaaaaggtgctactgggattttgatcttgagtagttaatgatagctttttgatgatgctattagtttcctaaacttagaaagctaaaaaagtttaaaaaatcaggcttttcagcttgccatacaaatttaacttttctgatcttcgaaagctaaaccaaaaagctagattg

SEQ ID NO: 71666 - DNA, 302 bp, Zea mays
  Clone ID: MRT4577_165363C.1
aataccgatacctacaactactatagaacgcacaataacccacccgcaacggtgggggggatattctgcttccttatgctcctggctctttctgcaagcgctgctaccacacatacaatccgacaatgctgacaacctccaatagcttcctttcatctaccatacctcttagcagtggcgccttcagtatacgaacaacctattgttcatctctacacgatcgaacaggtgatggcagcaggccacctaccatcatcagtctaggtgctgcaacaaccgtatgtgctattacagccattaca

SEQ ID NO: 71667 - DNA, 300 bp, Zea mays
  Clone ID: MRT4577_165364C.1
cagcctttcttgagaaattcacttgctgaacccactcaagaccctaggtgactaactcacttggtcaggcctttcaatcacaccatcaatttcagtttcagagaagccctatccactctcacccaggaaatctgccctgttgatgaactcttctggttgtacagagaaaacagtgaactctgggtttcccaacctgtctttaaaggcttgccacaggaaggacttcttgcctctgtgatatgtagttgtctatttctagatcctgtatcttcgatctcgagcgggccttgtcaccgatga

SEQ ID NO: 71668 - DNA, 416 bp, Zea mays
  Clone ID: MRT4577_165365C.1
cccacgcgtccgaaaaaaaaaaaaaaaaaaaaaaaaaaaaaaaaaaaaaaaaaaaaaaaggggggggggaaaaaaagggggggggaaaaaaaaaaaaacaaaaaaaaaaaacacgtacatacggggggggccgttttaaaatacccaaacttacttccacttgcatgccacgtcatattttttttttagggccaccaaaatccaattcattggccgcttttttacaacgcaaaaactggaaaaaccctggggttccccaatttaatccccttgcagaaaatcccctttttcccaattggggaaaaaccaaaaaggccccccccgatcgcctttccaaaaattttcacaccctgaatggcaaatgggaccccccctttaacggcccattaagcccggggggtttgggggttaccccc

SEQ ID NO: 71669 - DNA, 546 bp, Zea mays
  Clone ID: MRT4577_165366C.1
gataaactagcgtggtgccgcacgacccctccccttcgcttccttccctagcgacgacgcccaccagacgagatggccccgtagagaaggacaaggccccgccgccgtcgacgaagccgaccaaacccggcgctgctgatcacgatacgaacaactgaagtaccgcctagataaaagaaaatgctcctcactgcggtgtatgctgcagcacgctacctacgacataatggtctcggaggtgcccaaatacaagcagatcaccccttccatcctctccgagcgcctgaggatcgacgcttcccttgctcggaggaacatcaaagacttgatggagcgtgctctcattcgaatgctgtcgctgcactctaggcatgagatctactccagggcaaccgatacataaggatgttgaagagttttagcttgaattgtactgccctctcttgttagacgagatactctgtatagaatgtgccatctttgtcaagagttgccaactgaatgcctgtggggataatgtccaggtgacggcaacattttagagat

SEQ ID NO: 71670 - DNA, 2212 bp, Zea mays
  Clone ID: MRT4577_165367C.1
cattgggtacctcgaggccggccgggaacccgccaaaaaggagggaggggatccccgggaaggaggcccgcaggccgcagccagagcagccgccgttccgtatccgtcccgtctccggcgcggcggcgctgacgctaggggttgccgcacccagcgcggagatgcagcaacgtgcgcgggatggcgagcaacaccgcctgctcgacctcgcagtcgagtccggcttcgaccgcgacctcgccgccagctgcctcgcccgcctcctcgaggtctacggggaggatggtctggatatggttactgtcgacaactgtggcaatgatttccttgcatcactggctgatgccacacaacctactgatgactgggacgatctcaaagggattgagaccgaggcatgtggcaacttgaatgatatgatgatgaagaatgtacctgactgcaatggaggagttgctatagacatcagttatacgtccagagagccaaatttgtcctctcaacgtgctccgaatcatcttgaagctttcaaatttgcctctgatgattcagattttgaaatggacaaccttcctgacaagtcttctagtatgcaaaggcagacacaatcaagaaactctggaatgcagacccgaagctcagcaaaatccacagtgactagggaaaccagcagatatgacccaacgactcccacttcaaatagagagatgcctccagctgcatttcatcaaaggagagaacttctgagctacgagcaactttgttgcctcgatgatgtcaattttgccaatgctgtcatctttggcaacaaaagctttaggcccctgcagtacgaagcttgcagggctgcaatggataaccaagactgtttcgtacttatgccaactggtggtgggaagagtttgtgttatcagctccctgcaacattgcacccaggtgtcactgttgtcgtaagcccgctgctgtcgctgatccaggatcagattgtggcattaacttacaggtttgcagtaccagcagcattcttaaattcccagcaaacttctgctcaggcatctgcagtaatccaggagctaagatgtgggaaaccagccttcaaacttctgtatgttactcctgaaagaattgtcacgaactattcatttatggagaccctaagaggcttagatcagaggggactgctagcaagatttgtgattgatgaagcacattgtgtaagtcaatggggacacgatttccgtccagattaccgtggtctaggttgcctcaagcagaacttccctagggtcccgatcatggctttaactgcgacagcaactgaatctgtccgtaaggacgtcctcggtgccttgaggatccccaacgctgtggtactgaagaggagcttcgacagactgaacctcaactacgaggtaatcggcaagacgaaaactttccagaagcagctgggcgatctcctgaaagagcgcttcatgaacgaatctggtatcgtgtactgtctctcgaagaacgagtgtgcagacactgccaagtttttgagggagaaatacaagatcaaatgtgcgcactaccacgctagcctggcagctcgtcagcgaaccagtgtccaggagaaatggcacagcggggaggttaaggtcatctgcgctaccatagccttcggcatggggatcgacaaacctgacgtgcgttttgttatccacaacacattgtcgaaatcaatagaaagctactaccaggagtccgggagggcagggcgagatgagcttccggcacactgtatcgtcttataccagaagaaagacttcagccgtatcgtgtgcatgttgaggaacggtgagaacttcaggagcgagagcttcagggttgcgatggagcaagctaagaagatgcaggcatactgcgagctcaagaccgagtgccggagacaggcacttctgcagcacttcggcgaacagtacgacaggcgaaggtgccgagacgggcctagcccctgcgacaactgcctcaagacatagtttagggtaataaactatggcgataagaatgccatgacgcttggttatgctctgaacttgtgaggtgtgtgttccacagtacattcgtctgtgtatatgtagcatccatagctcaaacaagtggccgcaactgcactgtgtgtaacgatggtctttgttttcagtggattgtgaggttcatagctttaaaaaaa

SEQ ID NO: 71671 - DNA, 283 bp, Zea mays
  Clone ID: MRT4577_165368C.1
tgctggagatgcccagctcacgccggagcttagggccacacctccgtctccatggccgtcgcagccactgcgcacccttgctacccccttgactgcgtgcgagtgctctccaatgtcgagccccctccatctggtttcgggctgcagcagccgcctcgtcatcatcgcgtagagtatccaccgccgatccatgtagcccctatttggttgtcgttctgctccgtcgatctcctccatgcatgtgcgacacagccgctgcccttcgcgtcagtgtgccgacacg

SEQ ID NO: 71672 - DNA, 610 bp, Zea mays
  Clone ID: MRT4577_165369C.1
tttttgcgcctcacagccttcatttgagaagggaacatgtgggtggtaagcatctttcatgttgacacaaagggctaccccaggtaacaaaggtaccatgatcgcatcatcaattcatcatttgtatgacataataaaacactcttgacaacaaatcaatagccgccttcacaaaacaattgtttgcgttggttctctttatgacatgctgctctttccacggcatgtcatcctctggccccacgtatggcatcatcagaaagatgtcaaggaacgtaagacgtatcccctcgcagagttttccctttggatacgtcgacacaggactgagttaaaccgtaaagttttcccttcatgcttttcgtttgctgcgcttcaggtcgtacacaacacatgcatccgcagcagttttcatctggatgacattggtgacttgtttcactgcccagccaactaatggggaaataaacaccaagataatgatggggctttggttcaggagacctttgcatgcactaagcaagcttgttgacttctcatcagcaaagagaaagaggataatatacaaaacctcacaagaaacacagcaaaaggccatgaatggcctgta

SEQ ID NO: 71673 - DNA, 330 bp, Zea mays
  Clone ID: MRT4577_16536C.1
tgtgattgatgatttgagagggaggctagttaaatttactagtggtctgaagaagaaattcactaaagactagtctggatgaattcagatattaatatgataagttttttctctggtaaaagttatttcagtatgaatcctacccccttgatatatatatttcttgcttcagattagaagaaagagatatgcataaagagtgcctggagttagttcactcatttttttagcagcagtggagctcagataatttgggtcacttttacgtaacattaattactatgggattactaaggtgaaagactattgtttctactgccatgtacaaag

SEQ ID NO: 71674 - DNA, 648 bp, Zea mays
  Clone ID: MRT4577_165370C.1
gaccgaaacgaaatcctcccatcccacatctctcatccgaagttcctctacgcgtggactgactgcctcaacctccgtgtcgcgtcgatagtatccctagcgctgggcttggccgtctgaactccatggacacttctggagagcaatcagatgtggatgcctctgtccctagattgacaaagatgccctacccgctgtgctccgctagcaatggcaaggtcgcacacgttgtctcgtacacgaacgcccctcacaccaccatatctgcaccgcatcggtcaaagccatcatcagatagcagcatcagcatgtgctcagacattgctgcgaacgataacactgtcacgcctgcacagacgcactcaaaacaaaacatggcactatctacacaaaggacaataccttctggaactgacactccggagtgaggtcactgggcaaaaacatcatacagccacctcaggggagatactccaacatcacatatgacgcatgcccatgacaacgttgcaagctacagacgatgtcttcgatctcacactgcatgactcttatgatgcttgcataggatgcttcctaacactcagctacactgctcttctgaaagattgctctctaatcacaatgtgatcctttgcagcgaatgag

SEQ ID NO: 71675 - DNA, 315 bp, Zea mays
  Clone ID: MRT4577_165371C.1
taccactccacagtcagtagcaagagggatagagcaaggcccccccccccctggttgctctaaggggggggtgcggctatcaaggcagcgcgttcacacctaggtatttgttcctcgtgagcccgtcgatcatcacactcaccaaccaccacggccagttgctgacgggcaactactccgtcaaccttctctggtacgggcgtttcacgccggcgcagcgcgccgtttgggccgactttatactcttcctttcggggacagggcaagggtcggggtccgtggcgtaaacatgttctgcttccagtccttgatcgc

SEQ ID NO: 71676 - DNA, 942 bp, Zea mays
  unsure (1)..(942): unsure at all n locations
  Clone ID: MRT4577_165372C.1
catttccgacgaaggccttgtttacatcagtgcnaaactgcgngaaagcttgtagagctcgacctataccgctgcagcgctgtaactgatgacgggctggcagccgtagcgagcgggtgcaagaagatgaggatgctgaacctatgctactgcacccaaatcacggacggcggtctgaagcacgtaggcggtctggaagagctggcgaacctagagctgaggtgcctggtgcgcgtcacgggcgtcgggatcacgtccatcgccgtgggttgcagtagcctggtagagctggacctcaaacgctgttactccgtggatgatgccggcctgtgggctctctcgtgtgtgtcccagaaccttagacagcttactgtgtcctactgccaagtgactgggctggggctgtgccatctgctggggtcgctgaggtgcctccaggacgtgaagatggtgcacctctcctgggtctccatcgaagggttcgagatggcgctgcgggccgcgtgtgggaggctgaagaagctgaagctgctgggcgggctgaggtccgtgctctccaccgagctgctcctgacgctgcaggcctgcggctgccgcgtccgctgggtcgacaagccgctggtctacaagggatgagcatgagcatgagcttgagcgggcctctggccaatcaaggagactgagacatgcatcattgagagagcagagggaagacgacgctggtcattagcggtgtgccctgcttcctttcttgcgacagtacgtagaagagtagctgcgatgcgagtctgtctgtctgtaacagtaacacctgtccttcagtgcaattactgtctaaactttcggagtttccgcaatatgatgactgcccatcttgtaagctcatttcttgagtggatagcagacacagcacggtctattccaataaactatagatagatc

SEQ ID NO: 71677 - DNA, 754 bp, Zea mays
  Clone ID: MRT4577_165373C.1
ccatctatagataccgcatgaggacttttacgctactgtcctcctatgtctgcatgcacgatggcgatctcatcgacctcctatgccttgcctacccctatttaggtgttcctccttcggcaagtcgccgatctccatgtctccaccgtggtgaaactcaaagcggcggcgtcctcctccccctgagacagcccctacagcccaatgtacctcggcccgttctcccgttagccccacgagataactcaccggcgaaatcaccggtgactacccatgcaacacagccagaatgtccgccgaccgaaatagcttacaagagaactgcggagctgagaggcgatacactcttcgctgaagccttgctctttcgcagctcggctgtcaataccatgaactgctctcccctcaaggccgccaggtccaaggacgcgattgacctcaggacgaatcgcagatcaatcgagaccatccgattggaatacctcctaaagcgcagtgtgattcacgttaagatcatcctcgccatctggtctcgcctgtctggctcatgggctgcctgccagctgtatggcattgccgatgaacgatatcattatatttcctcccgctgtatactggtgtaccatatcaatcaccgcaggctgatcgaggatgcccatttattcttctagctcacgtggaaggacctctggatcgatcgcgtctccatgtcacaccatgtgatcaatgcttcgaccggtccatcgtcaccggc

SEQ ID NO: 71678 - DNA, 449 bp, Zea mays
  Clone ID: MRT4577_165374C.1
ttttgggggggaaaccattaaacccatgggggttatcatcgggtcattggaataagtgaatcaaacgaatctgccttggcctactctgatctttcaagacatagaaagacacgcacgaacatgcaccgtaagaacacttgacgagagtatccaaagtaataagcattcacatttacaaggaacacggcaactaacaagcaatggaaagaacaggattccagtgcctgggatggcaaccactttacaagattcttcatcatatttacctgtctacgcgcacctaacactcttggagtccaggccatggaacaagtgatccacactttcattttgcgcttcacgcccagtaaggagaagagcttacccgacccttcagggggatcttgttgaaaaccaatctgcctggaggtttcgaacctgctgcccttgaaacaatttttccgttattt

SEQ ID NO: 71679 - DNA, 195 bp, Zea mays
  unsure (1)..(195): unsure at all n locations
  Clone ID: MRT4577_165375C.1
gntgcggtcgtccctacagccgcgtcgcaccgcatacgcattactaacgattacgaagctctatgctacacgggggacctggnganaaatacccaaaccgtgancgccgagtaacagcgaggccgtacgagaaggccaggngacaagtancgagccctacatacgccgagaagagctgcgcacccctacatgntc

SEQ ID NO: 71680 - DNA, 205 bp, Zea mays
  Clone ID: MRT4577_165376C.1
atattagggtattttttctttgtggtggggaacccaaaccaggggggccaattctatttacaacatttgtttctctgttgggggcctcaaaaaatacattgataccaaaagttaccctgaatcaacaaaaagcaagagctttttacagcatataaaaaaatgcttcttataaacattctaagaaagtgccaatttttggcagttt

SEQ ID NO: 71681 - DNA, 580 bp, Zea mays
  unsure (1)..(580): unsure at all n locations
  Clone ID: MRT4577_165377C.1
caaccattgcaaactcattaactttagtcaagaaaaacattagcagcctgatcgatcttagagatagatagttatatcccaaaaaagctgagaccgactcaacgaaagaactcagcatccacacatttttatccttccactcagctgcggacaacgttccttctatgctctattatggattgactgttttccgaaatcacactagtgaatgtgcatctgtacttgttcccaaactataaaactgacactctacctattggtgcaaagccacaatggcgacactatatgaccactgatcgcgggctgtatctcattacgcgccccttacttattgggccactagacaccagaccgtccacattggcgtcatcgatctgatttgcttgatgacccaacacccaagcacatgcgtaattgtcttcccagttaatgccaaaggaacaacactggtgtcagacttgtccatctcttgatagtggctctcatgcagccattggattactcatccttcaaaccgngaccaatgacacttattgtttcttctacaatgagtgaaagcttgggactctcgctcaataga

SEQ ID NO: 71682 - DNA, 461 bp, Zea mays
  unsure (1)..(461): unsure at all n locations
  Clone ID: MRT4577_165378C.1
ggacctttgggctgatttatgtgcttgtttatgtgcttgtagatcttctcttgtctcacatttctttcattctgttgctgttgctggactcgttacgggggtgcataagcatgctctggagccacggagaaggaagtaacttgatgcgacgtggcctgcctaatgtgcgtgtcgccgggagcataggtagtagttggttactgcttgttctataaggtttatttgttttgataaggtttgttgttctggtcctaaggttaagtaggggcacgccgcccattgtgcttgcgcgaggtgcggcggtaggaagaggttcgcgttgaagggcaccgctcacggtaagtttaagtattagggcactatttagtctaagccttagaggaataagagactcgccgtcgaggaatgggtcggatgaaagtccggcggatctagggcctctaatcntcatcgggcgaacg

SEQ ID NO: 71683 - DNA, 475 bp, Zea mays
  Clone ID: MRT4577_165379C.1
gctaaatcagtaagtgtcgctaaactttttggctaatgtcttagagctgctcttacatttgtaatcgagaggtgcatcgtgtgtggtttccaggatggggctggggacctggactactcggcgtcgtgctcggcgtcggcgtcgggaggctccacctccaacttctccgggccgtccagcggcagcggcagcgggtctgccaacaaggtggactctccgattctcggcctcgtcaccgaggccgacagcatcacaagaacagcccggccgcagcacagccatacggcaacgggacaataacagtgtgacactcacgaatatacttgctcgcccgtcttacaccattgtttgacagtttttacaatgcttaactttttaggtgagtggttggttgctgggaatgtacagtatttgggtcaaaattcaaaatgtttcagaggcttaatccaatgaaacaggccctggttttttaaaa

SEQ ID NO: 71684 - DNA, 479 bp, Zea mays
  Clone ID: MRT4577_16537C.1
aattataaaataattcctattttattacccccgaaaaaataaaaatgcccttaaattccaagggccccttccccttgaataaaaccaaaagtcccaccctgatgtgcccataattccccgaccccgtaaccagccccagaatcccgtccatctttttatagccccataatccaccccccccaaaaaccatttatgccctttccaaccaactccaataatgccccaaaacatcatgggtttttaagccaattcatattaaagccggtccctccctttatcttaaaatttccctttgtccccaacctttccaaaaaaaaccttcgccccttccttttaaaaaaacctttcaaaagggttctttttaaaatcttcggttccaaaacatcccccaacaaaaccttctattttaaaaacttttccaaatccctctcaacctcaatcccccaattcgttggttcacaaaattttttttacaaaaa

SEQ ID NO: 71685 - DNA, 232 bp, Zea mays
  Clone ID: MRT4577_165380C.1
cggacgcgtgggcgcatattgcaccaagaaatccatcgcgaggccatcaacgggggggttaatggcgtccttgtgtatctgcaagcaccgagcgctcatgctctgagcaggcggtctgctctcgaagctctcgactgccagcgccagcgccgggacctactgcctgccaggacgggccatgccgtacatcccgattgcgcgctgcccgctgtgcgtgaccagtcggacctgc

SEQ ID NO: 71686 - DNA, 299 bp, Zea mays
  Clone ID: MRT4577_165381C.1
catcctgcagcgtagtagctcggattcgctcacactgtacaagggacatcactcgctactgagcactcatgggtttgaggagaagtaccaggaggcgttggccaagggagatgttacagcccagatagctcttcagcctgcactgaagttcaatggtggtggtcatatcaatcatagcattttctggacaaacctcagccctaacggtggtggagaacccagaggggagttgctggaagccatcaaacgtgactttggttcctttgttaagtttaaggagaagctgacggctgcatctg

SEQ ID NO: 71687 - DNA, 243 bp, Zea mays
  Clone ID: MRT4577_165382C.1
aagggttcagcccatcgcaactcccgggctatccgcccacctcattaagaaggtgatgcccgtcgtctttattcgacagagcaagccgaggcgccttatggactgggtgtacatgttcttttaagataatgcttgagtgattgtgaatgccaagggtgagatgaaaggttccgctatcactggacctattgtctatgagtgtgctgatctttggcctaggattgctagcgcatcatacgccat

SEQ ID NO: 71688 - DNA, 497 bp, Zea mays
  unsure (1)..(497): unsure at all n locations
  Clone ID: MRT4577_165383C.1
gtgcggcgctcgaggctgnncggttctggacctctcagagtttggcgagcagaacatactgagacgacatgtagaagacgactgactgcctcgagcagcagagatcagggaggccgagggcgggatgacgatccggctcatggtgttcgtctacaaacagggacaaacgtgactgacaaagcactacgaaggcaccggcgtcgaacaaagatcggccttcgagggtcaaagattggcaggatgccccgttccaacagaacggccgaggtgcactttcgcagcacatcaagacgggcaacgacggactgggcttcgacaggctggtgagcgaccaggagcagatcgccatcgagaaaaactacacgcctgccatgtaagcgaacaaggtcgccctacacaaggaaatgtaccccgcggtggtgttccaaccagcttaccaccaactaagcgcgtcctatcgtttgatccggcgacatgacctatttatggcgcccctg

SEQ ID NO: 71689 - DNA, 762 bp, Zea mays
  unsure (1)..(762): unsure at all n locations
  Clone ID: MRT4577_165384C.1
gctatgggaatacacgcttgtatgttggaagattgtctccccgcacccgttctcgtgacctagaataccttttcagcaaatatgggaggnttttcggtgtttttacacaaccatggaggtgtggtggaagggtgcccttgatggaattggtggccatagttccaatgtttgtggaggactttggtgaagggcgcccttggtaattcgagaagtggagttgaagcgtgactatgcattcattgaattcagtgacccccgtgatgctgatgatgcacagtacaacctatatggcagggacgtcgatggaagccgcattattgttgaatttgctaaaggggttcctcgtggttctggtggttcacgtgattacaacggaagaggaccttcaccaggaacaggccgttgttttaactgtggagttgatggtcactgggcaagagactgtcaggctggtgactggaagaacaaatgctaccgttgtggcgaaaggggccatatagaaagaaattgccagaacagtccaaggaacctcaggcgtgagagaagctattcacggtctctatccccacgccgaggacggggccgcagccggagctacagcagaagccggagctatagccgatccagatccccgtctggatctcctaggggtggacgccgagaccgtgatgagaggagatcaaggagtcttatctacagcaggagcgcaagccctaggcgttctgtgtcacctgtaaaggaaaaagagcgcaaccgcacacc

SEQ ID NO: 71690 - DNA, 1126 bp, Zea mays
  Clone ID: MRT4577_165385C.1
cccaccccgcatcgtcggaaccctccaagtccaaaccctctccccgccgcatcgccgccgccggaagcgcctccctcgatccagatccaggagatatgcctcgcaatgatgatcgctatgggaatacacgcttgtatgttggaagattgtctccccgcacccgttctcgtgacctagaataccttttcagcaaatatgggaggtttttcggttttttacacaaccatggaggtgtggtggaagggtgcccttgatggaattggtggccatagttccaatgtttgtggaggactttggtgaagggcgcccttggtgtaatcttattgactgttgtagatgatgaagttgcaagttaatgtatttgagtacttcgactcacgtcagcttattgtttgtggcaaccatttccgcagaattcgagaagtggagttgaagcgtgactatgcattcattgaattcagtgacccccgtgatgctgatgatgcacagtacaacctagatggcagggacgtcgatggaagccgcattattgttgaatttgctaaaggggttcctcgtggttctggtggttcacgtgattacaacggaagaggacctccaccaggaacaggccgttgttttaactgtggagttgatggtcactgggcaagagactgtcaggctggtgactggaagaacaaatgctaccgttgtggcgaaaggggccatatagaaagaaattgccagaacagtccaaggaacctcaggcgtgagagaagctattcacggtctccatcaaggagtcttagctacagcaggagcgcaagccctaggcgttctgtgtcacctgtaaaggaaaaggagcgcagccgcacacctgatggcagtaggagccccagcccaagggacaaggtgagcccaccaccaaaggataatggtgcccacaatggctcggaccgtgaagacagccctgggggcagggagatgagcaagaggagtcggagctcgtctgatggctaccgtagccctgtgggcaatgggcgcagcccgagccgtagcccaagccccaaggtcaacaatggtgatgacccaagccccagggcaacaatggtgacgacccaagccccaagggcaacaatggtgatga

SEQ ID NO: 71691 - DNA, 453 bp, Zea mays
  Clone ID: MRT4577_165386C.1
aaaaaaaatatataaaaatataaaaactaatttttaattttttaaaaaaaaaaaaaaaaaaagaaataaaagaaataaaaaaaaaaaaaaaaaaaaaaaaaaaaaaaagggggggccctttttaaggatccaaagcttcctaccccggcctgccaacgtaaaattttttttttggggcccccaaattaaaattaacggcccgtgttttaaaaaccttggactgggaaaaacctggggttacccaaataaaatgcctgtgaaaaaaatccccttttcccaaggggggaaaaaaaaaaaagggccctaccaattcccctttccaaaaattggcccatcctaaagggcaatgggaacccccctttaacgggccaataaatcccggggggggggggggttccccccaggggaccctttacatttgcaaggccctaagcccccgttcttttgtttttt

SEQ ID NO: 71692 - DNA, 1504 bp, Zea mays
  Clone ID: MRT4577_165387C.1
ggtttatgaaggttttgtacctgaaaaaaaccacatatcatcaacaaaataggaaaggaccctatattgttgatgatatgtggtttatgaaggttttgtgttgcttgaagtcattctgaggtttttgtggatggggtcatacaagtcttttttcttggtgtatgctctgttacatcactaagcacttcatagatgtttgacctccgggcctgtttgacttgaatgatcttgttgaaggttttcggttttttacccaaccatggaggtctgtggtggaagggtgcccttggtggaattggtggccattgttccgatatttgtggaggactttggtgaagggcgcccttggtgtaatcttattgactgttgtagatgaagttgcaagttgatgcatttgagtacttgactcatgtcagcagcttactgtttgtggaaactatttgcgcagaatacgtgaagtggagttgaagcgtgactggaagaacaaatgctaccgctgtggtgaatcgggccatatagagagaaattgccagaacagtccaaggaatctcaggcgtgataaaagctattcacggtctccatccccacgtggtggacgtggccgcagccggagctacagcagaagccggagctatagccgatccagatccccatctggatctcccaggggtggacgccgtgaacgtgacgagaggagatctaggagtcttagctacagcaggagcgcaagccccaggcgttctgtctcacctgcaaaggaaaaggagcgcagtcgcacacccaatggcagtaggagcccaaggagccccagcccaagggctgaggtgagcccaccactgaaggataatggtgcacgcaatggctcagaccatgaaggcaaccctggtggtggagagaacagcaagaggagtcggagcccatctgatggctaccgtagccctgtggccaatgggcgcagcccgagcccgagggacgatcggagcccaagccccaagggcaacaacgaagatgacgagcgccgtggttcacctagaggaagtcagtcccccctgaactgagaaattctgatcaaatttgggccgcacgattcggttgtaactgttatattttagtttgagacaacaaactgtatttgctcatttctcatacagtcaggtttatgctttttgagctagaaaacatgtgtaagaatttgttaccttcaagctattcctggtttgtgatatggtaatacttgaactatttagcttgccaaatctgaatacttttaactatcaaaaaaaaaaaaaaaaaactcgagtttgtaggcttcgttttccttcatctaattgtcgtcgtagtcgtcgtcgtcgcgcaattaattaatggagtaagtaggaggatttgatgtgctgtgttcggttcagttcagctcccggtgctgtcttgttcgtatgtgctggatggatctgtctgttgtaagctaaactagggaggcttagttctgtgttggtccgttcctttt

SEQ ID NO: 71693 - DNA, 816 bp, Zea mays
  unsure (1)..(816): unsure at all n locations
  Clone ID: MRT4577_165388C.1
gggtacctcgaggccggccgggcccacccggatcgtcggaaccctccaagtccaaaccctctccccgccgcatcgccgccgccggaagcgcctccctcgatccagatccaggagatatgcctcgcaatgatgatcgctatgggaatacacgcttgtatgttggaagattgtctccccgcacccgttctcgtgacctagaataccttttcagcaaatatgggaggtttttcggttttttacacaaccatggaggtgtggtggaagggtgcccttgatggaattggtggccatagttccaataattcgagaagtggagttgaagcgtgactatgcattcattgaattcagtgacccccgtgatgctgatgatgcacagtacaacctagatggcagggacgtcgatggaagccgcattattgttgaatttgctaaaggggttcctcgtggttctggtggttcacgtgattacaacggaagaggacctccaccaggaacaggccgttgttttaactgtggagttgatggtcactgggcaagagactgtcaggctggtgactggaagaacaaatgctaccgttgtggcgaaaggngccatatagaaagaaattgccagaacagtccaaggaacctcaggcgtgagagaagctattcacggtctccatccccacgccgaggacggggccgcagccggagctacagcagaagccggagctatagccgatccagatccccgtctggnatctcctaggggtggacgccgagaccgtgatgagaggagatcagggagtcttagctacagcaggagcgcaagcccta

SEQ ID NO: 71694 - DNA, 453 bp, Zea mays
  unsure (1)..(453): unsure at all n locations
  Clone ID: MRT4577_165389C.1
attaggggggggggggggttttatataaagcaaaaaaattttgtaaggaaaaggacccctgtttattgttacatgacaaagggggaccccccaggggggctaaattataaacagaccccctgtttttacatgacaaatccaaaaaagcccctgccttggatatccttacccggaaagggccctggtgtttaaaacaaagagggccccccccccaaggatcccaaggggggggacggcccaaataaaaaacccaggggttccacccacgaaaacctccccggggggaaaacaaccatccccgttgaaaaaggggctgtatccggaaacgttcgccccgaacttgtgaaaaaactgggacacccccttgcccttgccctttttcccgtgggggtnaacgtcaacgggaaggccacccccaatcccgaaggggttgggggtcttaatctttttttt

SEQ ID NO: 71695 - DNA, 287 bp, Zea mays
  Clone ID: MRT4577_16538C.1
tagtcccggcggctgggaggacggaacacgaagcacggatcttctacttccacagcatggaccacggcggcaggaggaggagcggcgcccgcgcggtggggggcggccagccgccgtcgccgcctcccaaggtgtaccgcgcggagcccagggactcctgtgtagctgtgtttgaggctcacgggcgccggtacgcccgccagcgccttctccgcgacggggccggggagcctgtcccctcaccagagggtgccggagacgccggccatggccggggcgccgcccgc

SEQ ID NO: 71696 - DNA, 282 bp, Zea mays
  unsure (1)..(282): unsure at all n locations
  Clone ID: MRT4577_165390C.1
cgactacacaggcagagacctcgcaccccccttcgagaagggatctattttttttctctcctctncctcctcctgcttatgccaagaaataacagccacacggcacccactcgccgtggctgcgaccaccactaatacaacatcaccatcagctactacccaaagccgccgcgacccctgcagacggcgtgcgtaaccaccacagccggctacctagggtaggcgatcgccaagctcctgctagagaggagctacaccgtccgcccaaccgcacgcaaacct

SEQ ID NO: 71697 - DNA, 1396 bp, Zea mays
  Clone ID: MRT4577_165391C.1
cttctcctccgcgccgccacagccgggcgcgcctctcgatcgagatccaggagatatgcctcgttatgatgatcgccatgggaatacacgcttgtatgttggaagattggcccctcgcacccgttcccgcgacctagaatatcttttcagcaaatatggaaggttttcggttttttacccaaccatggaggtgtggtggaagggtgcccttgatggaattggtggccattgttccaatgtttgtggaggactttggtgaagggcgcccttggtgtaatcttattgactgttgtagatgatgaagttgcaagttaatgtatttgagtacttcgactcacgtcagcttattgtttgtggcaaccatttccgcagaattcgagaagtggagttgaagcgcgactatgcattcattgaattcagtgacccccgtgatgctgatgatgcacagtacaacctagatggcagggaagtcgatggaagccgcattattgttgaatttgctaaaggggttcctcgtggttctggtggttcacgtgattacaacggaagaggacctccaccaggaacaggccgttgttttaactgtggagttgatggtcactgggcaagagactgtcaggctggtgactggaagaacaaatgctaccgttgtggcgaaaggggccatatagaaagaaattgccagaacagtccaaggaacctcaggcgtgagagaagctattcacggtctccatccccacgccgaggacggggccgcagccggagctacagcagaagccggagctatagccgatccagatccccgtctggatctcctaggggtgaacgccgagaccgtgatgagaggagatcaaggagtcttagctacagcaggagcgcaagccctaggcgttctgtgtcacctgcaaaggaaaaggagcgcagccgcacacctgatggcagtaggagccccagcccaagggacaaggtgagcccaccaccaaaggataatggtgcacacaatggctcggaccgtgaagacagccctgggggcagggagatgagcaagaggagtcggagcccgtctgatggctaccgtagccctgtgggcaatgggcgcagcccgagcccgagggatgaccgtagcccaagcccaaaggtcaacaatggtgacgacccaagccccaagggcaacaatggtgacgacgagcaccgcggttcaccaagaggaagtcagtccccctgaactgaaaaactccccgtgcaatttggggagcagtgtgcctgatttgagaaaacaaactgtattttgccatttctcagacttgtgatctttttgagcaagaaaactcggtgtaagaatttgttgccctcgggtgtaagacagatttgtggtatttgagcttttcatcctgcc

SEQ ID NO: 71698 - DNA, 1201 bp, Zea mays
  Clone ID: MRT4577_165392C.1
cattgggtacctcgaggccggccgggaccaaatccttctcctccgcgccgccacagccgggcgcgcctctcgatcgagatccaggagatatgcctcgttatgatgatcgccatgggaatacacgcttgtatgttggaagattggcccctcgcacccgttcccgcgacctagaatatcttttcagcaaatatggaagaatacgtgaagtggagttgaagcgtgactatgcattcattcaggaattcagtgacccccgtgatgctgatgatgcgcagtacaacctagatggcagggaagtcgatggaagccgtattattgttgaatttgctaaaggagttcctcgtggttctggtggttcacgtgagtacatgggaagaggacctccaccaggaacaggtcgttgttttaactgtggaatggatggtcactgggcaagggactgcaaggctggtgactggaagaacaaatgctaccgctgtggtgaatcgggccatatagagagaaattgccagaacagtccaaggaatctcaggcgtgagaaaagctattcacggtctccatccccacgtggtggacgtggccgcagccggagctacagcagaagccggagctatagccgatccagatccccatctggatctcccaggggtggacgccgtgaacgtgacgagaggagatcaaggagtcttagctacagcaggagcgcaagtcccaggcgttctgtctcacctgcaaaggaaaaggagcgcagtcgcacacccaatggcagtaggagccccagcccaagggctgaggtgagcccaccactgaaggataatggtgcacgcaatggctcagaccatgaaggcagccctggtggtggagagaacagcaagaggagtcggagcccatctgatggctaccgtagccctgtggccaatgggcgcagcccgagcccgagggacgatcggagcccaagccccaagggcaacaacgaagatgacgagcgccctggttcacctagaggaagtcagtcccccctgaactgagaaattctgatcaaatttgggccgcacgattcggttgtaactgttatattttagtttgagacaacaaactgtatttgctcatttatcatacagtcaggtttatgcttttgagctagaaaacttgtgtaagaatttgttaccttcaagttattcctggtttgtgatatggtaat

SEQ ID NO: 71699 - DNA, 1620 bp, Zea mays
  Clone ID: MRT4577_165393C.1
cggccgggctctcccaaatccttctcctccgcgccgccacagccgggcgcgcctccccgatcgagatccaggagatatgcctcgttatgatgatcgccatgggaatacacgcttgtatgttggaagattggcccctcgcacccgttcccgcgacctagaatatcttttcagcaaatatggaaggttttcggttttttacccaaccatggaggtctgtggtggaagggtgcccttggtggaattggtggccattgttccgatatttgtggaggactttggggtggccattgttccgatatttgtggaggactttggtgaagggcgcccttggtgtaatcttattgactgttgtagatgaagttgcaagttgatgcatttgagtacttgactcatgtcagcagcttactgtttgtggaaactatttgcgcagaatacgtgaagtggagttgaagcgtgactatgcattcattgaattcagtgacccccgtgatgctgatgatgcgcagtacaacctagatggcagggaagtcgatggaagccgtattattgttgaatttgctaaaggagttcctcgtggttctggtggttcacgtgagtacatgggaagaggacctccaccaggaacaggtcgttgttttaactgtggaatggatggtcactgggcaagggactgcaaggctggtgactggaagaacaaatgctaccgctgtggtgaatcgggccatatagagagaaattgccagaacagtccaaggaatctcaggcgtgagaaaagctattcacggtctccatccccacgtggtggacgtggccgcagccggagctacagcagaagccggagctataggtatgctgaggaaaggaaacccctggtgttaattctctataggctctttcgagtgtgttagttgtttttttgttcttttttatctttcatttccgtttgtaagccagcttgtgttaacaatcctcctattacactcagccgatccagatccccatctggatctcccaggggtggacgccgtgaacgtgacgagaggagatctaggagtcttagctacagcaggagcgcaagccccaggcgttctgtctcacctgcaaaggaaaaggagcgcagtcgcacacccaatggcagtaggagcccaaggagccccagcccaagggctgaggtgagcccaccactgaaggataatggtgcacgcaatggctcagaccatgaaggcaaccctggtggtggagagaacagcaagaggagtcggagcccatctgatggctaccgtagccctgtggccaatgggcgcagcccgagcccgagggacgatcggagcccaagccccaagggcaacaacgaagatgacgagcgccgtggttcacctagaggaagtcagtcccccctgaactgagaaattctgatcaaatttgggccgcacgattcggttgtaactgttatattttagtttgagacaacaaactgtatttgctcatttctcatacagtcaggtttatgctttttgagctagaaaacatgtgtaagaatttgttaccttcaagctattcctggtttgtgatatggtaatacttgaactatttagcttgccaaatctgaatacttttaac

SEQ ID NO: 71700 - DNA, 2317 bp, Zea mays
  Clone ID: MRT4577_165394C.1
tcctttccccaccccgcatcgtcggacaccctccaaagtccaaaccctctccccgccgcatcgccgccgccggaagcgcctccctcgatccagatccaggagatatgcctcgcaatgatgatcgctatgggaatacacgcttgtatgttggaagattgtctccccgcacccgttctcgtgacctagaataccttttcagcaaatatgggaggtaagcatcacattatatgcacatagaactattctgaaactcagagtgtgctggcgtgctgctttttgttatgtggtcggacaccagttatgctctactacctccgtttttatatatttgacgccatacaattccacttttacatgccgacgtcaaataaaaatgaacggagggagtagtatatatcatgagcacgtgatgttaactctgcatggttaaattttgtggtacacaactacacatcaatccagatataaaatacaatagcaagctaggggctttcctatcgtgttcaaaaaaaactcgacctgtgggggtaagaccgtctgtacaatattatattaagaagaccttctcacacaggtcaagaagaccttccacgcaggtcgagaaaacctctaaactcctgccccaccacccccacccatacacaatggcaccgtagcccaagtgagaacgaccgggccaggcctgtgctttggcttgggacaggcgaggggatgttttaacttttaaccacagcctgaaaattcgctcccacggggagtcaaacctagaacctgacaagtgctactcagaccacctaaccaactcgcctgttcataataggtagtttatgaaggtgttgggttttgtgatgcttgacatcattttgaggtttttgtggatggggtcatacaagtcttctgattttattggtgtatgttctgttacatcactaagcacaaaataaatgtttgacctgggcctatttgacttgaatgatcttgttgaaggtttttcggttttttacacaaccatggaggtgtggtggaagggtgcccttgatggaattggtggccatagttccaatgtttgtggaggactttggtgaagggcgcccttggtgtaatcttattgactgttgtagatgatgaagttgcaagttaatgtatttgagtacttcgactcacgtcagcttattgtttgtggcaaccatttccgcagaattcgagaagtggagttgaagcgtgactatgcattcattgaattcagtgacccccgtgatgctgatgatgcacagtacaacctagatggcagggacgtcgatggaagccgcattattgttgaatttgctaaaggggttcctcgtggttctggtggttcacgtgattacaacggaagaggacctccaccaggaacaggccgttgttttaactgtggagttgatggtcactgggcaagagactgtcaggctggtgactggaagaacaaatgctaccgttgtggcgaaaggggccatatagaaagaaattgccagaacagtccaaggaacctcaggcgtgagagaagctattcacggtctccatccccacgccgaggacggggccgcagccggagctacagcagaagccggagctatagccgatccagatccccgtctggatctcctaggggtggacgccgagaccgtgatgagaggagatcaaggagtcttagctacagcaggagcgcaagccctaggcgttctgtgtcacctgtaaaggaaaaggagcgcagccgcacacctgatggcagtaggagccccagcccaagggacaaggtgagcccaccaccaaaggataatggtgcccacaatggctcggaccgtgaagacagccctgggggcagggagatgagcaagaggagtcggagcccgtctgatggctaccgtagccctgtgggcaatgggcgcagcccgagccgtagcccaagccccaaggtcaacaatggtgatgacccaagccccaagggcaacaatggtgacgacccaagccccaagggcaacaatggtgatgacgacgagcaccgcggttcaccaagaggaagtcagtccccctgaactgaaaaactccccgtgcaatttggggagcagtgtgcctgatttgagaaaacaaactgtattttgccatttctcagacttgtgatctttttgagcaagaaaactcggtgtaagaatttgttgccctcgggtgtaagacagatttgtggtatttgagcttttcatcctgccaaaagctgaatattcattcaattgccaagtttctcgagtttaagaaaaaaaaaaaaaaaaaaaaaaagcttgtc

SEQ ID NO: 71701 - DNA, 252 bp, Zea mays
  Clone ID: MRT4577_165395C.1
cggaatcccgggcccgttttggaggacccaggcttccgtccccttgcttgcgacttattagtttttttatggggtaacctaaatcgaattgattgcccgtcgttttcgaccgtcttacctgggaaacccctgccgttccccaccttaatcgcctggcagaccatccccttttcgccggttggcgtattagcgaaagggcccgaaccgatcgcctttccaaccagttgcccagcctgattggcgattgggccc

SEQ ID NO: 71702 - DNA, 438 bp, Zea mays
  unsure (1)..(438): unsure at all n locations
  Clone ID: MRT4577_165396C.1
cccgggncgacccagcgnccggggctncttctncggctngggcgggggcggagggggagggaaacaacagaagcacggcgccggcgcccccggcaaggcgcccaagcaagggaaggccagcggcaacgggcacggccagggcgggcacggaggcggaggccanggcgggcacggcggcggcggagggaacgggcacgggcagaagcaggccgncngncacggaggcggaggccaaggcgggcacggcggcggaggcaagccgggnaagaaaaagcacgncaagnncgacgacanggacanggacagggacgacgacnncgacgaccnggacagggacgagccggcccggcggcacgcgcacgcccacgggcacgggcacgggcacgggcaccggcaccgngacgggaagccgaagaaacgcaggacgacaaacacccc

SEQ ID NO: 71703 - DNA, 1229 bp, Zea mays
  Clone ID: MRT4577_165397C.1
cggccgctcgaggcggcgggcgactcggaactcggaaatagttctccatcccaagcttctcttctcccttctcttctcctctcgcgcgcgttgcctcgaaccggaaggaacagcgtccattccattacagtagagcttggtgtttgagagacgatcaatccgtcgtcgaccaatggatccatgggtcagcagccagccttcgctgagccttgacctgcacgtcggcctcccgccgatggggcacccgcacagccaccaccaggcggcgccgatggtcgcgctggccaagcccaagatcctcgtcgaggagaacttcatgcagctcaagaaggaccctgaggttgcggttcttgagtcggagctacagcgggtcagcgaggagaaccggcggctgggcgagatgctcagggaggtggcctccaagtacgagaccctgcagggccagttcaccgacatggtcacggccggcgcccacgccggcggcaataaccactacaacaaccagccgtcctccgcgtcggagggcgggtcggtgtcgccgtcgaggaagcgcaagagcgaggagagcaacggcacgccaccgccgtcgcaccagcagcagcagcagcactacgccggcggcctcgcgtacgcggcggcgccggaccaggcggagtgcacgtccggcgagccgtgcaagcgcatccggggaggagcgcaaacccgtcatctccaagcgctacgtccacgccgacccctctgacctcagcctcgtggtgaaggacgggtaccagtggcgcaagtacgggcagaaggtgaccaaggacaacccgtgcccgcgcgcctacttccggtgctcgctcgcgccgtcgtgcccggtgaagaagaaggtgcagcgcagcgcggacgacagcgccgtcctggtggccacgtacgagggcgagcacaaccacgcccgcccgccgcagcacgacggcgccgccaagaggtcgtccgcgccgccggcgggcgaggccgcgcgaccgccggcgccactgccgctgcagaagcaagaggccgggccgtcgtcggaggtcgcgaggaagaacctcgcggagcacatggcggtcacgctcacgcgggatcccgggttcaaggcggcgctagtcagcgcgctctccggccggatctttgacaagggattataggttaataatagacgaacatgacgattaattgatgaatacacagccatttttatttcaccatgc

SEQ ID NO: 71704 - DNA, 374 bp, Zea mays
  Clone ID: MRT4577_165398C.1
aaacaatctctgttaccatggagtattgttttgtcctaaaaaaaaaaaaaaaaaaggggaaattattataaaaaaaatagggcttccattttaaaagaaccatatattatttaccctaacttgccccgccgttcttgctgttcctgctttctttcgttcacttcctccgccgttgtttttctattgcgtcacctgaaaccccttggctgtcccccttttactccccttgcactccttaatccttttgcctcctccccttttttcgctttggggctcctactcctctttccttcccctctcttttttgccctttttggccctctcctttccccccttttttaccgttgcttttccctattggctatttttactct

SEQ ID NO: 71705 - DNA, 213 bp, Zea mays
  Clone ID: MRT4577_165399C.1
tcgcgtactatatttcttacttgtatgccaagtcgcctccttccgatacgcgtacccatcctcgccaagcccacagcttttagatttgttaaacatatgtcttcatatactgacaagaagcttattctgaaacgactagagcttatatacagagtatcctatggagctttattggaaaaaagaatctttgagataagctatggagcaaaccat

SEQ ID NO: 71706 - DNA, 608 bp, Zea mays
  Clone ID: MRT4577_16539C.1
aaaaaagcggggggatttttaggaggagtttaatttacagccttacaggtcctccgttccgttccgacaaaacggggattatttggaaccaaaccagtccttccgaggaaccccggggggttttacagttttcctaccgtttttattcccaatcttttgaagggccaaggtggatttctacggtcttgggaaacaaaaaaaaaaacaactttaacaggggggattttgctgacacagaaggtttgaagctcgggatcccggggatctttttgccacccaccaggcttttaatggcataggggccctcgaacaaaaaaaggggttccacgtaacaaaaggcctgggggacaagaaaatcaaccaaattgcctttgccacccagtagttttggcccaaaaaaaaccacctccttggccttttgggacgtccatgccttgcctaaactaaaccggccgggggtattttggccggactcatacaggtggcacaggcgccatccaacgagaaccatacccggattgtggccaagcttgcggacaacctttttttgattgacctgaaaagctgccaggggagctccaaattgctttttttcctggggccaaatt

SEQ ID NO: 71707 - DNA, 842 bp, Zea mays
  Clone ID: MRT4577_165400C.1
attcggctcgagcgcgactcctcagcttcctcctctccttccttccttagctgtcccccttcccgcccccggccccgaccagatggagtgcacgtcggccgcagtcaccgccgccggcgccgccttccaccacgagccggccaggcgcatccgggaggagcgcaagcccaaggtgtcccggcgatacgtccacgccgacccctctgacctcagcctcgcggtgaaggacgggtaccaatggcgcaagtacgggcagaaggtgaccaaggacaacccctgcccgcgcgcctacttccggtgctccttcgcgccgtcgtgcccggtgaagaagaaggtgcagcgcagcgcggacgacaggaccatcctggtggccacgtacgagggcgaccacaaccacgcccagccgccgcggcacaacggcggcggcaacaaggccgcgacgaggtcgacgccagcggcgaccgaggccgcgcgaccggcgccgccactgccgctgcagcaccagcagcagcagaaacaagaggccgcgacggggccgtcgtcggaggtcgcgaggaagaacctcgccgagcatatggcggtcaccctcacgagggatcccgggttcaaggcggcgctagtcagcgcgctctccggccggatcctcgatctctccccgcccagggattaactaatacgtagacgagcatgatgattattcattgacgaactgttattagtccgtagacagaaaatttgttcacaagcatatatctcaaattttcaccaacccaagaagtgaatttgagctgcttactgcgaatatatgcatctcccgttcgaagttgctaattcaagcaaaa

SEQ ID NO: 71708 - DNA, 580 bp, Zea mays
  unsure (1)..(580): unsure at all n locations
  Clone ID: MRT4577_165401C.1
actctcaactcggaaatagttctccatcccaaccttctcttctcccctctcttctctcccgcgcgttgcctcgaaccggaagcgagctctacatccgttacagcgcttggtgtttgagagacgatcagtccatcgtcgaccaatggatccatgggtcagcagccagccttcgctgagcctcgatctgcacgtcggcctcccgccgatggggcaccaccaggcggcgccgatggtggcgctggccaagcccaaggtcctcgtcgaggagaacttcatgcagctcaagaaggaccctgaggttgcggttcttgagtcggagctacagcgtgtgagcgaggagaaccgccgcctgggcgagatgctcagggaggtggcctccaagtacgaggccctgcagggccagttcaccgacatggtcacggccggcgcccacgccggcggcaacaacagccactacaacaaccagccgtcctccgcgtcggagggcgggtcggtgtcgccgtcgaggaagcgcaagagcgaggagagcctcggcacgccgccgcggncgtcgcagcaccagcagcagcactacgccggc

SEQ ID NO: 71709 - DNA, 230 bp, Zea mays
  Clone ID: MRT4577_165402C.1
ccgttgtcttttcttctgcggcacgcggcgacatcggaccggtggatcctcacggtcggcgcgaacgacgacgaggcaaaaccgatgccgtcgccaccgctgctgtaggtcggccgccggtggttcggccaccctagctccagcggcgccgggtggcgctggttccgcaggaaccaggggtcgtgcaccaaaaggccgtccgcgcgcgccggctgtgacccgtcgaacgc

SEQ ID NO: 71710 - DNA, 485 bp, Zea mays
  Clone ID: MRT4577_165403C.1
ttcggctcgagcgcgagcgagtgatcaccatcggttgtgcccagtgttctgacctgtaccgatccttgcttgctgtagccatggggaccatcgtgtcgttatcgaccagcggcaatcccagcgagatctaccggctccaggctcatctgggcatgccggtcaagggtgttgcccggagcatggtccgctagcgcccccagcgatatatctggtgccagggggtgagcagcatttcctctctaccgtgtccgcaacaaggacaaacgtaagttgatgaacctccttctgctgtgtacatctctgtgcccaccgtcaggatggacgttccctactgctacttcctggtccctgccgtgtcctgtaacgtcggtggggtgacctacgcaaaggacaagctgggcaacgacatcacggtggatgcgtggatcatcacgcacggtccaaactacctgacgctcgtgcaggggctcaagggcgaccccacg

SEQ ID NO: 71711 - DNA, 474 bp, Zea mays
  Clone ID: MRT4577_165404C.1
ggtaccggtccggaattcccgggtcgacccacgcgtccggcgagatcatacccaaacatgatacattctgagacgcctgttgagattcctagctcagtcacattcatccctcgcaagaagtcagtggataccatggcagtggatgagggccccagagctattgattctaactcctctgcaattggaatggtagcaggcgcctcagatgaacctgatcaatgtgagatggatgaagatgacagtaaatcaccgtcaatgccacagatgcatacaaactcaaaggcgagctcccggcgttacaggtcaagcagaacagatgatgatgagtgaaattgaggatcccagggtacccaatctgatgtttgtttctaagaaaattttgagtttcagaataccttatgtaaatcaggatatatgtgtgttcttgtgatttgagctaattaactatgttgaactaaaaaaaaaaaaaaaaaa

SEQ ID NO: 71712 - DNA, 230 bp, Zea mays
  Clone ID: MRT4577_165405C.1
ctaaagaccatatccagggaccaagccctcctgacgtgtccttgccacaacgggacatggcttatatactgttaaaaaactccgctaacttacatggccataaaaggaaccatgaccaaaaagttgacaaatccagggctgcagaatgttcaacttgaacgtgaaacatgcatccgctcacagaaatgttgactggaatgatccctaccagattgtagcactgtttgatg

SEQ ID NO: 71713 - DNA, 261 bp, Zea mays
  unsure (1)..(261): unsure at all n locations
  Clone ID: MRT4577_165406C.1
aaacaagcaggngaanggncgcancancaggaagcgganccangnccgcgnggagcatgngcagccgncccgcngcacagaagagnnccgccngaggaaggggaagaangancagcngaaggcggangcaaaggagcgcggcgaggncancagcaccaagaggcagccgnngggncccaagccnggcnncanggnngaggggaccaccancgagaccgncacncccancccgnacgangnggncaangancnnaagggcgg

SEQ ID NO: 71714 - DNA, 405 bp, Zea mays
  Clone ID: MRT4577_165407C.1
cttcgggcggagctggtgggcgttcttggcgcgttcagtaagccccccgaagggcgggaaatggggggcgaatcccttggccccctggtgaccgggccccgcaaccggaagcgggttgttcaagaaggaccgcaactgggccgggtgcttcaacttgtgggcccccaccaggagaagggaaagcccgggcccggcaaggcggtccttgttgtcaccgggggggcccttaacggccggaagttccggcggaaggagaacattgtcttcgagcccggtaaggtattccggtccattccaaccaccacgcccccttacccaatattacgtgcttattaatttttggttgaggttttaatttttttttttgggaaaaaaccaatggttggggtcttgggggaaggattt

SEQ ID NO: 71715 - DNA, 826 bp, Zea mays
  Clone ID: MRT4577_165408C.1
gcacgaggtggcactggacttggtggggcccatgtccatggtcgtctcccttgtccatcgtctatcttctcccccaaatcgcattctcatcgcaccgcacgagctacggatctgcggcccgacgactacgacgacggggaggtaggggacgaatcgttgcaagcaacgaggtcagaactaaggaggccgatccatcctccagcctccgatcccatccgacgacatggtctgcgtcgcgtgcctgctgccgctcttcctgatcccggtggtcaacgccctcccttacctcatcgacctcatcatcagcaaggtgtatcggctatttggatgggagtaccggagacctgaaagagtcccacctgcatgtccatacaagcctgcagctcagaagaacgatgagggtgcgagtgaatcaaaacccctggccgaaccgcacggtgctggtgctgcggcggcagaagataagaaagtggaatgatgcagcaggcgcttaaaatggtggccacggctctgtgtggttagctaagaaacaataattgttgtggatggttatgtacttggttgatgggttgaacttgttatgacactccggatccttaccagttgcattactaatcactgctgctggtctggtctgtctgaatagaagggagttgaacttgcagtcgcaaatgtaatagcgagagtgaatcttgttgtccaaggctttcgtatagaatataatgcttgaataatgagctcaaaattatgattttgtcatcaaaaaaaaaaaaaaaaaaggcccctagggcccgtaccggagacctgaaagagtcccacctgcatg

SEQ ID NO: 71716 - DNA, 462 bp, Zea mays
  Clone ID: MRT4577_165409C.1
aaaaacaaggagggaatttccgggggggaggggccatggtgaacaaaacccaacacctgggggcacccaaaatgggcttaaaattggggccaaatctttttttccaaaaaaaaagggaaggtggggtttcccccgggggtctttttattaaggggtggtgtgaaacccttattttcccaaaaaaaataggctatttttcccttgggaaaaaagaaaaacatgggggccccaaactcgccccaaggggcctaaaaaccggggaaaaaagggggtttcgatcccccaaatatgctcttggggggcggacacccggggcccaaaagggttaacccggcctttgggggggggaaacactgtgggggggggggaaaaccccccccggggggggatttcccggtgggtgggggggggccctaaaggggggccccttatccgggaaaggggggacccccccccttgggg

SEQ ID NO: 71717 - DNA, 567 bp, Zea mays
  Clone ID: MRT4577_16540C.1
cggccgggccgggctcttctccttcgaccgctacagacgaacaccgcgtgtacatccacacgtccgcgagaaaccgcgctcgccgccgaaatggtgcacgcggatcacctaccgtgaaggccacggctaccccgctccttcctctcatacccgcgcgcgccagacccctggtgtgacgcttgtgtaccagtacaccgagaaccgcgcgagcgcaccaaactgcccgtgcaccctcaagaacatccaaggaattccatcatcctgacacctgctgcatacataaagtccaggatggcaaggaaccgcaggactgagaagcgcccatatgcaggtggtctgtcggctgcctgagcgagagacagcatcatccgagcctttttgcacgaggagccgaggatctggaagaatgccttgatgatctcatagagaccagcgatagagcctccaagaactatgcgacatatgcatcttccaccatggataatgctcttagaatctgtttcagcaagaaattctctcgtgggatcgctggaacctgatacttacacaacatatgcgagatgatat

SEQ ID NO: 71718 - DNA, 450 bp, Zea mays
  unsure (1)..(450): unsure at all n locations
  Clone ID: MRT4577_165410C.1
gtagaacccatcgacgtgtgctttcatgaaacaattcaagcagctgtcatgacgtttgaatcataatgtatggtgcacatccattgacagaaaaaaaaatgggaccctggacgagaattttcctgaggtacatgaatgtttatctgctcaaccaaatgaatgtttatctgcacaaccaaatgaattgaaaaccataatttcacgcccagtccagctccagctcaccattggccattgcagggncgggtgggaagccaagcgtagcgaaaagaccagggaagggccgagtgacagtatgtcatttagtcaaatattcacctcttgcgacatatcagacagattttccagatattcaantattttggattccacaccatttcttcaatttgggacagaggaaaacaacgacagattcaggaatagtgcaaacgggttctggagctcgagaga

SEQ ID NO: 71719 - DNA, 193 bp, Zea mays
  Clone ID: MRT4577_165411C.1
atggccttaaaccaggccagaggaagattctgttctgacacataaccagagaagtgattcaccttagattccttgacaaaattcctcttgaatgaacaaaacagaatcttcctctggcctggtttaaggccatcaaccattgaagaggaattttgtcaaggaagctaaggtagctcagttctctggttatgtg

SEQ ID NO: 71720 - DNA, 1967 bp, Zea mays
  Clone ID: MRT4577_165412C.1
gtcctattgctctggtcccatccggtgctgctgcccccgtcccatcacggcaggaggtggcacgtcgcactaccgcccaagagcgcctggacacttctgctgctggccgcatggtgtacctggacactgcccctgctggccacatgcctcaggctgctgcaagtgtcccgggcgcgaccacaaatgaagagcacccaaacgctgcccctactgacagccgcatggtgtgcctggacactgcccctgctggccacgtgcctcaggttgttgcaagtgtcctagacgctactgaagacggagtctccctcgtcgatgctgctggcggtgctgcccctgtcttgctgcaggatggagttcgcgccaggcaggaggctgacacccaagagtgtccggacgttgtcactgctggcaacgtgactgctacagtgggtgtcttgagcagcccactcactgcaccgatggatactacgcagactactctacctgctcgtgccatccccgttgttcaagttgacaatgctcatggaatgcaaactcgtggcaaaactggctttcggctcccagtcaataaactcaaccttcaggtctcctctctgtctccgctgcccaagacatatcgaggtgcgcttgctgatccaaactggagagatgctatgatagaagagcatactgctattcaggcaaacaacacttgggatttggtttcgcgccctagaggtgtcaacgtggtgacaggtaaatgggtttatcgccacaaatttcattcagatggctcgcttgaccgctataaagctcgttgggtactccgtggttttactcagcagcctggggttgattttggtgaaacattcagtcctgtggtgaagccggctaccattcgcactgttctatcagttggattatctcataattggcctattcatcaacttgatgtgaaaaatgccttcttgcatggtacgctgactgagacggtctattgtgagcaaccctccggatttgttgattctgcccttccggatcatgtctgtcgcctgaacaagtcattgtatggcttgaagcaagccccacgtgcctggtacagtcggtttgcctctcacattcggactcttggttttgttggtgctcgttcagatacatctctgtttatatacaaacacggcacggacacagcataccttctgctctatgtggatgacattgtgttgactgcttcttctacactgctacttcgtcgtattattgatgctctcacaacggagttctctatgaaggatctgggcaatctacatcattttctaggtgtatctgtcacccaacacaacggagccggtgcgctgcagtacttgactttcactcgtccagatattgcatatgctgtgcagcaggtgtgtctcttcatgcatgaccctcgtgagcctcatttcgccttggtcaaacgcattcttcggtatattcgtggcaccttggaccatggccttcagttgtaccgctctcctgttacggacttggttgcttactctgatgctgactgggctggatatcctgacactcggcgctctacatctggctacggtgtcttccttggggataatttggtttcctggtcttctaagcggcagcatactgtttctcgttccagtgctgaggcagagtatcgtgctgttgctgaaacttcttggttacgccagctgttggatgaactacgccacccaatacgtcgtgctactctggtctattgtgacaacattagtgctatttatctctcgacgaacccagtgcaacatcaacgcactaagcacatcgagatcgatttgcactttgttcgtgacaaggtcgccacaggggctgttcgtgttcttcatgcgccgactacctctcagtatgcagacatcttcacaaagggcctaccgtctacaatcttcactgagtttcgttccagtctgaacgttcttccaagtggccgatga

SEQ ID NO: 71721 - DNA, 1021 bp, Zea mays
  Clone ID: MRT4577_165413C.1
cacggagcagcagaggaccagggcagctagtagctgttaatcgcaattagtgcgcgctaatcaaatgctcatctgtcctcccgaccgttgctacaccatatccctccccacaccgccggctccactccactccgatcgactcgcctgagattctcgcagggactagtttgtggcggaatctcaaacccaggaacctgtgaatcctcgacacttgtgaaacatgagaaggttctttttcttcgggtcccctgctgcaaacgctggtgagggagccgggcaaccggtcaatgatagcaggactggacatagaaagacagatgagggaaaggacatctccaccgcgagattgtcgagatccagaagccgtcgtcagaagcggaataaggaggaaccggctaaccccaaacaactcaggaggtccatgtccttctcatccccggccagaagcagctgtgtggaggaacgatgctttagcttctcgggtgatgttccgtgctctttgtacgatgaatctgatgcaccccaccatgccaaagatgtcgctcccgacatgtggtctccagaagggaatccgttctctagagaatatgcaataagaaccccgaaagatcattctgccatggaaaatgattctcctcgttcaaaatactgttcttgctcagcagggcactctcctgttagctctcctgtcgctatacagtgcagatcaacaagactaggcaatttattaaacaggaacgaagtactagatcgttacattgatagagggcatggagatgcaatcgtagatgagaaacagaagcagtgcgtacctacggtttctaatttgggaaggccacctcgaccccactctacagtaccatccataccgagaccattcaaagagacaacggaaagctacccagatgtggacttaaacgacgccttcctttggcgacttgctcaagagggtataggagatacccacaagattacaactatgtgcagtgcatctagacgccacataaacatgtcagatgct

SEQ ID NO: 71722 - DNA, 573 bp, Zea mays
  Clone ID: MRT4577_165414C.1
cttctgcaacataaccatctgagcagatcaaactgcccatagaacaggccaagaatgtttcttttttgtttcccctttctttccactcttgacaggaaaacgatcagtcttcgaatagtgaatgaatggtacgttagtgacattccattcatcttagtgaatgaatgctacacgattcctctcgagacgagctaccgatatacaaacaaggtaggtatcgttagtgaggggggaggatccatccaatccagcatccgctacgagaacgagccggtggtcaggagatcagcgaccacttcgtcgatcaaggagccgagcagctccgccgccatgtcaccgccgccttggtacgactccaccttgaagtcgacccagctccccagaggaccactcatctccctgtacacgagctcgtccaccatccactcctcgccgacctgcaggctggtcatctctcggtggatcccttctgccgacaagctctgcaggaccgccgttcccgtgaaccacaggccgtagccaccgttgaagtagtaagcgcatctcgcgcccaacgattcattgacacagtcg

SEQ ID NO: 71723 - DNA, 245 bp, Zea mays
  Clone ID: MRT4577_165415C.1
gttcagggtttgtttaataataatggggctctattcactacaacatatatgtacttaggactgcaccgatgattgccatactggtcaaggccaatggcgcatggacattattcgccgtgttcttcggcttggggtgatcagtgacaacaaggacgacagagcttgacgctgtatctctgcctgacccaattgagcgaatacatatgggtcactccttgggaggccattacaaatagcaaaccgta

SEQ ID NO: 71724 - DNA, 424 bp, Zea mays
  Clone ID: MRT4577_165416C.1
ttcggctcgagtgtatctatttttacacaaaccgttgaagatagtgctagacctagactcaatacgggctgtcagccgtcgatgactcggacccaaatatgctgcatatgtgacagatgatccggactgctggactactggtcttatggaggtcgcaatggatctattcgagatattcctatctatcaatctagaaatccatcacattgctgttttactggacagagttgaaacgaattaggccactactaactaaaactatgacttcctagaacctacattcaaaagcagcttggctactttaagcttcagatctctagacattttgactgatccaccagggatgactttgacttggtatctatggaatatgagtgtgcgactgggcagaagagctcctattgataatacatataacgggcct

SEQ ID NO: 71725 - DNA, 812 bp, Zea mays
  Clone ID: MRT4577_165417C.1
ggattcagagtcagagcaaccctatcttttccccactccgctcctcgctcccctctcaccaaatccttctcctccgcgccgccacagccgggcgcgcctccccgatcgagatccaggagatatgcctcgttatgatgatcgccatgggaatacacgcttgtatgttggaagattggcccctcgcacccgttcccgcgacctagaatatcttttcagcaaatatggaagaatacgtgaagtggagttgaagcgtgactatgcattcattgtatgttctactacactcaggctatctccaaccattccccctcccaatccccccatttgtactttctattcatatttaaatacattcccctcaactattcttccccctatttttcctcctctccacccatttcccctattcagctctccctttactctttaactgagctatttgccttatatatatatatatcacgttttggattttttaaaaatactaccatatttgtagtaccgtaatacacattgttatctggtaattatacttaaaagagattaatttcacagttaaagcactgattaacgaattgggaggatattagatctccatcgtgtacagggggcgcagaggctgacacccttttgagagggtccccgagcgtgctccgttggagcggcctggggtatacggctccctccatttggtcagggggagcaggacgaggggggttccgttggaaccagcctcagttcaattctgcaactgttagatttttaatgttagcttactcgtattatggaaattgaaaaaacatttattttgc

SEQ ID NO: 71726 - DNA, 272 bp, Zea mays
  unsure (1)..(272): unsure at all n locations
  Clone ID: MRT4577_165418C.1
ccggccgcgcgcgcgcgggcgggggagagagacagggccgggcgagggcccnccacgngnggaacncgcacccnaagacnacggcccnggcncccgcgncggccgggncngcgcgacccncacgncngancaggaagnacgggcncaggggcgcgggcggngcnnccgcagcaacgccaaggacannggnnncancaagnaccgnngaagaggccacngngcngcngnggagaacnnccnacanncaaagaaagggncccccannagaaggc

SEQ ID NO: 71727 - DNA, 362 bp, Zea mays
  Clone ID: MRT4577_165419C.1
ggggggcctgtaaagacccgaaaattccggaccggccccccaaattttcccaattttccctatattaaagctgatcaaaacttggggaaatcatggccccagtgggaacctgtgaaaaaaggatatttgctcacaacttcccaccctaaaccatccagaggaaaaccggggaaacccaggggggcctaaaaagaaaattaactgacatgaattgcctggcccctactgaccggttaaaactggggaaacccttccatccattaacattaaaaaatggggcaaaaggcggggagagtcttgttccccatggggccccagcgtggcacctcttataaccaaaaaaacggataacccttgactgc

SEQ ID NO: 71728 - DNA, 353 bp, Zea mays
  Clone ID: MRT4577_16541C.1
ctgccacaaaaaaaaagggaaaatttttccccccaattgggtaaaaacttttttaaacacaaagctttcccttttttgttttgaagttgtttataacaagcccctggggaacatgacaataagcttgcccgttttttggtggggggggccaaaacaatcccccaaagttacttgtctcccggggctcaacaggggaaaaaaacaaaagttgtcagcctgaatggcccccataaaaggcacgggtcctcccccccttccgggggggacggggccacccttttttgtttttccaccggttttttttttttttcttggggggggcgagggggctcccccctccaaggcctgttggg

SEQ ID NO: 71729 - DNA, 1283 bp, Zea mays
  Clone ID: MRT4577_165420C.1
tcgaggccggccgggccgggctctcaaatccttctcctccgcgccgccacagccgggcgcgcctccccgatcgagatccaggagatatgcctcgttatgatgatcgccatgggaatacacgcttgtatgttggaagattggcccctcgcacccgttcccgcgacctagaatatcttttcagcaaatatggaaggtaagagccgcactctgtctgcacagagagttattctgaagttcagagtgtgctaacttttattatgaggttgagacaccagttctgtcctagtatcacgagcagtttgtgctaacactgtggttgaattttgtggtacacagctacacatcaatcctgctaaactacactagcaaatatagggtcctttcctatgtggtttatgaaggttttgtgttgcttgaagtcattctgaggtttttgtggatggggtcatacaagtcttttttcttggtgtatgctctgttacatcactaagcacttcatagatgtttgacctccgggcctgtttgacttgaatgatcttgttgaaggttttcggttttttacccaaccatggaggtctgtggtggaagggtgcccttggtggaattggtggccattgttccgatatttgtggaggactttggggtggccattgttccgatatttgtggaggactttggtgaagggcgcccttggtgtaatcttattgactgttgtagatgaagttgcaagttgatgcatttgagtacttgactcatgtcagcagcttactgtttgtggaaactatttgcgcagaatacgtgaagtggagttgaagcgtgactatgcattcattgtatgttctactacactcaggctatctccaaccattccccctcccaatccctccatttgtactttctattcatatttaaatacattcccctcaactattcttccccctattttttctcctctccacccattccccctattcagctccccctttactctttaactgagctatttgccttatatatatatatatatatcactttttggattttttaaataatactaccatatttgtagtaccgtaatacacattggtatctagtaattatacttaaaaagattaatttcacagttaaagcactgattaacgaattgggaggatattagatctccctcgtgtacagggggcgcagaggctgatacccttttgagagggtccccgagcgtgctccgttggagcggcctggggtataccgctccctccatttggtcagggggagcggacgaaggg

SEQ ID NO: 71730 - DNA, 261 bp, Zea mays
  Clone ID: MRT4577_165421C.1
tggaccgcagctttgttgatcgtgttaatgcctcccccaacatctacatcggactgcgatgtgacagcacaactagatgccttactggccagacaaagtgctatgaacacatcttccataatgttccaccctaaagctaccccgcagataaactgcctgaatgccatgaacaccacaaggcttcatgtactgcgcatagcttccgggagacatggcacggaccatcctcaagacacagagagtgacacactacagcatctt

SEQ ID NO: 71731 - DNA, 183 bp, Zea mays
  unsure (1)..(183): unsure at all n locations
  Clone ID: MRT4577_165422C.1
cagagggccgtcgtcggaggtcgcgaccaagcacctcgcggagaccatggccgtcacgtccacgcgggatcccgggctcaagcgcggcgtactcacngcgctctcccggagcatccctgaccagggactacagctaacaacacacgaacacgacgactaatcgatacagacattttcacttca

SEQ ID NO: 71732 - DNA, 981 bp, Zea mays
  Clone ID: MRT4577_165423C.1
cccagcgtccgggcagtcacgcccctcgaaaaaaacattcagtttggtgtgttcaccagtgtggtaattaatggaatcatctactcccaatgttttgatccgcaccattctatcacttatgattgtcgagctactgaggaagacttgataattacatttgacattgagactgagaaatgggggccatttatgcgaggaccccccatcagcttttctgatgctgctgctcaggtgttcaatgaccttcggcttccacctataaagcagctaacattagccaatctgaatggctctttagctgttgtgcatggcccagctcccagtatggacatttggattctgatggactctggtaagggtctctgggtcaaacaatacatcatacagttcaaagagtatgccagttttcaatatgtgcatccattggtggtattacgtgacggaagggtggtcctatataaagaagacatgcagcttttacagatctatgacccaagaactaacacactcacagattccgtggaggtgtgccatttttctgcagttgctttgtttggaggaaatctactgagtttataatatatcttgcaggatcgcatctattgcttcttgtgctcatcgcagggctgtctagtatcagtggtggcaatatctttagctatattctttctctttgtcttggccttgaccttcacagctttagatgctggtgctgcaccacttgtgtgctctgtagatgttcaggttgatttgagccttctttggatctgtaaaaatgcatgtaatgtggctttcattttagttaaacttcgagagttataccgtttagtaccaacaatttattgatttaaaactgtgagaaaattagatctactcataagccaatttttatgtgaattttcatgcatttgacaaaatcagatatgtttacaggatatttccctacaaaaaaaaaaaaaaaaaaaaaaactcgaggagggg

SEQ ID NO: 71733 - DNA, 388 bp, Zea mays
  Clone ID: MRT4577_165424C.1
cgataaaattggaacgatacagagaagattagcatggcccctgcgcaaggatgacacgcacaaatcgagaaatggtccaaatttttgtgacaacttatttggttttatccactttaagtccatttaatgtttaagtggcagtgtttgcccaattatgatgtgctgtgtcttctttgatatgactgtatggtatatgcgtgatcttagactgtaagacagtggggttgtaatcatgtgatgtttatctgatgactgtggtttcgagtctgagactaggaattgcttagggcagaaccgtccaattttgaattccgtaacccattttatttagttcctagtacaatgacaagtaacttggtctttttttgtgttcattatgtctttgggg

SEQ ID NO: 71734 - DNA, 814 bp, Zea mays
  unsure (1)..(814): unsure at all n locations
  Clone ID: MRT4577_165425C.1
aatgcggatcctttatttattgctaaaaatcttgtctcaaaacatctgtaattctctattaaaaaaaagaaagaaaaagaaatatcccgccgccctgctctaaccgtgctcatccgtcagggattttttttgccaccgccgctgggatttttaccagccgtcgtacgtagattttttccgagcatcggttttatctcctggagtcgtcgtcttctttctccctgcggcgtgctcttctctgaccagccagccgctcctccccagcgcccggccggaactctcgctgccgctcccctgctggcgcggccctgctctccatggctgccgagtctctccacgcatctccctggtcgagctccctcaagcttctcagctcgtctgcaccatctcctccacgcgcgcagggcagttctcgggtctgagctcgagcaggtgagctcgcccatggccgagtatcttccatggagatcgacgttccccttgttccttggtggctggcactctgcacgactttgcccctagctccctgcgtcgcgagctccagctcggattccccttcccatggcggcgcccacctccctgtgctccctgttccagctcgccggggatgccccttcctccagccgcgccccggtccctattcctcgtctctgcgcgcacgaatccctgcatgcctagcgccctagattcgctggccgtcgtagccgaggtcctccccatggcggcttcctctgccacgcccagcttcttctccctggtacagcacgtccctctgtncctgcgcgccgtgctccctncctggagtcgcggctgc

SEQ ID NO: 71735 - DNA, 180 bp, Zea mays
  Clone ID: MRT4577_165426C.1
tccccatctaaccataatgagcactcgtggtacctttctcaacaaacatctcaccataatataaaccctctttactctatattatcaccttccttttcaaaataccttcaacttgcgtcgtctcccaataccaatacacacctaataaattcctattcccccttgtcaacttcctagcac

SEQ ID NO: 71736 - DNA, 116 bp, Zea mays
  Clone ID: MRT4577_165427C.1
cgcgaaactcgacattaccctcaactaagggaacaccagcctggcgctcccccagcggtggcggcacgcatctagacactagatggctcccccggagctgacaagcattcaggcac

SEQ ID NO: 71737 - DNA, 352 bp, Zea mays
  Clone ID: MRT4577_165428C.1
ggcaaaaagccccccccctggaaaaaacaactttaatttctttcctcccagtctccccccgggcccaaggcttttttttttgacccaaaaacggcaaacccctttgggcgggggggggatttaaaatcaaccctggaatttgaacccccgggggcccaaacccaaacccggggcccccaggggggggcccaaaaggaaagcccccctggccctccccgcagggggccctttttgggggggggggggggggggggaaatcccacttgttccccaggaccccgccccgggtgttgggaaaattttccatcccgggcagcttggtaacccttccgtcggcagggacccccatcgg

SEQ ID NO: 71738 - DNA, 470 bp, Zea mays
  unsure (1)..(470): unsure at all n locations
  Clone ID: MRT4577_165429C.1
cgcggcgcgccgcccgnggcgccggggggcgcgcagngcgcggcggnggggacccggcnggccgngcngggcggcngggacccgcngagcnncgagcccgnggcggacgngcacgngcnggacgcggcgacggggcgggggcggcgcggcgcgcccangcggncggcgcgcggggggggggcgngcgccgaggccggcggcaggancnacgnggcggggggccacgacaagcacaagaacgcgcncaagacggccgaggccnacgacgcggaggccgacgccggggacccgcngccggacangncggaggagcgcgacgagggcgacggcanggccaccgnggccggcgaccggnnccgggccgncagcgggnaccgcacggcgcggcagggcgggnncgagcgcgacgccgaggggnncgacccggcggcgcgggcccggcgcaggcgggagcgcgngcgcgcgccggc

SEQ ID NO: 71739 - DNA, 251 bp, Zea mays
  unsure (1)..(251): unsure at all n locations
  Clone ID: MRT4577_16542C.1
ntttttatttttttgtttatgtttttttggggntgggcacagggggaagcatattatgctataacacatttttttacacaatgaacaatccaaatggcttgacggggccagggccattcctgtattaaaaatttatgctacaccctaactccaaggcttaagcaaagcccacccttttaattttcaatcaatcgccattatatgggcgcctaccggtacggatggctcttcaactctttaaccctgaccca

SEQ ID NO: 71740 - DNA, 330 bp, Zea mays
  Clone ID: MRT4577_165430C.1
atacacttaatacaatcctaacaactttaacattatactaatcattcccaggtacgagtactcatacatactgagcaacagcctcaatataccacaccaatcactacaaacatccatcattatccatccaacctctgacattcatacataaaactcctcatcgtatactaaactccttatatcctaacactccttattcacatatctccacgatccattctctccaagtaaatattctccaatcctttaatcttataccttcttactccaacactgactaccactattataaaaattacacagaactacctcagtgccattaacatctcc

SEQ ID NO: 71741 - DNA, 2607 bp, Zea mays
  Clone ID: MRT4577_165431C.1
tgcatacaggagcactgtacttgatacagcgtgaaacacaagctactttgcttgcggcattattcagagttctcattcttttgatatctgctacaccgtacgctcggatgccaaaggaattgttgccaacagtcattaaagtattgtgcagtagattactgaacaaacactcgaataagactgaacattatgctgtgctggttactgttctaagttgcttggagacagctttttcaaaagtgccacctactttggatgtctttgcggttctcactgaggattgctgtgctggaccatcacatgagcaggaagaatcaaatgttatagcttttcttcttcattgtatagaggaggaaatgcactacagtgttagacatggagccttccaggtgctgagatcagcggttcacaactacccaagctgtgcaaacatgatttgggaaaaacttcgagacaatgttcttaacttgttgcaaatacaaagttttgaagaccaaaagtatgatgctaactttgggcctcctggagctaaagaagaatcatcaatcaagggaagatgtcttgtagctggaataaaggtaatggatgaatgtctgcgtgtttcatctggattcacaggagcagatgacatcaaagaatgcagattactggatattcagcaaatttctgattgtaccataaataaaactattaagtctgcacctcactttgaaatggaagctgctggatcatcacagaattgcactttggacataacacttggaattaaccgttggatcgaggtgatagagactcatctccctaagggattatcccatggttctgctatggtcaggacagcatccctcacatgctttgctggcatgacttctgatgtattcttctccctgcctgaaaataagagagactatgtgacctcttcttctgttcatgcggcgttaaatgatatggttcctagtgtaagatcagctgcatgtcgagctattggcattgttgcatgttttcctcagatattgtcaagctctagcctaccaggcaagttcatagatgccattgagttcaatacacataactcatcaactccagttcgtgtcaccgctgcatgggctttggcaaatctctgttcttgtattcgttttagagcactggaagtgcatacagatccctatgcaggtgtaggtgtattgagcaaatcaagcatatctcttttggttgaagttgctttgcgtctggccaaagatagtgaaaaagtaaaatcaaacgctgttagagctcttggttatctttcaagatttatcagattcaattaccacgccggcacaataaatgacccaagtgattcagttttttatggagatcctgtgtggcttgaaagaatggtgcaggctttgatgtcttgtgtgacaactgggaatgtaaaggtccaatggaatgtttgccatgcccttagcaacttgttcatgaatgataccttgagacttcaagacatgccttgggcatcaagtgtttatagcatacttctacttctaatccgggactcaaacaattataagataaagatgcatgcagctgttgctctatcagtgccagtgtcaaggcttgattacagcagctcatttccagatgttgttcgaggcctcgtgcatgctctcgagtcattgaactcaaacaattcatcgttaccttcaaatttcaaacagagagacaacctcgagaagcagcttacgtttactgctctccatttgcttagttttgtgtcaccaaacgacgatccaagcctgaaagattttcttaccaagaaatcgtcgttcctagaagactggctgagatcactatgcgcatcgttcaacagctccgagcgccagcccttgccaacggaggccacaaacgacgaggacggcttcagcccaaacgtgactcagaaaggcatgctgtcttccgccctgcagtccttgctcggcgtgtacgcgggcaggacccagcaggtcatcacccagagatttgagcaactggctagaagcgtcgcttgaatggtgagcagcgacgagcagtcaggtgtggtctccactccagcctccattaacaagcagcgatatattggtcgtcgtctacccctcaggacggacagcgcgtcaggcagtggatccttaaattctgccgaatcccatgagctccaggcggcacttgtctcggatcttggctgtcatcatgcacaggctctgcaagcctggcttggtcggtgttttcgtcgttgtttacttgaaacatcgttactgtgagtacacacacatatatagtttttttttttttttagttggctggcctctcttaaaaaaaatggcgctgttatgtagatgggccttttccctggtcctggggcttcctgcttgcttgataaaaggttggtatcacccgaccacggtccacgtggacgatattacaagatgttcattgttcttggcaagaggggtcatgaatgccgtccaaatctgttggagtccgtcgctagtgccactgctgttattgagcccatgtgtgtgtgcgcgcgcgtgtgttttgttcatgtaccaaccttcataaattgcttgacgctctgcactgttcgac

SEQ ID NO: 71742 - DNA, 170 bp, Zea mays
  Clone ID: MRT4577_165432C.1
ctaaaaacggtacatagtacaccacccaagttgctaaaaaacgtagtcttcggatacaaaaactgcacgctgtttgtattaatccgaatgaacaacactccaatgcaaccaaacaaaatgttaaagccaaaaatcccacttaacaacgaactaaatttacagcaaatggt

SEQ ID NO: 71743 - DNA, 257 bp, Zea mays
  Clone ID: MRT4577_165433C.1
ctcatatagcagatcaggatgtgacgaaaccatgtgatgtagccttatgcaatacttcagatgattgctcccatggacagtggggaaatattgtgctaaagcatttatatcagtcattaggtgatggcaatggcggcatagaggggtgcataagggaagcacttattcattatcctaaacataatcataccactacagttatggaaacttttaaaattgacaaagatggacaagaatgctctttgcaatttgagcca

SEQ ID NO: 71744 - DNA, 334 bp, Zea mays
  Clone ID: MRT4577_165434C.1
acacacgaaagcaacagggtttattaaaaagggtgttaacaaatggggcagcagcaaatgcaagacagggtggtggcttttttattcgactggggggttcgacgcattcgggacccaggcaacggggcaacgcaaggggaggtcaaacccaggaggagggcggcgggggcaaggggatgggggcaacggttttttggaacgcggggggggcgaaaatgggcttccaccaggccttgacgtgggggggggcgggaaaaagcccggccttgggggttttgctgaggtaaaacaggtaggacgcgtggttggcgtcggcgagcgtgaactcgtcccc

SEQ ID NO: 71745 - DNA, 304 bp, Zea mays
  unsure (1)..(304): unsure at all n locations
  Clone ID: MRT4577_165435C.1
aaagaagcttcagctgcgataccaaatgaggtaaacgacaagtgtcagaacaagcctgngtcatgctaccaaatcaggagcccttatcccgaaagatcctttggtccccttcccgctctggctctggctcaaccccgaatccccagcccaggaacaggaacaggaaagggcccatcatccttccgggtcgggcgggccccaggctaaatgtgcctgcatgcctagcgaaacaaacgctgtacaacgacgtcgactgcactgcacagccggctaagcaatttataggcagttcgtcagtcacccg

SEQ ID NO: 71746 - DNA, 293 bp, Zea mays
  Clone ID: MRT4577_165436C.1
gccgaccaggccgccatcctcaacgcgaaggctatcaagaacggtcggatcgtcatgtggctccatgttcgccttcttcatccaagcctacgttaccggcgaaagcctcgtcgagaacctctccaagcacctcatctaccccttcgtcaacaacctgcttaccgtcatctccggcgccgccgataggacgcccagcctgagaagactcgccacaaggccggcagttatgccaagtcatgcgctgttaccgtacttgattttaccggggaaagatctgtgtgtgacggtctgaa

SEQ ID NO: 71747 - DNA, 452 bp, Zea mays
  Clone ID: MRT4577_165437C.1
gctggtcaagacgtctttggaaatttcctgaagtctgagttcagtgaggagaatattgaggggtggctggcttgtgaagactataaaaaaacaaagtctgatcttttgcattgcaaagcggagaaaatctataaggcatttgtgcagtcagatgctgccaaacaaatcaatattgacttccgcactcgagaatctacagcaaagaagattaaagcaccaacacccacatcttttgacgaagcccaaaaaatcatatatactcttatggaaaaggactcatatcccaggttcctcaagtcaaatatatacttaaatcttctgaatgaccttcaagctaatagtctaaagtgactggctcctggctggaaggaattagtgatggcatcaagtacacaaggaaggcgcgagagtggctccctgggggaacactttggcctttttggacaactcac

SEQ ID NO: 71748 - DNA, 1257 bp, Zea mays
  Clone ID: MRT4577_165438C.1
actgaacaacattataattaatataatataaataagtaccattcaatatatcataaataagcattgtcaaacaacgcatacataagtgtactctaaatctaaactaaaatacaactgtttgcactaatgttaagcctaactttatatgaattaaagtcttcagacttttgcgaccaccaaatttgaattccattctatgttttcctgtacaacaaataggagaaaactagacatagcaaaaagctccaagcagcacgtggatggtctcaaagctgcccttgtgcttctccctgttcttgatggctcctacacgcccggtgttcctcccgccagtcaccatgaccacattgccgacatcaaaattgatgaagtccatgatcttgttggtctccagatcgatcttgatggtgtcgttagccttgatgagcgggtcggggtagcggatggtgcggccgtcgtaggtgttcaggtaggggatgcctttttggccaaactgaacagacatcaccttgcagagcttgaacatattggtctcgaccgaagctgagtccattgtaatctgctcgattgtcttcagtccctcatattgatccttcaacatcttcttatgataatcgttaaggtacactgtttgatcataaataggatatttaacctccatgagcggttttctccatagcagggagagcgcgtgggcggctgcgacggcggcctggagagggtcgcccatgctggggcctttagggctcgtttggcagcctggtgaattgcacaccggccagccacagccagcgggggcaatacctgcattacctatcccacgtgttgtgcagtcctgtggggcataggttccctgtgtccatttggcaaagattgctgcaggtaacagacaagcagtgcaagagggacaagcatgcacatcagatcctcagtgtcttcttctacaatgagagaggtggcgatatagaagcggtgggtgaaggcggcgatggagggggactaggggaggtgccatagaagctgcgggtgatggagttgaccgccagatccagaggaggagcaccggtatgtgtcttcttcttcgccaaggactccagccccaacgctagcgggcccgggggacggcggttcattgaagatggagacgaggacatggtggcggcggtgctagggttatagggtttgtggaagacgaatgagagggaagttggctcgccgctcgtgtcgaacatggaagtgtaagagaaaccaacccaa

SEQ ID NO: 71749 - DNA, 262 bp, Zea mays
  unsure (1)..(262): unsure at all n locations
  Clone ID: MRT4577_165439C.1
caaacagaacagacagaacaccccgagaggacagaaaagaagcgaacagaaggngcagagacacgaaaggaagagnacaacagcggcccggagacccgcgctatncaaagaggagggggggcaggaccctacacaaaccaannnccgagcgggaggccgcgagnnnagcnaacaaccgnagcacaaaacncggaacccgaagcagcncagcgcccgcgcggaccgaccgacccacaagcgcggaccggacggaccgcggagg

SEQ ID NO: 71750 - DNA, 810 bp, Zea mays
  Clone ID: MRT4577_16543C.1
tttttccccctacgaaaaattggggttgttgaagttgtttttaaatggggttaaaacgggatttatttccccgttttttcaatttttaatgctggaccaactttattcaatttaattcttttttataaaacacgctattaaaatctttattttttggaaactcaagttctttttttttcccccccccccctttttttttttttttttttttttttttttttttttttttttttttttttttttttttttttttttttttttttttttttttttttttttttttttgcctttctgaactactagtataatatattataggttctcaaaagttggagtagcctgttggggggctctatacaggcagtaagctagctacccacaacgaatgcccagtttcctagcattcgacttcgaccaaatgcttttcacaggtacctaataaataaaacacacacaccatgtgccatcgtgtgtagcattgcaggccatgctttcggcaccaaacatcgcacgagctaatgcgcgactctttcaccatgacactgacagtgcaagcatggtcaaaaggacgatatgtacacaaaccggtcagcaagagggcgggcatgcatatattgatggcccaaggtccagatgattaggcactaagatctaccgccagcttcggggtcatctgcatccaggtctccattctgggccatgagcattctgtacacccttctagagcatttgttccccagccttttgccttcgtcacccagtcgatcttcccacttcaagtcgctaagcagaagttccttctcggcaacg

SEQ ID NO: 71751 - DNA, 584 bp, Zea mays
  unsure (1)..(584): unsure at all n locations
  Clone ID: MRT4577_165440C.1
attattttgtggaatcccaacagagtttattcatttgcttgtactctattaagtggaagttcttgagatgccaaaaaagcaggaaagtgcggacataacagtcaagatgagctacttaaaagtgaggataattcaaaggagcgtggtatcccgagaatatgaacactccagagatgcaatatttgagtggccactaaccatcatgttgaggatgcatcatcagtagcagtgcagaattatttcggtgttttgatggcatatggaggcctccaagatgaaccggattctcccattatattctttggatccttgcagcccatatttgatttcaacggctaattgggttattggtcagcttgcgatatgcctaccagaggacatgagttctagtatttatcagtccttaatgaaggcgttgaccatggagtatgtggaggacataacttgttatccggtttgtgcctctgcttctggtgctattgcagaactcatcgagaatagttatgttccacctgactggctcattcttctgcaagtggntctgaaaagagtaagtactggagatgaaaatgagtctgctcttc

SEQ ID NO: 71752 - DNA, 566 bp, Zea mays
  unsure (1)..(566): unsure at all n locations
  Clone ID: MRT4577_165441C.1
ccacgcgtccgcggacgcgtgggttttttactgtgggctcccaagccatcttctggacctcacaagtctagggagtgcctgcctctgatcctcatcatcaggaacaggctcaagtatgcactgacgtatcatgaggtcatttctatcctgatgcaacgccatgtacttgttgatggcaaggtcaggactgacaagacctaccctgctgggttcatggatgtcatttccatccctaagacaaacgagaactacaagctgcttccgtcttcacccaatcagttcaagctctgcaaggtgaggtctgttcagtttggccagaaaggcatcccctacctaaacacctatgacgaccgcaccatccgctaccccgacccgctcatcaaggccaacgacaccatcaagatctcgagaccaacaagatcatggacttcatcaagtttgacatcggcaacgtggtcatggcgaccggtgggaggaacatcgggcgtgtaggagtgatcaagaacagggagaagcacaagggcagcttcgagaccatccacgtgttgcttggagctntttgctat

SEQ ID NO: 71753 - DNA, 518 bp, Zea mays
  Clone ID: MRT4577_165442C.1
aacccaccctccatggtcttcaagcagatggagcaggtggctcagttcctgaaggcggctgtggactatggggtcatcaagactgacatgttccagactgttgacctcgctgaaggcaaagacatggcagcagtgcagaggaccctgatggctttgggcagcttggcagtgaccaagaatgatgggcactaccgtggagatcccaactggtttatgaagaaagcgcaggagcataagagggaattcacagagagccagctgcaggagggaaagcatgtcattggccttcagatgggcagcaacagaggggcctcccaggccggcatgacaggctacggacgacctcggcagatcatcagttagagcggagagggctagccctgagcccggccctcccccagctccttggctgcagccatcccgcttagcctgcctcacccacacccgtgtggcaccttcagccctggccaagctttgaggctctgtcactgagcaatgggaactgcacctgggcagct

SEQ ID NO: 71754 - DNA, 816 bp, Zea mays
  Clone ID: MRT4577_165443C.1
attgggtacctcgaggccggccgggagctctatatcctcagctaagcagacctgacgcatcccctattcttccccacctccgagctccctgcctggttccctagccgtcggttcctctccatggcacttcctccgtggtggttggactctctcctctaaccatgaacgccagccccctcttcccggctccctccctgctctagcttgccagcagcaggccctcggggacacgctcgctgccaccgcggtcgggagcagcagctggtgggcatctgcggcctgcagcagtcgctgcagtaggccgaggacgcgtgtcgcaggggatggaggccctgcagcaagccggtgatcccatctccttccccacgccaagtcccatggctgctgtcttccagccccatgctgtgacgcgcctcacaggtgttcgattaaatgaccatgaggagttttgtgttgtgtgcagccccgtatgcgacgccgtcgaaccccggttacgcctaatctttatggcaatttggtggctaacacggctgcaggtattgttggagggacgggcatcatgcctggagactttgtggcatatggaacttcttggagctttttgctatggtcttcatcaagttttctaccaatgacttatctcccgctacctcgacccactcatcaaggccaacgacatcatcaagatcgatctggagacaacaagatcatggacttcatcaagtttgacgtcggcaacgtggtcatggtgactggcgggaggaacaccgggcgtgtaggagtcatcaagaacagggagaagcacaagggcagctt

SEQ ID NO: 71755 - DNA, 1906 bp, Zea mays
  Clone ID: MRT4577_165444C.1
tatgcctttctacgccgcgccgccgccatgtcctccccctcctcctacagccgcacaggctacccccgccctcgccgcggctactcgggaaggccctcgccgccgccgccgccgccgcccccggacgcggcctccgagatcgtcagcagggattaccatctcagtgccgtgcacgccgccaacgaatccctgcgtcgtggcggcggcggcgacatccgctggcctccaccgccatacaggcaggggcctcaccctcaccaaccgcactatggctatggctatggctacggatacggatacggccaaacgtggcagccgggtccatcctatgggtttgtgccgtacaactacggccacccgcagcagcagccgccggggcctcagtacggctacggggctccgaacccgtacgttcacgggcacctgcagccgcagccgcatgtgcgtggggcagcgagtccagggttccgtcctggcgcgccccagctgactccgaggctggcagattacctccgacggtggcgctttgcaaagcagaggccgccacatcaagctgggaggtttattattctatcatacaagcgtccggcggactatctggcccaggagcaccgctttctttatgaaaaaatatcaccttttattttggattggaactggcgcaaggataagttactgtttgagttcggtctgtggtctccagacattctatgtcttcaggaggttgacaaatttacagaccttgaacaagaaatggcaagccaaggatataacggtacatggaagatacggactggagatgcagctgatggatgtgctattttttggagaacaacaaggttccagttgcgttatgaagaagacattgagttcaccaagcttggacttcgtgataatgttgcccagctctgtgttttagagtcggtgggccttcagtatgtgcaaactgactctgttagtttatctacaagttctaaccatccacaacaagctaaacaagttataatatgtaacattcacgttctttataatccaaagagaggggacatcaaacttggtcaggtcaggacacttctggataaagctaacgctctatctaagatgtggaatgatgctccagtgatagtttgtggagattttaactctacacccaagagtccattgtataattttatgttggggcaaaagttgaatttgtctggccttgcgagaaatactatatctggacagcaaattggtggtagttcacaggggctatatactggccctaatatatctgggtggacaccagaagaaatcaaagctgccactgggaaggatgaatgcactttcatgaaacacagtttgaaattaaggagtgtatatactgacgtcgaggattttgaaggaacaaaagacgccagcaaggaaccactggtgacaagctacaacagaaaattcatgggaacagtagactacatatgggcctcggagggtctgcatactgttaaagtcttggacacatttcccatagagattttgaaaaaaacaactgggttcccgaccaagaaatggggaagcgatcacattgcccttgcctgtgaattggcttttacaaaatgacgccttttatcaggcggagagggcgcctgcatagttgctagtgaccaaacacacctcaagagaaagaatactgtctacaggacgattaactgaaccaaacctcgctcttttagagctcgttaatttatttcatttttttttcgacacacctttttgaattgtgcgtgagtatggagaaccggagtacatcatttgggtccaattttagagcattgttcctgtttgattggctatggagagtgtattttggtgtgctgccactctacctgcgggcttgccatccactggttcaatgacttgtttg

SEQ ID NO: 71756 - DNA, 212 bp, Zea mays
  Clone ID: MRT4577_165445C.1
ggcctagatttatccattcacaatgccgactgactcgtcgatccgaggtctgccttcaattgcgccattcggcgaacgcgtggatcttcttgtgaaaaaaaggtatttgtatgtggccatcgcaatatgagagggtggtatatcccaagtgtttgatgcgcgcatttgtgacatcacatttgtgtgctatatagctgtgagagagcgctcat

SEQ ID NO: 71757 - DNA, 639 bp, Zea mays
  Clone ID: MRT4577_165446C.1
tataaataagtacaattcaatatatcataaataagcattgtcaaacaacgcatacataagtgtactctaaatctaaactaaaatacaactgtttgcactaatgttaaacctaactttacatgagttcaagtctccacacttttgcggccaccaaatttgaatttcattctatgttttcctgtacaacaaataggagaaaactagacatagcaaaaagctccaagcaacacgtggatggtctcgaagctgcccttgtgcttctccctgttcttgatcactcctacacgcccagtgttcctcccgccggtcaccatgaccatgttgccgacgtcaaacttgatgaagtccatgatcttgttggtctccagatcaatcttgatggtgtcgttggccttgatgagtgggtcggggtagcagatggtgtggtcgtcgtaggtgttcaggtaggggatgcctttctagccaaactgaacatacctcaccttgcagagcttgaacttggatcctcatccctgattgggtgaagacggaagcagcctatagttctcgtttgtcttagggatggaaatgacatcttgccatcaacaagtacatggtgttgcatcaggatagaaatgacctcacgatgcgtagtgcata

SEQ ID NO: 71758 - DNA, 198 bp, Zea mays
  Clone ID: MRT4577_165447C.1
tcttattttttagtgcatttgtacgcgggggcgccttttttcaatccgacggagcacatacccagggggggttcactaaacaaggggccgcccccaaaacggcgaattagtccccatcgtccgactttagttgcaagccgaattcgggtggacagtggcctaaaaaaggatggtactcggtatttcgttagggaccgg

SEQ ID NO: 71759 - DNA, 802 bp, Zea mays
  Clone ID: MRT4577_165448C.1
aattaatataatataaataagtaccattcaatatatcataaataagcattgtcaaacaacgcatacataagtatactctaaatctaaactaaaatacaacagtttgcactaatgttaagcctaactttatatgaattcaagtctccacacttttgcgaccaccaaatttgaattccattctatgttttcctgtacaacaaataggagaaaactagacatagcaaaaagctccaagcagcacatcgatgacctcgaagctgcccttgtgcttctcccagttcttgatctctcctacacgcccgatgttcctcccgccggtcaccatgaccacgttgccgacgtcaaacttgaagaagtccatgatcttgttggtctccagatcgatcttgatggtgtcgttggccttgatgagcgggtcggggtagcggatggtgtgaccgtcgtaggtgttcaggtaggggatgcctttctggccaaactaaacagacctcaccttgcagagcttaaacttagcatcctcatccctaattgggtgaagacggaggcaacgtttagttcccgtttgtcttagggatggaaatggcatccatgaacccagcagggtaggtcttgtcagtcctgaccttgccatcaacaagtacatggcgttgcaaattcatgtatggtatgagactgaaacaagcagcccgagaacgcacttaatggggagtgttaatcccaaatttctccatcccatcccatccaataatccatcatccacgtattgggctccgggttccatcccatcctgttttctccttcc

SEQ ID NO: 71760 - DNA, 328 bp, Zea mays
  Clone ID: MRT4577_165449C.1
aagtagctattaaaataaattaggaattaaagggatatgctaattatagaagtacagattatttatatagttgatacatgtagcttgtagaggtccaagtccctggtgtgttcgcccgaagtgactgcatgcttcgtctatttcttattagtactgcgggttgggtaccctgcagttcttcctgatctccaacttgtttccttgggctggcaggctgctgagcttgaccatggcggcggggaagtcggaattccactcccgctgggtgttcttgtattcatcgagcttgctggcggggaagtcatccgtgcgtagtacccagtcagac

SEQ ID NO: 71761 - DNA, 620 bp, Zea mays
  Clone ID: MRT4577_16544C.1
ttttttttttttttttttttttaattctgatctctcaaatttgaggcgtctggcaaaggtacaaaatcaaaaccctcaaaaatctgacggcagaaattttccgacgaacattggatcagagttttctctccttatttcctgtaagaacatgatggtcgtttctttttacagggcattgagccccccctgatattccagtacaacagtctaacactccaaattctaaaacaggagctgagatattcatgtatgccatctcgttggcgtcttcttctgcctcctgtcctccggcctcatctggcctttgctgcggccatacgtattcatgtatgccatatgatcgacggcctccccctgtataaccctccagggctaatcttgctctgggctttcatgtggatttggtgatattgagtcagtttaaatccataataaattaaaatccacctcaatacatctcaatcctataaccgaacaaggcctcatcgttggttgaagctccagctattctctaaaaatcaaatatggtggtaaggatgaagatgaacagttggaacacttttctgaataggtaaaattttcagcccactcatgtgtgagccaccgtcagcattggatcg

SEQ ID NO: 71762 - DNA, 385 bp, Zea mays
  Clone ID: MRT4577_165450C.1
ccacgcggccggaatttttccctttagccgacgacaccgccgacgccgccggtcatctcggcgagaggtgacgggaccgaggaactcaccgagccctaagatagagaatcgctttgcacagcctggggactgctgcgtacggaggggttgaaggggagaagggcaagatctgttccacagagcacgcgcgcgcgctcgagaatcgggggttgcacacatagctgcgccatcacgaatttgatggactaagggaatcacagggtggcaagaaggctagcagaagccggcccatgatgcatgaagctccccttggctacagcattgatgacgtacgacctgccggaggcgcgaaaaaggtccagcctggtgctcactacagctgccc

SEQ ID NO: 71763 - DNA, 634 bp, Zea mays
  Clone ID: MRT4577_165451C.1
aatataatataaataagtaccattcaatatatcataaataagcattgtcaaacaacgcatacataagtgtactctaaatctaaactaagatacaactgtttgcactaatgttaaggctaactttatatgaattcaagtctccacacttttgtggccaccaaatttgaattccgttctatgttttcctgtacaacaaataggataaaactagacatagcaaaaagctccaagcagcacgtggatggtctcgaagctgcccttgtgcttctccctgttcttgatcactcctacacgcccggtgttcctcccgccggtcaccatgaccacattgtcgacgtcaaacttgatgaagtccatgatcttgttggtctccagatcgatcttgatggtgccatttctgcaaacttttagctatacagaagggagattgtgtttggagtaaagaacgaccaacctcaccacatatggactcaaagaataactttagatctacttgagtgacctgcgtgtattaaaacagaaccatgacagcttactaacctgatgcagcacatggtgtcataaagtgtcttaacgcagtagtattgtactaataacttataatgcaatcacaaaaggctgcatacataccact

SEQ ID NO: 71764 - DNA, 266 bp, Zea mays
  Clone ID: MRT4577_165452C.1
gcggccttttttttttttttttttttggtttttttttgggggttttggcacccacaacaaatcggtataaggatgattattttccgccctggatttgaaatttcgaaggttccagggccaaccaaaattttaagtttcccaaggggagggggtcccccaacccaacccaccggcggtggtggaaaggaaatgccagttggcaccccggtgggccctttgtaaaggactggaccaaacaaaaaaaaacacggggcgggggttccttt

SEQ ID NO: 71765 - DNA, 2203 bp, Zea mays
  Clone ID: MRT4577_165453C.1
aatataaataagtatcattcaatatatcataaataagcattgtcaaacaacacatacataagtgtactctaaatctaaactaaaatacaactgtttgtactaatgttaagcctaactttatatgaattcaagtctccacattttgtggccaccaaatttgaattccattctatgttttcctgtacaacaaataggagaaaactagacataacaaaaagctctaagcagcacgtggatggtctcgaagctgcccttgtgcttctccctgttcttgatcactctgcgcttgtacttctccctgttcttgatcactcctacacgcccggtgttcctcccgccggtcatcatgataaagtaccaaaatattgaccacacagaagaaagatgcactactacctgaggccaaggatctgggacaggggacaggagctccattacagtactggcaatgttggatacaattttaggaatatgagacagaactttttcctgtccaccctcaactattgtgcccagaagcttgaacagaagagcagactcattttcatctccagtacttattcttttcagaaccacttgtagaagaatgagccagtcaggtggaacataactattctgaaaaaaacagagacaaaatattttcctgtccaagcttgaacagaagagcagactcattttcatctccagtacttattcttttcagaaccacttgtagaagaatgagccagtcaggtggaacataactattctcgatgagttctgcaatagcaccagaagcagaggcacaaaccggataacaagttatgtcctccacatactccatggtcaacgccttcattaaggactgataaatactagaactcatgtcctacaggtaagcaaacaagaaataaagtgaaatgtataatgtagagggatatacatattacattaagcctctactttgatccagcatgtcctatgagatgatggaatttaaaaacaagaaaaacatgtaacctctggtaggcatatcgcaagctgaccaataacccaattagccgttgaaatcaaatatgggctgcaaggatccaaagaatataatgggagaatccggttcctgatcaatgtaattgtcaaatctttcttttcagtcagaaaatcttggaggcctccatatgccatcaaaacaccgaaataactaaaatgaaatcatttagtacatcaagataatagtatagtaaataaacatagtggtatgtctaatcgtctttaagcctttcttacttctgcactgctactgatgatgcatcctcaccatgagaaggtataggaaactttgacaggaatgggatgaccaataactccccaattgagctcatttcagatttccctttatttttatcacctttcttacgctttgatgctgcagatgcaactggtggaccctgaaaccaaaaaaaaagtgtaagcaaatgacatcaacatctcaatttttgagttaattcaacaaactacatggttctgtgaaaaatagcaagtgtgttcaaatatgaaagaccgcatgcagccattgaaatcacttgatatagaatgacaaagtcatggaatacaatatagcaaaacaatcccttaaaatgttttgctcagcctgaagtcagtactatgtgtgttcaacaaactataataaaaaaggaatcacaacctttgatagcgctataacaccaagtaaattgattgcactttttctggcagtgaacaaatcctcagtccatccagaaatgtcatcaagttcagaaggaagattcttttgcatatactcatcagtatcctcctcccattcttctatatccttctcattcaatgctaatgctagaaaaattgctgaatcaagaagtgaagaaaaatgtggtgaaactagtcgccatcccggtcctgtttccaaaactcaagaaatcacatcaaatgccaatgaaacaatccgattggggagagagtcgagtttacttaaatggatgctttgttttgatattttgattgcacagttgacaatatgtggcatctggttatttgtatgtttccggtgacgtgtaacaagtgcgcaaaatataatgagacatctctttgcaatcctgagcttcatggtagatccatcttcaataagactattaaagttcaaagaatctagtatacagaacatgtctttgcaaaaggaaggcaaaat

SEQ ID NO: 71766 - DNA, 2295 bp, Zea mays
  Clone ID: MRT4577_165454C.1
cacgtgagatcccttcactagcatctctcttcctcaagcgccatccctggcttctcccatgccgagcgtctccaatgcccaaacctccatggccgacgtcgccctgctcaggtccaaccagctccccttcctgttgttgtgtccagccgatgcccctccctccatcttcctctctgcagcaaccctaccatggttgtgcccctgcttccatggtgacctcgccccagccccaacgtcggacgtgccgtcgccctcacgtccagctcctccatccccctggttccctcccagctctgaccaggtttgccaggtccgaccgttctgctcgccgcgccctccccatgccagcacgcgagcgccccctcccgtccctgctcctctccatcgacgcccaggccgatgccgagctcccagcccctcccgatggcgtggtcaagcatctaggtatcagaattcctggattccaaatctgagatggatgttgatgttgactataacagcttgtactcaaagcaggactttctacagggtgaggtgctcgtttcgatgtggctagagtattgcaagtgacatcccatcacttctctggcaaggttcttttgtcacctgatgggactaacttggaatatgagcagctcctactcatcacatgcaaatgcatgtatttcactgtgaggtcatacatgccatctagggtgaaacaaattttgccttccttttgcaaagacatgttctgtatactagattctttgaactttaatagtcttattgaagatggatctaccatgaagctcaggattgcaaagagatgtctcattatattttgcgcacttgttacacgtcaccggaaacatacaaataaccagatgccacatattgtcaactgtgcaatcaaaatatcaaaacaaagcatccatttaagtaaactcgactctctccccaatcggattgtttcattggcatttgatgtgatttcttgagttttggaaacaggaccgggatggcgactagtttcaccacatttttcttcacttcttgattcagcaatttttctagcattagcattgaatgagaaggatatagaagaatgggaggaggatactgatgagtatatgcaaaagaatcttccttctgaacttgatgacatttctggatggactgaggatttgttcactgccagaaaaagtgcaatcaatttacttggtgttatagcgctatcaaagggtccaccagttgcatctgcagcatcaaagcgtaagaaaggtgataaaaataaagggaaatctgaaatgagctcaattggggagttattggtcatcccattcctgtcaaagtttcctataccttctcatggtgaggatgcatcatcagtagcagtgcagaattatttcggtgttttgatggcatatggaggcctccaagattttctgactgaaaagaaagatttgacaattacattgatcaggaaccggattctcccattatattctttggatccttgcagcccatatttgatttcaacggctaattgggttattggtcagcttgcgatatgcctaccagaggacatgagttctagtatttatcagtccttaatgaaggcgttgaccatggagtatgtggaggacataacttgttatccggtttgtgcctctgcttctggtgctattgcagaactcatcgagaatagttatgttccacctgactggctcattcttctacaagtggttctgaaaagaataagtactggagatgaaaatgagtctgctcttctgttcaagcttctgggcacaatagttgagggtggacaggaaaaagttctgtctcatattcctaaaattgtatccaacattgccagtactgtaatggagctcctgtcccctgtcccagatccttggcctcaggtagtagtgcatctttcttctgtgtggtcaatattttggtactttatcatgatgaccggcgggaggaacaccgggcgtgtaggagtgatcaagaacagggagaagtacaagcgcagagtgatcaagaacagggagaagcacaagggcagcttcgagaccatccacgtgctgcttagagctttttgttatgtctagttttctcctatttgttgtacaggaaaacatagaatggaattcaaatttggtggccacaaaatgtggagacttgaattcatataaagttaggcttaacattagtacaaacagttgtattttagtttagatttagagtacacttatgtatgtgttgtttgacaatgcttatttatgatatattgaatgatacttattt

SEQ ID NO: 71767 - DNA, 174 bp, Zea mays
  Clone ID: MRT4577_165455C.1
ctttattcatcttacattcaactttgaaccataaactatatattccaaaattttaattaaacattatcataaaagttcaattttaacttgcaaatatcatgaacatatcaaaatatgtataaaaataatttctggaattgtgataattatttctttaagaaacctatttcctaa

SEQ ID NO: 71768 - DNA, 764 bp, Zea mays
  Clone ID: MRT4577_165456C.1
aatatgatataaataagtatcattcaatatatcataaataagcattgtcaaacaacacatacataagtgtactctaaatctaaactaaaatacaactgtttgcactaatgttaagcctaactttatatgaaatcaagtctctacacttttgcagccaccaaagttgaattccattctatgttttttcctgtacaacaaataggagaaaactagacatagcaaaaagctccaagcagcacgtggatggtctcgaatctacccttgtgcttctccctgttcttgatcactcctacacgcccggtgttcctcccgccgatcaccatgaccacgttgccgacatcaaacttgatgaagtccatgatcttgttggtctccagatcgatcttgatggtgtcgttggccttgatgagcgggtcggggtagggctgacaatgggctgtaaattttgcactataagatttaaggatcaagtcggattaggatcgggctttatttctagtcatttttaaactataatttatttaggtccttgacattttgtgaagaaccatatggatcacaatccattaccacccttaggtcggggtagcggatggtgcagtcgtcgtaggtgttcaggtaggggatgtctttctgaccaaattgaacagacctcatcttgcagagcatgaaaaaagctctgccaagcttgtcgatcatccaatgcttgggcgcattgagcctcttcaagtgttcttcaatcggacgcggggcggacgcgtggg

SEQ ID NO: 71769 - DNA, 1210 bp, Zea mays
  Clone ID: MRT4577_165457C.1
tccgccccgcgtccgcccgtagtcggcgagcgcaccgccaccgggggggatggcgcggagacggggcggccccgcgccggcgacagcggtcgcctcgccggccgtgctcggcactgtggccgtcatggtgttcgtgtactactccacggtgttcgtcttcctcgatcactgggtcggcctcgccacgccgatcggcgccgcccacgccgccgccgtctcgctcgccgtcgccgcgtgcttcctcgccttcgtctgcgccgcgggcgccgacccgggcgccgtcccacccgccttcgcccccgacgccgaagccgcgcagggacaggggttgaaatcaaggtattgtgataaatgttgcatgttcaagcctcctcgtacccaccactgcaaggtctgcagaaggtgtgttctgaaaatggatcatcactgtgtctggatcaacaactgtgtaggatacgcgaactacaaagccttcatcatttgtgtcctaaatgcaactattgggtctctttattcatttaatattttgcaggtgatatttctatgcgatctacttctgaaagagcatgactttgatattctatatgtgaaaatactctatatcttggcaggtgtcctcttgttcttcttaagcttgacaataggttctctactaggctggcacatctatctattgtgtcataacatgacaaccatagagtaccgggaggcagtaagagcgagatggcttgcaaagaagagtgggcagaagtaccgccaccggtttgatcttggaatactgaagaacattcaaatgatcctgggtccaaacattctttgctggctttgccctactgcgacggggcatctgaacgatggcaccgagttccaaatcacgaacaactgatgaatgcgccagcagcatttccagttaccacgtgctaccgtgtagatttccctgttcattcttgtaaccaaattgctccggtaggcctacaatcctgttgcattggctttcttgcgtcttgctagctagggcacctgtagaaaccttcagttcttcccgatcttgtaacagcatgtaaagctttttctccctctcccagtctccatgtattttgttcattttttgttgttgtacgagtaaagttgttcttgaggccgaacctactctactgaaacattggatcgtgaagttaatgtgaatatgtgctgcaacttatcccaaaaa

SEQ ID NO: 71770 - DNA, 285 bp, Zea mays
  Clone ID: MRT4577_165458C.1
cacaacgcaacctgacacactgccttcgtggctagaactgtggcgtgcaacacacatctttaccacttgcgctaaccacattcttgctcgtatcaatgaatgtaacctcatttgcacccattgcgagaccaaaccagctgctgattagaactatggcaccacaagcgatcattccacccaccgagtaatccagatcatgcgtacataccaccatgacgttgtgaggctctactatattgacgatatgctcgatatcacagaagtgcagacatatcttatcaatag

SEQ ID NO: 71771 - DNA, 397 bp, Zea mays
  Clone ID: MRT4577_165459C.1
gctagggcgtccctgagtagattgagacaaaaacagtgagcatcatttactgataagttgcctaaattatatccagctgcacttaatcttttgaaaatggttctgggattttgatcccaatggatagacaacctgctagaaaattcatcactctgatccgtattctgaaggcctatctgaattaaatagaaaaccatgctgccagaagttcacatatatggatttctagtcagagcgacacaaggctaccaagagtcgatgctgacgaactcatttggaggcagatacaggaggatcatgcttttcttactagggattacatgaggcgcactgatatatccaactttctatatgatagcgctgctgaccatctcaagaggacattcgcatactggta

SEQ ID NO: 71772 - DNA, 2239 bp, Zea mays
  Clone ID: MRT4577_16545C.1
ctaggcggggctccgatggaagggcacgtgatggaacccgctcgggtttgctcccgacctttcgatgagagtgggggataacgcgatttgaggaggatcgacgttgtgctgcccgactacaacaccacaagggctaggctgcaccttagcaacagttacaccgcctccaatttgtgttgttcttgttgtgccaagaacaaccttgaaccttgcccaaaggagaaatctgatacacacgaagttggggttctgaatccagcaaatcgggtggtctaatcgacacacgcgcttgccagaaagtagcagcagcccaaaatctgcaggcaactcaagtttgtatgcattatcattgatcttagctacaactttaaaagggccatcagctctcgtaagcaactttgacttcctcaaatcaggaaaccgatcctttctcaagtgcagccaaaccaaatcacctggttcataagtgacatgcttctttcctctactaccagcaaatttatatttagcattcatggtttctatgttctcctttgtggtctcatgcattttcaacatcaacccagcacgttgtttagcatcaaaattcaatctctcagaagttggtagaggcagcaaatcaataggggctcgaggtacaaatccataaacaatctcaaaagggctctttttagtagtagaatgttgtgaaccgttgtaatcaaactcaacatgaggcaaacattcttcccacatttttatgttctttttcaaaatagcccggggcttgccttcaaatgctggggctgcggggagatcctctgtggcaggctcgggagctggctcctgatcttcctcgtggatagctccttgctcgggaagtgttaatctgttggtcatataatttgcttcaatgggccttttaggggttattactatcatgggtttttgcatattttgaagtggtaaaccatttgtattgacatagcgaccataaatgaacgaatgtgtagctctaggatcaaataatatagcaatagcaatatcagcaccgtcagcagtagcatcaccactgacttggttgactctggaaatgttgaaccccttgccggaagccggagtctgttgcttcctgaacattgcttcgagccggagtgttggggttcctcttcggacaagcattggcgtagtgcccaacctcaccacacttaacagctgaatgaatttatcctggtattcactaaatgtcatgttgccttgcttaagtgacaagatttccttcttcttgaaaatgtgggcggcttgtgactcatgaattctcggtgcttgtcccagtcgtggtgggggtggaggtagtgttggttgttgctgtcgttccagtcgttcttgtctcatctcctgtcgcatttcctgccgctcctggtgcatctcctgacattcttgcctcatctgagcttgcatttctgacatagtatttgccatctgctgcatctgctgcatatgagcggcagctactggatctatcccagccggtggagggttcggtggaggattcatctctggttgtggttggttagcaatcctcctgcgacggtcattggcatgtagatcgataccgcctcccttcctggtattgaccatcttatggtggtatatactagaatgccctgttataccatctaccacggggtcgtgaatcccatacacctctaccaaggaagcgaggcagggtaacactacgaggcctttacaaagttccactagcttcagaaaacctgctacagtttatgggaagagcacttgcaagaatcccccgtctgaccgtcatcgcagcaaaatcatcccgagaacctctcttgcatgcaactcccctactgcccttgcccctttcgggtaaggtagtcttccactagctttcctaattagttacccaagggcgtcccattccacccttgtggtggcacatgtttcccaagttaagctccacgttccaattaaagataatgatcttgacatgaacataaataacataacataataattggaacatggatataatgtaatattaatcccaaaaccacataatgcaatagcaaaactaccctattgggacctattgggacccatcaaaattaagcctatgcatgaataaataattataaagaacattattagaaaaataaatgtgatcaagggcacaacttgtctggcacttgagattccggttaccagggtgattcttcggatcctcgtgactgca

SEQ ID NO: 71773 - DNA, 110 bp, Zea mays
  Clone ID: MRT4577_165460C.1
gccgttcccggtctgcatccgccacgttgcgcggcgtcaccctccatgctccgggctgacgacgccaggccgagcctcgacactctgcgaatacggatcacgcgcgacaa

SEQ ID NO: 71774 - DNA, 748 bp, Zea mays
  unsure (1)..(748): unsure at all n locations
  Clone ID: MRT4577_165461C.1
ggtaccctctcattcggccgggttggagaagttgaagttccagcaaatattttatcagatggtactctcatctgttactcaccgcagcataaacctggtcgagtacctttttatatcacctgctccaacaggttggcctgcagtgaagtgcgagagtttgaatttcgaccaactgtctcccagtacatggatgctcctagtccacatgatgaaacaaacaaagtttatttccagatacgccttgacaagttgttatcccttggaccggatgagtaccaggcaactgtatctaatcctactctggagatggttgacttaagcaggaagataagttcactgatggcgagcaacgatgagtggtccaacttgctaaagttggctgttgataatgagccttctactgctgatcagcaggatcagtttgctgaaaacttgataaagagaaaattgcatatctggcttctaaataaagttggtatgggtggcaagggacccagtgtgttagatgatgaagggcgggttttgttagtgggaacatgatcaagttttttaagaagcaaaaggttcagatcagtgacagaaccctccatttcgaaggtagttaaggtttcattgcagaatcgctgngaaaaaggtcatttggcgtgccactgctgcccccaaagtcccaaatagttaatttgctctcttccagaactgaaaattccaattactttctggcaacatttgaagactcttatcattcatg

SEQ ID NO: 71775 - DNA, 265 bp, Zea mays
  Clone ID: MRT4577_165463C.1
aaaacagaatacatttcaatttaaatcccccttcaaaatagcccggttttcatagggggggggtccaataaacttccccaggggcccgggcacacaaactggttctataacacactgggggaatgggaccaaaactgcaacaattgggccctggtcaggttttcctatcccccatggaattggaaagggtgggaaaaaattttgaagggttttgacttgatttggaattaatctcacccaaacccccccaattcatatggggggg

SEQ ID NO: 71776 - DNA, 612 bp, Zea mays
  Clone ID: MRT4577_165464C.1
cacgcctgcgtgtaccgggcccctattacacggtcgacctagtcgttcggtgtaaacccatatagtaacagcccttcatgtatccatcgggacactccaaacatgctccaaaccactataaccctggactctaacatcatccgcaatccctattacggcaccacccatgatgggcatgttgggggcaccactacatgagggcgcaacaactacaacaactagtgctagcaaaccttgctgcatactcagagcgccatcagttggtttcattcaaccgactaactgcatcgaactctgctggttatttaacgacaacaatttccattcagccagctagttgcttgctacccccagcaatttcttccattcaaccaactagcacaatgcaactctgctgctgatttacagaaacagctactactacgcattcaaccagctagctgatgtgagccctgctggcttcttgacacaacaacacaatgttgcccagtctacctgcacgctatacctaacgctggctccctcttacaactgcgacagttgctgccattcaaccaacttgctgtgacaaacccaacagtgctctaccaacaacccatgttactggtgccc

SEQ ID NO: 71777 - DNA, 813 bp, Zea mays
  unsure (1)..(813): unsure at all n locations
  Clone ID: MRT4577_165465C.1
gccggccggtttccgggtagcaagggtaatgaagggacttgagagagctaggatcccaaaattgaatagtaagtgatcctagccccctcaatcccctctattacactcgctcccaaataaggacggaaggtttcaccacattttctgcaaaaatagttacgttcctgctgacgtaagggttactaaattctgcaggaatccactgtcgccctgtgtagtaagagaatcctagaacacaggaagtataatcgtgatgttgtactttatgtagattgataatcttgagttcctaattaattccgtttccccttctatttgttctgtgctcgactgtaatgttgtaattagataggttttagctgagttaggactggattatcaagtcacaataatgatatttgtcttcgccatcacctcggaggctcggaccatgttcaatgtgatacagtctaccatgcaatctatcaccatcggcctgctaactcatgccacaccctttaggctatcttcagcatcttatctatacacataccagtatcttacatatagacatatctatgatgttgatcaaaggggccgtgcaaaggagtgagagtgnggatttgaaaaagtgtgattattagcgggcgattaagtgtaaaattatccacgttcctgtggtccttggatcaacatcatatggttcagattagaagtttgcatggntgtacggaggagttggtttgcaccagatacgttcccatattntaattacactatacaaacattnacatgtacangtgaaaatgtgtaaagcattgnttttgagtgatc

SEQ ID NO: 71778 - DNA, 209 bp, Zea mays
  Clone ID: MRT4577_165466C.1
ccaaacatattttttccttatatattattcctttccatttaaaagaaaaattcaggtcattgaaaaaactgccccccagggtgaagggggaaattagggtacttgtcccccctaaccactaaggtagggggctaccttcctttcccaccgcgccctttaaattataactacaggacatagtttcctaaggaggggaccccttcgttttt

SEQ ID NO: 71779 - DNA, 467 bp, Zea mays
  Clone ID: MRT4577_165467C.1
agctccttgttaaggactaggcgcacggaaggactggatctcacgggaggagatggtaggcttgttggtatagcgcgcgagctaggcggcctgagcagcaagcttctcaaagatatcgttaatgaaggagttcatgatggacatgggcttggaggagatgccaacgtccgggtgcacctgcttcagcacctagaaaatgaagatcttgaaggtctccaacgctcttcttgcccttcttattgcccctcttgccctcgccgccttacttggcaaagagacttgccagcggagacccggtactccgacttcagcttcttcccggtgggcgccttatcggaagcggtctccttctgcgccgactactacaacgcgagtctctaataggacatgggcgccatagatgcaaggcgagatggggattcggctgcgaacggaggatcggatggcaagaaatgcgaggagacgcc

SEQ ID NO: 71780 - DNA, 164 bp, Zea mays
  Clone ID: MRT4577_165468C.1
ccgagttcacttacccccagcatttaacgccggcgacgcaccttgcgcagggagtggagcctagccaagcacgcacccatgatacctacctagctacctacctagcttacgcaaccatatatccattggttagctaagctagaacgaactggatcgcaaggata

SEQ ID NO: 71781 - DNA, 2114 bp, Zea mays
  Clone ID: MRT4577_165469C.1
aatataatataaataagtactattcaatatatcataaataagcattgtcaaataacacatacataagtgtactctaaatctaaactaaaatacaactgtttgcactaatgttaagcctaactttatatgaattcaagtctccacattttgcggccaccaaatttgaattccattctatgttttcgtgtacaataaataggagaaaactagacatagcaaaaagctccaagcagcacgtggatggtctcgaagctgcccttgtgcttctccctgttcttgatcactcctacatgcccggtgttcctcccgccggtcatcatgaccacgttgccgacgtcaaacttgatgaagtccatgattttgttggtctccagatcgatcttgatggtgccatttctgcaaacttttagctatacagaagggagattgtgtttggagtaaagaacgaccaacctcaccacatatggactcaaagaataactttagatctgcttgagtgaccttcttgtcaatgtttgtgcagtagatagtccttgcacacatttcacgttcatcgtcagacctcatcagtgaactctatgaaagcaaacctaaggactgaatttgggtccccacacatgcgacagtccacaacctgtccgcaatttataaatagtgttgcgaggttttcttcagtaaccttcgctgctcattccatcattcgtctagaagcgacatgaagctttctccggtctctctgaaatccaccagcatgctgcagatctctcattgtgcaagacgtctatctgatgaaggactgtaacttcaactcctgcagcaccacgcattcgctctcctgcgcgcccacgcactgccgcacactggtcatgcagcacactgcacagaaatctatgcaatgttgtacaagatttacctcatcgactagttgcctaactaaaactggtcatacagtcccaacagcaagaatcctaatttaactcctagttaacttctaaaattttcatgtgcctaatacttcaaatatgctaataccttatattaaagtagatctaaaatcacccacttaatcacatatatgtactagtccacctcataaccgtgcacaaaatcatttcaaataaactcataattttatacctaaaattcacatataaacacaatcaacacaacaacactgataggacccgtcagatagccgataaaaattctgaactcatcctacgcaattttagttcaccacaatcataacatcgaacctataaaacctagacttggtcatatcattataaataatgggacaactaaacaaacactttatggcgaggcacttcaacgatcatctaatataagcactacaaatacttaataccaccacaatatctacaaagaaaagagaggaaagaatccttccctgtataactcaatggactagcacgcaagcactgctacggatcatgaggttatcccagagcacatcaacctcaatcaattccgaatacacaagaacgacgtcaatcccatggctcaggcgtcccaccgaatacctggcgagcatcacatgacctcactcctttaattacttccttgctcaaacatggggatttcaattctgagcaaacatcagcgtggagctagggaccgagcagaggaggtccgaaaaggaacggtacctagatgcttgaccacaccattgggaggggctgggagctcgacatcggcctgggcgtcgatgtagaggagcagggacgggagggggcgcttgtgtgctggcatggggagggcgcggcgagcagaacggtcggacctggcaaatctggtcggagcagggagggaaccaggggggtggaggagctggacgtgagggcgacggcacgtccgacgttggggctggggcgagctcaccaaggaagcaggggcacaaccatggtagggttgctgcagagaggaagatggagggaggggcatcggctggacacaacaacaggaaggggagctggttggacctaagcagggcgacgtcggcaatggaggtttgggcattggagacgctcgacatgggagaagccagggatggcgcttgaggaagagagatgctagtgaagggatctcacgtg

SEQ ID NO: 71782 - DNA, 514 bp, Zea mays
  unsure (1)..(514): unsure at all n locations
  Clone ID: MRT4577_16546C.1
tcgtctcgtcccacgtcgtctcgtcagtatctagtaacctgctgactattagtggtcaccggggtagagtgcccttggcgtgacgctgactcagcaatgcataatatggctccagtccaatctctcgatctccatccggcatccagctcgtcccgcaactccgcaanagctagcttctccggacttagtctagggtcttcgatctacgctcgcttagatctaagtcctctactcccggcatctcgagggtcgcatgcgttgatgggcggcggcatccggcggacgctaagggcggagggccgccaagtatggatcctcactcgaggaccgatgactgagttcgaagagcttcgagaatcgaccatagaatgggatgacccaggaagaaggcatacgaagccgtccagcatgtgggaggatgatntgggatgaccgatgacgtgaatcgatgaatttctctttgcatgctcaagggaagagcttggacggaagcaatggcccagaagagctgaag

SEQ ID NO: 71783 - DNA, 787 bp, Zea mays
  Clone ID: MRT4577_165470C.1
accggccaaacggtggtatagctacagcagagtcatcatcccttgaggcgcgccctgctgctcgacctgtgagcctgtgaagcaaggtcgccatggcgggaggcaaggtttactcgttcgaggaggtgagcaagcacagcgatcgcaaggattgctggctcatcatcgccggcaaggtgtacgacgtcacgccgttcatggaggagcacccgggcggcgacgaggtcctgctggcgtgcgtcggaaaggacgccaccgccgatttcgaggacatcggccacaccgactccgccaaggagctgatgccgcagtactgcgtcggcgaggtcgacgcggctaccatcccggccaagctcacccacgccgtcgtcaccaaggacgccgccagcaggtccgagaagaccacgacggcgagcgccggcacctgggccacgctcctgcagctcgccctgcccgtcctgctgctggccctggccttcgcgctgcagaactatagcagggccaaggcagcgtagacaagatagatagctaccgtcgttgattccgcctgtgtgagtgataccgtcgttgattccgctgtgccgcgggcctgcggcctcttggaagcatctgaaagctggagcagttgttgatgcgagtgtgacgtactgtgacaaagtatatcctaaagtgctaattaattaagccgctcgtggtatcgttactttcgtataataatggttgaattttgttcctggtaaagtttgttactcttgtgtgctgaaactcatatattcaggctttcttc

SEQ ID NO: 71784 - DNA, 2866 bp, Zea mays
  Clone ID: MRT4577_165471C.1
accattcaatatatcataaataagtattgtcaaacaaggcatacataagtgtactctaaatcaaaactaaaatacaactttttgcattaatgttaagcctaactttatatgaattcaagtctccacacttttgcgaccaccaaatttgaattccattctatgttttcttgtacaacaaataagagaaaactagaaatagcatgcaaaagcctccaagcagcacgtcgatgacctcgaagctgcccttgtgcttctcccagttcttgatcactcctacacgcccggtgttcctcccgccggtcaccatgaccacgttgctgacgtcaaacttgaagaagtatatgataacaaggattggttatcatggggactcaactagtggaagccatggaatgccagtttgtaatgatttgatagtttgcagtggaaatagctacgctggaacacaaaattcttttaagagaccaccactgcacatccctgtcattgcccaaaattggtggttacttgacttgccataaagcaaacttttgtatatcattaatactcttgaatcacgtgacagcctgaaagacatccgttaggaataagtgaaggtatccatagatgcacttgcaaaattatgagtgcacaatttatatttaccaaagaactttcttctaatgatttttttctattttggctcaaggatgtgtgcatctgcacaaacttgaaaaagttactggttcaaaaagtaactggagaggactgttcatagagatgaattagaagcctccttgtttaaaggtttttgcagcacaggtcaagtcacaattttttccaatttgccaatatctccaattgaggaaaatccacctccaatgtctacagtacccaataaatccaggtctcaaaccttgctttactgcccccagttccaaaatcatttatttgctacatggatttccaattgtcaacatcctaaaagcatagataagccagacgaagcatccacagatagaaatcccaaaccgaacattatgacagttgaactaccaattacttgagctaaatggtctgcagaacacagaaataccagtagcacaagaattaaagcttcagtcagagcatagcaagataaagcagaaacaagcttgattaaatgaaagttgtagtgttgtagttctagcgatctccagttgaatctccgaagttaaaacatgctcattaccttctacaactgcagattaaattagaagtatctgaatattatattaacatagtaatagtattatggttcgtaaaggactggcctggtacaatagcgagagaggtctcaagtcaccatgtcacgggtttgaagcagggctggtacaatagcgagagttgctctaagtcaccatgtcacaggttcgaagcagtctcacaagtatcatggttcatatacaagaattagtaaattggataagttagtacccccaacacataatccacgatgacaagcccaagcaaaaaatagtagtaagacctgcaataatgaccctaatcattaactacttcaaggtagaagacactgaccaaacacaatgcaagttgaaggttgtaggtctgaatagatgcaaactggttccttcatgcccagctatcacctagagatctgcagtcaatgagaccaccctcggataactacctatttgatagtgacaactgagaacacaaacagcatgaacattcatcaaataacttaggaataggataaagcgtgatcaatgggcaacaatttcagctagaagtcctatctctgtagcaatgcctcccaaaactgcacatccagtaccagaacatgaaaagcctacgagggaagtaaatttttaaagaccattgacagcaaaagtttcgaacaacattgacagcaaaccaagggaacctgaacagtttataacttattgctcatgcagaaccagaatctaattcaggctcctccgtccatacaatccagttgctgtacaagtagagaatcaccatcccaaatgtgtaaggaacaagaaatttaagagtaccaataaaagagaggtagagccaaacgatgttctccagatgcaataaacttcagtccagtcaaagcttcaatccacctccaaaatgtttaaatctacctccaaaacaccacctgatccagctaataacatttttctaattaagggcgatcaagcttcaaattaatccggtggcaatcttcacccaccagtgattgacatatcaaaaacaaagtcaaacctccagccttcagctgacctctccataaccagccaggtacttttgcatctaggacgaactccgagtctcctaaaagtgcgcagatttactaacaaatggaagcctatgaggaaagctaattttcaaagaagattgacaaaggatggttagtgaacaaacaaggaactctgaacagttcagaacttctgattgcaggagatgctggagaaaacaaccagccccaatttaaaacatttaagaattgcagcggacagaaatgtgtataaaccaatagaagagcgatttaggtagatatatcctgacaatcttcacccggtactatgggcatcagtccagtcaacgcctcaaatctacttcttgcccttacagatccggtaagcagcatttccaatgaagggtaatcaagattataatgccaattttcaaagaaaaatgacaggagaggggggtgggttagtgaacaaacacaaggaactctgaacatttccgaacttctgattgcacaagcgtaagccagatcgatcaaactcgcctccaacccatccattcatccatataatatttgctggaaaaaacccaccagccccatataagaatttagaattgcagc

SEQ ID NO: 71785 - DNA, 2995 bp, Zea mays
  unsure (1)..(2995): unsure at all n locations
  Clone ID: MRT4577_165472C.1
ataattaatataatataaataagtaccattcaatatatcataaataaacattgtcaaacaacgcatacataagtgtactctaaatctaaactaaaatacaactgtttgcactaatgttaagcctaactttatatgaattaaagtctccacacttttaggaccaccaaatttgaattccattttatgttttcctccacaacaaataggagaaaactagacatagcatgcaaaaactccaagcagcacatcgatgacctcgaagatgcccttgtgcttctcccagttcttgatcactcctacatgcccggtgttcctcccgccggtcaccatgaccacgttgccgacgtcaaactgaagataacaccaatgggaacaaatatgaccccgacgatgaagaaacacgatcaccggaatgttatagcaaacccaggtgaccacatcggtctgccagtttgaagatgtagtgtactgtaatcctccaaggaagataacaatgatcttttctttatgtccgtgtaaccaactgccttcgcaagtgctttggcaagcaagtcagctgcagacaaactggaagagcttagcaactgctctgcttgctgcctgaagataggaataacactgtctgacacactcgcaatggcatctgcagcttcactgccagcagattgtgctacatcagtgggttgtggcgcagagatatgcttaaatttaaccccaggctccctttctagtctgctgacactgtgcttatatctgggctcataaagcatgacaacaacaccagtattaccagaaatatacagtcttgcgctacatctccatgcaaggcgaggtctcgtggaaaaagctgcccttgtaatatctcaacctcatttcatatctgaatgtctccttcactgtaagctctcctcagcccaaatgctgcctcaaagtccagcccctggaagtcaagaaagtttggcctggcaggtccattcatccaatctgctgagttgaggcatccagaactaacacttttttggagcgagcattcaggaacggattgcttctctttctccatggccgggagctgctggttctgtataagaacctgttcagcttggcttgggatttcttcaacttgcagcttggctggttctgtaccaagttcccctgttgtatatcgtaccgtcagtacaaaaaatgaggattccctgccactctccacgccgctagtgataggtgaggggtcttcagggcgtgtcctcgttgtctgtccatcatcttcctcctcctcgaagatcacctcatcggccctctcaaacgacgcccccacctcgtcgggcgccacaatccggatcgacacctagtcctatgtactacatgctgaaacttggagaaaaatctagatgcatatgtgaagtccatcaaatatatgaaagtaggatgatatcattctaaattaccattatatatctcataaataaacattgtgaaatagctcatgcataagcgtactctatatccaaactaaaatactaattgacaaatttggtaatcaactgtttgcgctatcgttgtgcctaactaaatatatatgaaatcaagtctcgacactggtgtggccattccatcttttcctaggaagccatgctagatttagttatatgaagcaccctcaaccctgcatgatccactaatgtctatcacctcattcatgaagaagtcgagcaaccgttctcggacatgcacaaaaacatgtagacagcagcacaacgattaattgttttattcataactcacaaaatatgcatccaaaaatagtaaactaggactttctggaaagcttagaaagtcctctataactcttatattatcatcacaacatgattcaacagtttgaatggtcaaacagtgctaaactttaattctgtccagatttggacagaattcggctcttcacttcaaaaatccataactggagtttcataaatccaaatcaggtgatcctagactttttagaaagctaatagaattgtctataattcatttataatcatctcaaagtgattcaatgtgtatcgaagtcagttaatacaaacaaacattgctgtccagatttggacagattcagagatactaactcaaacagctgtaacttaatttatagatcaccaaaaagggtgctccaaaatttgttggaaagcttaagaaaagtactacaattctcctataattactaagagctaattctcagtttaacttggacaaacaaggtcattttcgaaatcagtacagaatctggacagattctgaaactggacttggaaaaatcataactcctaaactactgaacctatggtcatgaaatttttacacaagcaagataaaaagattatctacaagttttatatataacatttctacagaaaacacggtttactttacttaactagccacgtaataaaattggacatgcagtccaaacagcaagaactctaacttagatcttatttaacttctacacttatcatgcttttaacatttagaacactcaacactttatctttagtagaactaaaaccacataatacaacaaggcattcatgtcaccatacattagaaattcactcaaccaccaataaatcttgtcggcaaagcgctataagtactaaacgttgtttttacattattaacttgatcactcaattcatatacaataaccaaatcatttatacttgagaaatacccttaccaaagtactctgcgtacaatccacttacaagcatcatgcatatctctaattagtttcataatacaatacatactcgccttaattctaacttatgccatatcacacaatggcatacatatttatcgacacactcttcacaccataaactacattttaacttaatctttattatcgaacgacgcatctcctttatttttctcatncacctcgcacatacaaacacatcatcaactaaatcacaatactagttctagatcgcga

SEQ ID NO: 71786 - DNA, 1364 bp, Zea mays
  Clone ID: MRT4577_165473C.1
ctatgggcgggggctgggactcgcgtgacggacaactgcaacacacacgtccggaactcgctcgccaaggctaactacccgccctacggcatcgacttcgccggcggccctaccggccgcttctccaacggctacaccatggtcgacgagatcgctcagctgctgggcctgccgctgctgccgtcgcacacggacgcggcgtcgagcggcggcggcgacgcggcgctgcacggcgtgaactacgcgtcggcggcggcggggatcctggacaacacggggcagaacttcgtggggcgcatcccgttcaaccagcagatcaagaacttcgagcagacgctggagcagctgcggcggcggacgacacgacgaggccgggcgcgggcgcgggcgggctggcgcggagcatcttctacgtgggcatgggcagcaacgactacctcaacaactacctcatgcccaactacaacacccgcaacgagtacaacggcgaccagtactccacgctgctggtgcgccagtacgccaggcagctcgacgcgctctacggcctgggcgcccgcaggttcgtcatcgccggggtgggctccatggcctgcatccccaacatgcgcgcgcggagccccgtcaacatgtgctcgcccgacgtcgacgacctcatcatccctttcaacaccaaggtcaaggccatggtgaccagcctcaacgccaaccgcccggacgccaagttcatctacgtcgacaactacgccatgatctcccagatcctaagcaacccgtggtcctacgggttcagcgtggccgaccgcggctgctgcggcatcgggaggaaccggggcatgatcacctgcctgcccttcctgcgcccgtgcctcaaccgcaactcctacatcttctgggacgccttccacccgacggagagggtcaacgtgctcctcggcagggccgccttcagtggcggcaacgacgtcgtctaccccatgaacatccagcagctcgccgcatggcagccgtgactcagtgcaaagctatcgatcgatcgatgcgtcgttttgtagcgctacttactgctatagcgtgtgtgtgtggtcatgactcatgagtaggagggagctgagcggagagttatggtacggtgcgtatccgcgaccagtctcctgttgtttggggggtcaacatcgtgtctcttttgtttttggttcatcatatcagttagttatctatcaatgtttgttcgcttattacctgtactgcatcacggagatcagtggagttctatattcggttttttaaaaaaaaaaaaaaaaaaaaaaaaagggcggcagctcgcgatctagaactagcggacgattgtgcggacgcgtggg

SEQ ID NO: 71787 - DNA, 1239 bp, Zea mays
  Clone ID: MRT4577_165474C.1
aattaattaatataaataagtaccattcaatatatcataaataagcattgtcaaacaacgcatacatagtgtactctaaatctaaactaaaatacaactgtttgcactaatgttaagcctaactttatatgaaatcaagtctccacacttttgtggccaccaaatttgaatttcattctatgttttcctgtacaacaaataggagaaaactagacatagcaaaaagctccaagcagcacgtggatggtctcgaagttgcccttatgcttctcccttatcttgatcactcctacacgcccggtattcctcctgccgatcaccatgaccacgttgccgacgtcaaacatgatgaagtccatgatcttgttggtctccagatcgatcttgatggtgtcgttggccttgatgagcgggtcggggtagcggatggtgcggtcgtcgtaggtgttcagataggggatgtctttctggccaaactgaacagacctcaccttgtagagcttgaacttggcatcctcatccctgattgggtgaagacgaaagcagcctgtagttctcgtttgtcttagggatggaaatgacatccatgaacccagcagggtaggtcttgtcagtcctgaccttgccatcaacaagtacatggtgttgcatcaggatagaaatgacctcacggtacgtcggtgcatacttgagcctgttcctgatgatgaggatcagaggcaggcactccctggacttgtgaggtccagaagatggcttgggagcccacagtaaaaaaagaccaacaaaagctccgccaagcttgtcgagcatccaataatattccattcttttgctattcccttttgctttaaataaatgaatcaattaccttatacctagcaacggcaacatctttggcttcagatgagaaaagcccagcaacagccttaggaactcctaagaaagatcctccaatattcattacagctttaatatggttctcacaccagttcggaccaccactgccccccacgggaggaggtgcttcgacccatttcgtaaaatgcagaaaatagaggacccccatggagtgtgggatcaccaccaccctatttccaccatttgtcgctactatgagttcaatattgctctttattctgctcaaagtttgatcacgaacctgtatatagtaatctgtgttacaaatatggcaatacattttataccagaaccatctacacggtgggaactgggaac

SEQ ID NO: 71788 - DNA, 586 bp, Zea mays
  Clone ID: MRT4577_165475C.1
ggccgcttttttttttttttttttaatataatataaataagtaccattcaatatatcataaataagcattgtcaaacaacacatacataagtgtactctaaatctaaactaaaatacaactgtttgcactaatgttaagcctaactttatatgaattaaagtctccacacttttgcgaccaccaaatttgaattctattctatgttttcctgtacaacaaataggagaaaactagacatagcaaaaagctccaagcagcatgtggatggtctcaaagatgcccttgtgcttctccctgttcttgatgactcctacacgcccggtgttcctcccgccagtcaccatgaccacgttgccgacgtcaaacttgatgaagtccatgatcttgttggtctccagatcgatcttgatggtgtcgatggccttgatgagcgggtcggggtagcgggagataagtcattggtataaaacttgatgaagaccatagcaaaaagctccaagaagttccatatgccacaaagtctttacaaatatgaacaatgtagggcaaaggagatatcgaaaccaaccccggccggcctcgagg

SEQ ID NO: 71789 - DNA, 597 bp, Zea mays
  Clone ID: MRT4577_165476C.1
ggtaccgggccctccccctcggatttttttttttttttttttttaaactttttatataattttttgttttttttgttttatttttaaaaaatacagctttattgtacttacaaagatacatgaagaatccacaacaagctgagggatgccccccttctataggggcagttgacactgcggttcccgattaaggaacaagggcacagcaatttgcaaacgttttgacaagctgcaccttgtgaacaatcatatatcaccatccaacactgggctttcacaataactacaatcgtccctcaattaaaaaaaacaaacatttttactccccaggattaccccaaactccgtaagcgctaaacagcttccccctgaatttggaaaataccttaacagtgacaaaagacacaaactttgctccatgctcatccatcttattgaccagaatccccatgtccctaaccatatttgtacccacttgaacaacacacccggccattttttacaacccactacatgctcagtagagaccactctggagcctaatgatctccctagcccacagggggctgataattattggccttgaaaccaataacc

SEQ ID NO: 71790 - DNA, 782 bp, Zea mays
  unsure (1)..(782): unsure at all n locations
  Clone ID: MRT4577_165477C.1
ggaacatcccatatttataaaattaaaataagtaccattcgatatatcataaataagcattgtcaaacaaggcatacataagtgtactctaaatctaaactaaaatacaactatttgcactaatgttaagcctaactttatatgaattcaagtctccatacttttgtaaccaccagatttggattccattatatgttttcgtgtacaacaaataggagaaaactagacatagcatgcaaaaagctccaagcagcacgtcgatgacctcgaagctgcccttgtgcttctcccagttcttgatcactcctacacgcacggtgttcctcccgccggtcaccatgaccacgttgccgacgtcaaacttgaagaagtccatgatcttgttggtctatagatcgatcttgagaaagagaaggaagctaacaaggtatgaatgctcttgcttacacagattccgtatcttgcaagctggactaacttcatccaacacgatgggcatgaacatgaccttgcttgcagatcccaacggtttcgcgagttcagggccttcgccgattggataaggactccagcgagcgaccgcattgcctgcacctgcaggctcagtttcaggaggggaagaagcatagtagcacagactgccaaaggggagctcctcgatgtacacgagaaggagcagggcagggtaggtatctcatgtatacaggtaaaacgcgacagatacaaangactcatacatcaccttactggatggnggctgctggcccttgaagaaccactga

SEQ ID NO: 71791 - DNA, 617 bp, Zea mays
  Clone ID: MRT4577_165478C.1
gcactaatgttaagcctaactttatatgaattaaagtctgcacattttgcggccaccaaatttgaattccattctatgttttcctgtacaacaaataggagaaaactagacatagcaaaaagctccaagtagcacgtggatggtctcgaagctgcccttgtgcttctccctgttcttgatcactcctacatgcccggtgttcctcccgccggtcatcatgaccacgttgccgacgtcaaacttgatgaagtccatgatcttgttggtctccagatcgatcttgatggtgccatttctgcaaacttttagctatacagaagggagattgtgtttggagtaaagaacgaccaacctcaccacatatggactcaaagaataactttagatctgcttgagtgaccttcttgtcaatgttaatttgtgcagtagatagtccttgcacacatttcatgttcatcgttagacctgggtaggaatgttttgttgactggtgcaatggcagtttttgacggcagaacattgacaggataatatccaagcacggctcctgacagattcagagcagcccttgcaccctctaggacatcgatgtttttcaccccataagcagtagatcc

SEQ ID NO: 71792 - DNA, 180 bp, Zea mays
  Clone ID: MRT4577_165479C.1
aaaattccttgtaatttgggaactgaagatgaaaataaaaacatgccctttgaaccggggggtcttctaaaattattaaattatatcacgtgagaacttagtgtgatcgaatacgcttctggctggttacaaagcgtggcatatttctatttttttctcaagcctgttaaccctttaaac

SEQ ID NO: 71793 - DNA, 207 bp, Zea mays
  Clone ID: MRT4577_16547C.1
tagggaaagctgagacgcctgcacgtaccgtaccggaattccatttccgacccacccctttcgtatctgttcaatcaaaaacacaccaagcgaagcgacattaacaacaaccggggcagggcgttactaccaatatataatcccttcttgcgctacttacgcttttttccatgtgcaacaaaatcctttcattatttcacaattctt

SEQ ID NO: 71794 - DNA, 371 bp, Zea mays
  Clone ID: MRT4577_165480C.1
gtgaggtcatttctatcctgatgcaacgccatgtacttgttgatggcaaggtcaggactgacaagacctaccctgctgggctcatggatgtcatttccatccctaagacaaacgagaactacaggctgcttccgtctttacccaatcaaggatgaggatgccaagttcatgctatgcaaggtgaggcctattcactttggccagaaaggcataccctacctgaacacctacgacgaccgcaccattcgctaccccgacccgctcatcattgacaacgacaccatcacgatcgatctggagaccaacaagatcatgaacgtcatcaagtttgatgtcggcaacgtgatcatggtgaccggtgggaggaacac

SEQ ID NO: 71795 - DNA, 566 bp, Zea mays
  Clone ID: MRT4577_165481C.1
ttttttttttttttttttttatggaacaacattataattaatataatataaataagtacaattcaatatatcataaataagcattgtcaaacaacgcatacataagtgtactctaaatctaaactaaaatacaactgtttgcactaatgttaaacctaactttacatgagttcaagtctccacacttttgcggccaccaaatttgaatttcattctatgttttcctgtacaacaaataggagaaaactagacatagcaaaaagctccaagcaacacgtggatggtctcgaagctgcccttgtgcttctccctgttcttgatcactcctacacgcccagtgttcctcccgccggtcaccatgaccatgttgccgacgtcaaacttgatgaagtccatgatcttgttggtctccagatcaatcttgatggtgtcgttggccttgatgagtgggtcggggtagcagatggtgtggtcgtcgtaggtgttcaggtaggggatgcctttctagccaaactgaacatacctcaccttgcagagctggaacttggatcctcatccctgattgg

SEQ ID NO: 71796 - DNA, 895 bp, Zea mays
  Clone ID: MRT4577_165482C.1
agacgaacatacaataagacacaaggacgatactagagcaggacacatcccatccacagatctagacacgaacatgctacagcacacagcgcaaatgaagaccctactttctaagccttcttgggcaggagcacggagtggatgttggggaggacgccgccgtgcgttatggtgacgccggccagcagcttcccgagctcctcgtcgttgcggatcgccaggagcacgtggcgcgggatgatgcgcgtcttcttgttgtctttcgccgcgttccctgccaactccagcctcgtgccgaattcggcacgaggagaactagtctcgagtttttttttttttttttttttaattaatataatataaataagtatcattcaatatatcataaataagcattgtcaaataacgcatacataagtgtactctaaatctaaactaaaatacaattgtttgcactaatgttaagcctaactttatatgaattcaagtctccacacttttgcggccaccaaatttgaattacattctatgttttcttggacaacaaataggagaaaactagacatagcatgcaaaaagctccaagcagcacgtcgataacctcgaagttgcccttgtgcttctcccagttcttgatcaaggatgtgaagagcaaatcttctggtaactttaactacgctgacaaatataatcaaacataccacaaattcatttcagacttttacatagtttttttaacagacttggtaaattttgaaggatgtattgaatgtatattattcttaaaatttagtcaaacaaattggtggtgcataactcaaagttaataactcatgcaaccaactcaatttgtgtataacaaaactatattaatacctacttacttgtaaaactt

SEQ ID NO: 71797 - DNA, 470 bp, Zea mays
  Clone ID: MRT4577_165483C.1
ttttttttttttttttttttttttttttttttttttttttttttggtattttatactttcttattttgttctagtattttctcactaattgaccccgggacaagttgacagaactacaaggtgaaaaccaaaacaggttcaggggaagaacaaaaaaaccaatccaacctaccccggagcggtttacttattgtcaactctttaggaagcattcagaacacctaaaaaaaaccaaagctcaccttggatagaagtatcctaaacaaaattggtaccgccccgcactggtaatgaaagccaaccttaaacaactagtgccggcaagacctgacctgcttcaccttgtgcaacctttaaaaaagcacaggacacagaaagagctggacatccacttgaaagaaaatagcacaagacgactacctggaaactataaaataaagggcgcccgagaaaagcggaccggtaccagc

SEQ ID NO: 71798 - DNA, 420 bp, Zea mays
  Clone ID: MRT4577_165484C.1
ggtctctacctcgcaattaaaaatgggggtccaaaaaaaaattttggtcccaaatccctcccaaaggaagggggcggagcaacaaatccaacaatataccgggccccggatccatttggcccactcatgcccaacactggtcacccccccatcggcgtcaggtgagttcaaaaaaacaaaacatcgttgtttggcgagccgaatccacccgaaatgtctcccatattgagcagggcaaaggagccactccccccaatgcccggggcgggccccgggctttgggggggaacccggggctggggggggaacccccccgcgccctatttgcccctcatttggtcccccaaagcgggggcgggggctgcggcggtgcttccctgggaaggcgtcaccttccccgagggccacctggcggcgggc

SEQ ID NO: 71799 - DNA, 266 bp, Zea mays
  Clone ID: MRT4577_165485C.1
tagtgccacactatgaaggggttcgttttattttcgcagcgcacggattctcaattaactacgcgatcgagcatgaaacatatctcattttggcacgaaatgttaacaccatggttaccgacatatctgtaggagcctgggccctttatctattaagccataggtgtgccagacatgtttgtcgtatatcgaacctgatgcagacaagccctatgcgcaccccgtttggtaccacgcgctgcgcttgcacatcttgtaaatggtgg

SEQ ID NO: 71800 - DNA, 326 bp, Zea mays
  Clone ID: MRT4577_165486C.1
ccgggggggcttttttaagggttatttccccccccctgggggcccttcctgggggaaccctcctcggccccaaggttggccttattgggggcaaaggtgtttcctggggggaaattttttccgcataaaatttcccccaggaaaaaaatcgtgtcctttaagttttaaaaccggggggccccacgggggaaaaaagtgaaattaattggggttttttaaatggccatttttcaattaggaaacctgttataactggtggtttaaaaaaagggaaaacccccgggggaaagggggttttatatttgggccctctttcggtttgttgg

SEQ ID NO: 71801 - DNA, 316 bp, Zea mays
  Clone ID: MRT4577_165487C.1
gagcaactctcatcctcactccccccactcgcccgcatcttccggtcttcctcatggcgtcgagcgacctcgccgagagcctcctccccggcggcgggggcggagcctccgcctcacatgacgaatacaaggagcgcgcgtacgactccgaggacaagatctgcatcgccgtgtctgattcccagtgccaagactgctcttccaaaggaagaacttggaaaattctacagcggagactgctatgttgttctctacacttatcattctgctgacaaaaaagaagagttccatctagcttattggattgggaaaaata

SEQ ID NO: 71802 - DNA, 817 bp, Zea mays
  unsure (1)..(817): unsure at all n locations
  Clone ID: MRT4577_165488C.1
gtttcctgggctggctgaccagtgaccagccctctcccacgtcgcacgcctgtggctcctgacctttccaccaccggagttaatgcctccgcctctccgtcagcgccgcctggcctcgccgtctcgctgtgcgcggcgtgggtggtagcagtaccacgcgtggtggttgattgagccattggatgggcggaattgccgttggcgagggaatgggttctgcggaaggattctgagccgcggagtcgggggagggaggaggcgcgacgctggtgcggccgctgctgcctcgatctcttgccgcctgggctctcgtacgtacgtcctcgtcgccgcggcgcaatttggcggcgtgcgcgttccttgcctagattggcgcgatccaatttctgagaggcgtagaggtgcggcgccgcagaacacgagcgcgcgcgcctggtgcttgctgagaagcatctgcaaccgtcattccaggctcacgaggaaactcatttactcgaatcatgtcggactttgtcaggagtagatatgataagaaagaagatttccaagttttgttgagcaagaaagatcctggagaacaacctcagcacaaggattacctgtggatggcacactggaccaaagcaagcagcgctgcagaaccccgaaacagtgacagcaatcctttggaggataccaacaacggcactgctacgaaagatagcgagaccttgcctttatgattcatgaaatctacagttgctngaaggctcatggtangagtacgccatggaagtgcctccatgcagcatgcccgacaattcaagtctagtatgcg

SEQ ID NO: 71803 - DNA, 686 bp, Zea mays
  Clone ID: MRT4577_165489C.1
tttcatgttcctcctctcccttcccctggcctcccatccggccatccccgactccccgtctcctgggctggctgaccagtgaccagccctctcccacgtcgcacgcctgtggctcctgacctttccaccaccggagttaatgcctccgcctctccgtcagcgccgcctggcctcgccgtctcgctgtgcgcggcgtgggtggtagcagtaccacgcgtggtggttgattgagccattggatgggcggaattgccgttggcgaggtgaggcgccgtggagactgagggggagctgttgtggcgcgtgtctccctgtcgctcacagcttctttttattcactccgcgcccggttccgttccagggaatgggttctgcggaaggattctgagccgcggatgtcggggaagggaggaggcgcgacgctggtgcggccgctgctgcctcgatctcttgccgcctgggctctcgtacgtacgtcctcgtcgccgcggcgcaatttggcggcgcgcgcgttccttgcctagattggcgcgatccaatttctgagaagcgtataggtgcggcgccgcagaacacgagcgcgcgcgcctggtgcttgctgagaagcatctgcaaccgtcattccaggctcacgaggaaactcatttactcgaatcatgtcggactttgtcaggagtagatatgat

SEQ ID NO: 71804 - DNA, 288 bp, Zea mays
  Clone ID: MRT4577_16548C.1
cggacgcgtggcgagacgcgtgggcggacgcgtggcggaccgtgggatttaacttatgcagacccctcaaagttcaggcttacgcaccaaagctcttttgtgagctcaacatgcaaactcttggagcaaaatcacaatcacgctctattttgtgagtcatttcatggctcctttctgtggctacaataagtttcatagactatgtaatactttcttctcagttaacacttaacatccacaaaatactttgtataaatgtactaaatattgaatatgaagagtttgtag

SEQ ID NO: 71805 - DNA, 842 bp, Zea mays
  Clone ID: MRT4577_165490C.1
ctggcatccctccatggtcggatccccctgcgatggacgccgcgcaggaagccaacgacgcggtccccacgctctccttcctcctcctaccgtacagcacctcgacactccttccatggcgcccagcaggccaagctcctccaacggcgtcctcccctccgctgctcgacacccacagctcctttctcccatggcgcagcagcaaacctccatggccgcccatctgttgcataccagcgcccctgcccctatctccaacccctcctcgctgttctccgtggagcatgccggctattcgacgaaatgtccagctgctgtcgcagggccccctgcctttcccctcgcgactgtagcctcgacgtcgtcgtcgaaccttccttgctgcgccttgcaccgtcgatgttccttgggcgttcgataaaatgcctaaccgagcagcttgtcttgggcagcccgttcgcgatgtcgtcgaccccggtgagacacctcgctgcccttgctgctatcgtatttttgtgcttggtaaaaatggttgaactgttgtatgtgtctaatcgcagctagccgtcaatgccatccgtcgcgcacgcgtgttcgaggcaagaccggtcgggtgaaccacatgcatgcccaactcatatccgatttcgttcaggttgattgattcatagtttacaatatgtatgttttggttgatggtaggcagtgcatgtatgtgtggatgtgtaaaatgattcggttatgcgcattggtaggatcgcgtttacgattggagaacaagaggttcgatgcgtgcgatttgtagttgtctaattatgttttggtcgatgtggtgcatgttt

SEQ ID NO: 71806 - DNA, 548 bp, Zea mays
  Clone ID: MRT4577_165491C.1
aaatccgataatgatattgtatggtgatactaaaaatattttatgtactttaatgaaataaaatactaacacggtaaaacatgcagttgattcaatattaaacaaagaacagcaaaccttacctcaattgaagacagggggggggaaaatattaagtcatagaaaagaaagaaattatatacataggaaaactaagaacacataatattaaaatgtttcaaaataaatttccaagatttatgcaaaatcttcatatgtctttacgccatctgctatgacgttcatagcactaatcagatctgcaccaatatcgcgagaaactattgaatccttctcgtatttcggatgctttaatacaaaattcctgatccatttagctattgtaggtctctcgcctgtcgctctttgactcagaatttcaaagtacttcatattttcaaccaacggatctattgtatagttattggcttctttcttcttcctccattctccttggatatcaactttgtattcctcttgacagaacttatagacaagattaaacaatc

SEQ ID NO: 71807 - DNA, 586 bp, Zea mays
  Clone ID: MRT4577_165492C.1
acagatcctactaaaatccaagcaatagttgattggcctactccacaatgcctcaaggaattacgtagttttctcggtcttgctggttattacaggaaatttattcgctattttggaattatttgccagcccttgacatccctcttaaaaaagggagtgctctttgtttggacagcggaccacgacttggcttttcacaccttacaacaagccttggtgtcggcccctgtacttgccttgccggatttctcctcgcaattcaccattgaaacagatgccagtgacctcgacattggggcagtattaatgcagcatggtcaccctctagcgttcctcagcaaggccttgggtcctaaatctcggggtctatccacctacgaaaaagagtatatggccattattgttgctgtccaacaatggcttcctatcttcaacacagagagtttgtatagtcactgcccataaaaacctaacgagcagcgacttcacactcctggcaaaaataaaaaaaaaactaaatggcatggacttcaataccgcttccaatctcggaagcgcaccgaaaatcgtactgcacgttcctggt

SEQ ID NO: 71808 - DNA, 2010 bp, Zea mays
  unsure (1)..(2010): unsure at all n locations
  Clone ID: MRT4577_165493C.1
tgggaccctcgaggccggccgggccgggagacctgtttatattcttgtgaggaagaaacgttccaattcccgtcgttgaggaattcggaatcggggatcgagtacatctccacttcttcccaggcggccaggccctggcccgcggccgcaccgcaccgtagtttgttccttccgcaaggaagcgagagaaaatcgagtgaaaaggaaggggaaataaggctgaatcacagtttctggatcggaggagcatccccgcctaggtctctgcagccatggttcgcggatcgctcggcaagcttgcatcgcgcgccctctccgtcgccgggagatggcagcaccagcagctccgccgcctcaacatccacgagtaccagggcgcggagttgatgggtaaatacgggatcaacgtgcccaggggcgcggcggctgggtccgtacacgaggtcaaggacgccttgaagaacatgttccccagcgagaaagagatagttgttaaaagtcaaatccttgctggtggccgagggctgggaactttcaaaagcggactgcaaggtggtgtccatattgttaaggctgaggaagctgaattgattgcaagtaaaatgttaggccagattctgataacgaaacaaactggtccagagggaaagattgtgagcaaggtctacttgtgtgagaaactatctcttactaatgagatgtacttcgccatcacccttgataggaaaactgctggtccgctcattattgcttgcagcaagggaggaaccagtattgaagatcttgcggagaagtatcctgatatgattattaaggttcctattgatgtatttaaaggaatcacagatgaggatgcagctaaagttgttgatggtctagctctaaaggcagcggataggcagtcttctatagaacagattaagaagctgtatgaacttttctgcaagtgtgattgcacattgctggagataaatcctctggcggagacagctgacaacaagcttgttgctgctgatgcaaaattgaactttgatgataatgctgcatttagacagaaagaaatatttgcactgcgtgatacaactcaggaagaccccagggaggtcgctgctgccaaagcagatttgaactatattggtcttgatggagagattggttgcatggtgaatggagcaggattggccatggcgaccatggatattataaagttgcatggtggtacgcccgccaattttcttgatgtcggtggaagtgcatcagaggggcaggttgtggaagcttttaagatactgacttcagatgatagagtgaaggcaattctagtgaacatttttgggggcattatgaaatgtgatgtgatagcaagtggaattgttaatgctgctaaacaggttgacctgaaggttcctgttgttgttcggttggaaggcaccaatgtagaccaaggaaaaaggattcttaaggaaagtggaatgactttgatcactgcagaagatcttgatgatgcggcagagaaagctgtaaaagcatccgtcaaataactatagtgtatcaatctgaagtttcttttttttcactggtacaagatgagcagtgctcttttacggatttcgatttggagcagaagtcgtgaactgcaacgtttttgaagtggggttattttgacctagttttcctgttaaacattgccagtgccgaaactttgtcgtctcatgttgataaacatttatcggggccattgggcagctgctagtttggcaattgcaaatcaatttaccttttggttcagagggcataggctgctaccctagtggctaaaaatttcgttgacagggtctacgttgccagtttattctgtacattgccagtgccagtttattctgttacattgccagtgcaggaacgctgtgatctcgtgttaataatgatttcacaccatgaatcataaaaaaatcattatgtgaaaaaaaaaaaaaaaaaaaaaaaaccgagngggggaaaccggtaccc

SEQ ID NO: 71809 - DNA, 136 bp, Zea mays
  Clone ID: MRT4577_165494C.1
atcgacgggcgcccaaacgcgcatgaacacgtagctatagtgggccgggctagcattcaaggaaagaggactggaggtccagggactggagtgctgatatggtacacacgagtaaccaacatgcgaggcctctgcg

SEQ ID NO: 71810 - DNA, 2203 bp, Zea mays
  Clone ID: MRT4577_165495C.1
gcctgcgctgcacgaggccgcgcaggcagtcagcaacagaactcagccgctggcgattggtccgcaccccgccgccgcacccgcacggcacccccttcgtcccttccgcaagaaaggaaacgagagagaaaatcgagtgaaaaggaagggaaacaacataacaaatcgcaaagaggcgtcttccaagcttgtagggttaccggatcggaggagcatccccgcctaggtcaccacagccatggttcgcggatcgctaggcaagcttgcgtcgcgcgccctctccgtcgccgggagatggcagcaccagcagcttcgccgcctcaacatccacgagtaccagggtgcggagttgatggggaagtacggtatcaacgtacccaggggtgcggcggcggggtccgtacaggaggtcaatgacgccttgaagaacatgttccccagtgagaaagagatagttgttaaaagtcaaatccttgctggtggccgagggctgggaactttcaaaagtgggctgcaaggaggtgtccatattgttaaggctgaggaagctgaaagcattgcacgtaaaatgttaggccagattctggtaacgaaacaaactggtccggagggaaagattgtgagcaaggtctacttgtgtgagaaactgtctctcactaatgagatgtattttgccatcacccttgataggaaaactgctggtccgctcattattgcttgcagcaagggaggaaccagtattgaagatcttgcggagaagtatcctgatatgattatcaaggttcctgttgatgtatttaaaggaataacagacgaggatgcagctaaagttgttgatggtctagctctaaagtcagcggataggcagtcttctatagaacagattaagaaactgtatgaacttttctgcaagtctgattgcacattgctggagataaatcctctggcggagacagctgacaacaagcttgttgctgctgatgcaaaattgaactttgatgataatgctgcatttagacagaaagaaatatttgcacttcgtgatacaactcaggaagaccccagggaggtcgctgctgccaaagcagatttgaactatattggtcttgatggagagattggttgcatggtgaatggagcaggattggccatggcgaccatggatattataaagttgcatggtgggacgcctgccaatttccttgatgttggtggaagtgcatcagaggggcaggttgtggaagcttttaagatactgacttcagatgatagagtgaaggcaattctagtgaacatttttgggggcattatgaaatgtgacgtgatagcaagtggaattgttaatgctgctaaacaggtggacctgaagtttcatgttgaatgctgccaaacaggttgacctgaaagttcctgttgttgttcggttggaaggcaccaatgtagaccaaggaaaaaggattcttaaggaaagtggaatgactttgatcactgcagaagatcttgatgatgcggcagagaaagctgtaaaagcatccgtcaaataactagtgtatcaatctgaagtttctttttttttcactggtacaagatgagcagtgctcttttacggatttcgggctggggcagaagtcgcgaactgcaacttttttgaagtggggttattttgacctagttttcctgttaaacattgccagtgccgaaattgtcgtctcatgttgataaacatttcatcggggccattgggcagctgctagtttggcaattgcaatttaccttttggttcagagggcataggctgctaccctagtggctaaaaatttcgttgacagggtctacgttgccagtttattctgtacattgccagtgccagtttattctgttacattgccagtgcaggaacgctgtgatctcgtgttaataatgatttcacaccatgaatcataaaaaaatcattatgttgaaaaaaaaaaaaaaaaaaaaaaaaaaaaaaaaaaaaaaaaaaaaaaaaaaaaaaaaaaaaaaaaaaaaaaaaaaaaaaaaaaaaaaaaaaaaaaaaaaaaaaaaaaaaaaaaaaaaaaataaaaaataaaaaaaaaataaaaaaaaaataaaaaacaaaaaaaaaaaagggcaccccaaataaaaaaaaaactttgtcaaacttaaaccacttggaacttgttaaaaatttttgtgtttcccc

SEQ ID NO: 71811 - DNA, 496 bp, Zea mays
  Clone ID: MRT4577_165496C.1
cccgctggcgctggtccggggcagcatctccaggcgcggcgtgtgcgtggccggcgacgcgttccacccgatgaccccggagctcgggcagggcggctgcgcggcgctggaggacggcgtcgtccttgcccgatgcctcggcgaggccttcgccgtcggcgggcacgggagcgccgaggcggccctggagaagtacgccggggagcggaggtggcgcgccgtccggctggtcactgccgcgtacgtcgtcggcttcgtgcagcagagcagcaacccggcgatcaagttcctgagggagaggttcctgtccgggttgctggccagagtgatggtcgacatggccgacttcgactgcgggaagctctagtagttatgtcactccttcacggcaaaacgagaacaacgagagaaaacgaatcggttaaaacggcatcaatcaaatcgatttgatgcctgtatttcgacttttcgagttaaataaagaaaatagtttgat

SEQ ID NO: 71812 - DNA, 513 bp, Zea mays
  Clone ID: MRT4577_165497C.1
aggccggagacgacctagtgcaccggcactagtacctcgtgatccctcggcgtcttgctgatgtgttgcttacccgatccatgtgtcactcgatgaagcgcccgactgcgcatatcggcgccgcggtgtgtgcgctagaagacggccgggggcgggttgctacaggaaggcaggacgggagatgatgaaggagaacctcgttcctggagagctggtaggtccagagctgcttctttttaaggccatgccatccgcgctgctaggggtgcgttataggggtaaggacagagacatgcgtatccgagggcgcggcggaggaaacacctaggatatctacgccatacatcaggacttgcggcacggctgcttgtgtcttactactgagaggtactgtaagaggaggcgtctacacaagtgagagaacaggtcattttgatgcgatactagcacacaatggtagtcttggagccccgacgttgggagggcaagaaggcggactggactatatctcga

SEQ ID NO: 71813 - DNA, 281 bp, Zea mays
  Clone ID: MRT4577_165498C.1
cgtggaagcatttacatttttgtctccagatgcacttgatgcagctgtacggctagctgagctacgtagagcagctgaagaccatgcttttggcatgcggcttacaaagaattggatgcatctgcatttattgccagccaattgcaactgcagtgtcaatgagagctggtgttgctgccgatacaggtgctgctctgcttttccggatgctttccccaccaacgctgctctttccaccactgcgacatgctggaggagttgacgtacatcatgaaccacta

SEQ ID NO: 71814 - DNA, 364 bp, Zea mays
  unsure (1)..(364): unsure at all n locations
  Clone ID: MRT4577_165499C.1
acccacgcgtccngcttgaacaacacgctgattttaacctttttactagattttgccaaactggtcttcgtggttcttcgagtcaaaagaggcttaacatatcttaaaaactaatagcttcatggtgctaatgtcaacaagaaagacacgaccagttgcacacctatgcatagagctgctaccactagaaactcggatctgagagaattcctcatcgaggaacgtactgaagttgatgcttttgacaagacaccacaaacacctatgacgcatgctggtataccttagaacacatgaactgctattatgttaattagacatacatctgatgttaatatccacgacaaggaaggctacactgacc

SEQ ID NO: 71815 - DNA, 403 bp, Zea mays
  Clone ID: MRT4577_16549C.1
gctgggcctcagatgctagctagctcttctccacgtttagcttccaatccgtccatctctctgcagactgcaggggtatttcttgtagttcagctcatgagtttcacaagacttcatcacacggttaaactacaaattgtgcgagacaaattagtagcgatactgttgaccagaattttggaaataaaccggctccaacacctacttgcaaagatatttggaaccggtgaccagctgcacgacgatgaatcctacaagacgaccatgtaatacacagtgtcgtcctcttcgttctactactcaacagagcagtcgccgaccaataacgaatggagtacctccgcgtgttcgtgatctctgtcactgccaacatcatatctatgggattgatgatattcttgat

SEQ ID NO: 71816 - DNA, 571 bp, Zea mays
  Clone ID: MRT4577_1654C.1
ctggcagctcgagggccgctttttttttttttttttactcgcatgctttttttttttttttttttttttttttttttttttttttttcttttttttttttttggccgtttttctttccatgttctgttttttgttttttaccatgtttttaaaaaagggcgaaataaacgccgaaagggcacaaaaaaaaccgggggtacagaaataataaaaattcggggccaagcccaaaaaaacaacccaacaaaccaggcggacggcgacacaaagacatttctaattggagcccgagacgggcaccaaaacgaagtgtattaccaggcgcccccgggcaccccaaaaagagtaaaaaaagggggaaaaacaggcaaagaaaattatttggaacaaaaggggttccccctaacccaaaaaaacagttattcatggggaagaaagggggggccccctttttaacaaacgggcatttcaccggccctaacgaaagggcagcccccacacaacaaacccatgggggccccgggaaaaacacaccggccctaacaaatttttaccccgagcaaaaagggcc

SEQ ID NO: 71817 - DNA, 261 bp, Zea mays
  Clone ID: MRT4577_165500C.1
cgccccgtggctggaatctcttaacgggaacaacgcaagacgcggacccaagggagaagagttgaagcggtttaaacttactgcagtttgtttatttgttgacgacaagctgaaaaaagaaaagaaaaagaaagggaatgagaaattgctaaaaaaataaggagggtcaactatactttgggtcttgtggcacattgccttattggccgggggcctctttttgtgcggttcgtcccttgttgagttgtcttgtcgggcggc

SEQ ID NO: 71818 - DNA, 234 bp, Zea mays
  Clone ID: MRT4577_165501C.1
gttaatttcttgcctaggccgggtgagcaaggaagacattgaacgtatggtccatgaagctgcgaagtacgaagctggaagatgagcagcagagggacaaggtgtcatccaagaattcacttgagtactatgccttcaacatgaacgcaactgttggagatgagagacttcaaggcaagattaacgatgacgacaaacagaatattctggacaagtgtaatgaaattatcaact

SEQ ID NO: 71819 - DNA, 655 bp, Zea mays
  Clone ID: MRT4577_165502C.1
gactcctatagggcgattgggtttctcgaggccggccgggatatcgccctattcctagtcaccgtgttcgcttcccgaggacgcaagcatggttcgactgtcagccaccgcggtgctgctcctcctcgtcctctccctcctcgccgtcgcgcactgtcggagccttccgcagtccgtgggagatcacgacaccgagcccgaatcagccgacgccgtggccgtcagagcacgacaacgtgctgtccgaccccacgggcctccctgaggcgggcaccgccagcgccactgaataggaggacatcccggcggaacagcaacaacatggggtcgaactcctccgtgtggcttctcaccggctcgaccaccaccaccacctctggatgaaacgccaccgcgggatctaccgcgacgcgtcgcacaagttcccttgttctggccacggcgcgaggtcctagtaggtagtgagccaccttgccatcttggccgcatccgcatacgaggacacggacgcgccggaggacatgctcgtggacgagccggggccgagatgctctctcctggacagtgaccgagaggaggaggtggctattacaagcagagagccgctgacgatcgccgacggcgactggcacgacgacaagagcgctgcagaaga

SEQ ID NO: 71820 - DNA, 992 bp, Zea mays
  unsure (1)..(992): unsure at all n locations
  Clone ID: MRT4577_165503C.1
gggatcggccgccaccttcacctccaccgccccggcgcacctgtgcgtctccatcgtcgccgcctctcctccttcggacacgactgaccttccactggcgccaacgaagaaaacacataggaagaagctcaccgccaaacctcatccagatccagtctctgccctccgaaggccgcatacggaacgtctcgtctcttcctttggatccggcggtcaactgcatcacccccagcttcacctcccttagtccccctaattcggcacgaggcacccaccgcttctatatcgccacctctctcgttgtagaagaagacactgaggatctggtgagcttccacctttttagcttactcagtttagatctgttgtctatatttgattctcgttatcgaagaagctgctagtgcttgcttgcatcatcgctgaggatctgctggtagaatagattagcttgatagcttgatcggtgcatccatgcatgtaatctaaacttgcattctagagctccacctagaaatctttctcttttgattaggtcttttctgataaattgatcagtgcatccgtgcgtgcagtttaaacatagcttagtttttttaaacagtgcacttcaggcttagttttttttaaacagtgcacttcaggcttagtttatattcttgttcctattaagaactgagcaactagccaagctgagatcaagttacagtttactaaatactggtatgttaaaaaggaaccctcatgtagcttgtgagagtaaatttcttcttcttgtaccatagtatattagcatttcttggttntcaattatatgtcagtttgcatttctcacaaacacatgcatttattctctggtgctatcaagctgatgcatcttttggtgagcagcactgtgactatggtcatacgattagtgctagatgcctgagtactgaccaacaatatctcatctgctgtttggtgtggtggttgtgtcaataaattttttt

SEQ ID NO: 71821 - DNA, 795 bp, Zea mays
  Clone ID: MRT4577_165504C.1
cagccacccggttctccctcgctccaggtggcggcgcgctcccctcgttttgttcttactcctcccgtttccctcactagtcgttactgacttctcgcttgcctgctccagatctcccttcgcagccggccagggaccccttcacagcgcgggagatggctgatcaggaggccccagttgcagttgaggcaccaaccccagttcttggagagccaatggacttgatgaccgcgctgcagctggtgatgaagaagtcaagtgctcatgatggacttgtgaagggtcttcgcgaggctgccaaggccattgagaagcatgctgctcagctttgcgtgcttgctgaggactgtgaccagccagattacgtcaagttggtgaaggcactctgcgctgagcacaatgttcacctggtcactgttcctgccgctaagactcttggcgagtgggccgggctttgcaagattgactctgagggcaaggcaaggaaggttgtaggctgctcctgcgtcgtcgtcaaggactacggtgaagaatctgagggccttaacatagtgcaggagtatgtcaagtcgcactagatgtgtgacatgtttcagtgatactcttgatttggacctgggcttaaaattatgcttttgcatctggggcttgcctaggagattagaacattttactagaagagccgaaaaggatatgtatgaacaatttggacatctgaattttttttgtttatggtgctgtcgtctggttttaatgcaaatcatgaagagccgagtttattcttgatttgtgttt

SEQ ID NO: 71822 - DNA, 2126 bp, Zea mays
  unsure (1)..(2126): unsure at all n locations
  Clone ID: MRT4577_165505C.1
aatataatataaataagtaccattcaatatatcataaataagcattgtcaaacaacacatacataagtgtactctaaatctaaactaaaatacaactgtttgcagtaatgttcagcctaactttatatgaaatcaagtctctaaacttttgcggccaccaaagttgaattccattttatgttttcttgtacaacaaataggaaaaaactagacatagcaaaaagctccaagcagcacgtggatggtctcgaagctgcccttgtgcttctccctgttcttgatcactcctacacgcccggtgttcctcccgccggtcaccatgaccacgttgccgacgtcaaacttgatgaagtccatgatcttgttggtctctagatcgatcttgatggtgtcgttggccttgatgagcgggtcggggtagcggatggtgcgatcatcgtaggtgttcaggtaggggatacctttctggccaaactgaacagacctcaccttgcagagcatgaactgcacacaaaccaatagaaaagcagcgagcatttcacaggcgtactatgaaagggcatgggaatttccagcgatgaaatggatagatagacagagcaacatctattaatagtcctaacgatagtagcacatgacatttaatagagatctgtccaaacagataaaaaaagataaacataaattcaagtaaaatataatataactattttcaaggccaagtacaatgcaatataggcttctggtgggactgatctagattgttgggtttcttgttctgccttttgcccttgccattgaagaagccaaaaccaaatggtccaaatgctgatagacttattgtggctgctctagcagccaatggattaaacggcagagcaggttcagtcctgacatcaatgctctcattgtggttttcatcagatacatatgatctttctgaaaggggaactattccatctcggccatggaaaagcttgaatgctgactcaaagcctgacccttcctcaaaaattggacccttgcctccttagcagctactggcaaagcagaagagagggaaaaggttgtagctccattgatattcctcaggaatgggcatctctcgacgtctgggtgtccaaaaaggttctgcggtgatactgattcactgagaaagctgcaaaaaacatttccatcctgataattgactcatacatcaccttactgcttggtgtctgctggccagctgtaaatagaacatgctctgcctagctgaaaatagaacagacatggtacaatttaaagccataatgactagcaggatttttaatagcatatctggatggcttcattgtgtccaaactcgtcaggatctgcagaaacagctcactgtgggggcgaaagcagtgcagcagtgttttttttcnctgcttgaagcccacacagaagcaagtcatgaatctagaatctcacttctttttttattaacggaatctcactattgtcaatctcctgaaacatacaaactggctaaccagtatatttcaaaaaggaaaaataaaaatgaaatggaaactatatccttactgtcggctacaccaatggaactaactaaagctacaaatataaacattgctcactattgcgggaagcaccaatatcctcacttgttgggtctttttctcccaatgaataaaaaataagcaatggttgaagaggtcaggctattctaccagactgggcaaaggcaaggcatactttgcgagagacgcttgaggtaacaccagcatcatatatgccagcgggtaccagcaatcacattcagagtcttacttcttcttttttggctgtgcaaaggtacctagagaagcttatgctacatcaccaactgaaccgccgccatggcggcctaccacataccgggaatcagtagagcaccaggcagttctggtgtgtgcgacacaggcgccaaccttctgtttcatatatagataggtttcacatcgttaacgccgaagcttagtccacaagatgggcacctcttctgacggctaccaagcgacttctgtatgcactggttgcagaagagatggtagcatttggcaatcacaacctctttctgcctgtcatgacaaataccacac

SEQ ID NO: 71823 - DNA, 541 bp, Zea mays
  Clone ID: MRT4577_165506C.1
gggggggggggggttttttatatttttttttttgggttttttttttttttttttttttttttttttgggcccttaacatttacacaaacaccaaagtgattttcccagctttttggggaaacccctttaagtttttaacttacacaccaacgggggggcgggggggtcccaaaaaaattaagcttttgcaaccccttggttcccaccaactgaaaaaaaattgggaatgacctcaaagggcatcccctttgttttagggaccttaagggagaccaaccccaaggaaatcaagcattccactgcgtattttcttaaaacaccccccagtccaataacatttagcataacaagaagggtggaggggaccaaaaaatctcccatccaaaatgtaaagggacaaatgggaatacaaaagccaccaaccctggttggaaaaaactctgcacaaaaaaagttggggatgggaccaaatcccctaactaaccaacagaagtgaaccataacactttctgtggagagcaaaacatgggctatttttccc

SEQ ID NO: 71824 - DNA, 268 bp, Zea mays
  Clone ID: MRT4577_165507C.1
cccacgcgtccgcagcctcgctgtcaagatccgcaacagcggacagacacgcgggtgtgcggtcttgatacacgtgcacgaagggatctaccaaaagctcgcacaagcactcatccaggctgagcacagattgaaggtcgagaacggtctataagagagtacacctcagggccccctgattaacgaaactgctgcgcaaaaggtggagaagaccacaaaagacgcaacctctaagggagcaaatgtcatgccaagacggaaaagacac

SEQ ID NO: 71825 - DNA, 868 bp, Zea mays
  Clone ID: MRT4577_165508C.1
gggaccctcgaggccggccggagccgtgactataattccgccttctccattctctctccaaaccctagcagccacccggttctccctcgctccaggtggcggcgcgctcccctcgttttgttcttactcctcccgtttccctcactagtcgttactgacttctcgcttgcctgctccagatctcccttcgcagccggccagggaccccttcacagcgcgggagatggctgatcaggaggccccagttgcagttgaggcaccaaccccagttcttggagagccaatggacttgatgactgcgctgcagctggtgatgaagaagtcaagtgctcatgatggacttgtgaagggtcttcgcgaggctgccaaggccattgagaagcatgctgctcagctttgcgttcttgctgaggactgtgaccagccagattatgtcaagctggtgaaggcgctctgtgctgaacacaatgttcaccttgtcactgttcctgctgctaagactcttggcgagtgggctgggctttgcaagattgactccgagggcaaggcaaggaaggttgtaggctgctcctgtgtcgttgtcaaggactacggtgaagaatctgagggccttaacatagtgcaggagtatgtcaagtcgcactagatgtaacacgtttcagtaatactctacatttggatctgggcttaatattatgcttgcgtcttgggcttgctaggagattaggacaatttactacaagagcccatgaggatatgagcaatttggaattctaaatgttttgtttatggtgttgtcatctggttttaattcaaatcgataagagatgagattattcttgcgaaaaaaaaaaaaaaaaaagcggcc

SEQ ID NO: 71826 - DNA, 258 bp, Zea mays
  Clone ID: MRT4577_165509C.1
gatgtcataagtcggcggccgcccttgtgcatggggacgcttttgtacccggagcgaggctctcagacgccgaaagaaaacgacggcacatgacgagcacaaaactcctgataggacaggcttccccataagcattatgccacccacgaaggcgccgaggctgaagaagacgtcgccgtcaacgccgcgggactcgaacaccggccggacgcacgccctagaagcggcctgagcggcgtcgaatccacctagggacac

SEQ ID NO: 71827 - DNA, 2221 bp, Zea mays
  Clone ID: MRT4577_16550C.1
cattgggtacctcgaggccggccgggagaagccctcctcgccttccgcttaaaccccatcccaactcatcgaagccctcgccaatcggcacgaccatggctgccatccacctgcgcccgctccgctccgtcgccgtctcctccgcgaggtaccgctcgcttctccaccttctcgcccgccccctctcctcttcccaatcgtcccacgcctaccaccctttccccaccccggccgccgccgcccccaaccatgttcaccaccaccaccctacccaccacagccagcagcagtcggcgccgccgaggaacccgcctccccttggcccctctccgcagtggtccccgcagcctccgccgccccgcggctatgggcctccaccgccgcagcacccgcatgtgccgccgccgccgccacgcggctacggacctctatcaccgggacagcacttgccgccttcgccacacggctacggccctccactgccgccgccgccaccaccacacggccacggacctccgccaccaggacagcatgttgtgccgccgctgcctccatcacacggccacagacctccaccatcgtgccagcatgtgccaccgccgccgccatcgcacggtcacggacctccgccaccgggccagtacgtgccgtctgcgctgccacgcgaccacgggcctccacccccgcaccagcaggcaccgcctccaccgccgccgcctgagcctgtagcggggcctggggagctgatgggattgtgccgggagggtcgggtgaaggacgccgtggagcttctggacaagggggcgtgcgccgacccagccgccttctacgagctcgcggcagcctgctccaaccctaagctgctggaggagctcaggaaggtgcacgacttcttcctccgctcacccttccgcggcgatctacgggtcaacaacaagctgctaaagatgtacgccaagtgtgcagccatgccccacgcccgcaggacgttcgacaatatgcctgaccgcgacatggactcgtggcacatcgtgatcgatggctactcggtcaatgggctcggggacgaggcgctgcgactgttcgagctgatgaaggagtgtatgtcacccaccagccatacctacctgcttgtgctcaatgcttgtgccaattccgaggccattgaggaggcgctcctttactttgatgccatgcacagggaccatggcattgagcctggtgtggagcactatgttgggatcattgaggttttggggaagtcagggcagctcaacgaggccctggagttcattgagaagctgcctttcgagcccaatgccatggtgtgggagtcactcttgaacctggcccggatgaatggagacattgaccttgaggaccgggcagaggagttgttggtgtcgcttgatccatccaaggcaaatcctaagaagctcccaaccccacctcccaagaggcgcctgggaattaacatgcttgatgggaggaacaagctagtagagtacaggctgccaccaaagattgaaaagaaggtggtcaatgagcagaggtatgtcccagacacaagatatgtgctccatgacattgaccaggaggccaaggaacaggcattgctgtaccacagtgagaggctggcaattgcttatggtctgattagcactccagcaagaactccacttcgtatcattaagaacctgaggatatgtggtgactgccacaacgccatcaagatcatgtcaaggatcgttgggagagagcttattgtgagggacaacaagaggttccaccacttcaaagatggaaagtgctcctgtggagattattggtgataatggattaaagccgctcttctatcctttatatggagctgctggcagccatggtttcagttgataataagcaatatgaaggtatccaatgggtgttgctagtattttgtcatccttaaatattcttaagatacttagctgcaagcacttgtatcatgcaaggctatcacttgttgatgcgctaattgatcctactctcctctgtatcaacatcttgtttcccatgggaaaacatgtgctggtctggagtatataacaactatacggttgtaagagctgggtcttccttgcattactttgactaaaacgaatcttatatatctgtgcgcatgtatttatttttatgggctcccagtgcatacttctggacgtggactacgaaccaaaga

SEQ ID NO: 71828 - DNA, 507 bp, Zea mays
  unsure (1)..(507): unsure at all n locations
  Clone ID: MRT4577_165510C.1
gggttgggggggtttttttttttttttttttttttttttttgggctaaactgcaaaaacgttggcaaaatatttttgcacgagcgcacccagaaagctcgcttggccacataaaattaaatttagcgccgctgcgaaactcaaaaggggggggggggggggttttttatttttaccaaaaaaacatgcttggggtatacatgcagagggggtaattaggaggggcgcttgaaaccacatgggtttttattctgggggagagtaactggcccagctgagggccggtgcaggcttcacatcagttggtggaacagggcatgctggatcctctcactttgtgtgaaacttgggggtaacagacctttagctgggaacatgaataacgttgccccattttttttttgggggggggggacccaactttttnccggcgggggacaaaagggccttcaaagggatctcctcaactgtttttatgaaatactcgatgggcttcctttccccctaa

SEQ ID NO: 71829 - DNA, 704 bp, Zea mays
  Clone ID: MRT4577_165511C.1
aatataatataaataagtaccaatcaatatatcataaataagcattgtcaaacaaggcatacataagtgtactctaaatctaaactaaaatacaattgtttgcactaatgttaagcctaactttatatgaattcaagtctccacacttttgcgaccaccaaatttgaattccattctatgttttcctgtacaacaaataggagaaaactagacatagcatgcaaaaaactccaagcagcacgtcgatgacctcgaagatgcccttgtgcttctcccagttcttgatcactcctacacgcccggtgttcctcccgccggtcaccatgaccacgttgccgacgtcaaactgaagataacaccaatgggaacaaatatgaccccgacgaagaagaaacacgatcaccggaatgttatagcaaacccaggtgaccacatcggtctgccagtttgaagatgtagtgtactgtaatcctccaaggaagataacaatgatcttttctttatgtccgtgtaaccaactgccttcgcaagtgctttggcaagcaagtcagctgcagacagactggaagagcttagcaactgctctgcttgctgcctgaagataggataacactgtctgacacactcgcaatggcatctgcagcttcactgccagcagattgtgctacatcagtgggttgtggcacagagatatgctcaaattt

SEQ ID NO: 71830 - DNA, 481 bp, Zea mays
  Clone ID: MRT4577_165512C.1
caagggtcttcgtgaggctgccaaggccattgagaagcacgctgctcagctttgtgtgcttgctgaggactgtgaccagcctgattatgtcaagctggtgaaggcgctctgtgctgagcacaatgttcacctggtcactgttcctgctgctaagactcttggcgagtgggctgggctttgcaagatcgactctgagggcaaggcaaggaaggttgtaggctgctcctgtgtcgttgtcaaggactacggtgaagaatctgagggccttaacatagtgcaggagtatgtcaagtcacactagatgtaatacgtttcagtactttggacctgggcttaaaattatgcttgcatctggggcttgctaggagactagaacattttactagaaaagccgaagaggatatgagcaatttggacatctgaaatttttgttatggtgctgtcatctggttttaatgcaaatcaagaagagctgagttaa

SEQ ID NO: 71831 - DNA, 3593 bp, Zea mays
  Clone ID: MRT4577_165513C.1
tttattccataccgcgtcttcctcccgtctcagcttccttcgctcccgttttttgttgccataacaattatgctcacaacatacttgtaaccatcgtacgtacatcatcacccatatcttgccacccacatcaagggaaaataaacaccatatctgacaaaaagaaacacatctcggaacaacgctcaaggtagaagcaaaccaaaaatgacacaaaaaaatataaacatataacaaaaagagaaaaatctgcacatgtttcctatactctaagctcgtcgaagggcttgcaaaaactgttcgtattccgggaatgtttctgcaattctttcaaccaggctgtccggaaacgctccggcgggctgcagagcaggaagtttctgcatcaggggaataaccacctgctgtatgtccacgtcatccagagagcccaattcgatgtcttgggtctcttcatcaatgtctccttcctcgactgactcgcccgcagccgccgctagtgcatatctttccagaaattcctcttctgtttcttctctcgcatcgtcgtcgtcgtccgaatcctcatcatcatcttcggtgtcttcctcttcatcgttgtcatcaacatcttcagcaccatcatcatcatcgtcattgtccccatcgtcctgaacttccttcagctgaatgcaagactccatcagtgatgcatagcagtcttgcaacaatttggtgccacccgtggaaagggacacgagatggttgatcacagtagatagcgtcagcacagctaacttgatctcggattcagatgacaggccaggattgaacaagctgcttgagacttgtgccaatgcagacgcccagatcgcaaaaccgttaccatcaacgttgttcaggacttgttcgatggcatcgggatagcagatgtagcacgaggatatcgccaacagcagtggtttccatagcccagcaggactgtcggatacagatttgaagcgggaaaacgctgcttgtgcaaaggattcggaaatagtctttctagtgtcttgtgctccaagggagaattttggagcgtgcagcagtgtatggacgcacgagcatgccctccacgttgcggatgggtaagctgcaattgccctagtcacaaaattagagacacggccgatgactgaactctgtgaaccattttcagactgcgacggaagcgttttcaggaagagaccgtcgaggtcaaatctctggtggaaattgacagcttctttaattgtgttgaaaacaccctgatcctccatctcctcccaggagtcccagttggcaatagcgtcagcccatgtagctaccagttcaaagaccttcagacttgccgtttcttccatgcaagtgacagaactcatgacaaactcaagtagcacagaagcatcgtttacgcatgacggaggtggtaatgctaatgcagagccctccatattgtcagcttgcaacaaccaagctttttgtaacagtaatgaaattgtttgggcaattgcagactggcctgactgccagaacctcttttcaggtgtcttgttttcatctggtgcagagctctcccaagcttgcaccattgctacgagggctgcgaaaccctgttcaacaacctgaggccaaggatctgggacagggggtaggagctccattacagtactggcaatgttggatacaatttcaggaatatgagacagaactttttcctgtccaccctcaactattgtgcccagaagcttgaacagaagagcagactcattttcatctccagtacttattcttttcagaaccacttgcagaagaatgagccagtcaggtggaacataactattctcaatgagttctgcaatagcaccagaagcagaggcacaaaccggataacaagttatgtcctccacatactccatggtcaacgccttcattaaggactcataaatactagaactcatgtcctctggtaggcatatcgcaagctgaccaataacccaattagccgttgaaatcaaatatgggctgcaaggatccaaagaatataatgggagaatccggttcctgatcaatgtaattgtcaaatctttcttttcagtcagaaaatcttggaggcctccatatgccatcaaaacaccgaaataattccgcactgctactgatgatgcatcttcaccatgggaaggtataggaaactttgaaaggaatggggtgaccaacaactccccaattgagctcatttcagatttccctttatttttatcacctttcttacgcttcgatgctgcagatgcaactggtggaccctttgatagcgctataacaccaagtaaattgattgcactttttctggcagtgaacaaatcctcagtccatccagaaatgtcatcaagttcagaaggaagattcttttgcatatactcatcagtatcctcctcccattcttctatatccttctcattcaatgctaatgctggaaaaattgctgaatcaagaagtgaagaaaaatgtggtgaaactagtcaccatcccggtcctgtttccaaaactcgagaaatcacatcaaatgccaatgaaacaatccgattggggagagagtcgagtttacttaaatggatgctttgttttgatattttgattgcacagttgacaatatgtggcatctggttatctgtatgtttccggtgacgtgtaacaagtgcacaaaatataatgagacatctctttgcaatcttgagcttcatggtagatccatcttcaataagactattaaagttcaaagaatctagtatacggaacatgtctttgcaaaaggaaggcaaaatttgtttcaccctagatggcatgtatgacctcacagtgaaatacatgcatttgcatgtgatgagtaggagctgctcatattccaagttagtcccatcaggtgacaaaagaaccttgtcagagaagtgatggaatgtcacttgcaatggtacaagaatctctgctgcaatttgctccaactgttgtggaacaggctctttcacaacttttggattcaagaaatactggaagggccttacaacagattgaagtactgtgagtgcattaatagtattgcactcaggatgctggcctggactaattagattgctgctctggatcactagtttcaactgagggataagctcaggccacaagttatccttgacaaaatctttttcaacaacttggcggaaaacttcaatcagcactcgaagaattgcaggctccactcgaagcaaagcctgggcaagttggtcacggaactccttgtaaacctcagatgaacacagacgggtttccaaattgcggcgggtaaaatttttcaagtatgtcgctgcagcgactctcatcccctgatcaccgtcccctgcagcgacggcgaggatggcgagggggaagcgtgggtcggaagagagcgcgtcgagccccgccgcggcagcgtcaaccgacgccttgtcggggctgagggtggcggccaggagccgccgcagctcgtcgcgggccagggcggcggcgtgggtctcgatgtccatggaggcagaaccctaggatattttgcccctttcctttcc

SEQ ID NO: 71832 - DNA, 697 bp, Zea mays
  unsure (1)..(697): unsure at all n locations
  Clone ID: MRT4577_165514C.1
ccggccgggctctagccaaaaccctagcagccgcccggtgctccctctctgcagatctcccttcgcagccgccgaggaaccccttcacagcgcggaagatggctgaacaggaggccccagtcgcggttgaggcaccaaccccagttcttggggagcctatggacttgatgactgctctgcagctcgtgatgaagaagtcaagtgctcatgacggtcttgtgaagggtctccgtgaggctgccaaggccatcgagaagcacgccgctcagctttgcgtgcttgctgaggactgtgaccagccagattacgtcaagttggtgaaggcactctgcgctgagcacaatgttcacctggtcactgttcctgccgctaagactcttggcgagtgggccgggctttgcaagattgactccgagggcaaggcaagcaaggttgtaggctgctcctgtgtcgttgtcaaggactacggtgaagaatctgagggccttaacatagtgcaggagtatgtcaagtcgcactagatgtaacacgtttcagtaatactctacatttggatctgggcttaatattatgcttgcgtcttgngcttgctaggagattaggacaatttactacaagagcccatgaggatatgagcaatttggaattctanatggttttgttatggtggaaaaaaaaaaaaaaaaaaggggcggcc

SEQ ID NO: 71833 - DNA, 3619 bp, Zea mays
  Clone ID: MRT4577_165515C.1
atatacacatatattgaacaacattataattaatataatataaataagtaccattcaatatatcataaataagcattgtcaaacaacgcatacataagtgtactctaaatctaaactaaaatacaactgtttgcactaatgttaagcctaactttatatatgaattaaagtctccacacttttgtgaccaccaaatttgaattctattctaagttttcctgtacaacaaataggagaaaactagacatagcaaaaagctccaagcagcacgtggatggtctcaaagctgcccttgtgcttctccctgttcttgatgactcctacacgcctggtgttcctcccgccagtcaccatgaccatgttgtcgacgtcaaacttgatgaagtccatgatcttgttggtctgcagatcgatcttgatggtgtcgttggccttgatgagcgggtcgaggtagcggatagcgcgaccgtcgtaggtgttcaggtaggggatgcctttttggccaaactgaacaaacctcaccttgcagagcttgaacatattggtctcgaccgaagctgagtccattgtaatctgctcgattgtcttcagtccctcatattgatccttcaacatcttcttatgataatcgttaaggtacactgtttgatcataaataggatatttaacagaagacactgcttgacatctagctgcacattcttcccgatgaacagctagatattcattaagctttggaagatcctgcctgcgaaatacatcccagacagcagcactagccagggatccttctgaattattagtgtttggctcctcgatgtgtgaaatcgagtgtttgtgtgattgctcttcaatatccagattcaaattttgaacatgagtatttacatgaacactagttccattagcaatcctttcagatacatcagactgtacccttaccctcttgggacattggtaatgcacttcagttgcatgcattaacatgtgaaccacatcgcacatgttaatcattagatttgtcattgaatcacctttaccaagttcttggtgacttccatgtgcaattagcagtttcatccctaattcaggttgtaaggcatctggtattgttttctctttccttttccaaaattatccttattcccaatcactgctccgtctgggatttctagcttgacgccaggttttgcagtgatggtcactttccccttcagtacaattccagaaccgaaccaaacatcaccggaaaccttcaagatgtcaagctcaacaatgctaggtatggacttgaagcgaccaaggaagctcccaaccttcttgaactcaggaccaagttcaattgagggatttgatggatttgttctggctgaattacgtgtaacgaagccatcaaccaaggtatatagatcagactgtactagctgcaaatctgatgtcgccttaactggtaggaagcgggaccttggaacgttgataccaatggcatggtcaaagaactggtccaataaaactttatttgttatatttatatatatagtcacataaaagcatggtgatgtacatagtactttggctcaaatgcttccctgataataataggctccgtgtttttccaatgcaagattgataagaatcactctggagagggtcgcccatgctggggcctttagggctcatttggcagcctggtgaattgcacaccggccagccacagccagcgggggcaatacctgcattacctatcccacgtgttgtgcaatcctgtgggggcataggttccctgtgtccgtttggcaaagattgctgcaggtaacagacaagcagtgcaagagggacaagcatgcacatctacgaacaagcagtgcaggtggacaaaaggcaggtcacatgataatacttcttaaccttaacaaataagcatagtaattgaaatatgtaagaatcacagataattataaacatgaacatggaggtaccattgctggtgcttttatttgacaatataaatatttaattatttttagaaaaattctattttgcaccaaccaaagaattttacgaatcacaaagtctgcaaaatggaaacaatagccctagcagctagcaagagatagattggttgagctcttcctgattgtgttctttgtgtatggtgattcattgatcatcagaattgattctctgtaattctctaaagtaaactcagtgacacatataggattccatgcatcaactaaatgagaagaagctgcttttttaactctcagttccatggtttattttagagaactgctagaaaaagtgtggaaaaaatatttctcaataaaaaattgtttgatgatagagcttcttctaaattcagcgtgaaagattctaatgcttttcttcctttttctttaaagaaaaaatatagagctaggcacaaataattactagaacctacactcttcgggtctagaaacaacaagtaatctaaaaatggaggtcatcaacattgcgcagcgcttgctaaatcgcagttcctctgttggtgatggaaaaatgtttttttgattgacacaaccaccacatcaaacaacagatgagattattgttgtcagtaactcagcatctagcactaatcgtatgaccatagtcctagtgctgctcatcaaaatatgcatcagtttgatagcaccagagaatgaatgcatgtgtttgtgagaaatgcaaactgacatataattgaaaaccaagaaatgctaatatactctggcacaagaagaagaaatttactctcacagctacatgagggttcctttttaacataccagtatttagtaaactgtaacttgatctcagcttagctagttgctcagttcttaataggaacaagaatataaagcaagcctaaagtgcaatgtttaaaaaaactaagcctgaagtgcactgtttaaaaaaaactaagctatgtttaaactgcatgcacggatgcaccgaccaatttatcagaaaagacctaatcaaaagagaaagatttctaggtggagttctagattgcaagtttagattgcacgcatggatgcaccgatcaagctatcaagctaatctatcctaccagcagatcctcagcgatgatgcaagcaagcactagcagcttcttccataacgagaatcaaatatagacaacagatctaaacggaataagctaaaaaggtggaagctcaccagatcctcagtgtcttcttctacaatgagagaggtggcgatatagaagcggtgggtgaaggcgacgatggagggggactaggggaggtgccatagaagctgcgggtgatggagttgaccaccagatccagaggaggagcaccggctgctgaatccaaaggaagagacgagacgttccatatccgaccattggagggcaacgactggatctggaggaggtttgacggtgagcttcttcctatgtgtattcttcttcgccaaggactccagccccaacgctagcgggcccgggggacggcggttcactgaagatggagacgaggacatggtggcagcggtgctagggttatggggtttgtggaagacgaatgagagggaagttggctcgccgctcgcctcgtgccgaatt

SEQ ID NO: 71834 - DNA, 731 bp, Zea mays
  unsure (1)..(731): unsure at all n locations
  Clone ID: MRT4577_165516C.1
ccggccgggctctagccaaaaccctagcagccgcccggtgctccctctctgcagatctcccttcgcagccgccgaggaaccccttcacagcgcggaagatggctgaacaggaggccccagtcgcggttgaggcaccaaccccagttcttggggagcctatggactcgatgactgctctgcagctcgtgatgaagaagtcaagtgctcatgacggtcttgtgaagggtctccgtgaggctgccaaggccatcgagaagcacgccgctcagctttgcgtgcttgctgaggactgtgaccagccaggttacgtcaagtttggtgaaggcactctgcgctgagcacaatgttcacctggtcactgtacctgccgctcagactcttggctagtgggccgggctttgcaagatcgactctgagggcaaggcgaggaaggttgtaggctgctcctgtgttgttgtcaaggactacggcgaagaatctgaaggccttaacatagtgcaggagtacgtcaaatcgcactagatacagtctgtcagtatctggaagttgtgttcaacactacattttgcacctgagttaaaatatgtgcttggttcttgggctttgctaggagattagaacagttttcaagtgagcctaggatccatgtgaacgatttgaatatctcgcctcttgtctttgcagtgttctcatctgctngtatacaaaatcagcaagagctagtattttgc

SEQ ID NO: 71835 - DNA, 2467 bp, Zea mays
  Clone ID: MRT4577_165517C.1
aatctctccatctccggctctccaccttccacaaatccccaaatcgccacatcaaatcgaatccacccaccacggaccacgcattcgccatggagtttcccaagcgagggcgagcttttctccaaggttccctgcgaaggagccccaaggcgacgatacctggagctgccacgggggccgacgagaacgcaagctctaagcatctcgtgccggtgggggccgcgtcgccgaagaggaagaaggtgctcggggagaggaacgacagcggcgtcgggggcatggagggcgccgcgtcggcaccagtgcagcagccaaagctcgcgttgagccccccgacacccgcgagccgcggcgcggggccgtacgacccgaagacgaactacaccacgccgcggccggcgttcctgcgctacgaccccgaacggcgtcgcgagatcctcctccgggtgtcgcgtgcggcagaggtgatggacgacgactgctctagcaccacatccggcactgcggcctcggaggaggacggtggctcgtccttggcctcggacgcggcggcaggctcccttatctcgtcgccgccaaggagcgactccgaggccgagcttgatgacagcgaggaggaagaggaagtagtcccagctcgtcgaggccggtgggccaggcggttgcttctgttgctcgtctgtgtgtcctgctcgttctgctacatgtattgcgccaaaccctctggctttcctacttattcagaagacgcacttgatttggatagaggtattgggggcatgtacgatgcctatgatcatgaattagactcactgagattgttagggccagttcatatgatgggtccagaggatgtgctggaagaaattacaaatcaacttgtgcacgaggactctaaaagtgtggaccatctgtatggcaacagagctcctagaaatctggtggcagttgctatggtagggctagctgatatctgcctcaatgtttcttcaggagaatttacatgccaaattgggggtgaaaaaggtgagaatgtgcctgatttgaaggaagattctgaaatggacaaactcgatacagaactgacaatctcctttcagaatgacaagcaaagcagtgaagttgattgcctgggtggaaacgccccactggattccattggttccacttctactcacactgataacttggagggcagtttggaatcattccatctagaggaatgggatgattactcaaatcaatctgaactgcagttagtctccatggagagggctataaaatcagcaagttacaagctgaaagacagaacgggtttggaaagtgaggaattggatctatggcagtatgagaatacagcagaagctgctaaaacaatatgctctactgtaaaatttctgtggtctgcaatggaacctcacttgctgcaggtattggcatgcttgtcttttgcaggtttggtggctgcattatataggtactatcaaagatcaagagagtgctgcaactgcatcataacctatgactcacttgctgaacaaccattgttagttcaacatcaagttgcgcagctgtcagtgacttcagttcgagatgcacagctacctgttcactcttcggagcaacctatacaattggcaattcctaaccaaggcacggctggtagtttggaggttcctatggagttgacattgcccaagctggacccattggtcagtcttgaggatcctgcacaagagtcattgcccatgacagacccactggtcaccgtcaagattcctgtgattggtcgtgggatccatgatcagaaacttaaacgtggggattctgagaacattaaggcttcaaatggtatgtttctgaaccatagtgacgttgacagctccaagccaccagtggttgaactacttggagagttcgtgcttgcaagtagctcaagagaaagatctaccaagaaattgtatcagaatgctggagatgctacagataagaaattgttgaaacctttgaaaaaggatgaggatgttgaaaagatgcagatgcattcaagcatcatccaaagccctagtgttggaagagccaaaaaagagcaggagaaatctataaaccgggagaagaccgatgcgacgccaactccactgagacgctcaagccgcctccgcaacaaggtgacttctccctgaccaaaatccaaggtgctcagctcgtcgttcgctaacctttggatgctgggttcctctgtggtgtggtggaaagctgtggacgggacagcacctagttgttacccaagctttgatattgtactttaggagcagaacaatgttttaccagaatatatgctgcgtatttgtcccctcttaatatcctcatgtgcatgaatttctcgtaacgatggctacacttaagctttccggctagagatgtctgtaacgaacacatatgtggcttcttagtttattttagttct

SEQ ID NO: 71836 - DNA, 2112 bp, Zea mays
  Clone ID: MRT4577_165518C.1
aatataatataaataagtaccattcaatatatcataaataagcattgtcaaacaacgcatacataagtgtactctaaatctaaactaaaatacaactgtttacactaatgttaagcctaactttatatgaattaaagtctccacacttttgcgaccaccaaatttgaattctattctatgttttcctgtacaacaaataggagaaaactagacatagcaaaaagctccaagcagcacgtggatggtctcagctgcccttgtgcttctccctgttcttgatgactcctacacgcccggtgttcctcccgccagtcaccatgaccacgttgccgacatcaaacttgatgaaatccatgatcttgttggtctccagatcgatcttgatggtgtcgttggccttgatgagcgggtcggggtggcgggagataagtcattggtagaaaacttgatgaagaccatagcaaaaagctccaagaagttccatatgccacaaagtatttacaaatatgtaacaatgtagggacaaagggagataagtcatgcccaaaatattattttttgtaataaattacagaaatgaaacgctgccagaacaatttttttagaggggaaaacaacaaataataaagaattagctgcaatccctacctccaggcatgatgcttgtccctccaacaatacctgcagccatgttagccaccaaattgccataaagattaggcgtaacctaaaaaaaagattgaaacccacaggtaatcctaatccatggtgtatttgcaaagaagcattcgagaaaattaggaaagcagaaaagaaatgtgatgacgaatagaaaagacgttcagcaagcacatgctttatatattgcatcaataccaatttccgttccttaggaacaatgggatttcggtcagcccaatatatgtttgattgttttcatatatgcctcagaacaagaaatgttatctttatcatatggcaagcatggtactcaagtggagcattcccagatttggacataatttgactactcacttcaaaaatccataatcagagatgtagacatccaaaacatgtgatcctagactttttaaaaagctaataaaattttctacaactcatttataatcatctccaggtgattcaatgtgtatcgaagtcagttaattcaaacacacattgctgtccagacttctgacagattcgaacatcacctttcaaatagtcataacttgacttctagaccaccaaaaagggtgctccaaaaattgttggaaagcttaagaaaagtactacaattcgtctataattactaagggctaattctcagtttaatttagtcaaacaaggcaattttcgaaatcagtacagaatctggacagattcgtatactgtacttagaaaaatcataactcctaaactactaaacctatggtcatgaaatttttacacaagcaagataaaggagttatctataacttttctatataacacttctacagaaaatataatttaattcactcaattattaccccacaacagagatgatgtgtgcagcaaaattcagctcagggacaatcagattccataagcaaacatcaccacaaatacctatgctaatcacaaaagacatcgaccacctaactatttaacccatcattcaagctgacaattatagatagcaaaggaattcacccaaaattaaattcaactcggaaactataagcacaatgtcgagctacactttagcccatacgtcgagcacctaatgaacaacacctcgggatttcgctttcattcaaccaaacctccagggatttctctcctcaccagcacacaataacatacacacgattagtatctaataaatcgacaccgggtacagaaaggaagaggtaaaacaacaatagcaggacctcaccgagtagacgatgatttctggtttgagcataacactgaacatcaaacaatcatctcacgacttgtctcgtttcatacatatgatatttctcttcacatcccacacataagcatacacatatacacaagattagcatttaattaatcggcgtcgaatacatgtactagcaaggaataaacacaagaaaaata

SEQ ID NO: 71837 - DNA, 871 bp, Zea mays
  Clone ID: MRT4577_165519C.1
acgctgcaaaccctagcagctcacaccctcgaggtggcggcgcgctcctccccttctccttgctactagtccccccccccccccccccctcaattcgccactgacgttcattccgcttgcttgattgctcgaggtacctccattcgcagtcggccgtgtcctcggagccgcgggagatggcggatcaggagaccgtagctgtggttgaggcacctaccccggttcttggggaaccgatggacctgatgactgccctgcagctcgtcatgaagaagtcaggtgctcacgatggccttgtgaagggtcttcgtgaggctgccaaagccatcgagaagcatgccgctcagctctgcgtgcttgccgaggactgcgaccagcctgattatgtcaagctggtgaaggctctctgcgctgagcacaatgtccacctggttactgtgcctagcgccaaaactcttggagagtgggctgggctttgcaagatcgactctgagggcaaggcgaggaaggttgtaggctgctcctgtgttgttgtcaaggactacggcgaagaatctgaaggccttaacatagtgcaggagtacgtcaaatcgcactagatacagtctgtcagtatctggaagttgtgttcaacactacattttgcacctgagtttaaatatgtgcttggttcttgggctttgctaggagattagaacagttttcaagtgagcctaggatccatgtgaacgatttgaatatctcgcctcttgcaagtgttctcatctgctgttaatacaaaatcagcaagagctagtattttgttaaaaaaaaaaaaaaaaaaaaaaaaaaaaaaaaaaaaaaagggcggccgctcgcgatctagaactag

SEQ ID NO: 71838 - DNA, 326 bp, Zea mays
  Clone ID: MRT4577_16551C.1
ggagttcttcattcaaccaactggtgcattgaacttgtgctattatgggcaacatctaccattatgactactgtactacccacacaattcttcattaaccaactacacatgaactctgtgttattacacagaacagctacctcattcaccactactgtgtgagcctgtgtcttttgacacaaaacatggttgcggctactgcacctggcctaacttggacactattcaactgcacataagctgcattcatccaacttgctcaacaaacccaacaacgttctagaacaactgatcatgttgggccttgtttgattgcttatgagcaa

SEQ ID NO: 71839 - DNA, 2746 bp, Zea mays
  Clone ID: MRT4577_165520C.1
aattcggcacgaggcatccacctcgtgcttatcgcctaccccaactccgactcctgctcgtctcgtcgctcgccgctcgccgcctcgtccagctctctccgcccctccggactagcctagcccctcccgctcaccgcgtcgtctccagaatctggcctacgaccgttgacggctggtgccccctccggcgatcggtggtcatggtccgtccttgctcaccccgttcggatccgctatgcgcgagcctccccttccctaatcacgcgcccccctgccccagcgatccgcagctgccgccccctgtcccaccgatccgcggctgccgcctcctccttcccctaatcacgccccccggtcccgttgatccatagttgtcgcctcccccaacccctaatcacgcgcgtctcgctcccgccgatccgcggatcggctctgctccaaccctcctccgtccctgagatgcaagcgagcaccacgggggatttctcccttgaggtgttgcctgagaggtgctgctgaccgagtagcatcattgaagagttactgtcgagcacttggattatgtgatcgatgtgcagagaagtggttccaagggcacaagtgtgccaacatggtgcaacttcacgccattgaggaagtctaggatttgctcaccttggatgaagctatagtggaagtcattgaaccagcagaggaactgatgatggttgtatccctgtctaatgcggcatggtccggatctgacacgatatcaaccatgagattacagggtcagattcagcgacataatctcttggttcttattgattcagggtcttcacatactttcctcaatgacagtcgtcgaccactattgttcggagtccaagaattgacaacaccaattacagtttaggttgctaatggccaagttattacctgctcacaccaccttccagcagctccatggaccatcggtataacccaatgagagtggattggacaaacaagtggatggttatttcttaccaggaaaatactatctaccttcagggcatcaggtcttccttactagtgggaatggtggtggaattattgttactatctgaaacatcattatccacatctgactctagcatagcagttgttgtagtgtattctagagtgcaagctgtactcgacagttatcctagcattttcatcgatctagtgggactcccaccaacctgcccgtgtgatcattcaatttcattgatccccggtgcccagccgttccacataaggccataccgttaccctccaaccctcaaagatgaaattgaaactcaagttaaggaaatgctatcccagggggtgatacgaaagagcagcagcccctttggatctccaattctcttggtcaaaaagaaagaccactcatggcgattctgtgtagattaccgttatttgaatgccacgacggtgaagagtaaataccctgtgctgatattcgatcagttctttgtgctcaggcactaggcatgtagaggtattttttgttgttattttctctttatgtggatgtggttacaaggctgttgacaaaatattactactccatcgtcctccctctcacccataaggtatttgatatattactttgtccagtcgatgcaatgcagcttacaaggctgttgacaaaataatccaggtttgttggcacacttttaatctttcttgtacgggtacactacttctaacaatggaatatgaatgttgttttttgcacaaaagttgcctggcttttagcatcgtttgaaatactagaacactagggatatttgttctctcaaataaagctttacctgttatattatataatacttccgtaagaagagctgttagtggctggagtgaatagaatttggttggtcggtgcctccaagttgtttggtctgccgttcaaatgccttattattctgcgagctgttttaagactgggcctcaattttcttttccaggcagaaagtgctactgccgctctcaactgtagcggtgtggtactgggatccttgccaataagggtgagcccgtccaagatgcctgtgcgtccccgtgcccctcgccagctgatgtcgtactaggctaggggattgaagaagcacttgaagaggctcaatgcgcccaagcattggatgctcgacaagcttggcggagcttttttcatgctctgcaaggtgaggtctgttcagtttggccagaaaggtatcccctacctgaacacctacgatgatcgcaccatccgctaccccgacccgctcatcaaggccaacgacaccatcaagatcgatctagagaccaacaagatcatggacttcatcaagtttgacgtcggcaacgtggtcatggtgaccggcgggaggaacaccgggcgtgtaggagtgatcaagaacagggagaagcacaagggcagcttcgagaccatccccgtgctgcttggagctttttgctatgtctagttttttcctatttgttgtacaagaaaacataaaatggaattcaactttggtggtcgcaaaagtttaaagacttgatttcatataaagttaggctgaacattactgcaaacagttgtattttagtttagatttagagtacccttatgtatgtgttgtttgccaatgcttatttatgatatattgaatggcccttatttttattaaaaaaaaaaaaaaaaaaaaaaaaaaaaaaaaaaaaaaaaaaaaactcgaaagggggccgcggtacc

SEQ ID NO: 71840 - DNA, 920 bp, Zea mays
  Clone ID: MRT4577_165521C.1
accctctagcaaaaccctagcagccgcccggtgctccctctctgcaggtggcggcgcgctcccctcgcctcgtttgttcttcctcctgtctccctcactaatcgctactgacttttctcttgcctgatccagatctcccttcgcagccgccgaggaaccccttcacagcgcggaagatggctgaacaggaggccccagtcgtggttgaggcaccaaccccagttcttggggagcctatggacttgatgactgctctgcagctcgtgatgaagaagtcaagtgctcatgacggacttgtgaagggtctccgtgaggctgccaaggccatcgagaagcacgccgctcagctttgcgtgcttgctgaggactgtgaccagccagattacgtcaagctggtgaaggcactctgcgctgagcacaatgttcacctggtcactgttcctgccgctaagactcttggcgagtgggctgggctttgcaagattgactctgagggcaaggcaaggaaggttgtaggctgctcctgtgtcgtcgtcaaggactacggtgaagaatctgagggccttaacatagtgcaggagtatgtcaagtcgcactagatgtgtgacatgtttcagtgatactcttgatttggacctgggcttaaaattatgcttttgcatctggggcttgcctaggagattagaacattttactagaagagccgaaggaggatatgtatgaacaatttggacatctgaatttttttttgtttatggtgctgtcgtctggttttaatgcaaatcatgaagagccgagtttattcatgattttcgtttacctttttactcatgtttctatacccatattccattggcttatggaaatctgttttgtgccgtgtggcaaatcaaatcatacttgaactgcaatttcctgaa

SEQ ID NO: 71841 - DNA, 1414 bp, Zea mays
  Clone ID: MRT4577_165522C.1
ggaaaaccattgcccagttggctggttctctgagaactgagatccaccagctttagctacacataccgacatgcgcatgtaaactaccgacaacagagcaaccccaacattttccagtttccactgcatgctacagcctagagaacaaccgctatagtatactctattgtatctgcttctttcagacatcagggcgcaatacaaggatgatggaggagtagctgagcataggatagagattggagttgaggaaatgagagaactggtagacggtgacagcacgatctggcaggccatcgcggaggcgaaggaggaggagcagcagcagcaggcggcgccgaggagcggcatcccactcagtgcttgcaaccatggctaggggattgaagaagcacttgaagaggctcaatgcgcccaagcattggatgctcgacaagcttggcggagcttttgctcccaagccatcttctggacctcacaagtccagggagtgccttcctctgatcctcatcatcaggaacaggctcaagtatgctctgaactaccgtgaggtcatttctatcctgatgcaacgccatgtacttgttgatggcaaggtcaggactgacaagacctaccctgctgggttcatggatgtcatttccatccctaagacaatggagaactacaggctgctttatgacaccaagggccgcttccgtcttcacccaatcagggatgaggatgccaagttcaagctctgcaaggtgaggtccgttcagtttggccagaagggcatcccctacctgaacacctacgacggccgcaccatccgctaccccgacccgctcatcaaggccaacgacaccatcaagatcgatctggagaccaacaagatcatggacttcatcaagtttgacgtcggcaacgtggtcatggtgaccggcgggaggaacaccgggcgtgtaggtgtgatcaagaacagggagaagcacaagggcggcttcgataccatccacgtcgaggactccatgggccaccagttcgccacccgcatgggcaacgtgttcaccattggcaagggcaacaagccgtgggtgagcctgcccaagggcaagggtatcaagctcagcatcatcgaggagcagaggaggcgcgactttgctgcccaggctgctgccaaggcataagttctctgaatgtgctgcttggagctttttgctatgtctagttttatttttatctgcaaggatatagagctaccttcccaagacgttttatcatcatgttttgttgcttttggttcttgaacagcgtttgcagcttagctgtaatgctttaattcgactttctatatattgttgaaccgtgttgtcgacaccatgccagcttgttttgcttctatgtttttgcttgagctacggtggttgtttgg

SEQ ID NO: 71842 - DNA, 824 bp, Zea mays
  unsure (1)..(824): unsure at all n locations
  Clone ID: MRT4577_165523C.1
cactcctatgggcgattgggaccctcgaggccgggccgggaaaaccctagcagccacccggttctccctcgctccagatctcccttcgcagccggccagggaccccttcacagcgcgggagatggctgatcaggaggccccagttgcagttgaggcaccaaccccagttcttggagagccaatggacttgatgactgcgctgcagctggtgatgaagaagtcaagtgctcatgatggacttgtgaagggtcttcgcgaggctgccaaggccattgagaagcatgctgctcagctttgcgttcttgctgaggactgtgaccagccagattatgtcaagctggtgaaggcgctctgtgctgaacacaatgttcaccttgtcactgttcctgctgctaagactcttggcgagtgggctgggctttgcaagattgactccgagggcaaggcaaggaaggttgtaggctgctcctgtgtcgttgtcaaggactacggtgaagaatctgagggccttaacatagtgcaggagtatgtcaagtcgcactagatgtaacacgtttcagtaatactctacatttggatctgggcttaatattatgcttgcgtcttgggcttgctaggagattaggacaatttactacaagagcccatgaggatatgagcaatttggaattctaaatgttttgtttatggtgttgtcatctggttttaattcaaatcgataagagatgagattattcttgctttgccattagcccattacctttttatgtttatatccatgtntcatggtgtataatgtttatactctctctgttgcggttgct

SEQ ID NO: 71843 - DNA, 264 bp, Zea mays
  Clone ID: MRT4577_165524C.1
cccacgcgtccgattgagtccagtttagctttttcatttttttactttatgtttaccagctattatatatttttgtaagaagaggttagttctacagaaatagaaaagcaaaaaagagttgcatacagtggcgaattcgctggactgatatagcaggcttgagatgttagtggtacatgggtatagtagtaattgagggactaggaggatgtgattttttattagttctgaagcttttggaccttgcttccggacaaggctggc

SEQ ID NO: 71844 - DNA, 1333 bp, Zea mays
  Clone ID: MRT4577_165525C.1
ccggccgggacgcggaaaccctagcagctcaacaccctcgaggtggcggcgcgctcctccccttctccctgctactagtccccccccgtctcaattcgccactgacgtccattccgcttgcttgattgctcgaggtacctccattcgcagtcggccgtgtcctcggagccgcgggagatggcggatcaggagaccgtagctgtggttgaggcacctaccccggttcttggggaaccgatggacctgatgactgccctgcagctcgtcatgaagaagtcaggtgctcatgatggccttgtgaagggtcttcgtgaggctgccaaagccatcgagaagcatgccgctcagctctgcgtgcttgccgaggactgcgaccagcctgattatgtcaagctggtgaaggctctctgcgctgagcacaatgtccacctggttactgtgcctagcgccaaaactcttggagagtgggctgggctttgcaagatcgactctgagggcaaggcgaggaaggttgtaggctgctcctgtgttgttgtcaaggactacggcgaagaatctgaaggccttaacatagtgcaggagtacgtcaaatcgcactagatacagtctgtcagtatctggaagttgtgttcaacactacattttgcacctgagttaaaatatgtgcttggttcttgggctttgctaggagattagaacagttttcaagtgagcctaggatccatgtgaacgatttgaatatctcgcctcttgtcttgcaagtgttctcatctgctgttaatacaaaatcagcaagagctagtattttgttcttccttgtccttgccatagcatgtggtttcgtgctgctgcccattcgttcgatgatggtttttatatgatggggttgtggaaagcgcttgcggatgtagcccttcatgtttgggaaattcgtacgcttcttatttcgacataagtgaccggcaggcgttcttttatcaatccaagttttttttttcaaaatatatatgttggagagagaactccagccggtgggggagtgtacctgcctatgaacaagggcatcctatgttttgcttggagagaaaaaactctagccgggtggcagaatgtagttgtataattctaaggaaagggggcattctaggatttgtttggagggatggataaacacaagaacatgcgagggttaaaagtggttcggaatgtaatatctttatttgtgagttgtattgtttagagcttgagcgcggatggtgtggattttgagtgagcttgttcccttgacctttgtatcgtgcttctccttttatagtccaacggcccattttat

SEQ ID NO: 71845 - DNA, 394 bp, Zea mays
  unsure (1)..(394): unsure at all n locations
  Clone ID: MRT4577_165526C.1
tgtcaggctaacgtcagagagatcaagggggtctttatgaagtgctggaaccatcatcatgcaggaccgggcatgtcagactgtcatccgtaacgtgactatgaagtgctcagggacgaacaggatcatgacttcactagtataatgccancgcccagatcaaaactggccacttagatgctactggcctgcacgatagacagtttaccacgttagctgtctctgggtatgacggacttacggtcatgccctcagatacggagacaggcctgaccaaagaaaaaacgtctggagtaagcagttcatatggcacgtatatccaccagtaatacactctggaggcacactgtgctagctgagctatagctcgtaggggaggagtctcatgcatgac

SEQ ID NO: 71846 - DNA, 298 bp, Zea mays
  Clone ID: MRT4577_165527C.1
gctttggatcgataggtttcctaactggagaaggactgaaggtctcggacaggatagatttgggattctgttcgaagatttgcggaggggggcattggccaccgcggggaaagtgatcaagcgcaaagccgcggtggcctgggaagccggcaagccactgtcgatcgaggaggtggaggtagcaccctcccaagccctggaggtgcgcgtcaagatcctcttcacctggctctgccacaccgacgtctacttctgggaggccaaagggcatactcccgtgttccctcggatctttggc

SEQ ID NO: 71847 - DNA, 724 bp, Zea mays
  Clone ID: MRT4577_165528C.1
gcaagcaagcagagcgcgcgcgcgctcccctccctgtctttcttgtctctctgttctgagtgcttcctggtggaaagcttcaagatctagaagatcgccattggcaagctaagctagtggtggtgggtgccgtgatgaagcgtgcgtgcatgggtgcgtaacacgtccaagcaagcgagctggcctgtgatttgcaaatggaagacgacgagatcagcgagctatatctgctgagccgcttcgcgccatcctcgtcgtgcgctcatcagcagaggcttgcagagatgcccatggatcaggacctgtcctcggagctggacccggcgctggtcatgtcgacgtcgacgtcctcctcgtcgccaccggactcggcggcctcgccctcctcctccttctccctcccatcaccgccccgctacacctttgccgtcaacaacctctcgtgccccgcccctcgccgccgcgccgccaacctcctaccgtcgttcctgtcctactcctcctccgccgccgcttcgccgacccccgatgccgccggcgcggcgggcctgctcaagtccgtgtccttcaccgcgtccagctccaacatcctcgctgtcgtgggtcccagcggcgccggcaagtcgacgctgctccgcatcctgtccggccgcggcacgggctccgagatcgccaagcccggcacggtgtcgctcaacgggcacgcgggcacctcccgcgcgca

SEQ ID NO: 71848 - DNA, 474 bp, Zea mays
  unsure (1)..(474): unsure at all n locations
  Clone ID: MRT4577_165529C.1
naaaaaaaaaaaaaaaaaaaaaaaaaaaaaaaaaaaaaaaaaaaaaaaaaaaaaaaaaaaaaaaaaaaaaaaaaaaaaaaaaaaaaaagaaaaaaaagtaaaaaaagaaagaagatttatgtccggcggctttcacgaattcctagcgtcttctttggggccacgctagtttcatttcactggcccggggtttcacaacgttggtccctgggtaaaaccctgctcgttcccgggtttatcggggcttgccccgcaattcccctttctcccgctggttccatctttagcaggcccgcaccgtgcgcctttgcccacattggcccgccctttttggctattgggacgccccctggcctgatggattaagccctccggccgtggggtttccccgcaggggggcgggttttcttgccaacgccctgttgccctcgtctttccgctttatcccctttctttctggtttttgccttcgtt

SEQ ID NO: 71849 - DNA, 320 bp, Zea mays
  Clone ID: MRT4577_16552C.1
tttcggtgagccaccccgttactttttgacgcgcggtgagtctcagtcgagtaaagtttactccaaatcattcacactcacaccactctttcacacaccagtacaccacacactctcctttccgatcccatccctctccagccaccttcctccgctcgccgtgcttctgctttcttcgccaccaccgccggcatggctgctcgctgcccctacttcgccgtctaggagtcctcccgcggcatccgctctgtggagtccccggccgtggcgctccgccggatcctctcgacgcctggtgcgcaccaagcgccctgctgcta

SEQ ID NO: 71850 - DNA, 259 bp, Zea mays
  Clone ID: MRT4577_165530C.1
aatggtacggggagggggggcctcacagggtgctgaaagtgactgtgggcgtcaacggggggactaaccgcaggggcggagctaaaggagtatacagaagagaggacaggaggtggagctcggcaccgcagcctccggaaagattacggagcctctccaggaggacggggaagcgcatttttgtggtgggggggggtgttctccgggggggctgagggcaaaaggcacaagccctccctcaagagaggagggagaccag

SEQ ID NO: 71851 - DNA, 371 bp, Zea mays
  Clone ID: MRT4577_165531C.1
ctcaagctttcaccaaatctctaaaacccgagccctgggtagacacttatccggtgatcaaccagccagcccatcttaacgatccgccatggccaccgcgaatcacgagaggccccgtggcggcccctgaaaggaggccaaccacattcaaaacgttcgaccccactccataacagactgagggcgacctcgccacaaccatcagccgccctatgacaccgccctaggaaacctgctaccgcggctcggcgccctcgacctactacgacggaccagactactccgaactacgagcacgccccctacggacaccacgccaagccaaaaaccaactatgggttccggccccaacaggagcaacaaaccactta

SEQ ID NO: 71852 - DNA, 1448 bp, Zea mays
  Clone ID: MRT4577_165532C.1
cctcgaggccggccgggccggggttcagcccatcgctgtcctcgagcttttacttgtacactggctagagctagctcgtacagcaatcgggtcaggaggtgttaagcgacgatggcgacctctaagctcgctgtcctcgctctgtttgccctgctcggctccgtgtcatgccaggccggaggctactacgactactactaccctaccccgcagcgacctccaacaccaagccctgcagggacgcacctcaaggtcggatactacaggaacaagtgtgccgccgcttacgtggatgtggaggccattgtcaagaagcacgtcaaggccactgatgctggcatgcaagctggccttgtccgtctcttcttccacgattgcttcgtccgtggatgcgacggctccatcctcctcgacacgttcagcaacgacacaagcctgaccccggagaagttcggcgtgcccaacttccccatcctgcggggcttcgaggtgatcgacgcggccaaagccgagatcgaggcggcgtgccccggcacggtctcgtgcgcggacatcgtggccttcgccgcacgcgacgcgtcctacttcctcagcggcggcggcatcagcttcgccatgcctgcgggccgctacgacgggaacgtctccctcgccagcgagaccctccccaacctgccctcgccgttcaccggcttcgaccagctcgtcaaggtgttcgccgacaaagggctcgacgccttcgacatgatcacgctctccggcgcgcacagcatcggccgctcccactgctcctccttcaccagggaccgcctgccgcccagcaacaccaccgacatagatccagcgttcgccgccacgctgcaggctagctgcgcgtcgcccaacggcaccgacaacacggtcatgcaggacttcaagacccccgacgtcctggacaaccagtactacaagaacgtgctggcccacaaggttctcttcacgtcggacgccgcgctcaccaccaacttcacgtccaacaacctggtgcgcgcctacgcggacttcgtgccctatctgtggcagcagaagttcgcaaaagccatggtgaagatgggtggcatccagatcaagaccgcagacaatggggagatcaggaagacgtgccgcaaagtcaacaacaggacgtgatcgatgatcatcagatcagatggcggcgatcagatatcttgtccacctagaccaaattaaactctgccgcttggcttagacgaaatgggaacaaataaccattctttgccttttcggatttccaatttcctaacttttgcctttacctacattattctcctgatatctcctctaatatgccgctgcattctccaactgtatgcctgtttttatgctgtataattttaattggattgaatatcatatcttttgtagtgcaaaaaaaaaaaaaaaaaaaaaaa

SEQ ID NO: 71853 - DNA, 239 bp, Zea mays
  unsure (1)..(239): unsure at all n locations
  Clone ID: MRT4577_165533C.1
ggggcgagggaaaagctccaagctaacagacgcgaccctgcgacgccagagctctcgcatagagacaccgaaattcaccgcaaaggccggcgcggctctctgtcgaganagggaaaacccaggcgtgacccaacttaaaaancttgcaaccccccccccgtaagggggggggnagnaanagggaaaaggtttggagaagaaaagcccccgaggggggggggagggggacccccatttgg

SEQ ID NO: 71854 - DNA, 1325 bp, Zea mays
  Clone ID: MRT4577_165534C.1
ggaccctcgaggccggccgggccgggattcagcccatcgctagctctcgcctgtcgatctcctctactagcacaagaccacgagggattaagcgatgacaacctctaagcttgctgtcctcactctgtttgccctgctcggctccgtgtcatgccagtccggaggctactacttctacccaaccccgcaaccatctccaacacccagccctcctcctcctagtccgcaactcatggtcggatactacaaggacaagtgtggcgctctcgtggatgttgaagctattgtcaagaagcacgtcaaggccaccgatgctggcatgcaggccgggcttgtccgtctcttattccacgactgcttcgtccgtggatgcgacggctccgtcctcctcgacacgttcagcaacgacaccagcctgaccccggagaagttcggcgtgcccaacttccccagcctgcggggcttcgaggtgatcgacgcggccaaagccgagatcgaggcggcgtgcccgggcaaggtctcgtgcgcggacatcgtcgcgttcgccgcccgcgacgcgtccaacttcctcagcggcggcagcatcagcttcgccatgcccgcggggcgctacgacgggaacgtctccctcgccagcgagaccctccccaacctgccctccccgttcaccggcttcgaccagctcgtcaaggtgttcgccgacaaagggctcgacgccttcgacatgatcacgctctccggcgcgcacagcatcggccgctcccactgctcctccttcaccagggaccgcctgccgcccagcaacaccaccgacatagacccagcgttcgccgccacgctgcaggctagctgcgcgtcgcccaacggcaccgacaacacggtcatgcaggacttcaagacccccgacgtcctggacaaccagtactacaagaacgtgctggcccacaaggttctcttcacgtcggacgccgcgctcaccaccaacttcacgtccaacaacctggtgcgcgcctacgcggacttcgtgccctatctgtggcagcagaagttcgccaaagccatggtgaagatggccggcgtcgagatcaaaaccgccgccaacggagagatcaggaagacatgccgcaaggtcaacagcaggtcctgatcagatggcgtaccggcgggcttccaatttcctaagttttgcctttacatacattcccctgatctcccctaatatctgcctttatgctgtatacattctttgtttcgttttccagctgtatgcctgcttttatgctgtataatttaaatttgattgaatattaaatattttccccccc

SEQ ID NO: 71855 - DNA, 294 bp, Zea mays
  Clone ID: MRT4577_165535C.1
caaaaaaatcagggactgtctcctgatatccatgaaagaaaaaaaggtactactggcgcatgaaaatgtgagcgtctgctccaggggatgatccctggtcgatctatgccttattccatgcgttcatgacctaataacaagtaccgtgacggccacaccataagacttgactaggggcgtggggactgatcttcttctgtggccgtagcttatctacccatttgtccaagctgttgctgcgtccggaggtgctggtggcaccacatgatgaactcgtctgcgcgcctgagcacc

SEQ ID NO: 71856 - DNA, 350 bp, Zea mays
  Clone ID: MRT4577_165536C.1
ggggacactgcggctgctggacttccttcacttcttcagcgaaggcgttacaaccacagcgcagaaagcactagaacccgagtacggtgtatgctgcggcgacgagtagcgagcgtgaccgggacgggcggttgcgtcgccgccgggttggggaacctcctgctctgccgtggccagctcatagtccgccgcaccgtccgcgaccctgccgctgggcggaatgctgatgtcaccggtgctggcatgagccgtggatgggttgcatgttgctaaggctgagttgttgttctacaaaggtggtcttttagcaattgccgcttgtgatgccgccttccatgtatgtcgccctg

SEQ ID NO: 71857 - DNA, 430 bp, Zea mays
  Clone ID: MRT4577_165537C.1
tggaattcggacgagggatctgcgaccgtacgatccggcctgaggacagaccgtcttcgctggtctgccacgcgggtcgatgcaccgctcggatgcggcgcacaggacgctgacgagagctccccgatcgttctgcaagaccgttggctggagctggcgggcgctgcgttagagtacttattagcctgcagacagcgtgccaatcttaggcgggttataggggtcgacgtgcctgcactacatcatgttgtggtacgagtacctgccgtgccattatccgatgctgccgaacgggccgctaatgggcgccatatcgctcgaggggtcgcgcctcagcctgctggagatgcgctatctgagtcgctgactgcagcagggcgcgatccgccatctctgctaggcagtcatcggcttcttccgcgtccgcgcg

SEQ ID NO: 71858 - DNA, 218 bp, Zea mays
  Clone ID: MRT4577_165538C.1
cggccgatcgtgaggcggccgccctcaaatttttatgggtctagattttgaaaaatgtctcttgataaatggtagaagatattttttccagatatctttgaataatgttgatggatgtgggaacatgtgctagacataagcgagcagcatttccctgaataaaacaataacacatttaacagttactttgtcatggattacaagaaggcgtttaatgt

SEQ ID NO: 71859 - DNA, 427 bp, Zea mays
  Clone ID: MRT4577_165539C.1
ctcacaaaatactctacatgttaagaggctgtgccagagtccaagtggtgaaccacggcggcgacgcagtgttcgacgataacgtggagcaaggtcagctcctgacggtgccacagaactttgcgttcatgaaacaagcaggaaacgaaggagccgaatggatttccttcttcaccaatagcgaagccaccaacaccccaatggctggaagtgtctccttcatgcgagcactgccggaggaagtggtggcagcgtcgtatcaggtgtcaagagaagatgcaaggcggattaagttcaacaacaaaaacacctttttcttcactccttcacagtccgagaggagggccgatgcttaaactccagccgatgccaatgcaatcaaaatcagggggatctttgtagggtaacgtaagtaggaagtaataaa

SEQ ID NO: 71860 - DNA, 120 bp, Zea mays
  Clone ID: MRT4577_16553C.1
agctcatctacagtagacactgcagtcaccatcaagacgacctgcttcttcaccgacttcggcaattgtgattcgcacatacaagacttcgcatctcattcgctggtcgctggcggtggc

SEQ ID NO: 71861 - DNA, 332 bp, Zea mays
  Clone ID: MRT4577_165540C.1
ccctcgaggttggccggagaagaaaaaatttgaagaagaaaagtgcaaaactctagaaatgcaaaggatatggaagtcagaagcacagaagtctgaagagtatagaagagttgctgatactgaaagaaaagttgccaatgattggagagcatcatgtgaaaggttgaggagtgaagcaaatgaaatcagagctcagttgactgctcaaattcagaaaacagaagaaatacttaaaagggctgaagcggagaagcagaaggtcgccagagaaaagaaacgtgctgattcagagaaatcattatctgataagaatagaacacttgttgaagttc

SEQ ID NO: 71862 - DNA, 415 bp, Zea mays
  Clone ID: MRT4577_165541C.1
gtccgggtacccgtacttcacgctatctgttgccggaacactctttcatttaatcactgaccggcgcacgctcgcggctcgtcaaccgcgcgtgcatcttctctgtcacactatagtggagagcgagtgcccggagacgcatccaatggcaggcgccaatcaacctctgtccactcccgcgcgtgaagactccagacgtgccgcgttgctgggcacgattacttcgttgccgtacactgaagagcacgacgaggaccaacctcaccacgcggataagggtacaggcgacctgatccgttgctcctcacgcgaggagagcccgccgaactgattccacgaccgaggagttcggatcgaagctcccactggccgacttaatcgccgccgccgccggtcaaccctgaacgacggcgat

SEQ ID NO: 71863 - DNA, 311 bp, Zea mays
  Clone ID: MRT4577_165542C.1
gcttcccggcggggccagctggagagagaagagacgccgcctggctcgggcgccgctttccggatccatctcggcacgacgtactcttgcgtcggcatggggcagggcgaccgcggagagatcataggcaaggaccacagtgtccgtaccacgacctcgggcgtgggctttaaggtcttccggcgctatgaccacagaccggagagccaccgagcgccctttgattgcggaggatgggccagcagatgtgcgaggtttcctggggaccctgcggaggatctccaaggaagagactgtggaatacctgcctc

SEQ ID NO: 71864 - DNA, 327 bp, Zea mays
  Clone ID: MRT4577_165543C.1
gcgttgttctccatcacctcctccccgccttaaggggacatcgctgccgattcccaccggctatctacccgccatcagagccccatactcgcccaacctgaaatccttcacctactcacgcctgaatacctcatctcacctccaccactcctcacacgccttgtacttcgtcgacctaaccgcacccttccaatgacagggcgctagcgaagccgcgcatactccctgcatcttcaccgctcgtcaccctaaccgagcccttccaacgacgaagtcgctaccaaaacgccgctcatcctcctcacatcttcctcgctcctgcgccgc

SEQ ID NO: 71865 - DNA, 496 bp, Zea mays
  Clone ID: MRT4577_165544C.1
tctctcctttttttgggggggggaattgtccactcaaacttttttccaaatttttccttgtccggaacccgaaggacgggggtagccccttgactggctagcctccaaaagcctaaccggggctggtttacatgacctcccaagggaaaaaccctggggaatttgtgggggcaaaaaagggcctgaaaccatttttgtttgagggctttgggttttcccggttgaaagactgaaaccggttttttttttaggaaatcttgcagttgacccaagggttttgtttttttgcccataaccggggttgaccccaattcaacggttgttgcgggaaatggggtttaacaagcaattttttgtatttttcaccaggtcctttggccgggggcgcctctttccaaaccaagttaatatgccttttttgaacccttgctggaatggggccaaaaattttcctgtttttgaaaggggggtaaaacccccccttttaaaatttttt

SEQ ID NO: 71866 - DNA, 694 bp, Zea mays
  Clone ID: MRT4577_165545C.1
cttcatccaggccggccgggaactggtggttaacataaagtgtaatatttattttatcagtttaatatttaatatgtggataatatgttcgctttgatattaaatttatttttttatggatatcaaatatgattataggtcggcacaacgcacgtagggatggtaatagactctaaattttacactataaaaattagagaaattatgtttctgttcctggatggaagtgcaactatgattttgtccctcaaaattggactttgtgattttgggccgaaaaataagtttgtccctacttctgttagatgacaataacgatatgaaataggacatatatagacaaatttatccttcggtcgtaattatgattttgcctcttttttgaaaaaagggtaaaatcacaattatagaatagacagattccaagaagggcacaaaatcataattacgactgaagaataaatgtctttatatgtcctatttcacatagttacttccatctaaccgaagcatagataaagttgttttttgtttttagaaaaaagacctgaaatcatgaagtcaaatttgagggcaaaatcagtgacaaacacaattgcccctaaaatttaagaatcgcgatgaagtgtcaaatttccaagtgtgcaaatctgctgacatagtttgagtggccaatccatatttctggtatttt

SEQ ID NO: 71867 - DNA, 1095 bp, Zea mays
  Clone ID: MRT4577_165546C.1
tcttgttgttgttgctggtggcatgcagatcctgagcccgcagctggagccgctggcggaggcgcagcgcatgctggtgggcggcctgcagcacacgtcggcgcaggcggaggacgcgctgtcgcagggcatggagaagctgcagcagaacctcgcggagacccttacggccgaggccgacccgttcgggccccccgacccctacatgctgcagatggccaccgcggtgggcatactgaaagagctggtcaacttcgtgacccaggtaaaccggaccggtcgccaaagagccatccatcattccatctccatgtggatgcaaatgcaaggcctggcctggcctggccagctcgaacgcgcgcggcgtgtgtgtgtgtgtgtccctgttgcgctcacccgtacgtgcccggccgcctctgctcggcgcgctggctgtgcctgtgcctgtgcaggcggaccatctccggctgacgacgctgcagcagatgcacaagatcctgacgccgcggcaggcggccaggggcctcctggcgctcggcgactacttccagcgcctccgcacgctcagctcgatgtgggcggcgcgcccgcgggaggcggcgatcagctagatgcctgcggcgtggcaggccaaaagctcgctcactggtgaggcgaccgtaccaaagaacacgacgccgacgacgacgaagactaaagagtggtagcagttcgctgtatacttgcccccccaatgcaaggtgtaaagcccagtggaggacgaagagatcgacctcgctgtacgagtacgacgaacggaagggatgcttctcggtcggcggcggcggcgatctcgctgtacaaggcgattagtagacgtacaaaatgtaaacggaaatcgattgatgggcggaagacatgtacgtatcttgttttgatacccgcggccggggccctcctagaggcgtactgtatgatggttatgcgggccgtctacaactactactggtgttgggctatatgtatatttatataaaatgtaatcacctgtaactatcgttggtcagattctaaagagcacgcggcatgcaggtgtggaacagttcagttcacctg

SEQ ID NO: 71868 - DNA, 703 bp, Zea mays
  unsure (1)..(703): unsure at all n locations
  Clone ID: MRT4577_165547C.1
ggaatgtaatgacaggagctctgcctttccattaagaagaagattagaattgacctagttttaagaaaaaccgggccaaaaacttacacagagtgcccaaacaacataagcagcggcaaccccacacacaaagcccatacagagtcaccgttgccgagctcaacacaaggtacgggtagctccaacttcaccagacgggccgcacacggtcaaaagaaacacgaaggcacctacacctaaaacctggcacagaaggaggaagaccgtgacacgccatcgttgctaagcctcaacacacccacactcgaggcagctccgattcttcaccaactatcttgatccaacacccacctccagttttttgctcgacctccaaaacaatccaaaccacgaagaaggaggttcgcctcatgtcatcgttaccgagccacatctcctaatgtggcagcttcgacttcatgtttcaaaaaatcccacctcgacccgcaatccagacgtcgagaagcgaaagcatcaaccgaaggcaacgtcgaggccaagacggactcaaacgtgacgcctttaggaagggagtgacatccaggacgccaccgtcacattccaaatggatcggggctttcgcccatggaagacatagcaatgcgtcgccctcaacagagntgaagtggcgcacacaggcgtcactgtcgccgaagctttcgtc

SEQ ID NO: 71869 - DNA, 493 bp, Zea mays
  Clone ID: MRT4577_165548C.1
aaaggaacaaaaaccttttttggggattttgattccacgtgtttgcatttagtaccctgcagtacaaataaatcaacccggggggacgtcgggagggccgaacgtacccccccccttgcggaagggttggtgtatttaactgaatctggatcctgggtttgaggacaaccatcttgcacaagtgcggcgcaacgtcaaacttaattttgtccggaaacggggggtccaacgtttcgggcagccacaggtccttggcctcaacgggcgtcccgggggggaggccaatttctccccagtgcgcgggaatgggggcctcttctttggcgtgccggttaaggagcagcaccgccgtccggtactcgaaaagcggggcggcccaaatttcgttgttcccctccatccgaacttttttcccttgcaccccgagcggattttggttgacggcaatcacctccttgttggccagaatggcgtacgtttcccgcaaatgtgc

SEQ ID NO: 71870 - DNA, 284 bp, Zea mays
  Clone ID: MRT4577_165549C.1
tcggcgcacggggcaccggacaccttactggcggttccttcttggcttctgttcttttcttttctcggcggatccggcaccgacccaacggccctttggttggttctttcggcggaatcgctggtcctttctgtgctggcgatttgtgcggcgactggtagtttggttcgggcccattcttctggtgatcaatggctgacggggaggatattcagccacttgtgtgtgacaatggcactggaatggtcaaggctggctttgctggtgatgatgcgcccagagca

SEQ ID NO: 71871 - DNA, 212 bp, Zea mays
  Clone ID: MRT4577_16554C.1
gcggccgcccaaaatctcctttcccgaaaacggaaaaacgccacggggggaagacaacaaaaggcaccgcccacacccccaaaagccaagaaacaagaggacgcaccccacccagcaaggacaccgaaaggacccgacccccacacgggacagagagagacggggaccccgacaacgcaaggggaccagaaacacaacggaccatgaggcaa

SEQ ID NO: 71872 - DNA, 262 bp, Zea mays
  Clone ID: MRT4577_165550C.1
gcagcacaatccaccagcgcactactgccacactgcacgacgcataggataggaggagcctgttactgactgtgagccaggaccacatgagagcttcttggagagccatggcggcggggcataccggccggaacagcaaacagcatgccgccgaccggttccgccgtgctttggctaacagtcgatcgctccatcatcatacatgcgctactatcgctgttgccaactttttctgtactgccggggcctctgctactgctag

SEQ ID NO: 71873 - DNA, 259 bp, Zea mays
  Clone ID: MRT4577_165551C.1
cggggcgagccacgcgtacgggagcggtcctcgtccgacctgctatttgatctgaagaactacctctacctacgcggtgcggtcttccacattctgctcacgatcttgaccgcctatggcatgcacacgcaaacgctctggatgaacccttactaccccgtactgagatccttgtacccggatattacctccctggagtttgggacaactctctttaaattcccgtgtataagggtgacccttcatactatattcattg

SEQ ID NO: 71874 - DNA, 382 bp, Zea mays
  Clone ID: MRT4577_165552C.1
ctcaataccgctcgccgaatgggtagacaccggggtttgggtaagcgtaagggtaccaaggacgctcgtatgccaagccaagttctctggatgcgtcgtcagcgtgttctccgccgtctcctcgtcaagtaccgtgcctccggcaagatcgacaagcacctctaccacgagctctaccacttgagcaagggtaacaccttcaagcacaagcgtgctctcgttgaacacatccacaaggccaaggccgagaagcagcgtgagcgtgtcctcaaggaggagatggacgctaagcgtgccaagaccaaggctgcccgtgagcgacgacaggagcgtatcctcgctaagcgaaatgctttgactggcgaggaggaagcccaggagt

SEQ ID NO: 71875 - DNA, 608 bp, Zea mays
  Clone ID: MRT4577_165553C.1
taaatctacatttaacacagttcttcacattttgtggttgcttttatttgaacttagaattgataatttaaattgtgtagttccttcttttctgttgattgtctgaagccgtttggcaccctgtagtgttatatgttatgtccttggattaaaatcttttttaaatggctagtttttggtcttgcctgaattgtatgatggagttcagttgagatggcacaactttggctgttctgcgctatttttttttgtttccttacagttatactagcagcaactatctcaaaattatttggagttcttggattcctattcagaaggttctgcttccttttgtaggtcttgatcaacctttcatcttagtagctaacaatgtagaatatatcggatcatgggccacccaatccaacccccaaaacctaacccaactagtgcaccgggtgggctcgggccatgagtgtcgaactgcaacaaccatcaggttgggtgtggattgtaatttttgaaccacaacaaccaacgggtcgggcacgggccaccttttttacctagaaattgacccaacattaggaaaaccctacctaacttgaaaaataggccaactcaac

SEQ ID NO: 71876 - DNA, 417 bp, Zea mays
  Clone ID: MRT4577_165554C.1
agccaatcctccccctccagctggcggaacttgtcctgccagtcgcccttggtctggcggatcggatcggcaagggccggggtggaggcaaggagcagcgcgaccagcgcgatacgagatgcggcggacaagaagcgagcctttcgaacggacggacggatgatcgttgccggtgatacgatgcgcgtcaaccgctggccatgcgaatatcggatatattgtgacacggcggaccgatggttgcggtccgacgcggagtgcggcaagcaatatgtcggaatagaatgggtacgtacacaagctatgctgttgaaccggcggacgatgatcggcgcactcgcttccctgccgatcgcgtcgcgggcaacggcccggccccgttgcggatccgttgctcttcgcctatttcggaaccgg

SEQ ID NO: 71877 - DNA, 274 bp, Zea mays
  Clone ID: MRT4577_165555C.1
gctattcatctacttgttttctgcatctaagtgctcggcactcaataaatcagtatatttgcaggtaagctgtccctatctttactttaaaagacgttagtttctgttttcccccccttatctttcaactttggcactctgatagaaatgtcatccttgggacatgtacaagaaaccacaccgttggatccctaaaacttgcttaagattcacctctctctctctctgcgttctgcggcaagcaggaaaagaattgggtgctaacgtatcatct

SEQ ID NO: 71878 - DNA, 111 bp, Zea mays
  Clone ID: MRT4577_165556C.1
tctaccatggcatcaactctctccttggcagaatgacaggagttgtagggtttcttactgcctttgtgctttactatcttggtctgactaccacctagaccagggagcgag

SEQ ID NO: 71879 - DNA, 137 bp, Zea mays
  Clone ID: MRT4577_165557C.1
tgttgtcaaaaaaaccccggccctaaaatagggtctatctagcgatatcccttttctagagagtccgctcaacaaatcttaatctgtgcaacactaaaatccgggaaccacgtgcacccaaattatccttgtttttt

SEQ ID NO: 71880 - DNA, 421 bp, Zea mays
  Clone ID: MRT4577_165558C.1
gatcccctcgctttttaatttcctagctccaaccgatcctcgcgggctctgtgccgataaggatttcttccccgccaccatcgacaccgtctgactccattaccgttatatggatgcaggacacgagcaaaaagtcaccaatgctactcttcaacgaagtacctacgatcaaagttgatggccttattaccgcttatgaatggggtacgctccaaagctgaatcacgcacactctatctggcatattgttaaaccgaagaacatataatacattttatgtaaaactgactgaacactgcacttgctgcactgttgtctctgctgaatgtcatgcgcttatccagcacccatcctgacattttgggggccctaaatgaaagcctatatagatgccttattcttaggatccataattgactca

SEQ ID NO: 71881 - DNA, 942 bp, Zea mays
  Clone ID: MRT4577_165559C.1
atggcgccgcgcgcgctcgatatactggcatgctgtaggcatgtcgctgttgatgattccgtcctagcaaaggagaacgcgcataagagggagaagcggtggtggcggtggaccgacgagatcaagcggaaggttctgacgacggccaggcgaccgcagatatgggcggtgaggagggaggagccgtgcgacgtggacgttgaaaagcagagggcgcatgcgccagagagaaaggtcccagggcagcaggcgacgccgcggcgagatggtgcaccggttttgcagattgacaggagcccaagcgatgacgatgatggcgcaccggaggccgtggccgtcgacggccgacataacaggaaatgcctcagggacttcgatctccctccggaggagatcagcgacgctccggtggagtcgcggctcccaactggagttctagccgtcgaaggccgacgtaagggagaaggcttccgggtccgcttcgacctccctccgcaggagatcagcaccgcgccggtggagccgtggttcccatctggagtgctgggcgtgccgccggaaagctttgcgcactcggatgcggaaatgaccgccgcgttcctgatgtccgttatcgccgagaagagcggggggatgggcagcgccatgcaggtcgaccgggaccttgttgcctgctggacggagaggaaggaggcctgctcgcgccgcctgcgctacctcagggactactgtccctttcaaagggatgacgaggagagcgagctggggacgacgacacgaccggaggcagagcccgctcacgcggaggtttggccggcggtgaagaccgggctgccgttcgagagtccggagtgtgaggccgagttcgtgaaggcgattcgttggaggtacctaggtgaagggcgagttcttattccgccatgcatacgaaacaagtcgtga

SEQ ID NO: 71882 - DNA, 1717 bp, Zea mays
  Clone ID: MRT4577_16555C.1
cgcgtccgtcggtgcgcccttggctccccctccgctgccactgtagccgttttaggggctacagtgcgcccctattctcttcaccggcttcctcctcctcctcctctcccctcccgatttcttctctgtcccgctaaatggatggacacgctactgcgccggatttctccccagccggttccttcggccacgcgaccgcgcgctcggaaaactccacggacagcgaaggaggcgaaccaagggcgacgtattcgccgccggagaaggtaagcgtcgatccgccgtgtcccgcgattcgtttgtcttgctccgggcggcgagcagcagtgggggtcgtcctcgcggatccgtcttcaagctttcgcggatccgccttcaggggggcgtttcgacgaattccgcgtcccacccggcccactttctctacgagcgccccccatctcacccacccaaaattaaaatcctcccggaaatcagagacgcgaatccctcgccccaggccccgaaacctccgagttctctcgccaattcgatccgcctcaccgccgccgcccgtccgccggtcggccttgactgctccgtcgcacgtggcggttcgcagcgcggaatctaccttgtgttgagagatccggggaaacccttgttcccggtcgttccggctcgaatcttctgcggactggcaatgtaagcgttctccatcggagggcgacgatctacggggcggttgttggcggggtcgcgggaatggagcacgtgttcggagggaagtttaagcttgggaagaagatcgggagcggatctttcggcgagctctatctcggcgtcaacatacagagcggcgaggaggtggctatcaagttggaatctgtaaaatcaaggcatcctcagcttcattatgagtcgaaactatacatgcttctccaagggggaactggaattcctcatttgaaatggtttggggtggatggggagtacaatgtcatggtcattgatcttcttggtccaagtctggaagacgtattcaaccagtgcaacagaaagttttcccttaaaacagtacttatgctagctgatcagatgataactagggtagagtacatgcacacgagggggttccttcatcgtgatatcaagccagacaatttccttgtgggcttaggtcgtaaagcaaatcaggtttatatcattgactatggccttgcgaagaagtatcgggacctccaaactcataaacacattccatacagggagaacaaaaacctcacaggaactgcacgatatgctagtgtaaacacccatcttggagtagaacaaagcagaagagatgacttagagtctcttggttatgtgctgatgtacttcttaagaggaagccttccttggcaaggcctgaaagctggaacaaaaaaacaaaagtatgacaaaattagtgagaagaaaatgctaacctcaattgaggccctgtgtaaatcttatccatcagaattcgttacatatttccattattgccgctctttgcaatttgaagataagccagactacagctatttgaagaaaaattttcgggatttattcatcccgtgaaggttgccagcctgattatgtatttgattgggactgtatcctaaggcaagctgcgggacaataacaagattgcgagtatgtctgctccttttctggaaattacctgagtgggaagacaggtgggttggtggga

SEQ ID NO: 71883 - DNA, 1394 bp, Zea mays
  Clone ID: MRT4577_165560C.1
ggacctcagcggcgggacggccatctccccggatccttcctccacacctcatcaaccgccgcctccaagaccctagtaccgaaccccaacctcgtcccgctccggctcgtccgccactttccggccatggccgccaccgccgcagacgagttcgtgaagggccgcgtcctccccaacggcgtcgccgtcatcacgctcgaccgacccaaggccctcaacgccatgaacctcgaaatggatgttagatacaaggcacttcttgatgaatgggaaacaaatccaagtgtcaagtgtattcttgtggaaagcagctctcctcgtgccttctcagcaggtcttcacagcagagtactccttaatttgtaagatacatgagtatgcaaaaccttatatatgcttgatggatggagtgacgatgggatttggaattgggctatcagggcatggccgctaccgcattattacagagagaacactcctagccatgcctgaaaatggtattggcctgttcccagatgttggctttgcttacattggtgcaaaagcgccaggaggtggtgcagttggagcttaccttgggattactggaaaaaggatatcatcacctgctgatgctatgttcataggccttggtactcactatgtaccttctgcaaatttgggttcactcaaggagtccctgctgagtgctaacttcaccaatgatactcatagagacgttgagtcagttctgacaggatacaagaaagaaccagagtctgaaccgcaaattgaaaagcttttgccatatatcatttcttctttcagtcctgataaatcagtggctgaatctgtggaagagctaaagaaatttagccgaagtggtgatgctgcagtggcagaatgggccaatgaagctttagcaggaattgagaaaggcgctcccttttctctttgtttaacacagaagcatttctctcaagttgcatcagcatatgggactagtgaacactatttatctaagctggctggtgttatgaaattggaatatcgcattgccttgaggtcatcggttagaaacgattttgttgaaggtgtgcgtgctgttttagttgacaaggaccagaatccgaagtggaatccagccactctggaagaagtaaacatggccgaggtcgaatcagttttcgagccattaggggccgaggctgagttgagtgtgtgaaacttcctatggcctgccacactcagttttcttatttgtgctgcaataataatgtatacaaaacagaaatgcgatgcccacagaaaaaataaatgttgtgtcttcacaaaaaaaaaaaaaaaaaagcggccaaaaaaaaaacaaaaaaaaaagaaaacaagacaaaagaaaaagaacgataaaggcaacg

SEQ ID NO: 71884 - DNA, 271 bp, Zea mays
  Clone ID: MRT4577_165561C.1
ggtagaccgggaaaagcacatgggtcccggggaaacatgttattacaaaaaaggggggccaggggggccaattttttcaggggtcccactccatgggaaaagtttggaacaaatcccgacaactttaaccaggaggggccctaaatcaggccttgacgctgcaggtcaggggaggctcttttggtgaaaaaggggcccttcccgactcttaaactatgggctggggcccggccgccaattatactcccctgggggggcttgaatttatttc

SEQ ID NO: 71885 - DNA, 396 bp, Zea mays
  Clone ID: MRT4577_165562C.1
aaaaacccatccgcttttttttatttggcacttaataaagattggcttatacaccgactggggtataacataactctagccttggatcctacggttttaggggggagattttttttgaatcgagcacgaacaactccattggaaccatggggtctagcaattttaccccacacaacacggacgttggaaccatttttgtttttttttggggcgcgatagacataggcaactcgtttacccaagtagaaactagtatcctccttggtggaaacattctccaacctcaagagagagacattggggtactggtcaactttgctttttcggtatccgaggacctgagctttgacgtacaagcggactggttgttttccccccacgcgtccgttgaagcag

SEQ ID NO: 71886 - DNA, 2008 bp, Zea mays
  Clone ID: MRT4577_165563C.1
ccggccgggagtaatactattgctactgtaataccataaaaattctctctcggctgggtaggagtcctgggggtattggattcctcgaggccggccgggaaacacgccctatgagggccctcgtccggatccacctgcccacggccatctccaccggatccttcctccacacctcctcaaccgccgcctccaagaccctagtaccgaaccccaacctcgtcccgctccggctcgtccgccacttcccggccatggccgccaccgccgcagacgagttcgtgaagggccgcgtcttccccaacggcgtcgccgtcatcacgctcgaccgacccaaggccctcaacgccatgaacctcgaaatggatgttagatacaaggcacttcttgatgaatgggaaacaaatccaagtgtcaagtgtattcttgtggaaagcagctctcctcgtgccttctcagcagggatggatattaagggggttgccgtggaaatacaaaaagacaaaaaaacaccacttgtgcaaaaggtattcacagtagagtactctttaatttgtaagatacatgagtatgcaaaaccttatatatgcttgatggatggagtgacaatgggatttggaattgggctatcagggcatggccgctaccgcattattacagagagaacactcctagccatgcctgaaaatggtattggcctgttcccagatgttggctttgcttacattggtgcaaaagcaccaggagggggtgcagttggagtttaccttgggattactggaaaaaggatatcatcacctgctgatgctatgttcataggccttggtactcactatgtaccttctgcaaatttgggttcactcaaggagtccctgctgagtgctaacttcaccaatgatcctcatagagacgttgagtcagttctgacaggatacaagaaagaaccagagtctgaaccacaactaaaaaagcttttgccatatatcatttcttctttcagtcctgataaatcagtggctgaatctgtggaagagctaaagaaatgtagccgaagtggtgatgctgcagtggcagaatgggccaatgaagctttagcaggaattgagaaaggcgctccattttctctttgtttaacacagaagcatttctctcaagttgcatcagcatatgggactagtgaacactatttatctaagctggctggtgttatgaaattggaatatcgcattgccttgaggtcgtcgattagaaacgattttgttgaaggtgtgcgtgctgttttagttgacaaggaccagaatccgaagtggaatccagccactctggaagaagtaaacatggccgaggtcgaatcagttttcgagccattaggggccgaggctgagttgagtgtgtgaaacttcctatggcctgccacactcagttttcttatttgtgctgcaataataatgtatacaaaacagaaatgcgatgcccacagaaacaataaatgctgtgtcttcatgaactaactggagtggttccattttctcgaaaggggcgcgtgggaatctaaggtctgttgcttgctttcctgcctctgcctgcaatattccagccatggtaccaggtggatggccaaatactctagaagcgtttgccctgggcacttgcatgtagcttgatgtgagtagtgtaagaacaaccgggtacggaaaccgttgtctggccagcagatttcaaggcgtgtttagacaagtgtacaactgacgcgcacagatgtacggagtatatattatatgaaatatggcactaaaactctttgcaaggcctagcaaagccaaagagactttgtcccaggggctttgatgcaggcccggccgcggaaaaagtacgtgctttcgttttcgcatccccttttaatttagccgctgccgttttgttaaaacagcattccctgtccttcctttgcatatggataatgcggtgccgttggtttaaaaaaaggaaaaaaaaaaaaaaaaaagcggcc

SEQ ID NO: 71887 - DNA, 120 bp, Zea mays
  Clone ID: MRT4577_165564C.1
aggaattcggacgagggcgacgcccacgggcgtaccaaccaccaggcgcgagtgcctactaatgaatgagcacccgcagaaccaagaccgagacagggctgagggttgcaatcggcgacg

SEQ ID NO: 71888 - DNA, 440 bp, Zea mays
  Clone ID: MRT4577_165565C.1
aacacaatggttcataaaaacccgctggtgagacccactttaaaaaagcgttttgcagacatacccccaggcctttgtcaaccaaattggtccatcatagtcctcccagcaaatcggcgggagccttgggccttttgcagactgggagacccgttctatgggttcatctgatattcaaattggtccggccttctactactacgaaaggcccaattcggttgctctccagtcccccccaccgaaaagcaatgaaacctgggggggagtaaacattatgcggggcacatgcaggcatgcctgtcacattttcactttagcttccccaacgggtgggcacagggatgcaattacaggtcttccattggtagcaacaacaattgctaaccaccggctgtgcaggataatcagcagccctgatggttggaccaacttgtggaaaa

SEQ ID NO: 71889 - DNA, 291 bp, Zea mays
  unsure (1)..(291): unsure at all n locations
  Clone ID: MRT4577_165566C.1
attgaaattttacttaataatgttgtttttaatttaccatggaatgctacccgaattggcatggagttcactgtcattaattattcaccagatctaaaagatgaaggttttgattcaattgatgatgaatattcaccaggaattttcagacaagaagcgtacatgtttgaaaataagcaaaaatcccgttcatttatctcttacaaaccaaatgcttataatgccaataatcgtcatattgcagcaactgtagaaatcanacaatctggttttanattatctacagacact

SEQ ID NO: 71890 - DNA, 646 bp, Zea mays
  Clone ID: MRT4577_165567C.1
cggcgcgccgccaccgtatcctcacattagcggcgagtgcataccactccactctactgacgcccgacgagcagtgtaacattttccttcgccatggctacggagaatactcacatcgacattgagctcattggccatgtggactctggcaagacgaccaccactgggcacctgatctacaaggtcgtcaggcattgactagcgactgcacagagagtgctccagaaagagtgctgtgcgacgacgaacaaatggttcgttgaagcatgcgtgcgacgcttgacaagatcaatgctgaacgacgagagacgtattacaattgatattgacctgaggaacatgtacatcaccaaggactactgcactgtgattgatgacccgctacaccgtgacttcatcagaaatatgatcactagtcacttccctccctgactgcgctgtactcatctatgactcaaccactggtgatctcagaggttagcatctgcaaggatggccagacacacgagcatgttctgcatgctcacacaattggcgcgctgcagatgagttgctgctgcaacaatatgaatgctactacacccaagtatgcagatgcccgatactgaagagattgacaatgaaatctcttcctacctgtagaaag

SEQ ID NO: 71891 - DNA, 344 bp, Zea mays
  unsure (1)..(344): unsure at all n locations
  Clone ID: MRT4577_165568C.1
cccgcttgctcgctcgctcgcttntatagccagccacccagccccgcccgatcgtcatctccatatccccgtatccgtccacgcccgcccgcccgccttgccaccagccagcaccctccttaacccctnncctcttgccccccctttcccncncatcctctgttctcccttctttttttttttttttctttcttctccttttcggtggggggggggggggtcttccccctggttcctgcctccnttcgttcctggcggtggtgggtctttctgtntgggtgcttgcgcgtggtggtgtgggctcttggtttgttttgttggggggtctggctcttcgtccttgt

SEQ ID NO: 71892 - DNA, 851 bp, Zea mays
  Clone ID: MRT4577_165569C.1
caactatcgaaaataggctttgaaatggaaatattatcaatgggatatcaagcttgtggtgcacttgaactatggaactacccaagtttcttcagggacctcataccacaaaatttggatggtaccaatcgatctgacaggatcgaccttgctgccctagaagtatacagagatagggagagaagtgtaccgaggtacaatgagttcaggagaagactatttctgattccaataaaatgctgggaggatctgacaagtgacaaggacgcaattgaagccataagagcaatatatggagacgatgtagagaaattggatcttcttgttggtcttatggcagagaaaaaaatcaaggggtttgccataagcgaaacagcattcaacattttcattttaatggcatcgaggagactggaagcagatcgattttttacaagcaatttcaatgagaaaacatacacaaagaaggggatgcaatgggtcaaaacaactgaaggcctacgggatgtgatcaaccggcactaccctgaaatcagtgccaagtggatgaagtcctctagtgctttctctgtgtgggatgcagactactagtgcaaaaataaagcccccctgccatattttcaatttgtcaagttttatgaagtattatttgtttacagaatgatggtgtttgttcagtgcaaataaatatacttaatataaatatgtcattgtaatatatgtaataggattcattgttgaatgacacaagttgtatgcttatttttttacaatttattgtacctgcccgggcggccgctggaattaaatatggctgggaaaataagtaggatgagaccatatggcatcta

SEQ ID NO: 71893 - DNA, 998 bp, Zea mays
  Clone ID: MRT4577_16556C.1
ccggcccgggctcccgcgaaatggatgggcacgctactgcgccagatttctccccagccggttccttcggccacgcgaccgcgcgctcggaaaactccacggacagcgaaggaggtgaaccaaggacgacgtatctgtcgccggagaaggtaagcatcgatccgccgtgtcctacgattcgtttgtcttgctccaggcggcgagcagcagtgggggtcgtcctcgcggatccgccttcaagcttcgcggatcccacccaaaattaaaatcctctcggaaatcagagacgcgaatccctcgccccaagtcccgaaacctccgagttctctcgccaatttgatccgcctcaccgtcgccgcccgtccgccggtcggccttgactgctccgtcgcacgtggcggttcgcagcgcggaatctaccttgtgctgacagatccggggaaaccctcgttcctggtcgttccggctcgaatcttctgcggactggcaatgtaagcgttctccattggagggcgacgatctacggggcggttgttggcggggttgcgggaatggagcacgtgttcggagggaagtttaagcctgggaagaagatcgggagcggatctttcggcgagctctatctaggcgtcaacatacagagcagcgaacaatatcagattattgcaaaaatgtggtacatctttcttcagctggatgtcatcactcacgaatgggttacccatgctagatggagccactgctgccgttccacttgaacagaagttttcagcaagtacaggagatggatctgcagcaccttcccagccacttcaaaacaaccgcagcgttcctatgcaattttttggcttcaatttgctcttccagtccctgtatactcgtaatgttctgcatgtaattgctttaaaaaagactggcatggtcccgagctatatttttagctgagtaataacaagattttaaaaccttttctcaaaaaaaaaaaaaaaaaagcggcc

SEQ ID NO: 71894 - DNA, 438 bp, Zea mays
  Clone ID: MRT4577_165570C.1
gttgaagtgaggggcgagccagacctggggatacatagaactgccacatcaattgtaaatggaaattcctaacaggccgcacgaccaacccactgcaaaagattgagcctagaccaagattttaaacacacccgcggcgctgcaccgcttataccaaacaggtggaaacaagactcccccgctattggaagaccgggggagaccgtccctacaggaccgacgggggagccggcgcacgcgtgcggggcaacggagctggccccacacccccgggccacccacaacagaagggggggctgctgagagcgaaccccccggcacccccccccataaacgaagagctggcgagcggcccccccaagttaaagggcacccctggggcgcaccccaccagccagttcccagacaaccttgttctggtcggcgcggtggaaaaag

SEQ ID NO: 71895 - DNA, 2137 bp, Zea mays
  Clone ID: MRT4577_165571C.1
tcgcggacgcgtggggttagaatggatcctcgaaacaaagaagttaatctcgatagtttaatgtatggtacaattggtggactaacagaacaagaactaaaaaaacaagaagcagaatacatttaccgttaccgttacaatggtggtggggcaactcaagtttggctaagttctggaagatttgttgtaatagatctttcagcgggcccttgtacatatgggaaaatagaaactgaagaaggcagtgtcagctataggtcaatgccacggctgtcacaaataatcttcccaagaggacttgctgccccaagtgctagttcaacgcaagatattttcattgggcagctcggaggtgcaattgcaactaccattgagcatgtgatagctcctgatataagatttgaaactgttgacatggcagtgaggttgcttgtacctattattgtgctacagaaccacaataggtacaacattcttcaagaaggccataactatagtatagatgttcaagctatagaaagggaggttaaaaagatggtccaccctggtcaggaggtaataataatttctggttcgcatgcgctgcaccagcatgaaaagttagctgttgcagtttccaaagcaacacgtagccattctcttcatgaaacaaagagtgatggccggtttcatgtccgtaccaaaacttacttggatggagcaatacttaaagaggaaatggagcggtctgctgatgtgctgtctgctggtctattagaagttgcaaatccttctctctcaagtagattcttcctaaagcagcattggactgatggagaagatgatgtaaaagactctattaagcacaggcccttgtgggaatcttacatgcccaaaaataataaaggaaggagaggaactggaaagaagaaacatggaagtctgtacagaacttatgggaccagagtgatcccagtttttgtattatcactggccggtgtcgatgctgaacttctcatggaagaggagagtcttgtttggacaagtaaagatgttgttattgtgcttgagcataacaatgaaaagattcctctaagctatgtgtcagaaacgactaggcagtttgctcttccatctatcgcacagcgccacatcttggctggtctggcatcagcagttggcggtctgagtgcaccatatgaaagagcatcacgtattcatgaaagacatgtagtgaactggctgtgggctgcaggctgtcatccgtttggaccattctcgaactcctcacagatcagtcaaattcttcaggatgtagcactgagaactacaatttatgctcaagtcgatgctgctcttcgcaaaataagagacacatcagagtttgtccaatcttttgcatcagagcatcttaagacgccattaggagaacttgtgaaaggtaataaaaacaagtccaccactgagttatgggtagagaaattctataagaaggtaaccaatctaccggagccttttccccatgatcttgttgagaagttagaagaatacctggataaacttgaagggcaactcgtggacttgtcttccttattgtatgaccaccggctggtcgatgcatatcaaaacagtaccgatatcctgcaaagcactatttttacacaacagtatgtggaacgtgttctagctaacgagagagacaagatgaaatgctgtagcattgaatatagtcatccaaagcagtcatcccaggcttttgtctatggagggatccttctggctggatttcttgtgtattcactggttattttcttctcttcacctgttcgctaattttatgtccagatgcagaaagtcttggatgctttatggtaggctaggtttgtctggggctgtcaatcttcatgagggaatggcctgaactgtcttggatacagaagggctttggcacagttttagtgctctatttctcgacacacaagcaatcagacggctgatatatatgtaactgattcttgtctgcgataaactatagtcgatttcacaaaaaaaaaaaaaaaaaaaaaaaaaaaaaaaaaaaaaaaaaaaaaaaaaaaaaaaaaaaaaaaaaaaaaaaaaaaaaaaaaaaaaggaaaaaaaaaaaaaaaaagggccccta

SEQ ID NO: 71896 - DNA, 507 bp, Zea mays
  Clone ID: MRT4577_165572C.1
atgtaccgccgtggtgacgatgaccggctggagagggacaacatatggaacatgatccaggtgcaaaaatcgcagatccaaagacgtgctatgggggaagaaggtgcgacaatcgcagatcaggatggggggcaggggcggtcgcagacctgcgcgaggccgggggaatccattgaatccatgccatttatagaagctttgggtcagttatcctatcgtgttggtgagaaacttcacacttattatgacacatacaaaccttctgctagtcctggcaacttctgcctggtgcatgtcagtctagttccagttttgaatgttgttggtgaacagaaaacaaagccaacccagcatagtgtatgtggtttgaggggactcggactcactccaaatattttagcttgcttcagtactaaggaattagaggatagtgtgaaggagaaactctcccagttttgccatgtgccggtagggaaccattttcattcaaagcttcatatgatgtag

SEQ ID NO: 71897 - DNA, 599 bp, Zea mays
  unsure (1)..(599): unsure at all n locations
  Clone ID: MRT4577_165573C.1
gaactaacgctaaaaaagtacagtttctgtactttattgatttctcgcatttcgtcgtcactccgccaaatggcttcccgtatcgaggacgtgctcaacctggactgcatcctggcccgccgcatggaggagaccgccgccttcactcgcgtgtgcgtgcgcaggctgccggcccggcgcggntgggtgtcgcgggcggcggctgcaacacggtcgcgcgcgaggtcgtgacgcgccctagcatcgcgccgatcctgccgcctacgatcctgcgccgcgccatctgcgtgacgccgctgcatgtcgctcagcccgtggtcacggaggtgcgcgccgccgccccccgccccgctgctgctgcctgcgcggcacctgttgccgcctgcgcgcctgtcgccgctgcgcctgtgcgtgcgcctgtggctgccgccacgaccgccgcggntcgcgcatgctgatcactttgcgatggactcggcgntactttgtccctattgactttttttctttttccttcccacgcacttgccctcccatgctcgtcgcctgtttgaagcgcgactatggcaaaaaaaaaaaaaaaaaaggcccccagggcc

SEQ ID NO: 71898 - DNA, 831 bp, Zea mays
  Clone ID: MRT4577_165574C.1
attaagaaagtgcatctgctgtgctcctggttcatgggggcacaatggcatgatgactatctaggggaatctctgatgctaatgctaatacaaattttcttatctagcttacacggtggataggttaatgcgtgtagaaccatgctagtgatagatatcctttgaacctggagtaaagcattttagatgcttatttacggccataaaagttttctggcatctcatatgtgactgagataagccattttagcttgggtgttggttgcctggaattaagtcactatctgttgatcctttcctttcagaaacatgtttggtttgtgtgttgtcatatttttgccacttcaccgcataagaaaaatgtcagatagtgagaagattgaagaaagacaagaacatctgcagtgttgccaattcaatcttgcgatgcaaaagtatgatgacttggggaatctacagcaatcttgtaatattgttttgaaaaccctatttattttcttgtaacatgtgcctcttgcttcctttctttgttattataatttttttcgcttttggtgcagtttggaagagttatgttttgtgtctgcatgacttgtcatcgcaacaattgactgcatgaaaacagtaatagcaagaaacaggacaaggacatcttcagtgtccccagtatcagggaagtaactgcatgatgactgtcttggggaatctctgattctaatatcagattcaacttattttcttgcaagttgtctcttctcttgtgatcatgtttggctttctgttcttttgaagcttggcttgtccagtgttagctatcatattccaaatatc

SEQ ID NO: 71899 - DNA, 164 bp, Zea mays
  Clone ID: MRT4577_165575C.1
attcggctcgagctcgtgttctctgtcttgtagcacatgggaggcactttcaacagggggaactgaattgcctcgactgcttcatgcataacggagagcactaacctcagcgctcaggcatactggcttccggacccatgttgtaagagctatttctgacatct

SEQ ID NO: 71900 - DNA, 382 bp, Zea mays
  Clone ID: MRT4577_165576C.1
tggctgtaacttgctcacggaccgcccgtcgaccaaggttgcattgccgtgccgggcgtgggatcgccgctcggctacacaatttggcggaggaccttccgggagcaagagatgggatgggcacattctgcgaccagacttttgggagtaccgcctgcttgcgaagctagattgttactaagtccatcgtgacctgccggatgtgaaggtaattaccatgaagacatgcatgttgatgtgtacctgtgcaaactaaaaatgtttatcacaatctctgcaattgggttggggccggtcggaagatcaatgcctgtaagggtgtgggtcatcaactggccttaacctgcatgtggtgcatcataaggagacaacatgtgtgaag

SEQ ID NO: 71901 - DNA, 545 bp, Zea mays
  Clone ID: MRT4577_165577C.1
aaaaaaaaaacaaaaaaaaaaaaaaaaaacaaaaaaaaattgaaaaaaaaaaaaatgagggggacacagaaagaaatataaaaaaaaaagaaaagccccagatggggggtctgtgggaggggggcaagtgcaggccgcctttttgttccgccgatgaccaggggggaaattttgtttgggaaggaagccttctttatttgttgcagaaaaactgacgctcggatgagaacttccctgtgaactcgaaaagaaaaaaaaaagaagagggcacttccccttgcgaataatatgatgattctacgagggcaaaattgctggctggcctgatgataccggtacccagatgcctcgcgtggaagatcaaatcccctaggcccacccgagcaaaggccactgacggaacaaatgctgctcttgggggggctgactgtggaatgctcagacctgagagtgctgctggagcctaccccgcggtaaatgggaagaacatggctcccctcttttttgagggagagtcctcccccgcccaggaggcagttttcaag

SEQ ID NO: 71902 - DNA, 160 bp, Zea mays
  Clone ID: MRT4577_165578C.1
ctctagccaacacacacataatactctccattccattccattccattttaaaaggtagaataatgggccggctcttcacccagcctttcgggggccctcttccgctcggttggtacacccggaccccagggcggcccgttaccattgtgtccgccaagaa

SEQ ID NO: 71903 - DNA, 516 bp, Zea mays
  Clone ID: MRT4577_165579C.1
acttaaacacaacaaccgtttttgaccttaaaaaacccggggggggggggggggatgcccccccctgggccggggggagggcccaactccccaaaaaaaaaaagaggaacgccacacacccccccacacataggggtcggtcaatacaaccaaaaataaacaaccaaaagggatcgacgggccaatctggacaaacacgggtacagggtttattttttttaacgtatttccccccccccctccttttttcctggggggttttttacttaaagttaaagggcaagggtttgcccccccactccttgggggactcaaacatgggggccaaaaacttgccctgggtgatgcccacaaaaaccttgttgcactcctccccgggggacttgagcctttccccgggaaaaaacacccaaccaaactcctttcgcacaaaaggggacaaggggaaccaccgggtttccccaaaccggttccccacggggggggggcccttgggaacccccacccgggggggct

SEQ ID NO: 71904 - DNA, 1049 bp, Zea mays
  unsure (1)..(1049): unsure at all n locations
  Clone ID: MRT4577_16557C.1
ctcctcctctcccctcccgatttcttgggtgtgccgctaaatggatgggcacgctactgcgccggatttctccccagccggttccttcggccacgcgaccgcgcgctcggaaaactccgctgacagcgaaggaggcgaaccaagggcgacgtattcgccgccggagaaggtaagcggcggggcggcgtgtcccgcgattcgtttgtcttccgggcggcgagcagcagtgggggtcgtcctcgcggatctgccttcaagctttcgcggattcgccttcaagcttcgcggatcccacacgaaacctccgagttctgtcgccaattcgatccgcctcgccgccgccgcccgtncgccggtcgggcttgactgctccgtcgcacgtggcggttcgcagcacggaatctaccttttgttgactaatccggggaaacccttgttcctggtcattccggctcgaatcttctgcggactggcaaggtaagcgttctccattggagggcgacgatctacggggcggttgttggcggggttgcgggaatggagcacgtgttcggagggaagtttaagcttgggaagaagatcgggagcggatctttcggcgagctctatctcggttagcgtctcgccgggttcttcactgaatctgtcacacgtctctgcagattcctacgcgccgctgttttggtttgaaaatcttgttattactcatgtaaaaatatagctcgggaccatgccagtgttttttaaagcaattacatgcagaacatcatctattttctgtcatcccataatctacacacaaattcttcacgaaaccgttgctagcaatggttgaccatgatatgtttgcatatggaacaaactcatgccgaatgccaggcatataactccacgacagagaaaaatggtgcacgaacagtatcagattatctaataacaacttgatagccacctcctcgccgctgtgtatgttgacgcctgcagccaaaaacaacgacgcgtaggaatcttctccggcggcgaatacgtcgcccttggttcgctatcgg

SEQ ID NO: 71905 - DNA, 200 bp, Zea mays
  Clone ID: MRT4577_165580C.1
agtcgatgcagcgaagtacgtcggattacgccgtgtcccccgcgcaccccaccaccggggacaacatcctttccaccgccactatcgatttcagcgattgacgttgggagacatacatacgcttgcgtctatccggctgggtgttcttgtattgtatcagcattccccgttctcgtctctctcgtctctctctctctctc

SEQ ID NO: 71906 - DNA, 182 bp, Zea mays
  Clone ID: MRT4577_165581C.1
attcccagaacagacccacgcgtcgcggaaacacacacatattatactagacagccttatccgatctatagtttactcctcccttcaaatccacatgagcgacatttcaaagatcgcctctggccaccactccaaggtcctaccctgaccatagatcacagcggatgcacaaaccatatgct

SEQ ID NO: 71907 - DNA, 113 bp, Zea mays
  Clone ID: MRT4577_165582C.1
accttatcttggcggcttctcattcgcatgcgatctgccgtccagtcgctctggcagcagggggctgccgtccgttcaggcgcaggctatctaccttctgtccagcgcaggct

SEQ ID NO: 71908 - DNA, 709 bp, Zea mays
  Clone ID: MRT4577_165583C.1
gccggccgggtcgggaacttccaccgggccgcagctaaccttacaaggaccttgacccgagaggaagccaatcagcctaagacagaacaatccatccaccatgaacatcctgatctcaagatcatgcaagcttaccccgcgcgccgcgctatccgctagcctggacaggctcttcgaggacgtggataccatcaaggacgagctccgggacctgcagcgcatccagcggtcgctccactacgacaacgaagctggaaagtctatgtgacgacacgccggccgtgcgcggcctccacgcgtgaatgtacacggacctgtccgcattaatcaagacagccaaggagtggaagctgcatctcgagactctgtaccgcgcctacaccgtcaaccgctcacggagacgattgagaacatgtttcctccaccgaacatacctagcacgccgaacaggtcagtgctgtcatgtaactttcaggactccatgagatgccttctctaaacatgcgatgcccgcgaatgtggtccactgacgtttacaagtgtgacagataaaatcttcacggtctcagagactcataccgacgatcatacctggaccaactgcaaagtccgtgacaaatgtagcgtctcctgcaatacgccatcactttcttggccctctatttgtgcaaactgctctccataccgatccagatccagcagaatgtac

SEQ ID NO: 71909 - DNA, 521 bp, Zea mays
  unsure (1)..(521): unsure at all n locations
  Clone ID: MRT4577_165584C.1
ctcagatattaaggggtccctctcggtgggtgttttggtggattaccttcagatttggaaccttatgtctgtgatagtgctgcagcctactattgaaggcaaatatgtttttagtattgccccagacggtatctattcagcaaaagtggcttatgaaggattcttcatgggatctaccttttccagccactattccagggtgaggaggatttgggccccgcctaaatgcagatttttctttggctctttgcgcacaactgttgctggaccagcgatagatttgctagacaagggctggaccaccctccgatatgccctctatgtgatcaagaggaggaaaccttagaccatctcctggtttcctgtgttttctcaaggattttctggtttcagctgctgaggactttcgaccttcataggatcgcccctcaatttggattggcctccttcatgangctggggaaagaagcctcttcttcggtcagtggtctggttagaaagggactgaattctctgatcac

SEQ ID NO: 71910 - DNA, 432 bp, Zea mays
  Clone ID: MRT4577_165585C.1
cgggtcgcctaggcgaggcctaggtgtccaggcgcccggccaggctcatcgtgatgcggcacctcgcctgaagatggctaggcggacgcctgaagggatggtggaggcaagcaatcacagcagccccaaaggaggctcgcaaggggctgaattccttaataatcttggtggcctgggagttatggaagcaccgtaatgcttgtgtttttgagaagcataggcttaggattcaagatgttcttagttatgttagtttggagggagacctgtggtgtttggcaggggcctccaaactcaaggagctagtgtttaggtcgtcgacgttcttggcctaaggcataagtcccctctgcccaactcttgttttcttcgaaagcgcttatgtaatttattgagtggtgccttcgttaagcacctaaggcggtctttcta

SEQ ID NO: 71911 - DNA, 292 bp, Zea mays
  Clone ID: MRT4577_165586C.1
tcggccttagcgtgaacacaaacaaagtaacaaagcttttttttttttaaaaaaaaaaaaataaaaaaaaaattaaaaaaaatttttttttcctaaaaaaaaaaaataaaaaaaaaattttttgttctttggccgttccccccctttgggcggattttgggggttttccctccccctggggggcgttggggcttccttttggggggcccatttccccctttgggggggcgttttacttttccttggccggggtttaacaccttttggtttggaaaacccttggctttccccc

SEQ ID NO: 71912 - DNA, 234 bp, Zea mays
  unsure (1)..(234): unsure at all n locations
  Clone ID: MRT4577_165587C.1
ctcgaggccggccgggctctcgaaaccctagtcctctgttacttctcccgccgccngccaantcccctcccgttctcncgccaccngccannatcccctcccgnntcctcnnncgccaccccntggctgnagnnagcgagaagagaatggccggcaagggtgatgggnccggcaatcgggcattcgatctcggcacngacctactcttgcnngtcggtgtggtggcagcacgac

SEQ ID NO: 71913 - DNA, 360 bp, Zea mays
  Clone ID: MRT4577_165588C.1
tttttctttgaatccctcgcatctcattcgggggcttggttttataacaccagggcgagacctcaccattcttattcattgcgcccaaggcgtataatattccctctgctaataacccatcggaggatgagccccctgtcgctattgccccggctgtgaagaagcccaattcctaaaagctccttccttttgtctattctttctgtaaagaatgactcgacaatatgggctataataaggctaataagtaactgttgaccttcatgatctacatatttaaggtgcttatatatttccactccttcatttccttattttccaaggtcatgtccatcatgaactacttcattaactacatct

SEQ ID NO: 71914 - DNA, 189 bp, Zea mays
  Clone ID: MRT4577_165589C.1
ccataaaacagaaaatattccaacagatcaaacatatctgctgcaggaacaaaatacgtggcaatccatgtgaaccctccccacaagcatggaaggagaccggaaaaggttcgtgtttgtttggcgcactttgtcttcaacagcaacaatggtcggacgcgtgggcggacgcgtgggcggacccgtggg

SEQ ID NO: 71915 - DNA, 562 bp, Zea mays
  unsure (1)..(562): unsure at all n locations
  Clone ID: MRT4577_16558C.1
caggccgnngccgggaaaaaaaaagattccttctctctcccgctaaatggatgggcacgctactgcgccagatttctccccagccggttccttcggccacgcgaccgcgcgctcggaaaactccacggacagcgaaggaggtgaaccaaggacgacgtatctgtcgccggagaaggcgtcaacatacagagcagcgaacaatatcagattattgcaaaaatgtggtacatctttcttcagctggatgtcatcactcacgaatgggttacccatgctagatggagccactgctgccgttccacttgaacagaagttttcagcaagtacaggagatggatctgcagcaccttcccagccacttcaaaacaaccgcagcgttcctatgcaattttttggcttcaatttgctcttccagtccctgtatactcgtaatgttctgcatgtaattgctttaacaaagactggcatggtcccgagctatatttttagctgagtaataacaagattttaaaaccttttcttgggtgtccatgccaaaaaaaaaaaaaaaaaatttgcgggc

SEQ ID NO: 71916 - DNA, 721 bp, Zea mays
  unsure (1)..(721): unsure at all n locations
  Clone ID: MRT4577_165590C.1
agttcactttcttttgtctgcagggtatgcttgtactgacacttgncggcagcaagcattcatgcactggacatctctccccagggccagggccaggacgccctgccttcccttggccttttcctggccgccctaggcctgggtggcgtgtggccatgcgtgcccacgtttggggccgaccagttcgacgacaccgacggagcggagaaggcgcagaaggagcggtactacaactggtactacttcgccgtcaatggcggctccctcgcgagcacgctcctcgtgtacgttcaggacagctggggctggggatgggggttcgggatccctgcgctgttttcggtggttggaatagctgggtttcttgccagcaccaagctttacaggtaccagaaaccgggagggagcgcactcaccagggtttgccaggttgtggttgccgccgtccggaaggcccatgtggatgtgccgagcgacagctctctcctgtatgaagtgccaggcaaggaggcggcggcggtcgtagggagcaggaagctggtgcacactcaagggctaaggtatggtactttgtaagtgtttttgagagcttcctaatttttattttgtctactgaatgggaaaacaaaacaaaatgaccgcaatttagtaagtttctttgatccggctgccacctttttcctccgtcgacgaagcatcgtctgctgctgctgctatgcct

SEQ ID NO: 71917 - DNA, 1314 bp, Zea mays
  Clone ID: MRT4577_165591C.1
ggccacagcccgcagcgcagggggtagcgaggagtgcgagaggaggcgagtgggtccaaacaccagagggaggggagggcaggcgaatgagcgaggaggcggcgcgggcgggagtggaggagtccatcgggcagcggcggcggcgggatgggcgcggggaggcggcggcggcggcgggcgggtgtgggagttcgagcgggatctggtggccggcgcgctgatggggggcgccgtgcacaccgtggtggcgccgatcgagcgcgtcaagctgctgctgcagacccaggacggcaacgccgcgctgctgggcagggcgcgcaagttccggggcttcgccgactgcgtcgcgcgcaccgttcgggacgagggggtgctctcgctctggcgcggcaacggcaccgccgtcatccgttactacccctccgtcgccctcaacttctcgctcaaggatctgtacaggagcatactgaaagatgctggaacctcatcagacaataagttcacttctattgctcttagcaacttctttgctggtgctgctgccggatgtacaaccctggtcctcatctatccgctcgacattgctcacactcgtcttgcagctgatatcgggcgtacagacacccgccagttcagaggcatccgccacttcatccagaccatctacaagaaaaacggcatcagaggcatatacaggggattaccagcatcgctccacgggatggtcgttcaccggggcctgtactttggcggcttcgacactgccaaggatgtcctggtgcctttggagtcccccctgtggcagcgctgggttgcagcccaggcagtgacatccatggcagggctcatctcgtacccactggacaccgtgcgccggaggatgatgatgcagtcagggatggaggtgcagatgtacagcagcacactcgactgctggaggaagatatacaggctggaggggatccggtcattctaccgtggtgcattgtctaacatgtttaggagcactggtgcagctgccatactcgttttgtatgacgaggtcaagaagttcatggacaggggtaggttgtaacagctatagaggggtttctttcacagaattttggattcgatatgggaagtgggattaggccaaaaggtgcaaggagcagcagctcgagcattttgtaactggatgctggtttcctcctgcttactaacctgctcgatgtaaccgagcctgaaggttctgactcgcgaacaatgcagcttgttcatttcacctcatctttacctcttcgaggttacatttatgggttgtttgttgcctgc

SEQ ID NO: 71918 - DNA, 2761 bp, Zea mays
  unsure (1)..(2761): unsure at all n locations
  Clone ID: MRT4577_165592C.1
atggcctcgcgcgcaccgctcatcatgccgcgcgccgcctccagcgccggcccgctcccggctgcggcgacgaccgtggccaggcgccagtccgcgcagtgtctccgcgcgaggggggctgtcggcggcctcttcttcgaccagaggacagcgcggccggtccaccacctcctccctggcgccaagttcggagcgattgggagcaccgcggaggccgcgccgtcggaggggctcgcgcagaagctgcagggggtcgatgtgttcgatctgagcggcaaggcggtgcccatcgttgatctgtggaaggaaaggaaggcagtggttgcgtttgcccggcatttcgggtgcgtgctgtgccgaaagagggcggaccttctcgccgcgaaacaggatgacatgcaagctgctggagttgctcttgttttaattggaccaggtagtgttgaacaggcaaaggcattttgtgagcaaaccaaattcaaaggaggctgccgcccacgcctgggagcaggaacatgcggccgtcgatgccctcgagcaccagcttctcgggccccctcacccgctccgctcgttggtgtccagggcgatgtttcctactccgtgcacgacgtcgataacgatgcccccgacgcgtcgatcatcgttagtctccatgctcaggcggcgggacttcgcaatatttgggctctggtctccgtcgtcctcggccctgactcgaccccgtacactcgttggcgcgatcaggtcctgctgaccctccaccgctacgccctcgacgaccacgtcctcaccgacacagtggtgtcgacgcacgcctggtcctggatggacaacgttgtcctagcctggatccttggctccctcacggtcgagatacaggacgacgtctgcgagcggcgaggcactgctcgccaggcctgggttgctatcgagaccaatcaaaaccaacaaggactattgtccttcccacagaccacgagacttattccaacagactcacttcgtgacctcggctccccgatcacggatgggacgctcgttctcaaactcatgcgcgggctcagccctcgccacgtgcacctgcgggccatcctcacgcggatcaccctgttcccgtctttcgttcgggttcgtgatgatcttctactcgaggaactcacgactgcagtcgccaccaccaccaacgtcgcgatagctctctacagcgccaaaccccggagggcaggccccgtggatccctactcctgcctacggggggtgccccctcgccagagcgcccctccaccaccctctgtcgccccccgcccgactaccatccccggcagtggtcgtcgtcgtcgcaagggcggccgtggtcgcggcggcggctccggtggtcctcctgcgactcgaggctctggctcttggccgtccttctccaacccgtgcactggctccatctccatgtggcctggactgcctgcgggccacgctcggacgccccttagcctaccttctacgctgctccaccctcattggcgcttccggcaaccccgacaccacctcgtctccagccgggtggctgactctggtgcttcctaccacaccacccctgacgttggtactttatccaccactcaccctcctcatccctctctcccttcttccatcgtcatcagcgatgagtcggtcatccccatcacctcagtaggtgatgcggtccttcccggccccttctgcctcagaaatgttcttgttacccccaacatcattcagagtattctttgtgttcgccaatttaccactgataactcttgttctatggagtttgacccctttggcttgtctgtgaaggatcttgctaccaggacccttctcgcgcgctgtgaaagccccgagccactctacacccttcgtctgcctgctgtctcttcctcgacctccactccacatgcgctgaccgctactacctcgtccatcacttggcaccgtcgccttggctatcccgggcgtgatgtgatgttgaagttgtctaggagttatgtcatctcttgtagtcgagcagcaaacaattttgatcttgtccactatgatgtctggacatcccatgtactcagcgtttctggaaacaaatattatctgctcattctggatgactactctcattacttatggacttttcccttgcgtttgaagtctgaagtgtatgctgaccctactcactcatcgtatgacgctcttgaatttgcattcgggttgttctccacctttacgcccgcggctggcctcaagataatacagttgtacagggaaggatacaggcaggactgggaattgtcattcgagaagaacaccaggacaaaaggcggatggtatcaaggggggttaattgttgcaggtccaggtatcgataacatcctgtacatccacaaggacaaagaagccggagatgatcctaacatgcaggatgtgttgagagcttgctgttcctagaaaatcagtgtgccccacgaccactctatatatctcgttgtaaaagtcaggttgtaagcagccctcaatcttcagcgatcctgttcagggtgcatgggctctcctcttttttcccccttatacatacgacgcacggggaaaaccaaccttacgtgtacataacatatgtatggttctgtatagaaatcaatgaagttttgagtaaaaaaaaaaaaaaaaaaaaaaaaaaaaaaaaaaaaaaaaaaaaaaaaaaaaaaaaaaaacncgagggggggaaccggtaccc

SEQ ID NO: 71919 - DNA, 165 bp, Zea mays
  Clone ID: MRT4577_165593C.1
atagccctgcagcccttccatccaccaactcccgttctccatttccagcgcatggccggtgtccatcagagctcacaaggagtacggctaccccccgctgctgctggagagctatgtcttcctcaaggtttggaagggcttccaggcccgcaaggcccgcataaa

SEQ ID NO: 71920 - DNA, 1287 bp, Zea mays
  Clone ID: MRT4577_165594C.1
cacaggcgaccccgacgccggccggggtgggcgtacgcgaccagtgaggtgcggttggccagccagcggcgagccaaaccgagcgtacgccatggatcgcgagtggggctccaagcccggcagcggcggtgccgcctccgcccagaatgaggctattgaccggcgggagcgtctccgccgcctggccctcgagaccatcgacctcgccaaggatccctatttcatgcgcaaccacctcggcagctatgagtgcaagctgtgcctgacgctgcacaacaacgaggggaactacctagcccacacgcaagggaagaggcaccagaccaacctcgccaagcgcgccgcccgagaggccaaggatgcgcccgcgcagccccagcccaacaagcgcaagcttgccccccgcaagtctgttaagattggcagacccgggtataaagtaaccaaacaatatgatcctgagacgaagcaacactcgtttctctttgagattggttaccctgaaattgaagataattgcaagccaaggcaccgcttcatgtcatcatatgaacagaaagtccaaagttgggataagaggtatcaatacctactttttgctgcagacccctatgaaatcattgcattcaagataccaagtacagagattgacaaatcagcgagcaaattcttctcttactgggatcctgacaagaaggaatacctgctgcaattgtacttcaagccaaggccgccagaaggtagtaaaccaccaccagctcctcctggaactttgcctaatgggactggggctcctggtgctccaccaaggccaccggggcaagctcccccaccacccccgccacaaattccaccgccccctcctgcacctatgggaatgccccctaggattcctccaccacctattggggctgttcaacctccgccacctccagcacgagtggcaaatggtctgcggccaatgattccaccgccacctaacttcactcccggagcacccccaccgcgccctccaatgcaaggctttcctgggcaacagcagtagttgactgcttagcaggcaatgttccagtaattggcagtcagtaaaagtttcaagcttgtgttgactattgtttttcggcttaaaactttgtatgttgtctgggactatactcaaacggcagcttgttggatttttttgtatccacatttattcaagtgcttgtttaaaaatagctagtttgcgtgtataaaaaaaaaaaaaaatatgataccgttattttttttggaaaaaaaaaaaaaaaa

SEQ ID NO: 71921 - DNA, 435 bp, Zea mays
  Clone ID: MRT4577_165595C.1
ggaaactaaaaggaagtgcaagggttatccatgcacggggaccaccccggtttaaaaaaaattttcctccctgggcgtttggaaaacccaatcggaccttgggtaccccacccaggggagggctttcccggaaccaacctgggcctttttaaggaaaaactggttttcctggttaacggaaccctccaagaacttgccgggccacgtggagcacccccccgcccggcaagagtagggcaagtcaaaacccgcctttttgggagggtccaagatgtaattttcctttggcaccttgaggacccttttctgccctttgggggcggggggctttaccttttaaaaaggggggacccccaggtttagcctttttttaaagcttgggaaacttgggacccttcttgggaagcccaaaaaaaagggccgttttggtctttt

SEQ ID NO: 71922 - DNA, 355 bp, Zea mays
  Clone ID: MRT4577_165596C.1
caaccagttctctttgatgaatcctgtcttgtatggcagcaattgttgctgctgtaggagaggcggtgaccaatgggttagccactaccaatggattaagtaactgctgtctctgttgtaggtactcagcatagttcgacagagtcagttggttgaatggaagcagctgttgcaagtaggcaatagggtttgccacagcagcaacatttgctgccttacaaccagatctctatgatgtatcctatgttgccgaggcatcatcccatcgttggaggtgccattttttagattacatatgatatgtactacattacggtgccctcctaccgacatgtgtttactagatgtaatcaat

SEQ ID NO: 71923 - DNA, 292 bp, Zea mays
  Clone ID: MRT4577_165597C.1
aagacggtgggaaatatacgcctgcctaccgtggggctccggaggggactgcaattctgctaatttgtgacagatcatacatgattagtctgttatgaggtgtatctgcaaccccaatgaagatggcaccaggacgatgaaaccctgtccaccggattttggttacccatcatagttgctttacgtaagatcaagatgtcgtcaactcacatactaagtgatagattcccttcgatgcacctttcttgctctttcgctctttgtacctgctaagtaaaatggccttctcaag

SEQ ID NO: 71924 - DNA, 293 bp, Zea mays
  unsure (1)..(293): unsure at all n locations
  Clone ID: MRT4577_165598C.1
tcctaagcagtggtaacaacgcagagtacgcggggattgcaccggtgacggtaaggtgaaaacgacacaccaccggtggctagttgttggactgggcttgggttcctctgaagggaatgggccctggctcttttagtcgcattgcgcaagttgtgaagcccgggaaatgttagaatatttcaagtgcgccttctgacttnnnnnnnnnnnnnnnnnnnnnnnnnnnnnnnnnnnnnnnnnnnnnnnnnnnnnnnnnnnnnnnnnnnnnnnnnnnnnnnnnnnnnnnnnnnnnn

SEQ ID NO: 71925 - DNA, 587 bp, Zea mays
  Clone ID: MRT4577_165599C.1
ataaaacatgattgattgataatacaaaatagagaaaaatatatacactctaaattatagaagtaaagttcaaaagttgatgtagtttgaatatattgttgacatgaagaatcaaaacacagccactataaatatttctttgtactttaaaggcttaagagttaagaatatcttaaaatgaacaatttttactttttaacacaagatccgattagttacttgaaagtttccaaaccttcttcaggatctttttcgtaacccggcagagcctgaccttcgttttcctcgctttctcttcctgttggaaaacctagaagccatcacagcattagactttggcttctctcttgaaacccgacgcctctttgggttactctcttccttcgtaatgatttcacgattgcgcggggttcttttccttacaggtcttgatggaccttcctcaattgaagcttgttctgtcttcactagattcttatcgggaatatagatttcccttcccttcgctttgatgctagaatctcagacagtaaaatatctgttgtctcgtcgtcttcaggtgagacgtgatgagatgaaactgaagc

SEQ ID NO: 71926 - DNA, 555 bp, Zea mays
  Clone ID: MRT4577_16559C.1
ttttttttttttttttttttaacagaaggctctcaggtttaacatatgagaatccgtttcattacaaccgaaccaaacttgaagctgcaaccgatggtgatggtagttaaacttcatgtgagcatgaagcaagccgccggccacttagatcgcatgccagcatggtatggtacattgctctgcttcaatccaaagcatttgcaacaaatgcgcatcaaggatccacaagtcctccatccaaagctcccaggtttacacagttgaactcaagtgcagacgtccttttcaaacaagtggggcggtagcattcagctaagtttgcaccgattgtgataaagcatttgccgaatcaaacacagcagagccttttgaacgcccccagctactgcctgctcttcacagttgctgaagcttttctccaatacaacagtaacctgctagaggacaggcagaattggaactctttcttttatcacttcccacctttttggtacatgactgacaaagctttccatgagttacaaaaagacaattcaaatcaaacttcagatcaca

SEQ ID NO: 71927 - DNA, 165 bp, Zea mays
  Clone ID: MRT4577_1655C.1
catgggctccgcgctcgtgagttgcgtgcgccacgatgcatgcgtgtattgtgatgaactgaattggagccgtgcagtaagtcgaataatttggagccaccttacgtgatgtgttgtggctagattttgttcatggacgtgttggatcttgaatcattgtttgat

SEQ ID NO: 71928 - DNA, 752 bp, Zea mays
  unsure (1)..(752): unsure at all n locations
  Clone ID: MRT4577_165600C.1
ttctccattgtttgcgctgtcctgcatcgtatgccacgtgtctttcgaatctttacagcacgatcaggtgatagcggtaatgttatccaagaaaccccaagcaattgggtgaagcggatgaggctcgagcttggcatgatgtacgatgacctgtatactaagtcctgtgtgctcagaacaaggagtggcatcatattgcgatgcatctctcaggtgtctgttctggttgccttggtgctcttcctcacgagcgacaaacggaggtacaatagagccgacattgcaatcacctggtcgctcttcgtaggatgctttttgttggaagtatgtgccatgtttattttgataatgtcaccatggtcctgggcgtggttgaagatgcgaaggtgcagcatgcttgcaaagttgtcctggtttctcctgtgcagtggcattggatggccggagaggaagccatatctaaattcaattgggcagtacaacttcacaggtggttggatgcaggcagcgaccagccaaggtcatatggtcgacgagcaatgaccacagtgatcaaaagcttggtgagtttggttggtgtcaaagaggataaaatgttgttctggatgagcaggttgttagacaccgagcacgtggaggcagataaggatacgatnggagtggtgttgtgaagggaattactgacttcgatgctgagatcaacagagatccccggcattggccaaaacttggcggcatagtgcaagagctac

SEQ ID NO: 71929 - DNA, 179 bp, Zea mays
  Clone ID: MRT4577_165601C.1
gccgccgcacccgttcccagcgcgagggccgccccgagcagccggcgccgcgaagcgcaccagagaacacccgccaacacgggggaagacacgcgggacggcgagccgggcgcaagcacaagacccaccgcaggaaccagcggcgggcggacaaggcaaacaagaagagccagcggggc

SEQ ID NO: 71930 - DNA, 388 bp, Zea mays
  Clone ID: MRT4577_165602C.1
gtggatggggccccaccacgagccgatgggggtcgggtgcccccgcgcgctggtgaatgtggggcgtcgttgcctagccggtggtggtgcggcatcgtcgacatcgttgccttggaccggcagcggtgcttcctccgacgcggcggcgagcaggccacctaaggcttactttggcagcacagccaaggcccttctgatcagtctccaggcgaaggttttgatgagaggtggcatcttgggtgccttccagaccttgtggaggattgatttagcttgaggtgaaatgctcctagatcctgcatctggcagctgaatgatattttgattatacaggtacttgtatatttctttagtagtgcaaactctatttttagctggtttccatctt

SEQ ID NO: 71931 - DNA, 1430 bp, Zea mays
  unsure (1)..(1430): unsure at all n locations
  Clone ID: MRT4577_165603C.1
tggggttttccgaagtcgaagatgtttatatttagatagccatttaaataaactattatatcaattaagaacaatatagagagtcttagaggtgcactaatatcttccctagccaagtttcccgctttttaacgagccgacagccgagacatgccagctagacgtccagcccgtcacaaaaggcccatctcactgaagagatacgctggtcggcttgtgggcgcgtggcttgtgggccgtgggcttcttcgctgttcgtcgtctcgtcaccactcaccattgccgacgcaagctgcgactgaacctccgtggcgacggaggagacggccatggtggcagcgatggagctcgagatcctaggcatgaatttcgggtgcgtcctcgcggctctgtccgacgccaagatccccgacaagggctgcctgctcccgctcatctctaagctgctcggctacgccatcgtcgccgcatccaccaccgtgaagcttccccagatactgaaaattttgaagcatggaagtgttagaggactaagtgtggcatcctttgaacttgaggttgtcggctacacaattgctttggcatattgtattcataaaggacttcccttttcagcttatggggagctagcttttctgttaatccaaggttttttgactcatgtcttggtatatgttcaaagctggtctttttaactgatgctcaattattttggttgcaatcatttactattactcaccaccaatgggaaccaaaacatggatgaaagctttattacctgctttccctatacagtggttatttagatattgtggaatggctccaacggttttggctggaaaaatagatcctgctctttttgaagtcctttatgcttcacaacatgctatcttcttttttgctagagttccacagatatggaagaattttacgaataaagggaccggcgagctaagcttccttacctgtttcatgaactttgctggttccatcgtaagagtttttaccagcatccaggagaagactcccttaagtgtgatcatgggctccgcaatcggcatcgtcatgaatggtacgctcttgggtcagatagtactgtaccagaagcccgctccaaagaaacagaagaaagaagattaagcaacatggagaagctgcagaaagttcttcctggttgtttaggattctgttccaacactcgctccacatctgaacaaatggcaccagtataggaagttgttggcaacttgttacgagaaaagaacatagtcggactattgctatataacaacatttctgtgctgttgtttttagcacttagcagtgtaccatgacttgaatagttcatataactgcctttagatattgactgcaagctgctgctgatgtgttttccttaaaaaaaaaaaaaaaaaggcccctattttnng

SEQ ID NO: 71932 - DNA, 1354 bp, Zea mays
  Clone ID: MRT4577_165604C.1
gcacgaggctaaacaaaactctagcttctcggtcctgacctcaaggctggctggctggacgttgatcagcgaatatgatctcagcactccccgtgctctgctatggggtcacagctagtgcgttgcaatcccaatcgatccaccaaataacatcctctacaagtcctgcaccagctttcttcaaactatcaagggacccctcatccttgacagtttgtagcccacaaatacaggcaataagaatccaatcactgcggggcaaccaaaatttgaaggccattgagatgagtgaagggaatagatggggctcagggatgaagctggatgtcaggggcatgacaattggatgcttcatatcgtgtccactgcatacgaacaacctgctcccgctcatctctaagctgctcggctacgccatcgtcgccgcatccaccaccgtgaagcttccccagatactgaaaattttgaagcatggaagtgttagaggactaagtgtggcatcctttgaacttgaggttgtcggctacacaattgctttggcatattgtattcataaaggacttcccttttcagcttatggggagctagcttttctgttaatccaagcaattattttggttgcaatcatttactattactcaccaccaatgggaaccaaaacatggatgaaagctttattatattgtggaatggctccaacggttttggctggaaaaatagatcctgctctttttgaagtcctttatgcttcacagcatgctatcttcttttttgctagagttccacagatatggaagaattttacgaataaagggaccggcgagctaagcttccttacctgtttcatgaactttgctggttccatcgtaagagtttttaccagcatccaggagaagactcccttaagtgtgatcatgggctccgcaatcggcatcgtcatgaatggtacgctcttgggtcagatagtactgtaccagaagcccgctccaaagaaacagaagaaagaagattaagcaacatggagaagctgcagaaagttcttcctggttgtttaggattctgttccaacactcgctccacatctgaacaaatggcaccagtataggaagttgttggcaacttgttacgagaaaagaacatagtcggactattgctatataacaacatttctgtgctgttgtttttagcacttagcagtgtaccatgacttgaatagttcatataactgcctttagatattgactgcaagctgctgctgatgtgttttcctttctgctgtgccgttccagacgttagtttgaataaaacccccaaaagtttatagatctaagaagaattagtcagggcggcacaa

SEQ ID NO: 71933 - DNA, 602 bp, Zea mays
  Clone ID: MRT4577_165605C.1
ttttttcattgatgtccgttttaagtatttgtggtgtaaagtagggatgagtgctactccctctgttccagtttataagttgctctagcttgctcctaaacttatctaaattggaccaagtttatagaaaaatacatcaacatctggaacgtcaatgcagtttcattaaattctgcacgaaatatgtcttgatagtgcatttacttgaacctgtagatgttagaaatatttttttagaaaacttggtcaaaactagagaagtttgacttaggacgaagataaaatgacctataatttggagcaaagggttcagttccaaggtagtcataagctattgtactataatgctgaacagagatgtctgcttgaacttatgttgagaatcagaaatgtttgagtgcagatgagccacaatctctattttgtgctgtgctgtgactgagctgtcaattatgctgaaacaaagttttgtttagtaattcgtcttttggttgatatattgtattgctaccataaacttgttaaaatatttcgcctgccattaagaaatgggttgtgttcatgaatcttttggttactttgtgagggcatgggcgtctccc

SEQ ID NO: 71934 - DNA, 421 bp, Zea mays
  Clone ID: MRT4577_165606C.1
ttcattccttcgcgggggttttgcgaggctgggatatggcaagacatacattctaaacctatgctatgttgaacaaggccttttagtgctcacagctaagggatatagtatcctcaaaaccggagaagctagatgcactagacgacgacatgggagagaactggttcttatggcagatgtcaatactgtgcttcggccgactcatactgaaacgcagaccgtatcctattcatggacgaggcatcggaatttgtccattctcaatcatacgctgctatgcaaaagatcatggcggaggagttcactgaacgtaccgaaatcagcgttctacattggatcccgactggcatgtacagggacctacttctgctgttggacccaagtctagtggcagaatgcgatgtacccttcaagttgatgc

SEQ ID NO: 71935 - DNA, 451 bp, Zea mays
  Clone ID: MRT4577_165607C.1
ttttggtttcccacgcgtccgcggacgcgtggggatattccggatctggacgacgaggtctactcggatgcgttcaactataagcatttgggcaacttggggtacattggtaactcatcggcgctcgactataatgggtactcgcatgcccgtggtttcctggcaatgtacgcgtggcgatcgacctattggtctgagcatacctgtatgcgaaccaaggtgttgttaatgattgactggatcaagcggggtatctttgggcgcgacttgtcaaagttctaaatttgagcgaacaacgggtcacgcacatgggagtttttgtgcatgaacatgcaagatggatacgcttcaatacatgggaaaccaaggatgagggtccctataatggaagcctgcaggatgaacaacgatatcatactatctgcactgataatgccagaggacgagaggc

SEQ ID NO: 71936 - DNA, 295 bp, Zea mays
  unsure (1)..(295): unsure at all n locations
  Clone ID: MRT4577_165608C.1
tttacaagattttcagggtttttaaatacacacaaaaatccctcaaatctttagaaacacgaggcgaacatctgctttcatcagactccaccttaaactacccaagagagctgtaatgtttagtttgttctaacacaaccatactcaggaaaanangcaaagaccggaaactccataggaaaatttctcttgacaaatctataatcaaaggcatnncaaaatataaaaagcatcagctcgattctattgtgccagatttaacacatgtaagaaaacacaaattaaaatatgcttt

SEQ ID NO: 71937 - DNA, 2362 bp, Zea mays
  Clone ID: MRT4577_165609C.1
actcgagcacatggtaaatgttgctatgatcgtatttactctacgcatacggtttgcaacgcatgttaaacgttgatagtatcattgtaattcaacggatgtaggttgcaacgcataacaaacgttgtaacctaatcacttccaacgcatataactatacgttgctaggtatacgttgctacaggggcatttgttttgtagtgaatattgaacctggcagcagattgccctcctcacgcggcctgagacgtggtctcccattctggttatggtgggtacaagtgcggtcactgcacgacggcagtcggggttagtgaggcattgtacgccaaggcggtgagccctgatctgctgatggggaatcgatgggaatggttgatatgtgtggggacagagtgcctcgccacgtcgtgtgtttaggtttaccttgcaaggtttaaaaactcgatttgaatcgtctgcttctcgcagctaatgagactgcttgatccatgctgctacattgagtaacaagtggaaatgtgatgacttagcaaaagttgttgattgctaaatgtttgataccatgtatgattagataggtatacatttagtcataagagagtcacactaaaacttgacaaagctaaaacttgatttatagactcagctagtgcttttggcaaaccaaccccctcagccaaacagctgcatgtctagaggtagaggagtagactcctcacaccgggtaagtctagctgagtattagtatactcagccttgcttgtggcacaatttttgcaggtactccttaggatgatttgttgctggtgtgacttggcctccatccctgccaccgggatagatggtcgagtgggttactgcttccgcaggagaggaccaggaggagtagcgtggccaggcttcgccatgttgctcggttcttctccgttagtgatgtccatggccagtactctgatctcctgaggctatttgattatggtggctatccgcctcaggccaactaccttttcttgggtgattatatggatcgtggaaagcaaagcctagaaacaatgtcttcttttggcttacaaggtcaagtacccggagaacttctttcttctaaggggcaaccatgaatgcgcatcagtaaatcgcatctatggtttttatgatgagtgcaaacgcagattcagtgtaaagctgtggaaaacattcacagactgttttaactgcttgctagtgtcagcattgatagatgaaaagattctctgtatgcatggtggtctatctctggagttgaacaagcttgagcaaatactcaacctgaatcgccccacagacatgcctgatactggattgctctgtgatcttctttggtctcatccttccaatgaagcaacgggccgggccatcaatgatcgaggtgtttcattcacatttggtcctgataaagtttcagaatttcttgagaagcatgatttggaccttatctgccgagcacatcaggggaccaagttatggttatcgaggcagagtgatgcttgcttttgaagataatggatcctcaaaaatttgagtccgatttgacaagcagatccctgatggtaatgatcttggtggtttgtgcgaggaagatcatggcttcttctgctctgctgaatcacttcgcccagacttttctgctggtgaagaagttgagaggctagctatgaccgagctaatagaggtcatttcagaagagaacaaatctggacctctgattgtgttacttaaggatgtagagaaatcattcattggagttaccgagtcactttcatctttgcggagcaaatttaatcgcttccatctggtgttcttattataggatcccacactcagatctaaataattaaatttacaggatgaagctctacttacagattggaagcagcagttggatcgtggtgttgaaacccttaaagccaaatcaaacattggtagcattcgcacggactgagattgatggatattgtgaaggtgaactaatcaaggtacctttgagagaggtaggaacaacaatggtcgttgttgctgcacaaacaaaggctattgctggattccggctctcatcaagtgactcctccccctcacgttgactttgcggacagatgtctcaattccagtggtggagctacgaacaacaatccgatgtcctgatcgagagcgatggagctaatgtttgaacttgtatgtttgaacttgtgtgtttgaacttgtgaactatggatgtgaacctgtgtgaatttgtgaacttatgtatttggacttatgtgaatttgcgaacttatatatttggacttatgtgaatttgtgatatgaacatatatcaatgtgtttg

SEQ ID NO: 71938 - DNA, 806 bp, Zea mays
  unsure (1)..(806): unsure at all n locations
  Clone ID: MRT4577_16560C.1
atctctggtatccgttgtccagcactccagcccccgtccgtttcccacgaattccgcgtcccacccggccacactttctctacgagcgccccccatctcacccacccaaaattaaaatcctcccggaaatcagagacgcgaatccctcgccccaggccccgaaacctccgagttctctcgccaattcgatccgcctcaccgccgccgcccgtccgccggtcggccttgactgctccgtcgcacgtggcggtccgcagcgcggaatctaccttgtgttgagagatccggggaaacccttgttcccggtcgttccggctcgaatcttctgcggactggcaatgtaagcgttctccatcggagggcgacgatntacggggcggttgttggcggggtcgcgggaatggagcacgtggttcggagggaagtttaagcttgggaagaagatcgggagcggatctttcggcgagctctatctcggcgtcagcatacagaagcggcgaggaggtggctatcaagttggaatctgtaaaatcaaggcatcctcagcttcattatgagtcgaaactatacatgcttctccaagggggaactggaattcctcatttgaaatggttgggngtgggatgggggagtacaatgtcatggtcattgatcttcttggtcaagtctggaagacgtattcaaccagtgcaacagaaagttttcccttaaaacagtacttatgctagctgatcagatgataactanggtagagtaatgccacacgagggggttccttcatcgtgatatcaagccagacaatttcc

SEQ ID NO: 71939 - DNA, 288 bp, Zea mays
  Clone ID: MRT4577_165610C.1
ggcatcagaacgctcttggacatctatcagcataattcaaacaatcatattctacatattaaaagtcgtacctatcatactgccctgccaactcttttagtaacagcagcttcgaatgtgcatggatcaagccaaaagggtgcttcaatcatctgcggtattaacatcctaatcctgccagaactacacctagaactgtgtgaaccgtatatactccctcaacacacactagatggcagcggcgctcccatgctatgctagtatcaggaaggcttccattgccttttc

SEQ ID NO: 71940 - DNA, 146 bp, Zea mays
  Clone ID: MRT4577_165611C.1
agtcgatcgagcgtcgtaatcggaatcggctcagtgattctcggcgagaagaaggtcagataggtcggcatgcttgactgcgtgaccatcctccgctccgagaaagtcaaggactagcttattctccatggcaacgacgtcgagtt

SEQ ID NO: 71941 - DNA, 374 bp, Zea mays
  Clone ID: MRT4577_165612C.1
gggggccaaaaactgatagggtgtcttgtcgttaaaaactggataaaccagtgccaaccgttttattttcacatagggagatttttacgggttgacaatttttttttatttttactgacagcgttttttacataaaaactggatgtttttttgcctgtcctttggggcaacacactgccataaagctttgtaggaataaattttttttgcgttttttcctttcgcacaaaggttccgtgcgtactcctgaatttcaaaaaatagctgcttacaaatcttgtctgtatcaaatttgatgctttttgaggcatttgtactagctcctactcgtttttgggcaccttggcccagtctttgcaatgaaaactcggttt

SEQ ID NO: 71942 - DNA, 726 bp, Zea mays
  Clone ID: MRT4577_165613C.1
ccggccgggaaagcagagcccctaccacctcggaacacttccctcgacaccctattcctcgccgcaatcatgtctttttcttcgctcgtctcagacattgcataccgtaactcggagcgacccgaccgaccggatctgcgctcgcaggtgtcagaagcacgctcaacacgatcctacgctagcactgctgccacgagcgtaagcatatctggcgacatcaagagccagttgcatggaggatatagtcaccctctgtcgcgagcatggcagtcagagcgccagctgaccaagtcgatgctcatctttcccctctttatttccgatcagcctgacgaagagacgctcatcccctcgcttcccaacatccaccgccgaggcctgaacaaggtcgtgccataccttacgcctcttgtcgcaaagggcctcaagtcggtcattctgtttggcgtgccgctcgcgcccgctgcaaaggacgccctcggcaccaatgcggatgaccccaagggccctgtaatcaaggccatccgcctgcttcgacgagcattccccgatttgtttattgttgccgatgtctgcctgtgcgaatacacctcacacggtcactgcggtatcctgcgtgatgacggcagtctaaacaacgccttgtccgtggaacgcatcgccgatgtcgctctctcatacgcgcaggccggtgcgcactgcgttgcgccttagacatgaacgacg

SEQ ID NO: 71943 - DNA, 755 bp, Zea mays
  Clone ID: MRT4577_165614C.1
tcgaggccggccgggatgtatttttgcacattgactgtgctcgctgtttgtactcgcgtgattcacgaaccttcttggcatggaggctatggcggctccgactcttggctgtggtggttattccttgagagctcgtagccgtgtcctaagtgctcgcaggtactaggtgcaacgtacgaggccgacatcatcctactgcttggccgcctcattgctccggcacggcaccgaggacgatatcgcatacatttacgcggcgaagcgacacatctgctggcggctgacccactcatgagctgcctagcacgaaaacctactccgcaattccgatcgggacggctgcatacaccgcgattacgatcaactcctgggagtcttacaactggactaccaacgccaccccgaacattgagagcaggtgcccccgtgcctgcagtaatcaccatggggggaccacgactgcccagtcatatcgtatgaccactgagtctgcgacatataccccgtatcctacatcaacggcaactaccatctctcgcgcagattgatcgaagtcaataaaaaaccctgctatacaggagtgcatagccatgccagatatatacacccttcatatacttgccaactcgctagtctaatatatatactcttgctgacactgtatatccctcatgacgatacctatacttgatttatacgtaagaaccagatatacccgtgcccgagaatacagctctccagatgttgttaagtta

SEQ ID NO: 71944 - DNA, 141 bp, Zea mays
  Clone ID: MRT4577_165615C.1
aatacatgttcagtgtcccaaacctaacacaagaaaggaacacccagggtcgctcagtaagcacgaaaactgcggaatacgttaaatatattacccttcacaaagccccccctttccgaaaaaggggtacccactgcctgc

SEQ ID NO: 71945 - DNA, 568 bp, Zea mays
  Clone ID: MRT4577_165616C.1
gggtacctcgaggccggccgggtacgcttatccaggagtcaatgcttatctgaatgcctaagaatgataacgtcggagcctaggtctctggactgcgttaacatcaccctggacgctgaggatcgaactgcacgatgatgttggactgaatcgaccaggtattagttgccttcaagtggatcactggttgcacgctgtaaaagagatgagtttactctagcgaccattgcgaaactacaccgaagactgcgaaccccactggtctgagtgatgggtaatcggtacaacatgcgccccctactggtctcatgtagaaactcgtggggcgctgaatgtcgtgatgacggttacttcaagatggaaatgaggaaaaaaatgtgccactgttgctacgattgcttcctaaacaattgtcgcatgatgtccttactaaacggtacatggactgatcgtgatcaataatgcatggataaccttcacctgacgatggatgataatgaacgacaactctgtgtgtggatagaaaatcctgaaaagaaagagcttaccgaagccctacttgtacgtc

SEQ ID NO: 71946 - DNA, 196 bp, Zea mays
  Clone ID: MRT4577_165617C.1
acgaggacatcgactaaaggaacatcaatttaaacagcatgaataaaaacattggggaaggtctgatcctaacagatctatcatctatgcaccgctatagctaacatgctctatttatactctcattctactataattttacttgcactaacacatatactaacatcacttattgatctagagtattcaaacttac

SEQ ID NO: 71947 - DNA, 143 bp, Zea mays
  unsure (1)..(143): unsure at all n locations
  Clone ID: MRT4577_165618C.1
tttcgtgggtngcatgctgtntgctnccacttgccctnctttccctagctgcttgntttgctacttgtccgncctcttgtgtcgttggttctgccctgtccnngggntccccggtcggctggtcctcggtcccntcgctcttg

SEQ ID NO: 71948 - DNA, 403 bp, Zea mays
  Clone ID: MRT4577_165619C.1
aaatacccggtccgcccacacccttccgaaaccattaaaaatccttgttttaattttttataaaaaaaaaaaaaaaaaaaaaaaaaggaaggaaaaattaaaaaaataggaagggaaaaaaaaaaaaaaaaaaaaaaaaaaaaaaaaaaagggccgccccttttaaagattccaattttccttccccttccttccaacatattatttttttttttgggccccttaatttaattcccttgccccccttttaccaccttcttactttgaaaaccctttcctttcccaaattaattccctttgaaaaaaatccccttttccccatttgccttaataccaaaaagcccccacccattcccctttccaaacatttccccaccctaattgccaattggacccccccttt

SEQ ID NO: 71949 - DNA, 792 bp, Zea mays
  Clone ID: MRT4577_16561C.1
gggaactttaatctttttcttgacggttttaaatattataattttagattacaaatacttgtcattttaagttaatttcgtattagaaataaaatgaaataagaccaaataaacaatgtgttataataagagaagactagtgaaggcatttttttatctgaaaagtacgatgtggcccttgcacttgttctcggcgtcggacccacgtcgtcgcgccgggcgcgtggcctttgtccatctggcagcgggcacgggcgtaatttccccgtcccctcccccgggcaggctccgctgcctcggaaggcgcgcgcaggaatccgatgcgaccaggcaggcaggcacgcacagcatgcgcgctgcttgtcggcttctcttcttccattccgtggcgctgcccactacaaagtacaaactcctccatcaggtgtgcactgtgcaggcagcggtcgcacgcaccgagatagatgaggtcctgggtgtctcgaggtgaggtcgccccgcccagcaccaccaccgaacgccatcggtttgggacaaattttgctcggtttcaaaaactagaatccgatggtactgctacactcagtctcatactactacttgtacagagtacacgcgatcgtttgacaccgaagcagcgttgccgtctgctgctggtgctgcttcttttctgtgtgcaggagcaagcttacacgcgagccctttttcgtccgttgcaggcttgcagcgttgctcctccccttgcagcccggctggccgtgccctcctcgacgcgacccatctgctagcact

SEQ ID NO: 71950 - DNA, 330 bp, Zea mays
  Clone ID: MRT4577_165620C.1
aaaagcaggcgggcaaaaccaaattgttttaaacccgctagggttccataccaaatatggccgagcaagcttattcacatttttactcgcggctaaaccgaatccgtctctctaggcttaggaagcagtcctggggaaaaaaaatggggctccttccgggacatatataagctactccttggttataacagaatgtggcacgtactcttctcattccctacactaacccaatataggggggcataaacaccattcttgatgaccaatagggtagggaaagacactactttactgtatgaacagtggcacaggattcaacggtaccacgga

SEQ ID NO: 71951 - DNA, 265 bp, Zea mays
  Clone ID: MRT4577_165621C.1
attctccctgtctcctggtggacgacgcgctccaccgctgttcggcatggggttcctcgacgggctctaccgtgtagtgatgcgccgcttcgccgtctacgctacgttcgtcgtcgccgacgctttcgcgggcgatggggcggtggactacggcgttcacaagatctgggtgatgcacaacctcgggtctaggtacgaagagatatcgattctggggctgaggcctgctgtggaaggagaaatgatgatctactagttgatgcgg

SEQ ID NO: 71952 - DNA, 412 bp, Zea mays
  Clone ID: MRT4577_165622C.1
aaacaagggggggcagcacatatttcgggggggttaatggccccccctttttggggggtggaggggtttagatccacccggggggggtcgggcttccagctccaaaatacttttgctaacaggtcgggggggtgaaacaaaacaacggaaatttaacggtcccggacataattttacaaattttcccatgaccggggcatttatgaaaaactggggccccccaacaaaaaaaaatgggccccgcctcccgataaatcccggaaaagggccccgaggccaatctgttaaattaattaaaaggggcccttgccaaaatatgggaaccctgaccaacgatcaggggttcagggggaagcatttttgctatagaactggcccaagggctttgctggaatacggggggaaaaattcc

SEQ ID NO: 71953 - DNA, 745 bp, Zea mays
  Clone ID: MRT4577_165623C.1
aaatactcagcaaggacattcacaacatggtttacagactcctctttggatttctccttcctcttgtcttacaaccctccttagtgttatgcaatccaccagagctgaagattggcttttaccaatacacatgcccgtatgcagaggtcattgttcgcgatgagattgccaggatcatctcccacgtcccaagcctcgctggtcctctgcttcgcatgcacttccacgactgttttgtgaacggttgcgatggctctattctgcttgatagcataccaggattaccatccgaaaaggaatcggaaccgaacctcagcctgcgaggcttcggcacaatcgactttgtcaaggctaaactggagcaagcctgccctggagtggtctcatgcgctgatatcctagctctcgtggcaagggatgttgtactactgacccatgggccttactggaatgttccaactgggcgtcgagatgggttgagatcggtgaaggatgaagctttgaacaacctacctccacctttttttgatgccactcgtaatctgaaccagttcttcgtcccgaagggtcttgatgcgaaggatcaggtggttctgctaggggggcacacccttgggacctcccactgctcgtccttctcggaccggctgtacaacttcagcggcacacagatgccggacccggcgctggacaggcggtacgcgctgcggctgaagagcaagtgcaggcccggcgacgcgacgac

SEQ ID NO: 71954 - DNA, 356 bp, Zea mays
  Clone ID: MRT4577_165624C.1
cccatttttattgacgatacgaagaagcctgaggtggccttgatggctccaaaaatcgatgacgttcttccgctaagctttaaaaaaaaatctgttgaggctgcaccaccgctccagggataacatgatgaaaccaggggtcataaggaaccctccattgtctttgtgctttaaccaccatgctaataaaagaccaggcgaggccattgagtatcctcaaggggagagctcccactacaagaagaataacccgtatcaggagggcactgccacagagaacaagcccgacaccaagtcaaagaacatggacggtggagacagcacggaagctgagactaaggccatgggctcaccat

SEQ ID NO: 71955 - DNA, 814 bp, Zea mays
  Clone ID: MRT4577_165625C.1
caagggggttaaaatagtgatctcgaatcggaccagaacttcaagtatcggatcgtagaggggtatgaccttaaagccatagattctactaaacagaatcatgtaatgagagaacatatttttattagtcaattatgtagtgagactccacctcagaaaatagccttcaatatccatgttcatggcaaattatatttgtcaaaaggtgcaatacttaaaccaagttatcgatctcaatatctcacaaattatttggcaacaaccaatacagaactaaactaagaattgcacagtgattgggaaataaatgtgtcatgtaaggcaatgtgcaccattctcttgttcatgtggaagcttcagccttgtggcatgtggatgtatacttggcctgtgtgtgagagggcaccaatgcccttctattcgtctcttttcccctttgccggtttcccttctctcggaagcattgtagctctatataactggaatcagctctcattgaagactcaacaatcagagcacgaaacacgagggcagcaaccttggggcatctttgtgcatatcggggttgtgaatctcaagagtaggctgtggtttgcaggcattgtaaatttcgactgaggaatacgggaacattgcaactttggagcccaacccaaaaaaagcgcagacaatccgtattgagtgaatgcccgcatattggcagccttctagcggttgagtggcttgaaaaactaagttcaaggaacttcccaaatgaaaggcagcgtgcttcagctgacattatcacccttcgtgatgatctggggaccccact

SEQ ID NO: 71956 - DNA, 318 bp, Zea mays
  Clone ID: MRT4577_165626C.1
gggtcttcataccattagctttatctactccagagcgcacaagaacccgatcgacaccatgagggtgttgctcgttgccgtcgctctcctggctctcgctgcgagcgccaccttcacgcatacaagcaggggctgcggctgccatccacctccggcagttcatctaccggcgtcagtgcatctaccacctgctgttcacctgccacctgcggtgcatctggcacctacggtccacctgccgtcgccggtccatctgccaccgtcggtccatgtgccgtcgccggttcatatgccgtcgacaccatgccactaccctac

SEQ ID NO: 71957 - DNA, 732 bp, Zea mays
  unsure (1)..(732): unsure at all n locations
  Clone ID: MRT4577_165627C.1
gtgcatcatcttgcaatagctatcacgatccattctcttgttcatgtggaagcttcagccttgtggcatgtggatgtatacttggcctgtgtgtgagagggcacaaatgcccttctattcgtctcttttcccctttgccggtttcccttctctcggaagcattgtagcaaggaatgctcaaagccttatctgagctacagtctgaaattttagtgaacaaggtgaatgattgcttgctcatgaagccaccattgagagaatcacaatatcgtttcatctattgtatgaactcttgattgtacaaggatcttcctttaataagcttgttcacctctatatgttgcaccaaattaacaaaagaaataatcaaaagcttgttcacctctatataactggaatcagctctcattgaagactcaacaatcagagcacgaaacacgagggcagcaaccttggggcatctttgtgcatatcgggattgtgaatctcaagagtaggctgtggtttgcaggcattgtaaatttcgactgaggaatactggaacattgcaactttggagcccaacccaaaaaaagcgcagacaatccgtattgagtgaatgcccgcatattggcagccttctagcggttgagtggcttgaaaaactaagttcaaggaacttcccaaatgaaaggtagtgtgcttcagctgacattatcacccttcgtgatgtnctggggaccccactttcac

SEQ ID NO: 71958 - DNA, 467 bp, Zea mays
  unsure (1)..(467): unsure at all n locations
  Clone ID: MRT4577_165628C.1
ggggaaaaaaaaaaaaagggtttttttaaagggggggggggggggaaaaaaaaatttttggggggaaatcccgggtttaaattttctcaaggtttaaaaaaaaagattggggaaattttttttgccaaacccaaaaccaacccaaaggggcccctttttttttaaaaggtaattgnaagccggggaaccggaaaaaaaaaaaggatgggttgaaaaaaaattagttttccccaatttttttaaaaaggggaatttattggcaaacccaggggattttttaaactttggggaaaaaccctggtatttggggaaataaaaaaaaataaaattgggcgaaaaatatttaaaaaactcttaaaaaaaagctgtctttattttggaaaattcgcccaatttattttcctcaaaggcccaaggggtggctttaaacgcgcttttctttaaaaagggctttaaaaaggtttttt

SEQ ID NO: 71959 - DNA, 271 bp, Zea mays
  Clone ID: MRT4577_165629C.1
acgtaagctcggaattcggctctagattgtcccaaaaactgcctcctcctcggggacaagcctcaccagcaagggtcctttttatacggcctagcggaacagcacattaggtgcgaagaggaagccaccgaagagaacgttcaacagcaaggctagggcgaacaggggtgacatgaagggtagtgctgcaaagggtaaaaggatgtgctcgtgaccgcagaattgctgcttgaaccctctggccaaggattcatacacactatggatgtgg

SEQ ID NO: 71960 - DNA, 2248 bp, Zea mays
  Clone ID: MRT4577_16562C.1
cggacgcgtgggcacctacccgttgggctgccctgccccgtccgtctcggacggtttccgcgtcccacccatcccttccacactttctcacccccgcccttctcaccccccgaaaaaattcccccggaaatcagagacgcgaatccctccctcgccccacgtccgaggtcgctcgccaattcgatccgcctcatcgtcgcccgcccgcccgtccgccggtcgaccttgactgctccgtcgcacgtggcgtttcgcagcgcggaatctaccctgggttgggttgggagatccggggaaacccttgttcccgggcgctccgggctcgaatctcgctgcagacgggcaatgtgagcgctctccatcggagagggacgatctgcggggcggttgttggccgggtgaatcgtgcggtgcggggttgcgggaatggagcacgtgatcggagggaagtttaagcttgggaagaagatcgggagcggatctttcggggagctctatctcggtgtgaacgtacagagcggcgaggaggtggctatcaagttggaatctgtaaaatcaaggcatcctcagcttcattatgagtcaaaactatacatgcttctccaagggggaactggaattcctcatttgaaatggtttggagtggatggggagtacaatgtcatggtcattgatcttcttggtccaagcctcgaagacttgttcaactactgcaacagaaagttttctcttaaaacagtacttatgctagctgatcagatgatatctagggtagagtacatgcacacgagggggtttcttcatcgtgatatcaagccagacaacttcctcatgggcttaggtcgtaaagcaaatcaggtttatatcattgactatggccttgcgaagaagtatcgggacctccaaactcataaacacattccatacagggagaacaaaaacctcacaggaactgcacgatatgctagtgtaaacacccatcttggagtagtaatagaggtgtacccagtgctagctcccacacaagaacaaagcagaagagatgacttagagtctcttggttatgtgctgatgtacttcttaagaggaagccttccttggcaaggcctgaaagctggaacaaaaaaacaaaagtatgacaaaattagtgagaagaaaatgctaacctcaattgaggccctttgtaaatcttatccatcagaattcattacgtacttccattattgtcgctctttgcgttttgaagataagccagactatagctatttgaagaaaaatttccgggatttattcatccgtgaaggttaccagcttgattatgtatttgattggactgtgtcaaggcaagctgtggacaataacagattgcgactgagcgggaagacaagtggcttggtgggaccatctgtggatagggctgaacgagctgcagcaagacaagatgttccagatagattcactggtcaagctggtgcttttgctagaagaaccggctctggttctggtcaatacggagaacacacaaagcacaggactctgttggattcacttatggcatccaagatggctgttgattcagataaaagaaagcattcatcatctcggaatggaagcacatcaaggaaggctcttctgtcaagcagccgaggttctggagatcccagcgacccaaatcgcagtagccacctagtcccgaccaccagcagcagcagccgtccatcaaccaatcaaaggcttcaccagtcaactggacttgagggcaggacctcgtcattcccaaaacctggaagaatcggccaggatgatcccactatgaggagttttgaacgccttactatcagcgcagagaggaggagatgaatctttggaggtgcaaaaggtctgaccattgacgagtatactgatttcattgaatattcattcggttccagatgatgcttactgatgagcaagtcaaaagattatgtactgtgcatgatgctgagctcttcacattgcgatgctcgtcgaatcttggcacagatttgagttctgtacattcgttttccaaacggttagcgaagcatttagcaccccgttagggacgtgcaaaatgatgatgattaacacttatataatgacaatgaaataaaaatagctcgctaggctagctttacctttgatgtagaatttcatttgtgcaatggagtattagacataaggtcatgtttgatccattagttattaatagttagtggatttatacaat

SEQ ID NO: 71961 - DNA, 380 bp, Zea mays
  Clone ID: MRT4577_165630C.1
aaatccgttacttcccatatacatagagagaatacacagagataagcatgggagtgagtgagcaacatatgataccgaaggaaggttcatgccagtgaacctggagaacatgttcaccaagtatgcactcacaaagcccgacaatttatcactcaaggagttgtggcagatgactgagggaaatcgggccgctttcgactatcttggatggatggcatccaagttggaatggttgctgttgtattatgtagccaaggacaagcagggttttctgtccaaagaagctgttagagggtgttttgatgggagcttgttcaagaacatttccaaaatgtacaaggactcagatagaaagagtaaataaaaaacactacccatca

SEQ ID NO: 71962 - DNA, 448 bp, Zea mays
  Clone ID: MRT4577_165631C.1
ggcggggaattttttaaggcttgataatttctcccagcaaaaatacagttggcataattccttggggggcattttacatgggccagaattatttaaatggtgagccccaaaaatttctcggtagagacaggtcaaaggccacgggccattggatttccgtttccttgggttcccgcctggtatttattttccccattggggtgcaaaaaaaaaaactggggggagcatcatccattttaaaaggggggcccatttgatcgtaaactctaattccagatcaacccactttttgatggctttggccaaatcctccgtttgcccaatggatgaaatgcggggttaagctttaaatgcttaaaacgaacctttctcgaattttcttacccctaaagaatgggttcttgcctcccttggggacaaccttgcctcttgcgaagctttcagattt

SEQ ID NO: 71963 - DNA, 773 bp, Zea mays
  unsure (1)..(773): unsure at all n locations
  Clone ID: MRT4577_165632C.1
gggaccctcgaggccggccgggccgggttctcaacttgtagctaaaaaaaacagaaagcgcacgtctttgccatagcatccgattgagcttcgaacggacctaggatgtaaccgtcgtgccctaccttttggccgctccagctgggcatcatctgtccgtcatctataaatagccttaccttctctctcctctaatccctagacgcgcaccgcaattaccatacccaaacaagccgagaggatcttcacctgcgagctcgcgtgtgggggatttgctgggagtctggcagcgtgtggcggctgcgacggcccccgtatcgtggctggcgttcttcgcgacgtcaggcctgggcgcggcaggagcttctggtgcgcgcgggcaggaccaagaggcgggactcgtgattttctgtaccgcgcagaggcgatttcggtcggggccggtgcatcgccattgaaccgcgagactaccgtcgctccatccgggggcaacctgttcgtgtctgggcgctgagcgaggacacgtgtcatctgaaaagcaagttggtacctggattctcaagtgtcaggtcaagaacaggtaccacaggatgaggcgcgtggaggatgctgcgatgtgttcgtgagaggtctaggtcgtcgtctcccagtcaactttgggtgctggaccgttgtctccttataatgtaattatttattttgtacaaaactcctattatatagtaaagatgtgacattcgataaaaaaaaaaaaaaaaaaggcccctagggnc

SEQ ID NO: 71964 - DNA, 507 bp, Zea mays
  Clone ID: MRT4577_165633C.1
ggggccaagccttgtccatttaaattcccaaacccctggtttttccttttcacattgaacattccctgtccaagtcacaaattaaacccgccttttttgccaccccttttttcttttagttcgaaaaacaaaacaagttggcagcccggtttttggggttgaaattacaggctttaccaggtaaacaagcaagctgttgggccatccatgcccattttttaaaacttggaaataaaatcctaaatttgctggttgaccttgtgggcctttttctttttgacaaaatggcccgccccggggattaccaccacctttttaagccccgggacgttggccttaaacccccccttggggatttaaccctggatcccccggtagtggtaggtgaggtccccctcccccacaataaacctggggggcccccccacctttgggtccccccacggggcccccagtttccaattggggtccatttttcggtaataatttatgggccccctgaaaccc

SEQ ID NO: 71965 - DNA, 879 bp, Zea mays
  unsure (1)..(879): unsure at all n locations
  Clone ID: MRT4577_165634C.1
acccccgaggccggccgggatgagttgaaaggccctatcttttcatgtccatgtccatctcccgagtgaaagcgagcgagcgagcgaccgattgattgacgtgtgatgcctcactagctggagagcgctctctcctttgtggcaaatctcatcagcaacagagacggctggtgtgacaccttgtgaaaacgcccgctcgctcgctcagtcgctccgtctctctctccctccctccatatctccctttgccacctgctgtctccctcctcatctctctccagtcgagtcggcagtctctaccactctgcttcctttcccctcctcttcttctccagaaagcagaggcatggagcggcagaggaaggcaatgtggctgtaccccaaggtggtcggcttcaacccgccggagaggtggggccactccgcctgcttcttcgaaggggtcgtctacgtctttgggggatgctgcggcggcctgcacttcagcgacgtggtgacgctggacgtggagacgatggcgtggagcgcgctggccacgacggggcagcggccgggcacgcgggacagccacggcgccgcgctggtgggccaccggatgctcgtgttcgggggcaccaacggcggcaagaaggtgaacgagctgcacgtgctggacctgcgcaccagggagtggagccgcccgcagtgcaggggggcggcgccgtcgccgcgggagagccacagcgtcaccgtcgtcgggggcgaccgcctcgtggtcttcggcgggagcggggagggggagggcaactacctcagcgacgtgcacgtgctggacgtgcccaccatgacgtggtccacgccgngagccatcaggggcggcgcccccgcgcccagggacag

SEQ ID NO: 71966 - DNA, 321 bp, Zea mays
  Clone ID: MRT4577_165635C.1
accacgcgtgcgaaaaaaaaaaaaaaaaatttagaaaaaaaaatgaaacctaaaaatataaagagatgagaaaatcaaatgaaacgtagacataaaaaaaatagataaacaaaaaaaaaactggtcctccgtttaagatgctccaagtttcaatacacgtccattcactaatagacacttcacttagggacgcctaatttcaatccactggccatcgttttcaaacttcgcaactgaaaaaaccttgtcttcacccaatttaatagctttggatcaaatccctttttgacaccatgggatactaacacaaagtgccttacc

SEQ ID NO: 71967 - DNA, 138 bp, Zea mays
  Clone ID: MRT4577_165636C.1
agtgagtcgtattaaggagcaggaacctaaccacgaacgcatccgcagcgactgggtaacgatctctgatcccggagcaatgaacagccaaacgaatcgcaaaccgtgaggatcagacgatgttttatctcaagcgcc

SEQ ID NO: 71968 - DNA, 293 bp, Zea mays
  Clone ID: MRT4577_165637C.1
attacgcgtccacaggtaacaaggtttccgatcaatggagtcgtgattgcatacgggggtagtggtgtactccagtgtgacttcctgctattctcatggtggcctatctgcacactggcgctgctctagtccagacttacctgaagcactgaccaccttgcgaccaaacaccagagtgcattctgatagactactatggagacgctgaccataacggtgcagatgacagactctgaattaatcgcagacgtaaatgcgcttatctacatgccccacctgactccatatctagc

SEQ ID NO: 71969 - DNA, 246 bp, Zea mays
  Clone ID: MRT4577_165638C.1
ccttcctttttttttgtggggttatttacaaaccaattttggtattccacagcatacaataaggaaccacactgccatccggcacatctggaaagagtcaaaaaacccaatagtaaacagcagacacccggggccaaaaaacccaggggtgcccttcccatccgaccaaacctagctgggacccaaacaaaggggggtctaaaggacccaacacccaccttatacctagggaaacaagaggggggg

SEQ ID NO: 71970 - DNA, 263 bp, Zea mays
  Clone ID: MRT4577_165639C.1
gttgaaaccgggcccccaataaaaataaaaattatggaatgggatgaacaatataccctcatagaagggaaaagttcaaagatgggggggggatgggcaaaaaaaaaatacagcgcggggttttgtgattacccaaagaaaaaagaaaattcatccccgggcaaatttattttggggggcacttgatacatccaaagaaaaggaggggttgcaaaaagggaatttttattaaacatatgccaatggagtcaatgggtgtaaat

SEQ ID NO: 71971 - DNA, 334 bp, Zea mays
  Clone ID: MRT4577_16563C.1
gggcccccggattcacccctccttattttcaggtcagtcgggggggggacccaaatccaaagtcccccccgggaaaaacaagtttgggggggcgggcaaaaaaaaaaaaaatattggccctttgccaggggttgggccttggggccccacaaaaacaccttggcaaacccttcgggggggatgggggggaggaacttggccccccggtagccgggctccccgggggggggaacccccctgttgatcttgggggcccaaggcccgggggggggcacaacaatttccgggacgggggggaacaccggggggcccttaaaggggccccagggggaaa

SEQ ID NO: 71972 - DNA, 329 bp, Zea mays
  Clone ID: MRT4577_165640C.1
cgaacggacgagccccgcagagaaagaacgcctcgcatgcaactgctcaaaccgaaggaagccgccacactcccgcgcgaggccctcgaggcccacatcgtctcgctggtccgcagatgcccgggcttcctcgcgctccgcagcgcgcacgcgcacctcacgcggctccgcttgccgcgcctcaccgccgccttcgcgctctcgaagctcctcgcctcctgcgtctcggcgcccgcaacagccgcagcccaagccgcggggtcctcctacgcccgcaacctgttcggacaaatccccgaacccgacgccttctgctacaactccctcat

SEQ ID NO: 71973 - DNA, 392 bp, Zea mays
  unsure (1)..(392): unsure at all n locations
  Clone ID: MRT4577_165641C.1
tttggggggggggggggctttaaaggccttgggagggggggccaaaaatggttattcctcttaccccttttaatgggtttaaaaacttaacaagataaggggcttaaaattccttactttacttaacttctttccaaaacaaattttaagggtggggggggggggaacctctttnccacttaaaaactcggtgatcattacatttaaggggggattcatctgtactacaacataatttctcaaccttgtttattgtgcggaaacctaactcatgtagagatattgtggaaggacactctcttgcattctcttcctttgggcggaaaattgaaaatcattagggacttcctcatttctgctacccccaaggactgtaccctgatgatcagctt

SEQ ID NO: 71974 - DNA, 259 bp, Zea mays
  Clone ID: MRT4577_165642C.1
caagctccgggcagccctggcctgcagcaaagagttgtggatcctgaacaggtacctgagctacaccctgaacccggacttaatccggaagcaggacgccacctctaccatcatcagcattaccaacaacgtcattgggcaaggtctggtctgggactttgtccagagcaactggaagaagctttttaacgattatggtggtggctcgttctccttctgcaacctcatccaggcagtgacacgacgattctccaccgag

SEQ ID NO: 71975 - DNA, 545 bp, Zea mays
  Clone ID: MRT4577_165643C.1
ttcgggaatctaggtcgacgagaagacatagacccctggatcgcgatctacggagggaaagacgattccccgacatgggccatgcatgaggagctgtggaactaaaaacgatagagagagctcctgcacatgtaccaggacctgtacgccaacatctgggtgacggaaaaactgcagcgagcctactcccgaccagctcatgtcgtgagactactacgaagctgattgccccactttcgatgcatgcgaggtcatactcgcctgtcctcctctgatcgcgaaacggttctcgacctcgcatcttccatcacataaaccgtatacaatgaacggcaacggtcttgcgactcctccagacaaaaagaaacacggccacaggcgagctcccggtcaagaactactgatacgcgccggccgccagcataccgcctacgacgcatatatatagcactgagcgcagagcttcatcaccgacatcgattcgccctatagtgacatgcattgaccaacgactcactccgccccctgttacacgacgtcgacta

SEQ ID NO: 71976 - DNA, 701 bp, Zea mays
  Clone ID: MRT4577_165644C.1
gcgctcctggcttgcccctgcttccatggctgaccgcgctgctcccctgcgcttgccacggtgcccttctccctgcttgcgcgtgtagatgtgccctctgctcggtcttgcccaagctcccagcttcctgcacacgcgaagctctctgctcaccgtcgtttctcctctgcgaccgctcagttcctgctcggtgcccagccctcttgctgcggacgcggaccgccacgctgccaggctgctctctctgctcggtctcgacctctcgcatgtgttcctgctcaccgtggacacagctgcccggctcggccgctcctcctattccctgcgctcgccccgccacgcgctctcctggttttccctgcgcgcagccacgagcttcgctcggcctgctctagatccgtagctagtcgctctgtgtgctcgaccttgccttgtcgcagaaccccaacactgtcgatatccagctcgcccctgtgtcgctctcccttccgctgtgccccggacgtcgtgctcgttgtggtcggcatcatcacgctgcctgtctcgcctgaccctcaaatttactctgctccagccgtccgaactcgctagctcttgtgcctctctgcgcgtgcgcgccactcagtaccgcatcgttatcctactcgcagtcagcttttgtcgtgattgctgggcattacttgacgccctggcatcatgtc

SEQ ID NO: 71977 - DNA, 543 bp, Zea mays
  Clone ID: MRT4577_165645C.1
cacacgtgaccacttccagcagggggtgcggcctgtccgagctctccgggctcaggagctccgcgtcactgcccatgcgccggaaagccacctccgacgacttcatgtccgccgtctacttcaggacccacacgttcggcacgagcgggggctcgcggtgggcgcctgacggaggcgatactgaaggtggtcatcaacgggttgcgccgcatcgggcgcaacttcctgcggtgctggcacgggcgcggctacgcctaccccctcgacgtcatcgtcatcaacgacaccggcggtgtcaagcaggcgtgccacctgttcaagtacgactacacgctcggcatgttgcacaccgacgtcaagcccgtctgcgacaacgccatgtccgtcgacgggaaggtcatcaaagacgagtccgaccgtaaccccagcaacctgccgtggggcgagctatgcattgaccttgtcatagagggcaccggcttatttgtcgaccgcgagggcgcggaggaagcacatgcaggcggtggccaagaaggagctcat

SEQ ID NO: 71978 - DNA, 773 bp, Zea mays
  unsure (1)..(773): unsure at all n locations
  Clone ID: MRT4577_165646C.1
ctgncnacaggcaagcatctaccacccacttatgaatgaacagtgtgacagcagccgtgctacactgagagctcgaccacagagaacgacgatggccgcctccatgatgtcctcgaccactatgttgctggggcatgacgtgctggcgcgcctcggccgccgcgacgcctccttccgcgtcacctggtcccagaacagcaagagagcgacccagactaatggatacgggcctgacctgaccgagtaccttgacccgatctccaaaaagacgacggcgaacctgaccgacgagttccccgacgactatgggcgagacaccgcggatatctcccactatacgacagaccatgactggccacccgcaggtaaaggcgatccactcgcgacgactgatgttgtgatctgctgcctgcccgttcctggatatctcggctaagaacgcctcctcgttcacaacaggcaggtgcgctctccggctaaggatatacatctgtctgcgatgtctgtgctgtactacctgaggaaccccaacgctgtgtgctatcatctagcctccatggcagctgagcgtgccacgtggagatcatgcactgctactagggctaacgtgattgtgatggtacacatcatataacgcatcgatcccgtgtaccccggcggcgccttcgacccgctgggcctcgccgacgacccggacaccgccgccgagctcaaggtgaaggagctcaagaacggccgccttgccatgttctccatgttacgcttcttcgtgc

SEQ ID NO: 71979 - DNA, 1687 bp, Zea mays
  Clone ID: MRT4577_165647C.1
ccgggccgacccacgagtcagggcaaagcttcgagcaacaacagcttgctcgactcagcgcccatctatctctcttctcccccgcctgtctagccagcggcggccaccaccaccgttcagttattatagcaagcatgacgaagcacggcgtggtgatcggcccggaggacgtcgcggcggcgcggcatttctcgttcccgccgccgaggacggcggcgggcggcgagtcgtgcaggaagctggcggcgcaggtggacctcggccccgccgtcgtggggtcctggctcgactccatgaaggcctcgtcgcccaggcacaggctcatggcgcccgtgcccggcgccgccgacgcggagcacgacgactggatggagcggcacccgtcggcattggaccgcttcgacgcgctggcggcggcggccaaggggaagcaggtcgcggtgttcctggactacgacggcacgctgtccccgatcgtggaggaccccgaccgcgccgtcatgacggacgagatgagggacgcggtgcgcggcgtggcggcgcgcttcccgacagcgatcgtcagcgggcggtgccgggacaaggtgttcagcttcgtgcggctagcggagctctactacgcggggagccacgggatggacatccgggggcccaccgccgacgccaaccaccaccacggcaacggcaaggcggaggcggaggcggaggtcgtcggtgctctgccagccggcgagcgagttcctgccggtgatgcaggaggtgtacgcggcgctggtggccaaggtggagcgcgccatcccgggcgccaaggtggaggacaacaagttctgcctgtcggtccacttccggtgcgtggaggaggcgtgctgggccgcgctcttcgagcaggtccgcgccgtgctgagggaccacccgggcctgcgcctcacccagggccgcaaggtgctggaggtccgccccatgatccgctgggacaagggcaaggcgctggagttcctgctccacgccctcggcttcgccgccgacgccgaccgcgacgacgtcttccccatctacgtcggcgacgaccgcaccgacgaggacgccttcagggtgctgcgcgcgcgcgggcacggcgccgggatcctcgtgtccaggttccccaaggacaccagcgcgtccttcacgctacgcgaccccgccgaggtcaaggagttcctgcgcaagctcgtcggcgccaacgacgacagctgatgatccggcccgcgattcgtttccctttcccgccgtgaccagctccgatccgcctgtgtcaagccgctaactcaacctcggctacctacctgctgcaccggcagagggcttccttgttgttgcaactgcatctccatcgagcagcttgctttgggacaagaacagacctagctagtagtacagtagagcctttttggatctcggttctttttttttggttccatctctcttgttcatcactgcctgctgttgtttaccatttgcctcggctgaaaaggcttgtattttcggcgcccttcccgcgaggcactgtaactagttgctttgtctgctgtacgtacgcgtaccatgttgaaataatatgtcatgttgaggagctattaataaaaaaaaaaaaaaaaaaaaaaaaaaaaaaaaaaaaaaaaaaaaaaaaaaaaaccccaggccggccgtt

SEQ ID NO: 71980 - DNA, 200 bp, Zea mays
  Clone ID: MRT4577_165648C.1
aaataaaaataaaaaaaaaagtaaaatatataaaaatatccaggctttcttactcggggatgctatttaagaggggttgtataactacaccataaattaattaactggcacttaaattacaattaactaaactgaataaaacatggctttaactaaaaaaattcttgtgttacaaattttaatttccttacattacatat

SEQ ID NO: 71981 - DNA, 642 bp, Zea mays
  Clone ID: MRT4577_165649C.1
ttttttttttttttttcgcacctccccccgaaaaccaactcattagaaataaacggaccagatcatactctaagtccattaatctcttactcgctcacatcaatggttgatgttctttggatcatgcatccttcataactcatcctctccccacagtcccacacacgctctcactccacctacagctcgcactccttgccctccacaacggcacggggcatagggacctgctctctctacctggcgtcgccaccgtgggaggttgcggtgaggagagcgctgagcagctcatccgctcaacagcatcatgctcgatgcgctagatgcggatgcagatcctgggcgagacccgggaggagcagcaggtcggagacgttgtagaggtcggcgtctaggtagaggtagtcgtcgatggagagctcgacatttgtgcgggtgtcctcgtcgtacatgacgagcgtgaggaggaagaaggtggtggcgagcatggcgaccggggttcgccgcgacgatgagaggagggagcgcccaaatgtggcgagcgagttgaggagcatcgcgggggcggggtgggatgacgacttgggaaccgagatggtggtcgtggggagcaagggggcggaggtggaggtgcctgatgat

SEQ ID NO: 71982 - DNA, 323 bp, Zea mays
  Clone ID: MRT4577_16564C.1
ggggggagcacccaaattttttaaaaatgtttaaaaatgctgggggctggcggagggtttttttttggtccataatatccacttttaaatttttttttacaaagaggggggtaaaccaaaacttcaggactggcaaactgggtttgggataacccccaaaatgaaaaaaggcttttgcttaaccttgccaagggagaactcaacaattgggttgtcaaaaacaactgggttattatcccctttggggggacggtggttttatacggggggggtgggttgacaacaaaatatctggccagcaaacctggtgtggtgggggtaaa

SEQ ID NO: 71983 - DNA, 325 bp, Zea mays
  Clone ID: MRT4577_165650C.1
aaaatcctcaagcatggaaattcttatgtccttaaaatagctaataggatatatgtggagaaaacatacctatttcataataaatatttggaggacatgaaaacatactttggtgcagaaccacagtctgttaactttgtcgaagcttctggacagatcaggaaggagatcaactcctgggttggacagccagactgggggtaaaatcccaaatctcctcccagatgacgcagtagacaacaagactacgatggttctggtgaatgccctttattttaaaggaacctgggagcatcagttctcagtgctaaacaccactgaaaga

SEQ ID NO: 71984 - DNA, 907 bp, Zea mays
  unsure (1)..(907): unsure at all n locations
  Clone ID: MRT4577_165651C.1
ttcataaaacacagagctgtagagcccgattccgatccagcgaggcctagaccctcactcctccccttgattcgctcgaccgggcctgtgcacccgcatcaccgccatgtctggactacacggcccctccaccggcggcgcgggtcgtgtcccatgaggtgggggacagacagatggatgcgcgccggcgatcgtcgaacttgatcgccacgaagtgtgtacctgaacatgcagcggtatcgacgtgaatcgngcgacaagcaccanaacggaactcgatcggcgtttgggaggagatcgcgaggagcgtgcggcgtgcaggggtggtgggatatcgtcctggtgctttcgcccggcagtgaatcttcgcgcctcgtcctactgcgaccgctcgtgcatcatcggggggtggtcacatcaactcccgtccggcaccttgcggcctacttcctggccgcggaaggtgctccctggtggcgacgcgtctgctctacatcgctgggaccagcgttctcgcgcggcnatctgctgcgcatgcctctcgcgcaaggacgttactgaagcgtcctacttcntacaggagacgtgggtctgggggacaaattcgcctcgatctccggtttactacccgcgtgaatcggccctcggcggccgtggatcatcgcggacctntcgaggctcgcactacacgcgtctttctccgatcaccgtaccctgagtcggaacgtccggcgcactcccacngtncccggatctgggctccctctccccattccgcgttcgaccgtggttcatggatgcacctgggctaccnattcccgatcaccgggcaacggaaatcaaacccggccagggagcctgggtggcgggcgtcctctacaacaaggacaagccctgggacgaccac

SEQ ID NO: 71985 - DNA, 405 bp, Zea mays
  Clone ID: MRT4577_165652C.1
gggtcttaccaggggaaccgcaacaaaagggggatagccccccccagggcagtccattttatgggttgacccttggacacccttcaccaaaaaaaaatggggccaaacctgggggctggaaaatgggtcaccctttaaatacctacctaaaaaaaaaggaaagaccagggaaaaccccactgggacactttttttttggacaaattatagggaccggaaaaaggggttccaaaaaaataaggggggtgctgcacccccaaaaaaaaggggatattacgactaaaggcgccagggggggggctctttggattctcccggggcttaaccaaattttcggccaaaaccaacaagcgggtgtttgaaacacaaaccggtgggggtttcaattggatgggggccttttta

SEQ ID NO: 71986 - DNA, 253 bp, Zea mays
  Clone ID: MRT4577_165653C.1
caaaacattgtcaccttttctaaaaaccacagggttcacccaggaagagtccccttttctacatggccggactggctaaatgtgtattcctgaccccccacaccaggagggtgcaaggcccccaaaggttaaacctttatctcacttttcggcccttaagacttgaagtgtgtttatgccaccgggaccccaaaaaccccccggaatatctgtatccccatgggctagacaacgctgaaatcaacgggtgcta

SEQ ID NO: 71987 - DNA, 1514 bp, Zea mays
  Clone ID: MRT4577_165654C.1
gggtaccctcgagggcagcccgcgccgacgaggcgaggagcgtgcaattccgtagctgcaacgaactccctcgaccgtatcgcccgctgctcctctatccctttcctgctgctgctactaccttaagctatcactatcatggccttgatgctgctagcgcgcaacctgcgctcccgcctccgcccaccgctcgccgccgccgcggcgttctcgtcggccgcggcggaggcggagagggcgatacgggacgggccgcggaacgactggagccggcccgagatccaggccgtctacgactcaccgctcctcgacctcctctttcacggggctcaggtccacagaaatgtccataaattcagagaagtgcagcaatgcacacttctttcaatcaagactggtggatgcagtgaagattgttcttactgtcctcagtcatcaagatacaacactggattgaaggcccaaaaattgatgaacaaatatgctgtcttggaagcagcaaaaaaggcaaaagagtctgggagcacccgtttttgcatgggagctgcatggagagaaaccattggcaggaaatcaaacttcaaccagattcttgaatatgtcaaggaaataaggggtatgggcatggaggtctgttgcacactaggcatgatagagaaacaacaagctgaagaactcaagaaggctggacttacagcatataatcataacctagatacatcaagagagtattatcccaacattattaccacaagatcatatgatgatagactgcagactcttgagcatgtccgtgaagctggaataagcatctgctcaggtggaatcattggtcttggtgaagcagaggaggaccgggtagggttgttgcataccctagctaccttgcctacacacccagagagcgttcctattaatgcattggttgctgtaaaaggcacacctcttgaggaccagaagcctgtagagatctgggaaatgatccgcatgatcgccactgctcggatcacgatgccaaaggcaatggtgaggctttcagcaggccgagtacggttctcgatgccagaacaagcgctgtgcttcctcgctggggccaactccatctttgccggcgagaaacttctcacaaccgcaaacaacgactttgatgcggaccaggcgatgttcaagatccttggcctgatccccaaggctccaagctttggcgaggaagaggcgtctgcggcggctcccacagaatccgagaggtctgagcaagctgcttcgatgtagaatatatacatatcattaccgattatccgtatcacggttggggcgaaactagaactaccgttgtagctagagcattggattgtagaaaccacaacatttcattattttgtaattgcttgagactgaatgggggatacccatgtcgggctagatcaatggacaacttccacacaaccaaatccaaacattgaaactcatttttcatcacagttttaataaacttctcccacttattaagttgc

SEQ ID NO: 71988 - DNA, 461 bp, Zea mays
  Clone ID: MRT4577_165655C.1
actccttagggcgattgggttcctcgaggccggccgggacagtctaatccctatccgaaccaaaggacgtagaaggcctgaattgggacgacgaaggatggatacctggagcaggagattgacctgggagaggaggtcgagggagaggtcagggaggaggtagagcagtgcgttgagcaccgtctccatgctccatggcggcatccgccggtggccgcatcaaatccatcgtcacctccatgtgaacggctctttgctcgccttatttttttttctccctgtccaccacaatcctcttatagatctctcgtttcttcccttctcctgcaaaaaaaggttctttctgtgttccacaaaaaggcaaccaatcacgcccatagtgagcgaccaagtgccgagtgaaagaaccttttttgcaaactgatgattcacatcagaaaaaaaaaaaaaaaaaagcggcc

SEQ ID NO: 71989 - DNA, 289 bp, Zea mays
  Clone ID: MRT4577_165656C.1
tcgttcgcttaaagctggcaacgcctaccatttttatttttgtgaataggaacagctggcccagggttgtttaagtggccatgaaccctgtggagcatacccacggaggaggtaaccaccaacatatctgtcacgcctttactgttcgccgcgatgctatccctgtccagaatgacggtctcattgatgctattaggactggctggctcataagtcatgctgctgacacaaccactaatgctaacaatgacacctatcatattgatagtcatgatttatttattcctct

SEQ ID NO: 71990 - DNA, 177 bp, Zea mays
  Clone ID: MRT4577_165657C.1
acacgccgtggggtggacggattcggcggcttcccgacaatggagtttgaaacgagagcgcagatggataaggccaataagctacatcaccggatcggaggagaaggcgaccaagagcatgagccacgggtccacggagctgttcgtcgaggtggattactggttccagtcgtgtcg

SEQ ID NO: 71991 - DNA, 330 bp, Zea mays
  Clone ID: MRT4577_165658C.1
acccacgccgtccgtttaaaaaaaaaaaaaaaaaaaaaaaaaaaaaaaaaaaaaaaaaaaaaaaaaaaaaaaaaaaaaaaaaaaaaaaaaaaaaaaaaaacaaactaggggggggcgttctagataatccatgctttgggtccgcgtggcatgcgggttcttggtttttgtttgttgccttccaggttgattgctttgtccgcggttgtccttggttaagcctggggaaacccctgtctttccccttttgattgccttggcggtagatccccttttcttaacctggctaatgtccgttcggtttgccccctttcgcttttccgcactgtg

SEQ ID NO: 71992 - DNA, 1679 bp, Zea mays
  Clone ID: MRT4577_165659C.1
ttatttttttcaaagaaagttccctcctatgttattgaaacaaatgcagttcagggaaaataatctatgaaatccataatgacacaaaatagatcatcattctctcactaatacaacatgtgtggcctgattcactccaaagaacacgggctgattcaccctgaagggcgcgacagcgcctatgtttctagtttgctctaaaacatgtaaacaacaaggttcttaaaatcctgcagtcgaggcgacggtctccaaactgcccgaattctggttccatatcacttgcccagcaaccggcgtccgcgctgattcgcacctttcagtctgaaattcagttcatcgacgtcgtcgcttaaaggaaccagagctttgttttgcctgtcaatttctgtgcccatatccactgccatttccttgagttgtcccaatgtgctacacaggtcggaaagtgcatcatcctgctttgttctctcagcctgaactttttccattgcagatacaggtgtggtttgtacatgactgggatattcttgacgtgctggggcaattcctagcttccccctctgttccgtgtcgttagctgttgtcgcagaatagttatttcctgagactggtccttttatctgatgatttctctttggtctccatgacttggaaaatagcccacccagacttcccagaagcttctcactcactgtaaggtcctgctcaatgtcagctgctacttgatgagaccgcatgatctgctcaccttgacggtgtaaagttagcatggtttgtgtagcatcttccctgatggcttcagcagccctgacacaatcatttactttgtgtgtggtttctcttgctttggttatagcataatcttccaactcttgcacagattgattggtgcgtcgtactgggacagactgtgcccttgatggcccttcagaatcagaaaaggggtttgtcttgtggggagggggggtgcccaatgagttctgtttgttatacatcggcaccgacatcacaatctacacttcaagttctgtactgatgaccagatatctgcaactggcgtggggggtgctcgtcgccggagaagggtccgacgaagacggacgcgggcgtgttcacttgaaggctacgctcggcggacgcgtgggcgaaaagcctcgaaaacggtcgagatggttaagccccggcctgggctcgaggtcttgctgctagtgacaatgatcctccattctgctgagcaaagttgttcacacctgcagctttagcaacaagggtgcgcttcagtgtatggtagactgaactttgtccacaattgttagacagactgctgtcctagctaacgctcctgccatagttggttggagctcagtaagccatagacatacatcatcctttcaagcaccatgatcagtctacaagcaccatcaagttctgatactgccgatagcatcagttgtgactgcatccttgttcatctcatgcatagtgaaaccgcgttatcatgattggcagttcatggatcataggaaatcaaacatgtaaggaggccatgaaaggaaaattatgaaaaactaaaaaatagatgatcatttagctcattgagaagttgaaacgtttggtttcagccgcaactcatctttcgttttccccatctcttatgtcctcaaagtcatcatgat

SEQ ID NO: 71993 - DNA, 401 bp, Zea mays
  unsure (1)..(401): unsure at all n locations
  Clone ID: MRT4577_16565C.1
ggcgaccaagatattttccctccttatgctccttgctctttctcntgtgttgctnncgcgncnnttttccctcnntgctcacnngctcctatngcttcccttcttcccccntcccttccntcnnttntngcttcngtntgtgagngcccagctcttcnncctttttggcttcntccctgcttcgcngcnggccccatacctttatcgcccttgttgtttctccctctccagccctntctttggtgcngtgcttggtcccnnccntcngggcccaaccgctgccgcccctcgtgcctcctgggntccccccgttgctctggccnccctttctcccttctctctgcnncccccntttctttcctttcnccccctgtcttcccttggcccctgctgcttttttg

SEQ ID NO: 71994 - DNA, 365 bp, Zea mays
  Clone ID: MRT4577_165660C.1
attacaacattaatgtccaaataacatagaatgtggggagaaaaaaaatatgggggggacacattttttagtgcctttggggggggggggggggggactgaaaagttgggggggaaaaaacagattgggggggggggggtcacccattcgaggggggattatgacagggggggttgtgcattccgggggggggaccgaagatgattggtgaaggaaaagaggatggtaaaggaaggggaagagggaaggaaacgggattcttgtcagcaaaccgggatttttgggggggcaaaaccgaaaaaggcccccaatagaacatgatgctgggggggaaacccctggcggctatgaggcgcccaacggtg

SEQ ID NO: 71995 - DNA, 599 bp, Zea mays
  Clone ID: MRT4577_165661C.1
ggccctaggggccttttttttttttttttttcttttttttttttttttttttttttttttttttttttttttttttttttttttttttttttttttttttggggggcgggaaaaaacccccccaattggattcccaaatccccctacatggggggttcccacctacatataccgaaaacaaaaatatggccccctttgggcccaaaaaaaaaacagcaggaagcaagggggggcctgggcacacggaaaaaaaaaaggggggcatgggggggaacaaaaacggaaaggggcccagctcctgggggggccggggggaaattaaggggtgctcccggaggaccccaacttgggggggctgggccccaacaacgaatgggggaaagggggggcaatgggggccccaatcaggggggcccccccaaaaatcccctgggagaggaatggccaaaccgtattggaaggcaaaattggtaaaattatcccaaacaggggggttacttgcttaaagggcaaaaaataacctggaaaaaattgtttgattattggggtgccaaaagctcggtttggccccaccaaggggggcgacaacaggggtggga

SEQ ID NO: 71996 - DNA, 324 bp, Zea mays
  unsure (1)..(324): unsure at all n locations
  Clone ID: MRT4577_165662C.1
tttccggggggacgccactcntccnncaagtacacaaaggaactgctgagttatgtaaaagccgggttcatcccttggtcattggggggcagtgtcataggctacactgagaacagggaatttcatcttatgaacgagatctatagtgggaagggggtgtcctcacaatataaataactccctaagagcatggaggggatatcctactcatcatctttggattagtagccaggctaatgattggcggggactttgcaatattcgaatggggggccggtcaggtggaacatagcttctaaatgcttttgaccaagggtgagataa

SEQ ID NO: 71997 - DNA, 711 bp, Zea mays
  Clone ID: MRT4577_165663C.1
ccgacgtccgcgtcccgtgctcctcctcctcctccgccgctgccgcctcgcccgtccagctccgccgcgtcgccaagcgacaggtggactacatccagggggacaacccgctgcggatgtcctacatggtggggtacggcccgcggtacccgctgcggatccaccaccgggccagctcgctgccgtcggtctcggcccacccggcgcgcatcgggtgcaaggccggggcggcctactacgccagcccggcgccgaaccccaacctgctggtgggcgccgtggtgggcgggcccagcaacagcaccgacgcgttccccgacgcgcgggccgtgttccagcagtccgagcccaccacctacatcaacgcgccgctgctcggcctgctcgcctacttctcccagcaccccgacccagcgcagcactgatgaacgggcagctagctagctagtagtaggtgttgtagtagtattcttccgttgctgctgctgctcgtgctatttgttttgcagtatttatgttttggtagcatatattgtgccgatccattcctgtaaaaaaaatggcaggaacgaggattggtcctactgcttgtactcgtactatgccccaagtaagctgctgtatggtggtaagatgcattctgaaatcgccttaatttcggaaaaaaaaaaaaaaaaaaaaaaaaaaaaaaaaaaaaaaaaaaaaaaaaaa

SEQ ID NO: 71998 - DNA, 1086 bp, Zea mays
  Clone ID: MRT4577_165664C.1
cctcgaggccggccgggccgggagtaccagcccacatcccgaggcttttctttccctcccgttccccgtctgcctccctctcgtcgcatcgcgcaccgcttccccagttcccccagctccccccaccttccgttgccttctcgaactcaacccccgcccccgtcgcggatcgtcatggccgccggcctcgccttccccgtcgcctcctttcaactcgcctgcgtctcctcacatccccaccccgggcaccgcatctgctgcgcgatcccgtcgtcgtcctcgcgccgcatcgtcaaatcctcgccgctccgcgcgactaccgtcctctccagggaacgacggggcacgggccgtggcgcgtccgtagtgtgcgccgtccaaggccaggacacgaccatccaagtcccagatgtgacaaagtcaacatggcaatcactcgtgatcgagagcgagcttcctgtcctggttgagttctcggcggcatggtgcgggccatgcaagatgatagaaccagttgttggcaagctctcgaaggactacgaggggaagctgaaatgctacaagctaaacacagatgagagcccggacatcgcaagccagtacggggtccggagcatccccaccacgatgatcttcaaggatggcgagaagaaggattcggttatcggggccgtgccagagagcacactggtcacatgcatcgagaaatttgtcgagaggtagaatgcgtagtggatctcttgagcggtttcctttaaatcaaaaggtcatttcgagaccacttgggccatacagaacaattctataactgcctctagatgatgggattatatgtatattatatactctgttattattgtttgaagaaagcggcatgaaatttgtgtccaccccagccttggttttgttttcttattctttagaggctctgaactgtgtaacgtggacgaccgagaacctcgttctattcttctcataatatataagaatacacacatgaaacaaaaaaaaaaaaaggcccctaaaaaaaaaaaaaaaaaaaaaaaaaaaaaaaaaaaaaaaaaaagggggggcgtttttaaggga

SEQ ID NO: 71999 - DNA, 452 bp, Zea mays
  unsure (1)..(452): unsure at all n locations
  Clone ID: MRT4577_165665C.1
gaagcttcgggccgaaccacccgtccggtccacaccacaatccggaggataaacaccaacgcttgcgatttagangaaaagaccccaccagggggctggcgcaccatcaaggaaataacgggaagcaggcacagaaccgctacgcgagcagagatgaacacatgaaaaacaagcttgaccgctatgaacagtacagcgaaatcagaggagccagacagaacaccattagccagcaccaaagcgacctatctgaaacagataaatggactaccccagaggggccaacacatcccaatgaaatgcatgggtaccacaacactgaaagagacaacgaaacagcatactaaacataccgccatggaaagaatgttgcaaccagacaaagttcatacgaccaccatggaagaaacaattcacatcttcaaaggactgtaagagaaaaatgaacttca

SEQ ID NO: 72000 - DNA, 211 bp, Zea mays
  Clone ID: MRT4577_165666C.1
ctggccagagcaaggagtacccaagacgggggaaggcttcatcgacttcatcgggcaggtgcacaagacaaaggagcagtttggacaggatgggcccatcacagtacactgcagtgctggtgtgggccgcacaggggtgtctatcaccctgagcattgtcctggagcgcatgcgctacgagggcgtggttgacatgttccagaccgtgaag

SEQ ID NO: 72001 - DNA, 265 bp, Zea mays
  Clone ID: MRT4577_165667C.1
gcggcgccgcaccccaccacttccgtccggtctgagctataggccgcgccgtcgacgccgctccataccgagcgcgcagccatggccccacagactgagaaggcttgcctcaggcatgactagggggttccttagctcagacaaatctgcgaggcggaacaaaccaagcaaggggggcacctactcactcaagaccacatcactggctaccaagactgcaaggaggacttgggtggcaactgctttgtcgggactgttgcctcgc

SEQ ID NO: 72002 - DNA, 387 bp, Zea mays
  Clone ID: MRT4577_165668C.1
catcagcctgcttgctcttgcttacattgttaccatcgtgaattcttacctgttcgaagggcaccctatcttatgaacaatcctagcttgtaccatgcagaaggcccagtgatgtttggtgcacagaactacaatacaagaggcatgaatggtatgatgcgacgcagtcacatgagggccaccctgagtaaaaaacctgcacagacttgtgaaccgattgtcaatggcgctccttttactatttgctacaattgctatgaagtgctgcagcttcccaagaactctctcttgttgggaaaagatgagtataagctgcgttgtgggtcatgctcacatgcaattgtggtcagacttgatggaagcaggcttgatgtttcagcacctaca

SEQ ID NO: 72003 - DNA, 643 bp, Zea mays
  Clone ID: MRT4577_165669C.1
cctcgaggccggccgggatctttttttctattccgatttccattctcgcaccgcatccaccgcgccgccgcgagagaagaggggagagtgaggaggagctttccgatggagaacgtcgaggatacgttcgcctcccccaacgccgccgccgaggtacttctccaccgacggagaggacggcacggccaagctccacgacgcgaaggacgagatcaagtccctccgcgcgcctaatggcgagctgaaggagaatgtcgatgccgtgcgccacgagaaccagatcctgacctccgagtcccgccgccttgaggatctcgtgtaccaggaccgcgaggaggtcaccgtcgtcgagcaaggtgctgactccatcgagagcgaggacgacacgctccggagcgaggtcgagtgcctcgagtatctcctcgtcgagaagaaggctagccatgaccatgatatgcgcaaaggtgcacgggtcggggaccatgtgcagaccgcgtaccaagagaagggcgccctcgaggaggagatcgagaccctgaaggtatccgccactgccgagggcaagggcgtggaagaaggatgcgagtctattgctgtcagggtcgcgacgcctatggatcaggacgtgttgcctcccgcactg

SEQ ID NO: 72004 - DNA, 214 bp, Zea mays
  unsure (1)..(214): unsure at all n locations
  Clone ID: MRT4577_16566C.1
cacacatccntaactctcttactacctcaactaatttccattctatcctnacaccaaccactggtgttccgatttcttctttatagggagagaacatcattaaaatttccacacaacctttactctaacaaatacccaaccctactacatgctttatacttgatcaattacactctattatccttcaaacaatcccctaactctccccctacac

SEQ ID NO: 72005 - DNA, 407 bp, Zea mays
  Clone ID: MRT4577_165670C.1
cacgcgtccgctatgttgcaaatagataaaaaccttcccatcttgcaaaagggttgaagcttggcctctacaatgacgcggggacacaaacctgcagccaaaaaatggcagtatcacttgatcatggggaccaaatgtgaaaattttcatcttgggctgggaaatgctagtatcacttgatcacaaagagcaagatgtggaaaaaaacatcatgggtaaatctatttatgtttatttcctgacaactgtgacaagtcaacagtgacaaaagtatctgatcgtctcttgttctaagttcctggtattgttccaactcttcttcattctatttaatatctgatcatctatttattgtacgtactgattaacaatatgatgactataataatgctggtaggagtgtgaca

SEQ ID NO: 72006 - DNA, 270 bp, Zea mays
  Clone ID: MRT4577_165671C.1
gcccacccattcgatggggtttgatgctgatcataaattcgacagcacatgtataaaacgagaggggtccatgaagagaaggcaatgggcagctccttttagaagatccaaatttatcttcaacacgcatctcgacgggttaattattctataatgtcaactaaacacaattagctgttcatttttttgctaggcgtgctgtgggaaaaccttgccgttacctaacaaaatcgttttgtaaaacattcccttttctcctactggctttat

SEQ ID NO: 72007 - DNA, 418 bp, Zea mays
  Clone ID: MRT4577_165672C.1
gtcatagcttgacatggaagagacctatctgtggcataagccaaattgagcgttccaaggcatgcatgatctcgaacacgacttccatacaaaacaagacaggcaagttgaccctctacgtgagggcccaaccgatggacatgcattgcggtagagcatcatagcagttgtgaatgtggagacagtcttgaagaccaaaatccacattctttataatcgccaccggaggggactaagcacaaatttttaagattcgattgcggggaggatgcgactaacaaggataaatgatctattgtccatggaaacaaaatgatggggcctggtgttcctaatattagtcactatgcgcaccaatttttgactaacatagatgtttatgtcttatttggaaaacagtatccaaatattttttggc

SEQ ID NO: 72008 - DNA, 251 bp, Zea mays
  Clone ID: MRT4577_165673C.1
aaattaaccatcttgaactggcattattccactttaaaaaaaaaaaaaaaaaaaaaaggggaaagggaaaaaaaaaaaaagggggggggaatacataaaaaaaaaggcaagcttttttagggggccctagccatacatacgctgtcctagggcgttcctttttggtgtttgggttccctttgtcgttccccaggttaattagtttacagggggggcccccttaaatcatttggcttccccccgtttaaccc

SEQ ID NO: 72009 - DNA, 314 bp, Zea mays
  Clone ID: MRT4577_165674C.1
ataaacttctattgaagaagtgacaaacatttattgaaatttatgcttgatgggtgggacgatccttttttattttctgtcatataatgagactctgtttgatgccgatttaccctactaagcctactgaacctaatatttttatctgttctaaatactacaattcacctcatatatttgggctattatgatactacattgttatacatatattcttgattaacttttatttaaattaattatgataaacctttacctaagataattttattttttgctataaatatattccattttaaaaattctttttacat

SEQ ID NO: 72010 - DNA, 365 bp, Zea mays
  Clone ID: MRT4577_165675C.1
acttgggcacattaactgtatttgactcttagaaaacgctgcccgtcaccatggcatgcactcacgttggacacggtggcagggcacctccccctaagaagaaagagctacgccacacacgcaggctcaaatacgggcccaacaagccaaccgaaaatcaacaacggagaaccatcctctgaaaggaccggacaaacacgggtacaggctttactgttttggaaaaaagcgcaaaaagggcgcccctaaaaaaaggggcgggttttactttaccaaaaacgggtagaggtttgccggccccctccaagagggacttgggcatgggatccacgagcttgcccttaatgatgcccactaaaaccctt

SEQ ID NO: 72011 - DNA, 535 bp, Zea mays
  Clone ID: MRT4577_165676C.1
attcggctcgagggttgccgtcgcagatgaccttttctcaggccgccgcggtgttctacagtccccagtacggcgggtactggtacccacctgattattcataccaacaggtgctacaacattactaccctcagatgtatggtccagcctctcattcagtaccaccctaccaatacatggggtatatgcctagtggcccaagtccaagtgctggattctcaccgatgcagcaacccatgcgaccagcgttctttcagcagccaacggcacagatggatggttctttcccaccagggcattcgcttccgcctaatttcagactccagctgccctctcatgcagtctcaaaggaatctgacgatgcatctggtacgctactgtaatcctttcggttaacgtggtgtttgttgctgaaacctgcaaaacaaacacattttggttcaatagttttaatgttgcaagatacctgttactataaaatctttgtatcgtaaaactgtcatttctgggtgtatctaacataagttaactaaaa

SEQ ID NO: 72012 - DNA, 817 bp, Zea mays
  unsure (1)..(817): unsure at all n locations
  Clone ID: MRT4577_165677C.1
ccggccggccaaattccaatcccatccaccatcttgttcttgtcttctccgacaattaaccatcaatcccaaaacgtcatattcatcttgtcgaggccataaagtcacaacaaacacgtcgtccatgcatccaccaccgcatccatccatgaagcccggcggcgaggaggaggaggatgtgcaggtgctggtggtgcggtcccaccaccactcggaccagagcagcacgaggagccaccaccaccagcaggtcgtcatcagggcgcggccctactaccggcggtggtcgccgtggctcgtctccggcgccaccgtggcctgcgtcgccatcttcctcgtcaccatgtacgtgaacgactgcccgacgcacaactccaactgcgccgccgcagggttcctcggccgcttcgccttccagccgctccgcgagaacccgctcctcggaccctcctccgccacgttagtgaagatgggggctctcgatgtggctaaggtcgtccatggccggcaaggatggcgtctgatcacctgcatgtggctccacgccggagttgttcacctgctcatcaacatgctgtgcctcctagtcgtgggcatacgcctggagcaagaatttgggttcgtgaggatcggtctggtgtacctcatctctggttttggcgggagcctcatgtctgctctcttcatacagtccagcagcgtcctccgtggggggcctccggcgctctcttcggnctcatcggatccatgctctctgagctcatcaccaactggtcactctacgcaaacaaggtggcggcgctgctaactctggctc

SEQ ID NO: 72013 - DNA, 987 bp, Zea mays
  Clone ID: MRT4577_165678C.1
cattgggtacctggccggcggacggaccgaaccggctgacaaaaatttcgagcagcagagtaaacatggcgggaatttttggcgccatccattctcccgccgccgcctgcctatttagcccccggcgcccgccgtctcggcgtccactcagcccctacctttcagatttttcctcatctcccgccgcctgcacccaacaagcctctcgacgctagtcatggccgcttccaacggcgccgccgcggtcgacgagaccgtcgccgccaccgactccgtgcaggagcctccccagaagatctccaagatctctcccctgctcaaggtgaagaagctctccgagaaggccgtgctgccgtcccgcggctccgctctcgccgccggctacgacctctcgagcgccgaggagatggtggtgccggcgcgtggcaaggcgctcgtgccgaccgacctcagcgtcgccatcccgcacggaacctacgcgcgcatcgcgcccaggtcggggctggcgctgaagcactccatcgacgtgggcgccggcgtgatcgacgcggactaccgcggccccgtcggcgtcatcctcttcaaccactccgacgccgacttcgccgtgaagcccggcgacaggatcgcgcagatgatcatcgaggtgatcgcgacgcccgaggtcgcgggaggtggaggacctcgacgccaccgtccgtggggacggagggttcgggtccacaggcgtctgaagggattcggtgtctaggttaggatggcgatgcaagccttggtgtcttttgttggctctaagaaatcgtgatgttcaccatcactatcctgctatcgataattagtattgagattagtacgtaggttgcgtagttagctcgatgcacgtactattgtcgagaactcgctattctgtgatgttgaaaatgtctaatgatcctgcagtactgtcgcattagacccataaaaaaaacccaatttgacggcggttta

SEQ ID NO: 72014 - DNA, 414 bp, Zea mays
  Clone ID: MRT4577_165679C.1
aaaacgggggctcccattttttttggttttgggaaaaaaaaacatagccctttttggttggcccaacaaaaaaatgtatcggattttgaggcgggttttcggggacttattaaacatttcctccatagccccttaggggggggttgggttggggaacatttaggacgggatcgcccctggacgtcctttttggtccttttaatttggggggacaccgggggacaacccaggatagttctgccccaacctttgccccaaaaccaaacaacttatttggggggatgggcccgtcccatcccgtcttgtttttgaaaccaaaccccccctaacaaatgaaacccgacccaggggcaacgggcgcttaatttttttggaactgccgaaacataacagggaatcccaaagttttttggg

SEQ ID NO: 72015 - DNA, 794 bp, Zea mays
  unsure (1)..(794): unsure at all n locations
  Clone ID: MRT4577_16567C.1
accagctcaaagctgctttagctagctagcaagagagagagagagagagaaaaaatatggctccactcgtcgctactgccacgatgaaccacgctgtggcccatctgctaggacccaatcatgagagtttctcacggcaccatctttcttcctcgctgcagcaaaacagtaagcgaaggtgtaatcttagcttcaggccacgagctgctgagagtcagaatggaagccaaacgctgagcccctcggaagtccctaaaagagactggttcccctctgacttcatctttggtgccgccacttcagcgtaccaaattgaaggtggatggaacgaggatggaaagaagccaagcacatgggatcacttctgccacactttcccagattggatagcggatcacagcaatggggatgttgcagcagattcgtaccacatgtacaaggaggatgtcagattactgaaggaaatagggatggactcctataggttctccatctcttggtccagaatactgccgaatggcacactcgaaggaggtattaatccatatggcatcaagtactacaaaaatctcatcaacttgttggtagagaacggcatagagccatttgtgacaattttccactgggacacgcctcaagcactggtagacaagtatggtggctttttagatgagaggattgtaaaagattacacagacttcgnctaaggggcggtgcaccccagggacaanaatggtgctaaccccatttggaaactcgctcactgagccatacactgggtggccataaccttc

SEQ ID NO: 72016 - DNA, 536 bp, Zea mays
  unsure (1)..(536): unsure at all n locations
  Clone ID: MRT4577_165680C.1
agctgcgaggcgcagctgcgggcgctgccggaccacgcggcgcggtgccggtacctgtcgtgggcctcgcacccggcgtgcgcgccgcgcgggtacgtgcactacctgcgcctcttctactgcgccttcggcggcgcgccgtggctcggggccgccgcgctcgcgctctggctgctgctcctcttctacctcctcggtgacaccgcgtcccagtacttctgcgccgcgctccagggcctgtccgccgcgctgcgcctcccgccggccatcgcgggcgtcacgctcctgtcgctgggcaacggcgcgcccgacgtgctctccagcgtcgtcgccttcgcggcggccgacgccgacgccggggacgtcgggctcagcagcgtcctcggcggcgcgctcttcgtgtctaccgtcgtcgccggcgtcgncgccatcgtcgcctcctcgtccgggacccgaggaggccccgtcgagatcgagcgcgacgggttcgtgcgccgacaccagattcctcctcatcgcgctctactacctccccc

SEQ ID NO: 72017 - DNA, 686 bp, Zea mays
  Clone ID: MRT4577_165681C.1
gcaggttgcaccctaacaaactcggctagccatcgggagaggaaagcgctctcacttccccatccttcctccgtccacaccgcagccactacagatagatacgccatcccacgaggtcaactcaagtcccctttccttctccaccacgatgagcggcggcgctgccagcggcagcggcagcggcggcgcgagcttccagcagcacgcgaagcggcggcggccgcccgctgggccgcagcggctgacgctgtcggtgcaggacgccgacgccgacgacgcggccgcggccgtggtcccgcccgtcaccgtggtcctggacgggcgctgcatctgccaccgcgtccacctcaaccgccacacggggtaccgcagcctggcaggcacgctccgccgcatgttcgtcgactccgacgacgactccgaccagcagcagcagcagcagcggcggcgcgccgaggacgacctcgacctcgccaatgccgtcccgggccacgtcgtcgcgtacgaggacatggaggacgacctcctcctcgccggcgatctcaagtggaactcgatcgatttactctctcgatggtgtgcatgattgcatcgcagcgattttgttcgcgtcgccaaaaggatccgtatcatccctgccaagaagacgacgtcgtcgtcaagccgcggcaacaaatgcggaggag

SEQ ID NO: 72018 - DNA, 850 bp, Zea mays
  Clone ID: MRT4577_165682C.1
acctcgaggcgggccggagaaaagaagtgggaaagccgaccaatccgccttgaccgttggcggctcggcggcatcccaaaccagacgccttcctcccatcccatccctcggctgggctggccaagccaagcaaccaagcgggggtgtcggtccgccgagcggagggcgagcatggtgagggccctcgaccgctactcctccggctccggcaaggatgtcgcctacagctgtggatactgcggcttcgcgttgaacttgagctcctccacgcggaacacggccaacattgggtccaagtacggcaagcacatcaggaaaggcgtcgtctccttcttcgcgatcgacgagagccgcttcacgcaggccgacgaggtgagctgcacgccgtacttccgctccagccgttcgtggggcttcttcaggaacaggacgcggctgctctgccggaagtgcggtggccacactggttatgcctacgaagacgagggtcccgccctgcgcgacgaggggccagcagatgacctggacatgagctccagctccaggggaagcagcacgtcccctcggaagaagtatgttatcaagatcagtgcgctgcggccgttatcagacgactctggtgctctcctctccccgtgatggcgatctggattctgagctgcagccatgtgtaaattaagggatagtggttctcttcagttacttcgtgagcagaatttttttggtttattgtacgttacaagttacatcatgttcatatttattttgtgtaataaggtgtggttgatgtaatatcttgggttatgatagtcatggagatatagacatctagctttagcattgatggtcc

SEQ ID NO: 72019 - DNA, 103 bp, Zea mays
  Clone ID: MRT4577_165683C.1
gtagttcctgtgttcaaaccaggttagctcctcttctcagtcgctaggtgttctgcctttgtgctgcgcctgccaaccctattttctggtgaacacacccacc

SEQ ID NO: 72020 - DNA, 150 bp, Zea mays
  Clone ID: MRT4577_165684C.1
cagactgcagacatgatcacgaggtgagctgatggcatggaccatgacttccagattctgacctatgcaaggaaagaagacacgactcagaggactaagaggcttcggtttcacaagacagatggttattcgctgtgactcgctgtatga

SEQ ID NO: 72021 - DNA, 1403 bp, Zea mays
  Clone ID: MRT4577_165685C.1
attgggtccctcgaggccggccggagcgatggagctaccgatgcagtcagtctccagcttgctgctcgccggtccttcgcctagctcgccggaagccgcggagacgacgccgccaccgatgcagccgctacaatgtcaacatgagcgattggtgggcaacatgtgcccttctctctatctcgccgtctacagagggcggatagcggacgtcacggcgctgcttctggaacaacccgccgttgcaatagattgtcaagccactaccacgccgggtattaagggcactgctattatgcacggacagtgcgacatacttgagttgacagcggagaggaacaccgctctacatgtggctgcggagcaagggcaccacgagctgatccgggagctctacttcaggttctcagaccagggcctcctcaatcgcctgaactcggcgctggacacgccgctgcattccgcggcgagggcagggcacgtcagggcagtcgctgttctcttcgagctggcgagggatcgtggcgtgaacattctgggatgcaaaaatgaggcaggggacacggccctgcacctggcggcgaggcacgggcacggtgcagcggtggaggtcctgatctcggcggcggcagaaccggcggccgagctgaacaacgccggcgtgtcgcctctgtacctggcagtaatcagcggctcggtgcaagcagtcagagcgattaccacgtgcaaggacgcatcatcgctggggccaggcgcacagaatgctctgcacgctgccgtcttccagagctcagaaatggttcacctgctattggaatggaggccagctctggccgaccaagtcgacagcggcggcagcagcccgctccatttcgcttcgtccgacggcgaccgcacaatcgtgaaggcgatcctgcgtgcctcaccaccaagcacagtttacaagaaggactcggacggcctgtcggcccttcacgtcgcggcgcggatgggacatcgccgcgtcgtgaaggacatgctacggagctatcccgacgccgccgagctccgcgacggtaacggcggtaccttcgtccacgcagcagccagggagaggcgctcctcggtggtgtcgctcgctatcagcaactccatgctgcgcggcgtcctggacgcgcaggacagggacgggaacacgccgctccacctcgcggtggcggtgggatcgaccggcgacgtggaggccctgctacgggagggcaaggtgcgtgccgacgttctgaacaacgacggtcacacggcgttggatctcgccgccagatcgaacgccggtttcttcgccacgatcaacctggtggtggcgttagtcgccttcggggcacggctccggccgcagaggcaggaccgcctggagcagtggggcggcc

SEQ ID NO: 72022 - DNA, 1100 bp, Zea mays
  Clone ID: MRT4577_165686C.1
tctcggccgggctcttccatacatgtgggttctccatcagtgcaacatctggatgcttcgggttcatcttcctcgttgcatagtaaagccaatcgctcctctgatgtggctgtaaatcatgacatttttgatgattcggataaaggagggacagcccaatatatggttaatgttattacaccccaattcaacctacactctgaagaagcaaatggaaggtttctacttgctgcagccagtggtcgtgtactggctcgttcatttcattcagttgttcatcttgggaaagaaatactagaacaagcacttggaacaagcagtgcacagattcttgagttacaacctgaaatgacctggaacaagtcggaactctcggtgatgcttaaagatgttcaagctcatgtagcccccactgatgtggatcctggtgctggtctacagtggctccctaaggttctgggtagctctgagaaattgaagcgcacaggtgccttgttagagagagtgtttatgccttgtcaaatgtatttccgttacactagacacaagggtggaactgcagacttgagggttaaaccactgaaggagctacgctttaactctccagacattactgcaacgatgacctctcgccagtttcaagttatgtttgacgtgcttagaaatcttctattcgcaagacttcccaagcctaggaaaaacagtcttcagtatccatcagatgatgaagatattgaagaagaggctgacgaggtagtacctgatggagttgaagaagtggagcttgcgaaaattacactcgaacagagggaaagggaaattaagttactgcttgatgatataaggtctctcactggaaatggtgataatgggaccgatcactgtcattctgcagaaaaaggtgattgtttatggatgatcaacagcgggaaagcttcattggtggaaggactgaaaagggatttcgcaaacctacaaaagtctagaatatttgcatcatcagcattgaggaaagcactttcaaatgcttcacaatcacatttgtaaaaaaaaaaaaaaaaaagcggcctttgtgccatgcggatttctatgaaaattag

SEQ ID NO: 72023 - DNA, 423 bp, Zea mays
  Clone ID: MRT4577_165687C.1
aagcggtcgcccttttttaaaatttttatagcttattcattcaccattcccatttatcgggcgtgtatcacattgttaaacatatcacatccattctttattattacatttcatgcacccgacaatttttgaaaaaaaaaaaataattttttccccttccaaacaaacaaaaaaaaatggaaaactaatttcgtaatcttagtatacaacacacaatcatgtttccctttccttgatcctcttttcttcccccagaaaacgaaagaagcccactcatcgcctgaagagcttgtggataacttgctctcgggcctgacccgatcacctgttgacaatttcctccaacttctactggcacctccaaaagccggtgccgtataacctctaccacaccttctttttcagctccccctttttctccaa

SEQ ID NO: 72024 - DNA, 358 bp, Zea mays
  Clone ID: MRT4577_165688C.1
agtccgcaggcgagggtgggatggccaactttggaagcagcgggttcgcttttgacattgaatcttatatccacagccagcaactgcagtattctcaagagatggcctgtacagtcgacaaggctaatttggacccaccaattgtgccacttttagttttaaagcatcttgtccacatgggttgtgaacagagcgtcaaaagcttctatcgtgctgccttcgggggttttgaaacggaccctcgtgtccccttttccgaaggtgacctcgtgaagctgctggaaagatcgaagataaaacgccgatttgtagacatggtggtaaatggcgaaatccaggcttgtttcgaagctttggc

SEQ ID NO: 72025 - DNA, 366 bp, Zea mays
  Clone ID: MRT4577_165689C.1
ctcagttttgctggaggccgcaaccaggcccgcgccgccaccatgtttcgagatcagtatgacaatgatgtcactgtttggagcccccagggcaggattcatcaaattgaatatgcaatggaagctgttaaacaaggttcagccacagttggtctgaaatcaaaaactcatgcagttttggttgcattgaaaagggcgcaatcagagcttgcagctcatcataaaaaaattctccatgttgacaaccatattggtatctcaattgcggggcttactgctgatgctagactggtatgtaattttatgcgtcaggagtgtttggattccagatttgtattcgatagaccactgcctgtgtctcgtctt

SEQ ID NO: 72026 - DNA, 325 bp, Zea mays
  Clone ID: MRT4577_16568C.1
ataggtcttttgaatggacgtgaccctgggcatcgtcggcgggcagatgttgattctacagacatccatgctggaagaagccaccggaagcagaatgcctatatctatgtgcagggagagcgcataggagcaaaacttctgcattataaaggcagcctagagggaaattatacgactgccgcgcgatcaacacaggccgtgtcagttaccaactactggttcaaggagcatgagttctgggctgacaggggcacttgtgggaatccttataagggatactatggtgccgcaatatcagccctgagtgcaactccaaatttcggtc

SEQ ID NO: 72027 - DNA, 467 bp, Zea mays
  Clone ID: MRT4577_165690C.1
ggagtggcaacgattacgtaacacattggttggtttttataaaaggtatatgaatttgaactaacatgagcaattgtgaaattgatacaattgaagtatcttatataacatgagttacatgtataaagaatcgctaatgatgtcaagacacatgcacctaccctggatgttttaaaaaaatgttgagcctgacattgacgttaatattggaacctaatccgaactttatttgactacattatagaactgagtggtgacaacacagcattgccatgatgtactcctttgtggctttagggtggcataactgacggaaatgcatgctagaaaactgttttttctgagcgccaaatctgatactgttcggttagagctgatacacgaagcctttcatcttatcaaagaccaccatggcttggataaacaaaacctggagctctacaatgattgtgtctgcgtgatacttg

SEQ ID NO: 72028 - DNA, 436 bp, Zea mays
  Clone ID: MRT4577_165691C.1
ctagattacgatcatagctggagcgctatgagaggtagaaagagggcagcgaattactagatgctggacaagctgtggtactacgtggcggctgctgctcgcccggagacgggcctggagaagctccgcatggccaccactcggcccgcccgatcgtatcaacaaatacgctgacggcggcagctacaagcgggcgcagatcgatgccgtctaccctgacgactgccggtgacgccgttgtcgctgaaacacttgaccaagccaaccaagatgcgtgaactagctgacctcccagtaacagcgggtgaggagaataatcataaccgtaatgggggtcatgatgatgtcacggatgaaagatatcttcctgaacatccacagcatgcgtgtatttgcttactatgtcctgagagcagcgatggatatatatacatga

SEQ ID NO: 72029 - DNA, 975 bp, Zea mays
  Clone ID: MRT4577_165692C.1
atgcctagtgtggatgatgatgatgactttgagccaccaaaaaagaagtgtagtatcaaaatggatgccccaaacaagacgcagagactcaacatcagatgcaacccaggagatgttcttgcgtccattcaaatactgaatgaaaggcaacgtcaagctatagtcagaaaaggtttctctagtattcttgacatgacaattgatgcaattggatgtcgaacacttctttgttggctcatgcagaagctagacccaagagacatgactcttcgtattggtccagacaaagaactaaaaaacaccaagcagactgtccatctaatattggctcttccaaattcgggtggacaaaaattgaggctaggcaacgatgatgagctctcaatcagatgtttttttatcctcttcaaccggctgcttttcccaacaactagctggtcgatttcttacaacgaggttctattggcagaagaattggagtggttccctcacattgattggtgccatctcattttcagtgacctatgtgaagctgtccagaaatggcacaataggagcactaataacatctcgacaacgatatacaggtgttccatcgctgttcttttgtattatttggaccacttgcaccatgtcgtagctcccaacaacaaaagtggcactccgtgcatcaagtattttaacaagaatatcataagggcgctgtcaatggctgataaacgtaagcctcgtcagggtggcgaaccatttggtttttgcccttttcggagcagcagtgagacctgttatgtctcaaaatcggcatctattggtcagctcgagtctacaatgaggccagaaacaggtgaggcagacccaaatgaacatggtcgacttcccaacataaacatccaacttcctcttatgcaagacctgatgtcaactaagatccaactgcttcctgtacatcaatgctccaagtccaagctaagttga

SEQ ID NO: 72030 - DNA, 171 bp, Zea mays
  Clone ID: MRT4577_165693C.1
gggcgcggtaatggagctggagctggaggcggcggcccggcgcttccacctctggtggggcgggctgcgctcgctgcgccgggacctggcgtcggcccggtggtcggacgacccgacggcccagctccccgcgcagggggcgcagaacgtggttctcgtggccattttcta

SEQ ID NO: 72031 - DNA, 238 bp, Zea mays
  Clone ID: MRT4577_165694C.1
agcggccttactactgcatgcgacgccctttcctttacactctttagaaatagttctcggggtgagccctacgctccaaggcattagatcttccatggaaagaagcagcacactaacaagcagcgtgtctgcacctgtcgtcacggaaatggaattgtaaaccattaaccttcagaatttctccatcgctactaatactcatgtttacgcaacagtggaatgtgtgatacctaataaa

SEQ ID NO: 72032 - DNA, 358 bp, Zea mays
  Clone ID: MRT4577_165695C.1
tctcgagttttttttttttttttttttttttttttttttttttttgaatcccaccgtttcgttttcagggggcccgaaatcgcatgaaagaaaaaaaagagagagagagagaaggcagagatagacggatcgcagagtttcagggttacatgctgcaaagagcggccggggaaacgcagctcagcatcaagggggggaaaaaacctcacgaccgccagaaacacagcctgggtgtggcaagcaccgccgtcctccgacgcttccagcgcgggggctcaaggggagcagccgcgaccactcacttttgccctcaacgtctcctcctttcccggctccctttttagggctccttcttcct

SEQ ID NO: 72033 - DNA, 395 bp, Zea mays
  Clone ID: MRT4577_165696C.1
aagggggaggctacctgcttaaactttagcagggaaaaaaaagacaaacgggatcacggtatcggaacagaattcacgaaaacagttaaaaactgaaaaaaaaaaaacggccctttgctaatccactttacaagggcaaaagttggggccctagaaacaaaaaaactggccctttgtatgaccaaacacaaaagggacaaacagaatgcttttttttctcgctgcagtttttaaaaccaccccggacggaagccgaaaaaccagttgccccccaaaaaacttttcaaaaagtagtagcaaaaatctgcaaggataaatgtctggacaaattcggaaaggaaaaccattgaaggccaaaaaccgtagcccaacgcaataaaaaatccccctggggg

SEQ ID NO: 72034 - DNA, 1184 bp, Zea mays
  Clone ID: MRT4577_165697C.1
cattgggtacctcgaggccggccgggactggcaccagagtcaccacagagccttaatccggttgcgggacacacaagcaggaaccagcagccatgatgatcaagctgaggtactccaagaggctcttcaagaggagctcctcctcgtccaagcagcaggcggcagctcgtggcgacgacaatggcagcgacggcagcgccggcgcaggggagatcgagtgggaggtgaggcccggcgggatgctagtgcagaagagggaggaggggaggggcggccaggagacggtcacggtcagagtgtccaccggcttctcctgccatcacgtgtccattggagccacctccacttttggggagctgaaggtgatgctgtccatggtgacaggactgaagacccgggagcagaggctgttgttcaggggtaaagagagggatgacaccgaccacctccacatggttggggtgagggacaaggacaaggtccttcttctagaggacccggcgctcaaggacattaagctccgggctctctcagcccaagagcccgggagctcgtgccagccttttattcaattgtaacccgcaccgcagcttgctatcgtgctaactattaccactgcttattagttacagagtacaagatcgtactactacttagtatctcgaaggtacttctagttcctggaagattttttataatccggaatccgagggttttgttctatgaagccctcttacttagtccactcgtactcttagtgccactccatggaaggggctaagggtccctgaagatgagagtgagagagccttttgatcatgttctagcttagcttgttgcaagtgtgatttgaagcctagtgcgctggggtttcttttatggtccctactactgtggccatttctttctcattcctctacattcatgcgtgggtcatggataggcatgagaaaagattgtacgtacgtatcttgtgttcctgttcccaatgaatggatggaaccaaacgtgtgtccctttccaaaatacaatcaaaaaaattatctttaccgttacttgaaaactaacaaatttttttttgaattcaaactgtgaactcaagaaattttgtttttttggcttggtggggccccctttataaaattctttttttacctactatttttttcccaagatagtttttt

SEQ ID NO: 72035 - DNA, 412 bp, Zea mays
  Clone ID: MRT4577_165698C.1
aattttccgaacaattctcttctcatatcttgtcgtccgatccccatttactaatccctcaactactcatcccgtatctatgtagtgcgggtgctggaacagaccctggggattatatctgcggaattggaatccgcgtgcgactgagcgcacctgcgattaccatcacgatccgtggaggaagggtaccccgcttggatgagcgctgccatggagggcgactacgactcgaacgcgaacaagaagcttcagcaaatcctgcggacgtacgagagtctatatcttaccgtggactgaaccgagagcacactggatttgcgcatttcctccaaggccatgtccctcccgaacgctgttctcagcgatatcttctcgcacctcgctgctgcggccgccaagatcgcgcggttat

SEQ ID NO: 72036 - DNA, 696 bp, Zea mays
  Clone ID: MRT4577_165699C.1
atgcatcagcaacagcaccaggagcggccgcgggaggtgtaccgcgagtgcatgcgcaaccacgcggcgaagctcgggacatacgcttctgacggatgctgcgagtacacccccgacgacggccagcccgcaccgatgctctgcgccgcctgcggctgccaccgcaacttccaccggaagacgttcctggacgccgcggcgggggcgcacggcgcgatgctgccctcccctgctggcgcctccccgggctacggcagtggcacgcaccacactgcgactactgcggccggcatgggcggtgacgccggcgcgcacggctccgggggcaggcggcggacgcggacaaagttcacggaggagcagaaggagtgcatggcgcggttcgcggagcggctcggctggcggatgcccaagcgggagcccggccgcgcgccgggggacgacgaggtgggccgcttctgccgagagatcggggtcaccaggcaagtcttcaaggtgtggatgcacaaccacaagtccggcggcggcagcggaggcgccggcgccggcgccggcggggccgctcagacgtcgtcgtccacgacgcgtggcggcgggagcggcgccgttggaggaggcgggagcatgtctccggcgatttgcgcggacgtcgaggacgacgaggaggtgatgaggggcagtggaatgtgcatgtag

SEQ ID NO: 72037 - DNA, 484 bp, Zea mays
  Clone ID: MRT4577_16569C.1
gataaaaccctgacctcttctacacgaggcctttattattccgccgaaattatgacaaaggcaaacacccacaacactgaccacagtttaccaaagcaacgttccgaattacatgagcaaacacaccacaacacatcacttaggtgcgaaataaagcaactggaagcctcacgcacgcacacttttcaagcagcatgtggtgaaggactcaactctgtgggtgatagagcacacatgcatgcagctgcattcattcacatcacaaaacaaagctttttagagggggcgcacgtataccccaatggcgctcaggtagtccccggccccttcaacgcgcgcgaagaaggccacgatggcgccactccccggctgcacagggactgtaaaggaagtgacccagccgaccccgaacgctccaaaagggcccccagacttgttaaggttcatgacaaacttaatggacggtatcacagtgcggtcgaag

SEQ ID NO: 72038 - DNA, 515 bp, Zea mays
  unsure (1)..(515): unsure at all n locations
  Clone ID: MRT4577_1656C.1
atttcggcacgagggagctgggcttggttgcgtccgcgcgcgcgcacaccctctctctctctctctctctctctctctctctctctgctgtgcccgcggctattaagcccgttctggatgagtcggtgagggaggacgacgaggagagcctgttcttcggatcgctgccgagggtgctgcnggggtgcgacagagaggtggtggnggngacggtgtcagggcgggagggagggggcgcccctggcggagaggaacaaanaccacnacgggggggggcgtcanggtcntgttggggcctcgcctgggtgcccagggaggggcctgggcngcgcggggggttggggggggggtgggggggttttgggggtggcgggggggttgggctggtggtgggcggggggtgggtggggggcggggtgtggtggggggggggggggtgggtgtttggggtggggtgggggggggggcgcggggtgggtgtggggggggggggggcgggggggtggggagggggg

SEQ ID NO: 72039 - DNA, 838 bp, Zea mays
  Clone ID: MRT4577_165700C.1
actttcgaaaaaaagaaatcccaccccgaaccctacgttctcccacctctccatcgctctctccctgatccccgccgccgccatccccgcccccgaatcgccatctacctctatccaccccgcgcgccggcgccgccgcgaccctcgcacctccccacgcgccaccgccgctctacctctcccccacccgagtctggcttcctaccgccgccacgcggatctagccgccgcacaggatcccgccgccgcgttcgtcgcttgctgggcccgacgacgcgtcgaaagccaaaccgtccgtgatctccggccaacgaggcgcgacgaccacccctccccctgtttccacggtgctcgacccggttgcccgtcgccggcgctcctcctccccgaccccttcttccctgatccaccccgcctccacctccggtgacgcggtccactagcctccttccccggcgtgagccaccagcccgaccctcgccggcgtgatgcccctgcgcgctgccgtggcacaggcccccacaagagatccagccgcgacgtactgctcaaaagcgaaggacagcaatgagattctctccttcggcgccagcgtcgtcgttctcggctacctactgcgtcaaggacattcataggccatgaatccagcgggtgctagcacgtcggaagtggtgttgccacgttcaacaaaaatattggaagcaattccgccgatacatgcgtggaaggaaaacttcgtatgagcagaagtcacaccacccctacagcgagtctccggcttctcagggagtcgatgaggtcacctgggctccagtaagaaagatgacaggttcagcaa

SEQ ID NO: 72040 - DNA, 240 bp, Zea mays
  Clone ID: MRT4577_165701C.1
ctatgattggagatattctatgtgacctttgcaggatgttggagctcagaaatgtcaatctagatcaagtcaagctgacttgatggtttatgagtccaacataaatctcaatcatgccaaatactaaagaagtgaaaatcaaagagaaggtatgtttcgagacttagtacattggtttttgtgtactaatatatttgtctaagtattagaaacagagaaaagaagaaaagagatacaaaa

SEQ ID NO: 72041 - DNA, 309 bp, Zea mays
  unsure (1)..(309): unsure at all n locations
  Clone ID: MRT4577_165702C.1
gtttgggttttttttttttggggcncctcttttcagggggggcccttattagaggtcatctggccaagatccttccaacaaatttacaggccttcacagaagccttgttccggggcctatgaaaatgcgcgcgccccccccccngttcggggtaagaagggccttatggctttccccccccgccaagatccccttaagccggccctggggcctttttaaggggggggcctttggggtccggcttttttttcggggggggggggccccatgggccccttcttcccgggttgggcgcccctgccccccccg

SEQ ID NO: 72042 - DNA, 525 bp, Zea mays
  Clone ID: MRT4577_165703C.1
agtaccaaaattaattgtatgtagcccgtcaactggtacaaacttcaacactcacggcgcccaatctgcagctgagtcacgactcacgagcatgcagttcatcgtacacggattcacactctctgattctgttgtaatgagttcaaatttacagctagagccgcagcatcccacaaagaatttggaaggaaaaaaaagaatatatctctatatctcattccgagagtttgttttgagctcttttcacgtttgattttttttcttcttctcatcttccttcttttgacacggaggacggaactccgatgaaatcctatggtatcagcggtgacctcccttttctgcttccttgtcgtcgttttagagctggccgcctcctccgtccgctttgatggcgtcatcgtcgattccccctcgccgccttttctcccatcgtctgatctgctcgtcgtcccagaatttcttctaaacttactcaagatggaggaaagagagggatagcacataatttcttctaaactcgct

SEQ ID NO: 72043 - DNA, 483 bp, Zea mays
  unsure (1)..(483): unsure at all n locations
  Clone ID: MRT4577_165704C.1
cggnacgcgtgggncgccgnagcccaacctgcacaagcgcgcgnaggcaggnatanagnanagnaggcggggagcaaaacaatggnnaggggaaagaggnnaggacgtgcgccttggnngcgccaactaagttcttcggagnncgccagcccatttcgggannnggcggcgcagnnggcgccgctttgacgacaaggnacttacaaggnagnncccccgccggcgcccgcttgtnttcgagcccggggnagctttcaagtccttggtcctttcttaccgcnngcgggcattcgcnncgagttcnngtcgccacctttcctctttccttctacnnatcaccattccttcnnaccgtcattggnngcgtcttccannagtccaccttccannagtgcgccaccnnngtcggcattccaggngcattcgcctttggtcctttcggnaggnannatgatctnntcgcgcttcgtcttactttgcacc

SEQ ID NO: 72044 - DNA, 189 bp, Zea mays
  Clone ID: MRT4577_165705C.1
cacgcgtccgttttttttttcgtccacgcgtctgagaaaagcctgaggcatacgttgaggaatcccagtcaggcaagcaaatggaagaaccaactgctgtcgccggagatgtctacccaatgatcaacgagcactgtttgatccaggaggagcactgtttgcctcgagtctgtgttagccgcaagtgcg

SEQ ID NO: 72045 - DNA, 316 bp, Zea mays
  Clone ID: MRT4577_165706C.1
ggctatccaatagctcatcgactccagaatgcataacttgacaccatgatggcgctgatcggtgacctagctctcgtggagctagcttgaagcgccacctgacgtacacgctgcggatgtgactgccaaacaccaccgtgacatataacggcttcatcatatatgacgcctgcgttctatctgcagacgaaacagcagtcgcagccatggcaataccccactggatcaccgcaagtaactccgtgccagccgtacatatgctgcagggtcaagcgcttctatagtccatttatgggccaatacgatcagattctga

SEQ ID NO: 72046 - DNA, 439 bp, Zea mays
  Clone ID: MRT4577_165707C.1
cggagatttcacaaacgccgagggcaactctcgaccgagcctgacagatcttcaattgatcattccgacgacctatcgaccttgacgccagtctcggtctcttgcgaaggcgtcccgcgcggctgttcgagaactgaggaggaacatgagagtgtgcatatccctacacagggggcaggtcgccatccaagactgcctcgcgtgctgggaactctactgctttgagcacgagatccagtctgatggccaactgcctggatataagacctctgcacatcacgatgatgtcgttagcaccatcttaatccagactggtgctgggaagcacgttccccgctctatctgcgatgatctagaacccactgtgatcgacgacgtgcgcactgtcacataccgtcagctcttacagcctgtgcaggtcagcagtggcaaggatgat

SEQ ID NO: 72047 - DNA, 785 bp, Zea mays
  unsure (1)..(785): unsure at all n locations
  Clone ID: MRT4577_165708C.1
ggtaccccttcgagtgcccggcccgggcccgggcccaattcccactctcgtcttgtgttgttcggagcgggcagcagcacacagccccatcccaatccttagtcgatcttcttcccctcctcaagcactcactgagcctcttgatatatatagtgaatggattgatgagtgtgagcgtgtcaacactgttgaaggcgacgatgatgcgtgagcttgccccatgtgttgaaactgttacctacaatcgtaatgtaatgtgctggtattctcgaatgccatagcccatagtcagccatggcttggaataacgtagtggctgactgatatgccagtaggcaccttatctagtacttacagaactacaaaaagtttgtactatacatatatggacaaccttataagtggctatgtgtgtacctatcctaacgcttatcccagatggtgtatcagcgtttttctgtgagattgttttcaaacaaggggttgttcattcattgggtcttctcagaaaaaagagaattatgctgcagtcaaccagatggccngntgttgtgccgacaatacagggtaaaccaaatgcaaccagaatataatctgcagcggaagatattcatagatacaattgttttcagttcattcaacgctgaaagcgntttcggtctggaggctgagctttggatcattggatgacactatgcagctttggcacctggagtaccgctcatttagttttcatcaagtcccgttcatttcttgtgcacattgctggagattgggagatcgag

SEQ ID NO: 72048 - DNA, 183 bp, Zea mays
  Clone ID: MRT4577_165709C.1
ggggtgggtatatttattggtttgttatacacataacccttgttttggaaattcataataacaaggggcttggttaattttggaccctggcaacaaacaaaacattggacttagccgaggttgagataaagcggtactattttcacatttggtcccctgaggttacaggggatattgatgatt

SEQ ID NO: 72049 - DNA, 2232 bp, Zea mays
  Clone ID: MRT4577_16570C.1
acggatgcatcataccagcactaaagcaccggatcccatcagaactccgaagttaagcgtgcttgggcgagagtagtactaggatgggtgacctcctgggaagtcctcgtgttgcattccactcaccagctcaaagctgctttagctagctagcaagagagagagagagagagaaaaaatatggctccactcgtcgctactgccacgatgaaccacgctgtggcccatctgctaggacccaatcatgagagtttctcacggcaccatctttcttcctcgctgcagcaaaacagtaagcgaaggtgtaatcttagcttcaggccacgagctgctgagagtcagaatggaagccaaacgctgagcccctcggaagtccctaaaagagactggttcccctctgacttcatctttggtgccgccacttcagcgtaccaaattgaaggtggatggaacgaggatggaaagaagccaagcacatgggatcacttctgccacactttcccagattggatagcggatcacagcaatggggatgttgcagcagattcgtaccacatgtacaaggaggatgtcagattactgaaggaaatagggatggactcctataggttctccatctcttggtccagaatactgccgaatggcacactcgaaggaggtattaatccatatggcatcaagtactacaaaaatctcatcaacttgttggtagagaacggcatagagccatttgtgacaattttccactgggacacgcctcaagcactggtagacaagtatggtggctttttagatgagaggattgtaaaagattacacagacttcgctaaggtgtgctttgagaacttcggtgataaagtaaacaattggttgacctttaatgagccccaaacgttttcttctttttcatacggaaccgggctatgcgccccagggcggtgcaccccaggacaaaaatgtgctaacccaattggaaactcgctcactgagccatacactgttggccataaccttctccgagcccacgctgaggctgttgatctttacaacaagtattacaagggtgagaatggacgcatagctccatgagatcattggcaaggagggcttgcatttgacgtaatgggtcgtgtcccatacgaaaagtcggcgtttacggatcaacaggccgaacaaaggtcctgggacattaacctaggatggttcttggagccggttgttcgtggtgactatcccttctccatgagatcattggcaagggaacgactacccttcttcactgacaaagagcaagagaagctagtgggttcctatgacatgttggggttaaactattatacctcaaggttctctaaaaacatcgatatctcaccaaactactcgccagtgctcaacactgacgacgcatatgccagtcaagaaacgaatgggcctgacgggaatcccattggtccttggatggggaattcgtggatctacctatatcctgaaggcctaaaggatctccttatgatcatgaagaacaaatacggaaacccacccatctacatcactgagaacgggatgggtgacgttgaccatggcgatctacccatggaagttgccttggatgaccacaaaagagtacattacctccagcgccacatcgcaactcttaaggagtcaagagacttgggagcaaatgtgcagggctacttcgcttggtctctgttggacaacttcgaatggttctccggctacaccgaacgttacggcatcgtctacgttgaccgcaacgatggctgcaagcgctacatgaagcggtcagcccagtggttcaaagagttcaatgctgcgaagaaagcggctgccaagaagattcttacgccagcttagaaatctttgcgcctgatgtatggtacggtgccacgtacgcatgaaagactgggcacgtttttctttgcactatctgaggaggcagcatctgttctctccagcaccgtggattgttcccgccagttcagtatttccttattatgcaataaatgaagtgatcgatttccccttttcagtatcatgtaatgttgaattattatagaatatatctttttttttgtcaaacattgggaacaaaagctgctaactctaccatcaccggacgatgtgacgtgatacatatatatgtgcttcgacatatcatcatgtgcggtaaaaaaaaaaaaaaaaaaaaaaaaaaaaaaaaaaaaaaaaaaa

SEQ ID NO: 72050 - DNA, 845 bp, Zea mays
  Clone ID: MRT4577_165710C.1
cccattcccatctcgtcttgtgtcgttcggagcgggcagcagcacacagccccatcccaatcctagtcgatcttcttcccctcctcaaggaagaaaagaagctgaaccatggggaagagaaagtcagctgctaagccacctcctaagaagcggatggacaagcttgacactgtcttttcctgcccattctgcaaccacgggagtagtgttgagtgccgaattgacatgaagaatctgattggcgaagcatcttgtagaatctgtcaggaaaacttcagcacaactgttaatgcactcactgagcctattgatatatatagtgaatggattgatgagtgtgagcgtgtcaacactgttgaaggcgacgatgatgcgtgagcttgccccatgcgatgaaactgttacctacaatcgtaatgtaatgtgctggtattctcgaatgccatagcccatagtcagccatggcttggaataacgtagtggctgaccgatatgccagtaggcaccttatctagtacttacagaactacaaaaagtttgtactatacatatatggacaaccttataagtggctatgtgtgtacctatcctaacgcttatcccagatggtgtatcagcgtttttctgtgagattgttttcaagcaaggggttgttcattcattgggtcttctcaggaaaaagagaattatgctgcagtcaaccagatggccgctgttgtgccgacaatacagggtcattcaacgctgaaaagcggtttcgggtctggaggctgagctttgggatcattggatggcactatgcagctttggcaccttgagtaccgctcattagttttcataagtcc

SEQ ID NO: 72051 - DNA, 1345 bp, Zea mays
  Clone ID: MRT4577_165712C.1
gtacccctcgaaggcctggcccgggtttgttaaatattaatggtcgataataatatatgtattattcgtttttatgtaaaaaaaaaaaaaaaaaaaaaaaaaaaaaaaaaaaaaaaaagccggggcccccaatgcgcagtccgcgaggcctcctcaccgcctccggctaccttgcgggccggcacgctccgtcgccctccgtgtccaccactggccacaactccctactcgctcgcaccttccaaatcctagcccagccggagtccgtccgtctgcagaagcacccggcacccaactccgggatcttagagctgaggctggagcggccggaagtcaagaacgccattaattgggatatgatgaggatgctgcggagcgccatagagaagattcaggccgacacgacggcgaaggtcgtccttgttgcgagctccgtgccgggggctttctctgcaggcgccgatctcaaggaaaggaggctaatgagttcttctgacgttggggggtatgctagatccttgaggtctacattttcgtcttttgaggcacttcctattccaacaattgctgtcattgaaggagctgcccttggtggtgggctagaactggctttggcatgcgatcttcgaatatgtggagaaaatgctgaacttggactgccagaaacaagccttgctattatacctggagctggaggtacgcaacgccttcctaggatcatagggaggtccagagcaaaggaactgatattcactggccgcagatgtggtgcagctgaagctgtaacgatggggttagcaaactactgtgttccagcaggagaggcttaccagaaggctcttgacattgcctgtgagataactcagaagggtcccatggggataagaatggcaaagaaggcgatcaatgagggggcagaggttgccgacatgtcctcggcgctggctatcgaaggggagtgctacgagcagctgctttacacgcaggatcgcgttgaggccctagctgcatttgccgagaagaggaagcctgtgtacacaggaaagtagtagtgtcagaaaggatgataatcgtcttgagagtctgctacaagcagagatggtggcaatggataccccaaatccatacatccaatagccgggtgtggaataaattctttatcatagatacgttaatgggtacaatattatacccatcggtagacgggtgcaagatggatgcgggtatagatatgtattagctatctatgggtaatttttacccacctcatctatatatataatctactcaattaagtacaaaaaaaaaaaaattagctaaaaataaaatcaacttacatatctct

SEQ ID NO: 72052 - DNA, 822 bp, Zea mays
  Clone ID: MRT4577_165713C.1
cccattcccatctcgtcttgtgttgttcggagcgggcagcagcacacagccccatcccaatcctagtcgatcttcttcccctcctcaaggaagaaaagaagctgaaccatggggaagagaaagtcagctgctaagccacctcctaagaagcggatggacaagcttgacactgtcttttcctgcccattctgcaaccacgggagtagtgttgagtgccgaattgacatgaagaatctgattggcgaagcatcttgtagaatctgtcaggaaaacttcagcacaactgttaatgcactcactgagcctattgatatatatagtgaatggattgatgagtgtgagcgtgtcaacactgttgaaggcgacgatgatgcgtgagcttgccccatgcgatgaaactgttacctacaatcgtaatgtaatgtgctggtattctcgaatgccatagcccatagtcagccatggcttggaataacgtagtggctgactgatatgccagtaggcacctgtctagtacttacagaactacaaaaagtttgtactatacatatatggacaaccttataagttcaagcaaggggttgttcattcattgggtcttctcgggaaaaagagaattatgctgcagtcaaccagatggccgctgttgtgccgacaatacagggtaaaccaaatgcaaccagaatataatctgcagcggaagaattcatagatacaattgttttcagttcattcaacgctgaaaagtggtttcggtctgggagctgagctttggatcattggatggcactatgcagctttggcacctggagtaccgctcat

SEQ ID NO: 72053 - DNA, 4696 bp, Zea mays
  Clone ID: MRT4577_165714C.1
atgcccgccagtgccgccaccaccacaaccacctcctccgcggctccctctccctcgttgttgccgtgcttgcatgtccatgcacacggcagggcctcggctgcggcggcctgctgcctactcgtgctcgtgactttcctggtggtggccgcctgctggtgggaccccaggacgcgagaagcttccagctggttcctgtcgccgccgcggtctgccccctcttccttctcgtccttgacgagtgccggtggagttggcggtggtggcgagcacctattggccaccgccagctcgtactactccgccgccgccggcttcaggaacagcactggcaaagaggtgcaccaggaggtccggggtcatggtggtgatgatcgtggcttcctctccttcgtcaactccagcttcggctatgacgaagcgccgccgccatccgcaccggctccggcgtctccagtgacgggaggctcagatgaggtgataatccagtccacgccgccacaggttgagaggagaagagacgacgtgaaactggagcgactagagcttggcctcgcgagagctcggtccgcgataatggaagccatcaggaagaaggacaaggtatctccgttgcctgacaaggactacgtgccgatgggaccggtgtacaggaacgcccacgtgttccacaggagctacctggagatggagaggcagctgaaggtgtacgtgtacgaggaaggcgagccgccggtgttccacgacgggccgtgccgcagcatatactcgacggagggcaggttcatccactccatggagacggagacggaggcggaggagggccggcggctgcggacccgggacccggcccgcgcccacgtcttcttcctcccgttcagcgtcgtcaagatggtgcagacgatctacgagcccggatcgcgcgacatggccccgctcaagcgcaccgtcgccgactacgtccgcgtgctctcctccaagtacccctactggaaccgcagcctcggcgcggaccacttcatgctctcctgccatgactggggcccgtacgtgtcgtcggcgaacgcgcagctgttcggcaactccatccgcgtgctgtgcaacgccaacacgtcggaggggttcgacccggccagggacgtgtcgctgccgcaggtcaacctgcggagcgacgcggtggagcggcaggtgggcgggccgtcggcgtcgcggcgcccggtcctggccttcttcgcgggcggcaaccacgggccggtccggccggcgctgctggcgcactggggccccggcgggcggcggggaggcgacccggacgtgcgggtcagcgagtacctgccccgcggcggcggcgcgccgtcgtacgcggacatgatgcggcgcagccgcttctgcctctgccccggcggctacgaggtggcgtccccgcgcctggcggaggccctgtacctgggctgcgtccccgtcgtggtggacgacggcgagtacgcgctgcccttcgccgacgtgctcgactgggacgccttcgcgctgcgcctgcgcgtcgccgacattccccgcctcaaggagatcctggcggccgtgtcgccgcggcagtacatccggatgcagcgccgggtgaggatggtgcgccgccacttcatgctgcacggcgggccgccccgccggcgtcatgcgtgtctgatctttgagtctagcgtgcgttggttgcattttgacacgaaggttggaggaatcttggtgggtcccagagacgccggcgccgccgctatacaaaattacaggcacgacgacatccatcgcagtcacccacgagcccaacaaaccactcccacccggtggctcgtcctcggacgccaagccactccgcgccccaatccggaagcgccgccgccgccgatcgaccggccgtcgacccatgctccgctcggcgctcttccgctcaggtacgcgcgcggcccagctgcaccccgtcgcgccggggcattcctttccctgactgaccgagcgactgaccccaccctcccgcacgcgcgcagcccccgggctccgccggtctccggcgacggcccacttatccaccgccgccgccgccgccgcagcgtggctctccaacggccctgcctccgccccggtacgtgcccgcggctcctccccgtcccccagtcggttctctgcttctgtctgattgcgcgtgctgcgctcggcacctcgtcccgcttgacttctcgcattcctcctccccagtctagggtgcgcctcctcatcggcggggagttcgtcgagtcgcgcgccgacgagcacgtcgacgtcaccaaccccgcgacgcaggaggtggtgtcccggatccggctcaccactgagttcaaagctgccgtcgatgccgccagcggacggccttccccggctggcggaacacgcccgtcacgacgcggcagcgcgtcatgttcaagttccaggagctcatccgggctaacatggacaagcttgcagagaacatcactacggagcaggggaagacgctaaaagatgcttgggcgacgtgttccgcggcctagaggtggtggagcatgcttgtggaatgggaacactgcaaatgggcgaatatgtatcaaatgtttctaatgggattgacaccttcagcattcgggagccacttggtgtttgcgctgggatatgcccatttaattttcctgctatgattcccctatggatgtttcccatagcagttacgtgtggcaatacttttgttcttaagccatcggaaaaggacccaggggctgctatgatgcttgcggagctagcaatggaagctggtttgcctaagggtgttttgaacatcgttcatggcaccaatgatgttgtcaataatatttgtgacgatgaggatattaaggctgtatcttttgttggttccaatacagctggtatgcatatttattctagagcatctgctgcaggcaagcgtgttcagtgcaatatgggagcaaagaatcatgcaattatccttcccgatgctgatagagatgctacattgaatgcccttattgctgctggatttggtgcagcagggcaaaggtgcatggcattgagcactgctgtttttgttggcggttcagaatcatgggaggatgaattagtcaaacgtgcaagtggccttgttgttagttcaggaatggttaatgatgcagaccttggtccagtgatcagccgacaggcaaaggatcgtatctgtaaattagttcaaagtggtgttgacagtggtgctcgtatattgcttgatggaagaaagatagtggttcctcgctatgaagatggaaattttgttggcccaaccattctggctgatgttaaaagtgacatggagtgttacaaggaggaaatatttggtccagtgcttctcttaatgaaggcggagagcctagaagatgccatccaaatcataaacagaaacaagtatggcaatggtgcttccatatttacaacatctggcgtctctgccaggaaatttcaaacagacattgaagctggccaggtgggcatcaacgtgccgattccagtccccctgccgttcttctccttcacgggcagcaaagcttcattcgcaggagatttgaatttctacggcaaggctggcgtgcagttcttcacccagatcaagacgatcacgcagcagtggaaggagtcgccggtgcagcgggtctcgctctccatgcccacctcgcagaagtgagacgtcaaaggacgctcacgccactctccaaagctccactcctctggacatagacccacgcatggccacaagagaaggataattggtaggcatggcgacactccatgcacggccatgatactagtgtgtgctcgctttgctcttttgtctggacatcttgcatgcgcattcagaacatccaatgacgaaggtttagatatatgtgagcgctgcccattatgctgttaggattactgtaaaagccccaggtcctttgatcgagtgtcatgtgtaaacccacaataagaggagaaataaaaatgtcgccgtgctggtttgtggcataaaaaaaaaaaaaaaaaaaaaaaaaaaaaaaaaaaaaaaaaaaaaaaaaaaaaaaaaaatgttcttcctccctcccgggtcctccctttttcttaactcccttctggaggcgggggtcgtttccttttctctccctcttccctgtgccgggttacaaactaccgtccattcttcgcttcctctgtcctcgtggtctctgtctccggttttatgctctgcgcgtgcgttatcttgctccgtggctattgttgtgtgcaacatcgtctcgctcttatatccgttacattcttatctctttccctttctgttctctttgtaattttatttttcttcggtcaactgttctgtgttatcttcctcgtttccccttcattttgtttttttcttagtgtttttattatccactctcctcttcgcagcgtctacccctttcactccttacccttctcttctctccctatttccccacccccacctaattttcatcttcttcatacctctctgccttagtccacctattgtcctttaacagttatttgcatgcttgtggagcggcttatttttctcctatagtagtttgtaaacgctacgttctgttgcacttccccgtcgattacgctcgaccaatataacataataatt

SEQ ID NO: 72054 - DNA, 1894 bp, Zea mays
  Clone ID: MRT4577_165715C.1
gccaacatgtttccaaggtattggaaagcgtgtgaaactaccactgaacaatttattttatctccatctattttatctgttcctatagttatttatatttaacattttgtaatatgttagtctatgaaattgtgtcatgaaactcttcatcaaaagagcatatttcatgctttatttcatcttactctggttgacgtggtgacattggaaatggtgtgataaagctaccactgaggccttactatccatttcgtgctcatctatgctgttgttatttatttttattacttggatggtagcatgctgctgctgtttgctgattctgcggtacctatgtggctatgtgattagcatgcatatctgtttcttgttgcttactgttccttattcctcccttggtctactgagactatgttcaacggtgcacccttggctccccctcccctaacactgtagccgatttaggggctacagtgtgcccctatccccttcaccggcttcctcctcctcctcctctcgcctcccgattccttctctctcccgctaaatggatgggcacgctacgccggatttctcccccgcagccggttccttcgtccacacgaccgcgcgctcggaaaactccgcggagggcgaaggaggcgaaccaagggcgacgtatccgccgccggagaaggtagccctcgatccgccgtctcccgcgattcgtttgtcttgcgacagctgggcgaccgtcgtcgccgccgcccttctccaggtgcccaggtcttcgccggtccctttgccgcctccttgccgccgacgagcaccagccaggaagaaaagaagctgaaccatggggaagagaaagtcagctgctaagccacctcctaagaagcggatggacaagcttgacactgtcttttcctgcccattctgcaaccacgggagtagtgttgagtgccgaattgacatgaagaatctgattggcgaagcatcttgtagaatctgtcaggaaaacttcagcacaactgttaatgcactcactgagcctattgatatatatagtgaatggattgatgagtgtgagcgtgtcaacactgttgaaggcgacgatgatgcgtgagcttgccccatgtgatgaaactgttacctacaatcgtaatgtaatgtgctggtattctcgaatgccatagcccatagtcagccatggcttggaataacgtagtggctgactgatatgccagtaggcaccttatctagtacttacagaactacaaaaagtttgtactatacatatatggacaaccttataagtggctatgtgtgtacctatcctaacgcttatcccagatggtgtatcagcgtttttctgtgagattgttttcaagcaaggggttgttcattcattgggtcttctcgggaaaaagagaattatgctgcagtcaaccagatggccgctgttgtgccgacaatacagggtaaaccaaatgcaaccagaatataatctgcagcggaagatattcatagatacaattgttttcagttcattcaacgctgaaagcggtttcggtctggaggctgagctttggatcattggatggcactatgcagctttggcacctggagtaccgctcattagtttttcatcaagttccgttcatttcttgtgcacattgctggagattgggagatcgagatcaagactgtacacatcataaaccgatcagtctattctttgttgtgtacacctgggttgtctttgtgcctgtggtctctgccaggagggtgttcttcgaagtttgaagtacatgtggtttgtgtcttaatgcagttcggtttcatggacgggttgtcaagtgttttaccaggaacagttgtcggtgcagcagtatgcttaatcatgaataaatga

SEQ ID NO: 72055 - DNA, 300 bp, Zea mays
  Clone ID: MRT4577_165716C.1
cgatcttgaattatctaaagcggtggccggatgacgatctcgccgaagcgatagattaacccggacgcgtgcctgcatgctagaccacattccctatagtgcgccgtgttagactcagtcgaagcatggtcatatgctagaccatgtgcgaaatagctatgagcttacgaattctatagccacatacgagcataccatgtgtctagggcctgtgagaaaaccaggctacacatctccaggggaacggctcctgactctatggactttgacccaccgtactttgcagggctgggggggctg

SEQ ID NO: 72056 - DNA, 329 bp, Zea mays
  Clone ID: MRT4577_165717C.1
attaaaaaacagtacgtatatgtatgggtttggcatgacaaaaaaaaaagaaaaaaaaaactcggggttgaggctttgacagatttttccaatcgggcagtcacaagtcatgggtgggggtagagctcacgagtagaactgggaggttttcgcttccattattatttgccggagccctccgatgggcgacagaatcatcaggagccccccaagaatgatgcacatttgatgaacacagaggggcatcttttgttgatatataagccgagaaatgaacccagagaagataatggggtattcagttcttacccagttggtcaaccaggaga

SEQ ID NO: 72057 - DNA, 620 bp, Zea mays
  Clone ID: MRT4577_165718C.1
atttggtccagtgcttctcttaatgaaggcggagagcctagaagatgccatccaaatcataaacagaaacaagtatggcaatggtgcttccatatttacaacatctggcgtctctgccaggaaatttcaaacagacattgaagctggccaggtgggcatcaacgtgccgattccagtccccctgccgttcttctccttcacgggcagcaaagcttcattcgcaggagatttgaatttctacggcaaggctggcgtgcagttcttcacccagatcaagacgatcacgcagcagtggaaggagtcgccggtgcagcgggtctcgctctccatgcccacctcgcagaagtgagacgtcaaaggacgctcacgccactctccaaagctccactcctctggacatagacccacggccatgatactagtgtgtgctcgctttgctcttttgtctggacatcttgcatgcgcattcagaacatccaatgacgaaggtttagatatatgtgagcgctgcccattatgctgttaggattactgtaaaagccccaggtcctttgatcgagtgtcatgtgtaaacccacaataagaggagaaataaaaatgtcgccgtgctggtttgtggc

SEQ ID NO: 72058 - DNA, 718 bp, Zea mays
  unsure (1)..(718): unsure at all n locations
  Clone ID: MRT4577_165719C.1
ccggccgggattcccaatctcgtcttgtgttgttcggagcgggcagcagcacacagccccatcccaatcctagtcgatcttcttcccctcctcaaggaagaaaagaagctgaaccatggggaagagaaagtcagctgctaagccacctcctaagaagcggatggacaagcttgacactgtcttttcctgcccattctgcaaccacgggagtagtgttgagtgccgaattgacatgaagaatcttattggcgaagcatcttgtagaatctgtcaggaaaacttcagcacaactgttaatgcactcactgagcctattgatatatatagtgaatggattgatgagtgtgagcgtgtcaacactgttgaaggcgacgatgatgcgtgagcttgccccatgcgatgaaactgttacctacaatcgtaatgtaatgtgctggtattctcgaatgccatagcccatagtcagccagccatggcttggaataacgtagtggctgactgatatgccagtaggcactttatctagtacttacagaactacaaaaagtttgtactatacatatatggacaaccttatgagtggctatgtgtgtacctatcctaacgcttatcctagatggcgtatcagcgtttttctgtgagattgttttcaagcaaggngttgttcattcattgggtcttctcaagaaaaaaaaaaaaaaagcggcctcgagctcag

SEQ ID NO: 72059 - DNA, 196 bp, Zea mays
  Clone ID: MRT4577_16571C.1
gacgcaggagctgtggtgcctcaatgtgccaatgacctagtgcgaggggatgtaccgccggcccaagcggccgaagcgcccaacgagagaaagggtcccgaggatcataactcccctacggagaccaccctttccacggcgaggaagacgcgggcgcaccctccctacgctgagatgagtgtacaggcgatcgcct

SEQ ID NO: 72060 - DNA, 745 bp, Zea mays
  Clone ID: MRT4577_165720C.1
gcgggcccgtacgtgtcgtcggcgaacgcgcagctgttcggcaactccatccgcgtgctgtgcaacgccgggacgtctgaggggttcgacccggccagggacgtggacgtgtcgctgccggaggtcaacctgcggagcgacgcggtggagcggcaggtgggcgggccgtctgcggacatgatgcggcgcccggtcctggccttctgccccggcggcaaccaggtgccgtccccgcgcctggcggaggccctgtacctgggctgcgtccccgtcgtggtggacgacggcgagtacgcgctgcccttcgccgacgtgctcgactgggacgcattcgcgctgcgcctgcgcgtcgccgacatcccccgcctcaaggagatcctggcggccgtgtcgccgcggcagtacatccggatgcagcgccgggtgaggatggtgcggcgccacttcatgctgaacggcgggccgccccgccggtacgacgcgttccacatgatcctccactccgtctggctcaggaggctcaacgttaggatcgcaacagctgaatgatgcacatgactgactgactcactgaccaatgtaacgatggatcttgcttacagtttgcaggcgtcatgcgtgtctgatctttgagtctagcgtgcgttggttgcattttgacacgaaggttggaggaatcttggtgtgcaagtggtttttgtaccctgtattatacactactaattaatacacacgctgtacaatc

SEQ ID NO: 72061 - DNA, 728 bp, Zea mays
  Clone ID: MRT4577_165721C.1
cctcgaggccggccgggccggggtacaatctcaataactcagtcccttccggccttccctctatctttcgctcgctctcggcgacagctgggcgaccgtcgtcgccgccgcccttctctaggtgcccaggtcttcgccggtccctttgccgcctcttcgccgccgatgagcaccagccaggaagaaaagaagctgaaccatggggaagagaaagtcagctgctaagccacctcctaagaagcggatggacaagcttgacactgtcttttcctgcccattctgcaaccacgggagtagtgttgagtgccgaattgacatgaagaatctgattggcgaagcatcttgtagaatctgtcaggaaaacttcagcacaactgttaatgatatagtgaatggattgacgagtgtgagcgtgtcaacactgttgaaggcgacgatgatgcgtgagcttgccccatgcgatgaaactgttacctacaatcgtaatgtaatgtgctggtattctcgaatgccatagcccatagtcagccatggcttggaataacgtagtggctgactgatatgccagtaggcaccttatctagtacttacagaactaaaaaaagtttgtactatacatatatggacaaccttataagtggctatgtgtgtacctatcctaacgcttatcccagatggtgtatcagcgtttttctgttaaaaaaaaaaaaaaaaaggcccctagggcc

SEQ ID NO: 72062 - DNA, 371 bp, Zea mays
  Clone ID: MRT4577_165722C.1
cggaccgcgcagccgagagggagaggaggaggaggaggtgccttccgcgagccgcacgggccggatcagccgccgcaggggtcgccttacagctacaggttgccgtcgcagatgaccccgcctcaggccgccgcggtgttctacagtccccagtacggcgggtactggtacccacctgattattcataccaacaggtgctacaacattactaccctcagatgtatggaccagcctctcattcagtaccaccctaccaaatacatggggtatatgcctagtggcccaagtccacatgctggaatttcaccgatgcagcaacccatgcgaccagcgttttttcacaagccacgggacagatggatggtttttt

SEQ ID NO: 72063 - DNA, 973 bp, Zea mays
  Clone ID: MRT4577_165723C.1
taattcggcacgagggtgccgccacgacgcacaaccacctcctccgcggctccctctccctcgttgttgccgtgcttgcatgtccatgcacacggcaggacctcggctgcggcggcctgctgcctactcgtgctcgagactttcctggtggtggccgcctgctggtgggaccccaggaggggagaagcttccatttgttttttaccgccgccgcggtctgacccctattccttctcgtgcttgacgagtgccggtggagttggcggaggtggccagcacctattggccaccgccagctcgtactactccggcgccgccggtttcacgaacagcactggcaaaaaggtgcaccaggaggtccggggtcatggtggtgatgatcgtggcttcctctcctgtcgtaactccagcttcggctatgacgaagcgacgccgtcatccgcacggcgacaccaatgcaatttcacgggaggctcagatgaggtgataatccaagccacgccgccacaggttgagaggagaagagacgacgtgaaactggagcgactagagcttggcctcgcgagagcacggtccgcgataatggaagccatcaggaagaaggacaaggtatctccgttgcctgacaaggactacgtgccgatgggaccggtgtacaggaacgcgcacgcgttccacaggagctacctggagatggagaggcagctgaaggtgtacgtgtacgaggaaggcgagccgccggtgttccacgacgggccgtgccgcagcatatactcgacggagggcaggttcatccactccatggagacggagacggaggcggaggagggccggcggctgcggacccgggacccggcccgcgcccacgtcttcttcctcccgttcagcgtcgtcaagatggtgcagacgatctacgagcccggatcgcgcgacatggccccgctcaagcgcaccgtcgccgactacgtccgcg

SEQ ID NO: 72064 - DNA, 1174 bp, Zea mays
  Clone ID: MRT4577_165724C.1
aagaagaaatgccccgcgacccacgtcccctccggccctccctctatctttcgctcgctctcggcgacagctgggcgaccgtcgtcgccgccgcccttctccaggtgcccaggtcttcgccggtccctttgccgcctcttcgccgccgacgagcaccagccaggaagaaaagaagctgaaccatggggaagagaaagtcagctgctaagccacctcctaagaagcggatggacaagcttgacactgtattttcctgcccatttgcaaccacgggagtagttttgagtgccgaattgacatgaagaatctgattggcgaagcatcttgtagaatctgtcaggaaaacttcagcacaactattaatggtatgccaaacctatgtataaaattgtaccggttgctcctaatttcacttctatgaactgtactaatttgcatcgaagaaagtttggtcccaaacaactcgtgaactcgttttcttattattgggctgatggacaaggcaacgtgaaatttttcatggtacctgggaacagaacatagcctacaaactgcagaaccattcccatttcatcttgtagtcttgtcttgctaataatggactttgtgggttgtctgttccctgtgtaattcatttgaccatgatagttcttgatcatgtgatatcatagaatgtgtcaaaaactgcatcacatcaaaattaaaactggatagaacactatacataggtaatagtagaattaaatgttaagaagtatttctttatgtttattttaattactaattgttttacgtgatgtcttttcttgcagcactcactgagcctattgatatatatagtgaatggattgatgagtgtgaacgtgttaacactgttgaaggcgacgatgatgcgtgagcttgccccatgcggatgaaactgttacctacaatcgtaatgtaatgtgctggtattctcgaatgccagtaggcaccttatctagtacttacagaactacaaaaagtttgtactatacatgtatggacaaccttataagtggctatgtgtgtacctatcctaacgctcatcccagatggtgtatcggcgtttttctgtgagattgttttcaagcaagggttgttcattcaaaaaaaaaaaaaaaaaaaaaaaaagggcggccgccaccgcggtgga

SEQ ID NO: 72065 - DNA, 442 bp, Zea mays
  Clone ID: MRT4577_165725C.1
ctttgtttttttttttttttttttttttttttttttttttttttttttttttttttttttttttttttttttttttttttttttttttttttttttttttttttttatttttttttttatatttttttttttattttatttttttataaatttttttttttgggggggggaaaatacatcctttccatgcaaaaaattttttttattaattaatccaaccttgaagcgctacattaaatcgttgcctcacttgagtcggattggtttggggggaaaaccattgtttcaaagccttccttatgtcttacttgttttaatagaggaaaaaggggaaatggcacttgcccggaggaccccgaaatggggctaaggtagggggagatgagaagaacctccttttaaggacaattattgggggcggcacccttttaaacaataaggg

SEQ ID NO: 72066 - DNA, 2383 bp, Zea mays
  Clone ID: MRT4577_165726C.1
gggtacccctcgaggccggccgggccgggcagtcacccacgagcccaacaaaccactcccaccctgtggctcgtcctcggacgccaagccactccgcgccccaatccggaagcgccgccgccgccgatcgaccggccgtcgacccatgctccgcgcggcgctcttccgctcagcccccgggctccgccggtctccggcgacggcccacttatccaccgccgccgccgccgccgcagcgtggctctccaacggccccgcctccaccccgcctagggtgcgcctcctcatcggcggggagttcgtcgagtcgcgcgccgacgagcacgtcgacgtcaccaaccccgcgacgcaggaggtggtgtcccggatcccgctcaccacggccgatgagttcaaagctgccgtcgatgccgccaggacggccttccccggctggcggaacacgcccgtcacgacgcggcagcgcgtcatgttcaagttccaggagctcatccgggctaacatggacaagcttgcagagaacatcactacggagcaggggaagacgctaaaagatgcttggggcgacgtgttccgcggcctagaggtggtggagcatgcttgtggaatgggaacactgcaaatgggcgaatatgtatcaaatgtttctaatgggattgacaccttcagcattcgggagccacttggtgtttgtgctgggatatgcccatttaattttcctgctatgattcccctatggatgtttcccatagcagttacgtgtggcaatacttttgttcttaagccatcggaaaaggacccaggggctgctatgatgcttgcggagctagcaatggaagctggtttgcctaagggtgttttgaacatcgttcatggcaccaatgatgttgtcaataatatttgtgacgatgaggatattaaggctgtatcttttgttggttccaatacagctggtatgcatatttattctagagcatctgctgcaggcaagcgtgttcagtgcaatatgggagcaaagaatcatgcaattatccttcccgatgctgatagagatgctacattgaatgcccttattgctgctggatttggtgcagcagggcaaaggtgcatggcattgagcactgctgtttttgttggcggttcagaatcatgggaggatgaattagtcaaacgtgcaagtggccttgttgttagttcaggaatggttaatgatgcagaccttggtccagtgatcagccgacaggcaaaggatcgtatctgtaaattagtccaaagtggtgttgacagtggtgctcgtatattgcttgatggaagaaagatagtggttcctcgctatgaagatggaaattttgttggcccaaccattctggctgatgttaaaagtgacatggagtgttacaaggaggaaatatttggtccagtgcttctcttaatgaaggcggagagcctagaagatgccatccaaatcataaacagaaacaagtagtatctttctccccgatgcttgtagatctgaagcattcattgcaatctggtataaatatctattcgtccatgtctgcaggtatggcaatggtgcttccatattatttctacggtacacccttctcatcacaacatctggcgtctctgccaggaaatttcaaacagacattgaagctggccaggtgggcatcaacgtgccgattccagtccccctgccgttcttctccttcacgggcagcaaagcttcattcgcaggagatttgaatttctacggtacacccttctcatcctaacaccgcctgatccttcccaaacagttcgtgagtgactaacacgatggcatgggatgggatgtcaggcaaggctggcgtgcagttcttcacccagatcaagacgatcacgcagcagtggaaggagtcgccggtgcagcgggtctcgctctccatgcccacctcgcagaagtgagacgtcaaaggacgctcacgccactctccaaagctccactcctctggacatagacccacgcatggccacaagagaaggataattggtaggcatggcgacactccatgcacggccatgatactagtgtgtgctcgctttgcttttttgtctggacatcttgcatgcgcattcagaacatccaatgacgaaggtttagatatatgtgagcgctgcccattatgctgttaggattactgtaaaagccccaggtcctttgatcgagtgtcatgtgtaaacccacaataagaggagaaataaaaatgtcgccgtgctggtttgtggcatctctcacacccatttccgttcatctctttggcttccgtcctgttgtcgggtggctggtgtggtgtgtgtgtggaccaaatttattcataagcataaaattcagttttcc

SEQ ID NO: 72067 - DNA, 881 bp, Zea mays
  Clone ID: MRT4577_165727C.1
cattgggtacctcgaggccggccgggattcccaatctcgtcttgtgtcgttcggagcgggcagcagcacacagccccatcccaatcctagtcgatcttcttcccctcctcaagctggttccttcgtccacacgaccgcgcgctcggaaaactccgcggagggcgaaggaggcgaaccaagggcgacgtatccgccgccggagaaggtagccctcgatccgccgtctcccacgattcgtttgtcttgcgacagctgggcgaccgtcgtcgccgccgcccttctccaggtgcccaggtcttcgccggtccctttgccgccgacgagcaccagccaggaagaaaagaagctgaaccatggggaagagaaagtcagctgctaagccacctcctaagaagcggatggacaagcttgacactgtcttttcctgcccattctgcaaccacgggagtagtgttgagtgccgaattgacatgaagaatctgattggcgaagcatcttgtagaatctgtcaggaaaacttcagcacaactgttaatgcactcactgagcctattgatatatatagtgaatggattgatgagtgtgagcgtgtcaacactgttgaaggcgacgatgatgcgtgagcgtgagcttgccccatgcgatgaaactgttacctacaatcgtaatgtaatgtgctggtattctcgaatgccatagcccatagtcagccatggcttggaataacgtagtggctgaccgatatgccagtaggcaccttatctagtacttacagaactacaaaaagtttgtactatacatatatggacaacccttatagtggctatgtgtgtacctatcctaacgccttatccagatggtgtatcagcgtttttctgcgc

SEQ ID NO: 72068 - DNA, 461 bp, Zea mays
  Clone ID: MRT4577_165728C.1
ggaaaccgtttatttatgccttacttaattggggggaattcacacatccatttttggggaggcccgggttatttcatcggatataaattaatttcaagttctggggcagggaaaggaaaaagcggctagcttatatattataaccccacggggggcgtttgggcaacaatttcaacaaaaatgcggacccggttagggcaaaaatccggggtcaccacggagccgacgggcaacaccacaatgtcggcgtcgggcttgtccttgaggaaaacctttttggggtcctccacgctaagcccgaccaccttaggccacaactttttggggcccccgccgccgccgaactttggggagctaatggggtcccaaactgccggaccaattgacaatatgaacgaggggcaggaaaattttgcttgttccactgccgaacccgtgggcggacccctgggtcaaccccg

SEQ ID NO: 72069 - DNA, 1177 bp, Zea mays
  Clone ID: MRT4577_165729C.1
attgggtccctcgaggccggccgggcccattcccaatctcgtcttgtgtcgttcggagcgggcagcagcacacagccccatcccaatcctagtcgatcttcttcccctcctcaaggaagaaaagaagctgaaccatggggaagagaaagtcagctgctaagccacctcctaagaagcggatggacaagcttgacactgtcttttcctgcccattctgcaaccacgggagtagtgttgagtgccgaattgacatgaagaatctgattggcgaagcatcttgtagaatctgtcaggaaaacttcagcacaactgttaatgcactcactgagcctattgatatatatagtgaatggattgatgagtgtgagcgtgtcaacactgttgaaggcgacgatgatgcgtgagcgtgagcttgccccatgcgatgaaactgttacctacaatcgtaatgtaatgtgctggtattctcgaatgccatagcccatagtcagccatggcttggaataacgtagtggctgaccgatatgccagtaggcaccttatctagtacttacagaactacaaaaagtttgtactatacatatatggacaaccttataagtggctatgtgtgtacctatcctaacgcttatcccagatggtgtatcagcgtttttctgtgagattgttttcaagcaaggggttgttcattcattgggtcttctcaggaaaaagagaattatgctgcagtcaaccagatggccgctgttgtgccgacaatacagggtaaaccaaacgcaaccagaatataatctgcagcggaagatattcatagatacaattgttttcagttcattcacgctgaaagcggtttcggtctggaggctgagctttggatcattggatggcactatgcagctttggcacctggagtaccgctcattagtttttcatcaagtcccgttcaatcgagatcaagactgtacgcatcataccgatcagtctattctttgcagtagaaaataagcagcagcaggtacacctgggttgtctttgtgcctgtggtctctgccaggagggtgttcttcgaagtttgaagtacatgtgatttgtgtcttaatgcagttcggtttcatggacgggttgtcaagtgttttaccaggaacagttgtcggtgcagcagtatgcttaatcatga

SEQ ID NO: 72070 - DNA, 311 bp, Zea mays
  Clone ID: MRT4577_16572C.1
cccacgcgtccggttaactttacacaaaggtgtcgtatcctgcaactttcaaactgctggggatctactcaagatcgggttgcttggcactaatctgcctgggcgcgcacatatcgatagtgttaggaagaaaggtatgagtgctttagagttatgaagtatgaccactaagctgtacatgcttacaaacaaggtgaacgtcctcaacatggtcaccattgaactcaacagttggactgacaagatctggaacagcagcttccatgattgcaatatttactataccgactcgatgcatgtcctgctgaagg

SEQ ID NO: 72071 - DNA, 205 bp, Zea mays
  Clone ID: MRT4577_165730C.1
gggaaccaaaaggaggaccaaatagcaggaataaagggcagccccaggggggacatcaccagtaaaacaagcccctaaaacaacacatcagacctttttttaaacctgtccgcccgcccgccggggctacttgaagccggcgggcctgggaaaaacccttatggaaaaggaccctggggcccgaaaccacccgttccaagccatc

SEQ ID NO: 72072 - DNA, 997 bp, Zea mays
  Clone ID: MRT4577_165731C.1
gggacagctcctgtcctgtgtctgtgaccctctgtgtgctgtgtgcagaacatcacaagtcaagcaaagcaatggccaccaagatctacatcgtgtactactcgacatggggccacgtggcggcgctggcggaggagatcaagaagggcgcggacgcggtggccggcgtggaggccacggtctggcgcgtggcagcacacgctgccggaggaggtgctcgggaagatgggcgcggcgccggcgcgcgaggaccacccggtgatctctccgcggcagctggcggacgccgacgccgtgctgctgggctttcccacgcggttcggcatgatggcggcgcagatgaaggcgttcctggacgccacaggcggtctgtggcagggccaggcgctggcggggaagcccgcgggcgtgttcctctgcacaggcacgcagggcggagggcaggagaccaccgcactcaccgccgtcacgcagctcgcgcaccacggcatgctcttcgtgcccgtgggttacaccttcggcgccggcatgttcggcatcgatcaggtcaggggtggcagcccctatggcgctgggaccttcgccggcgccgatggcagcagggcgcccaccgaggtggagctcgccatggccagacaccagggcacctacttcgccggcatcgccaagaagctcaaggccggagcagcagccctcgctgccgaagccttggcctaatcagtcgtcatgactactcagacggtctttatttattccatgctttgttgtttctataattaataattggttttattattggcgacagaatagtaaagtacgtacttacgtattatgtactacatcagcttgtttgttcctatacatgatgtcataagtggctccatacaccaaaagatttgagtcgcacgtcataccaagactgcattgttgttactagtttgtttccccgggcatgtgtatggtttctatatatatatataatactcgctctgttccc

SEQ ID NO: 72073 - DNA, 271 bp, Zea mays
  unsure (1)..(271): unsure at all n locations
  Clone ID: MRT4577_165732C.1
atgctaaggtctgaccgaaataaagttagttatgttctttgatcacttctcatgatgaatctgctaataccaaatcttttaatctacacaccttttatgtatttaatatcaaacttaaatatggtaggaacctaaaatggttcgtatctgtgatgatgagaggtagtacattgtccttttttaataattgcatgcttatgaacatctgtccatttagttgtttttgcatttatanaaaatgatagttgtttttcaatcaggaattcaagct

SEQ ID NO: 72074 - DNA, 2803 bp, Zea mays
  Clone ID: MRT4577_165733C.1
caagcccacacacacacactcgtcccttgccttcccctccatctccaatctcccctcctccgttcgacgctctccccttgcttctcgcgcacactaaccaattcgagcacccgacgccgcggccccgatcgaatccaccggagccgcccgcctggggcccgcccgcgccattgctcgaatcgggaggcattcgtccgcccgcgctgctgccccgcgccgtggcggtggcgttggcggtatgtacgaccgctagaaggaaggaggaggcggcattagtggtggggattaggcggcggcactgctggtgccgggaggaggaggaggcgtagcccatgaaggcgacggcgccgccggcgaagcggcggaggggcccgcggctggcggtgctggcgctcgtgttctgttcgctgctcgtgccgatcgccttcctcttcaaccgcttccccgccgtatatgtgacagatgagcgccctcagcaggagattgacttgccttcgttcgatcgtgtggtatttgaaaatggtggctctgtaattgaagatgtgtccaagaagacttccaggagcactagtgtgtcgcaccgtggtattgatagtgacccttccatagttagcactaaaccaaaagctatagttctacggcctccaaaaattgaacaggtcctcccccctccaaaagttgaacccaatccagaagtgaagccagtacttgtaccagttccagttcatcaaaacaaaaaaattaacctcgacaagattaggcctcccagagttcaaagtgctgatgaggtggaaaaggctaaggcttgtcaacttgagtttgggagttactgtctctggtctatagagcacaaagaagttatgatagataccattgtgaaaaggctgaaagatcagctatttgtagcccgatcttactaccctagcattgcaaaacttaaaggaaaggagacattgactcgcgagttgaagcaaaatattcaagaacacgagagggtacttagtgaatccattgttgatgctgatctaccatcctttataaaaacgaagctagagaggatggagcaatcaatagcaagagccaaatcatgcactgtggattgtaacaatgttgacagaaagcttcgtcaaattcttcatatgacagaggatgaagctcattttcatatgaagcagagtgcatacctatacaaccttggtgttcacaccatgcctaaaagtcatcattgtcttaatatgaggttgacagtagagtactttaaatccatgccattggatccaaatgactcttctgcccataagtttaaccttccagacaataggcactatgttatattgtctaaaaatgtccttgctgcttctgttgtcatcaactcaactgttagtagctctgaggatactgaaaatatagtctttcatgtactaactgatgctcaaaatttttatgccatgaagcactggtttgcaagaaactcctacagggaatcagctgtgaatgtcataaattatgaacaaattattttcgagaatttccctgagtttggaacccagcagttatatttgcctgaggaatttcgtgttttcatcagtagccttgagcggcctactgagaagagtagaatggagtatttatcagtgttcagtcactcacatttctttcttgccgaaatattcaaagatttaaagaaggtaattgtgttggatgatgatttggtcgttcaacatgatctctctttcttgtggaatcttgatatgggagataaggtccatggtgctgtcagtttttgtggtttgaaacttggtcaactgaggaaccttctgggtaggacaatgtacgatcaacagtcatgtgcatggatgtcgggggttaatgtgattgatttggaaaaatggagagaattcaccatgacagagaattacctgcaactcctgagaaagtttgggaacaatgatgacgaggcctcactacgagcttcagctttgcctataagtttgttgtcgttccagcatcttctatatccacttgatgaaagattgattttatctggacttggatatgactatggaattaaagaagaacttgttcagaattctgcatcattgcattataatggaaatatgaaaccttggcttgagttgggtataccagattataggaagtactggaagaggtttcttacacgagacgagagattcatggacgagtgcaatgtaagtccatagtgtgcttgagcttgggagccgaatcatttttgacagtagatttcagtctactgctgtactatatactaagaggaccaacacttgagaaaagacctgggaactgggaagcagtcactagccatcaattttgacagagtagatccagcaccatctgttcattgaacttgtgagctcgatggatgggtttttctgcagttagcggggtttagttaagttcgaaggataatgcagtagacaacgttggtcacgtgtggtggtgaggttccaagtaagagagagcatcacactcacgtaacaggaatgatcattgatggattgaggcgccttaattgaaattggtgccttccacctcatggatgcaggttaattcttttcttcgttgattttttgacccctcttgctttgtccttctgtcaataaggacatacacaggttaaaattcaaattctttgctcttagttgttgcacattgattgtcctatcactattatgttgatgcaaagtatattatgatgtcagagactcatctgttacaaaaacgagattaacaactattctatttggatgccttctgagcactc

SEQ ID NO: 72075 - DNA, 514 bp, Zea mays
  unsure (1)..(514): unsure at all n locations
  Clone ID: MRT4577_165734C.1
cgggtacacctcggttgcgtgcacgccggactgctccctcctgcagctcgccgtgccgtgcactcgcatcgcttgagccctgcgaccactgctgtcttcctgctcagcgggccgccgcacccagcaaatcccatgcgtgctcctccctgctgcgctcgtccggccacgacctcgtcctggctccctcggagctcgcgtccagctctaccatggccacgccggtttagagctttctgccgcgccctgctcgcccccatgtccgaaggcagccgctcatccatctccatcctcgcgtccttggtctctcctctgcttggtcgccatccccaagccgcgccaagttccctgctccgctccgtcaccgctttctgcagccatggtcaccgtggagttccgtggagttccatccctgtgcgcaggtcctctcatggcgtncagccgctgctccttgctcgcccggatctccctgctcgcccatgccgaacgcaggcaagctagtccctgcacgcaagct

SEQ ID NO: 72076 - DNA, 568 bp, Zea mays
  Clone ID: MRT4577_165735C.1
gggaggctgaggtgagactggagctgatgcatgtcctaagggggatgtttcatatctgagctcggtacagagatttgctaaggagcaaagacaaacttgagcttgctactacataaaaaagcagcctcccatatggaaagggcttgtagcatcccaaacctcagacacaaaaagggaaccattccatcatcccacaacactacatattatccaacacgttgtcttgcttcagacataaaagtcatcattgaacatgattgacatcgactcacccatattatccagcggatcatcatatgtgccgacctcggaatcaatgtctgagtcaaatacgccactgttgatgtaataaggccaatacctggtgtcgtcgaagaagacggggtcatgaggaagccttagatctcgtatcctggaacacttcagtttaagcgcatcgtccatttgtatgttgaagcactcgcgaatgtcaagggattcgaggcgagggcaacggtcaaggattgacatgagcccatcatttgccagattgttaccaatcaactcaagttcttggagtcttggcatg

SEQ ID NO: 72077 - DNA, 160 bp, Zea mays
  Clone ID: MRT4577_165736C.1
gctccatgcgcaccgcgctcaggacactaccagcgcgcgcgggcgcttttgaacttcgccttggcggggaatggtcagcacgggggcacggaacaccgtgccgcccggcgactgcggcgagcgtctgtttctctcgcgcgtgcgcgttacttcccgcgcg

SEQ ID NO: 72078 - DNA, 809 bp, Zea mays
  Clone ID: MRT4577_165737C.1
gaactattgatttgatgtcctacgaaaagcttggtcaatgggaacatagtttgcagctattgtggacgatgaaaaaaagtgaactgaaaatatcagcagtgtcttaaaatcttgtgatacgtgattatgaggttggtagctagctaaaagttgctcttaaagtgcttaaaatcttgtgatagtttccagtttttcttggtcatacgaatgccttgtgaaagcacgtccacgtcatcaccttcattcttagccgtctgattggctgcagcagcttcctctcgataatgttgcctctccaccggtgatgggattcttccggatagaaaaccaaagggcattgacaaggaaaataaacatagtaattccctagatgcaaggaaaataaacatttatcgaatgaaaagaacatctagggctagtcattaaattgtcaaatacggaaattaaaataaagttttagttttcatatttgacaatttatagactaaaatgaaataaaatagatggactaaaaattagtccctacaaaccaaatatctcttttgtcttatctcgtggagttgtgcaaaagtgcacatcacgcaaacactttgtcgactcggctcgtggtagagatgacaatgggtatccgcgacccgataccccgtgacaatgggtacccgcgacccgatacccgatgggtatttactctattaggataagtgttgagatacccgcgacccgatatccgatggatattacactagccagttgcccgtgcttttgctacgaaacctaatatatcatattaataagtgttgagatattta

SEQ ID NO: 72079 - DNA, 313 bp, Zea mays
  Clone ID: MRT4577_165738C.1
ctggagacccatgagggcaggaaagtcgttcaggctctcaaggatgtgtatgctgagtgggttgccttggacaggatcctcacctcctacctgtgtttcggtgggcttttcaagctcgcctccaattcgttcttgtcacagaggatctgctctgtcaatgccatctccattctatgtgaggtaaccggagccaatgtttattatgtggtttacgccgtgggcattgacacgataattgttcctatagtccctaacaccagagttgtggtcggtggattatgctttcacaatgacatcctatacctggtgtaca

SEQ ID NO: 72080 - DNA, 151 bp, Zea mays
  Clone ID: MRT4577_165739C.1
cacatggttggtggatttaagccaaaatccaaaattggtttcatttcaataaaaacagagttaatttgatacatgcctggttttttgaaaacatggcctgaaaccatgaaaacccggccagtttaagggtttgggatccaatgagcacttt

SEQ ID NO: 72081 - DNA, 137 bp, Zea mays
  Clone ID: MRT4577_16573C.1
ctctttctgagtttgaagacgagctctagaaattttggctgttggcgatactgattcatctgccggtctaatcatcaattcgtctactgtaatagcagcgacttcgatatcttaatttgttttagctgtcaaatgca

SEQ ID NO: 72082 - DNA, 381 bp, Zea mays
  Clone ID: MRT4577_165740C.1
cctaagctgaaaattacactggtgtgtaccaacctgcctatgcattcaccaatattcgattctcatcaaggaccacaggggagcccacatcaattacgtggacacatataatacacttaaaggcaattgccgatggatcgtgtcccatggatattcaaaaaggagatgttcttgcttggccaacgaatctagcacggatgatgggcccttggctagtttatgcctgcttgctgaatggaacatccatggctctgtatgactggatcagaacaatgtcaagcatctcgaagtctgtacacgatgcataaagaacaatgcttggactgcaacacaggattgttcgtacttggaagaatactgactgtacagatggactagact

SEQ ID NO: 72083 - DNA, 354 bp, Zea mays
  Clone ID: MRT4577_165741C.1
gggggggcaaaatctaattttttttgcaaaaaaaatgttccaaaaaacccaacacttatttaaactttttgggagttcaaaaaaaaaaaaaaacttgcagggaaaaaaaaacccaaaaaaaacttccattgaaaaaactaatacttttatgaggctaaagcccttttaactgccaaaggaaaaaaaaagggtaaaaaaaaaaaaaagcaaaggcgaggccttttttttgtttttttaatgaccggcaaagttggctaaaaaaagggaagggttttattagcccctaaaaaataattgttctaaaggtttaaaacaaaatttttggagaaagttccattgtttgggaaatgtttt

SEQ ID NO: 72084 - DNA, 295 bp, Zea mays
  Clone ID: MRT4577_165742C.1
gtgctgctttcggagcaagaatgggtacgtttatgtctttctgtctaaagcatctgtagttgagaaaaggatccctgaccttatattcttcaacacgaccgatggagttgccgcccactccccggagtttatcctgatacagtcggagaaagagtggtacatgcttcggtcatcgaagaacgccctatgttcatctgacatctccgacgaagtccaactctatgtccctggagaggcatccaactccaaccagttccttaacaaggttgctagtgccgggggtaccggcccaact

SEQ ID NO: 72085 - DNA, 1046 bp, Zea mays
  Clone ID: MRT4577_165743C.1
ccggccgggttgtgcagtgttggtgggctgaccagttgggttatggcctgctggcatatccttcctcccgcacatcccgatccttctctcggcggcccgttggtcacgtgactcatccccctgtgctctcctctcgtggccttgtttcctggcggcgacggctggtcgagcggcgccgcccttggctaggtcttcgctgggtccttccccggcgacgagcgtccatctggggtcgactgaactgagcaggcagtaggaagagacactatgttgttcttctcctacttcaaggagctggtggggaaggaggtgacagtggagctcaagaatgacttggcgatccgcgggacgctccactcggttgaccagtacctcaacatcaagctcgagaacacccgcgtagtcgaccaggacaagtatccccacatgctttcagtgcggaactgcttcatcaggggctcggtggtgcggtacgtgctgctcccgcaggacggcgtggacatcgacatcctccacgacgccaccaggagggaggcgcgcggaggctgatcctgatgcgcacccgctccctcacctgctggctgctgcttcatccccgattgtacgaagcatgcatgtacggtgtgtggtagacagatgccccagtttagttctttggtgcttgccttgacatagatattccaggttggatgatgacctgaatcacctgatatattattgtcatatcatatgcaaaggtcttgcataaaaaggctatattattaccatatcgtattatcacggggtagagggggaaacttattagcacgtgagcagcactgctgtgctccccggcactgctcataaacacaatatggctttattttgttcgaaataagatcccacaccccccccccgcccaaaatatttatttttgtggggggaaaaaaacaaaaaaaaaaaaacgattcttcttcctccgggggggggggggggcgccccccacaaaaaaaaaaaaaaaaaaaaaaaaaaaaaaacccgcccccccccccccccccccttttttt

SEQ ID NO: 72086 - DNA, 619 bp, Zea mays
  Clone ID: MRT4577_165744C.1
ggccgcttttttttttttttttttctttttttttttttttttttttttttttttttttttttttttttttttttttttttttttttttttttttggggcaaggggaaagtttttccattccttcacgggtaaactacgggggggccaacacaaaaaaaaaccggggtttgaaaacggccccgggggcacattttctaccccccggggggtttaattagggcccacaaagcctcattgggtaaaccaaaacgggggggggggaaaagggcagccaaacaaaaaaaaggcaggggatttcaactgttaaaacccgggcgagttgcctagtccccgggggcaaacttgaaccccttttaaagggaaaacttgagcccgcccttgaggctttccaccccctttttttcgaagggggggggctcacccaaaccaagcacttcctccactccatttttgccgagccaaaccttgggggcaaaaaacggcaactttgccacgggggatggcccaaaaaagccctctacaagggccggaactccattcaaacccttaaagcatgcttttgcaaaaacagcccccgcatatgccatggacaagggtgcaaagccctttccagcctttg

SEQ ID NO: 72087 - DNA, 405 bp, Zea mays
  Clone ID: MRT4577_165745C.1
tttttttttttttttttttttttttttttttttttttttttttttttttttttttttttttttttttttttttttttttttttttttaaaaaaaagcacagggggcaatttttaaacccttaaaatatgaaaacagcttttgaaaaatgggagggcggttcctgacaccgggcaaaaacaaattaaaggggaccatatttgacgggggcgggaaaaaaaaaaaaaaaggtaacaaaggcaaaaccttactgggaaaaaaaaagggggggcatttttaatttttggggcaaaaaaaagggcttaaggggaaaaagaaaataactgagaaaaccattttacttttttaaaaatccaccaacttctgaagggggggtaaaaaagggcttaaagggggggccttttttt

SEQ ID NO: 72088 - DNA, 511 bp, Zea mays
  Clone ID: MRT4577_165746C.1
ggggcaaggggaaagtttttccattccttaacgggtaaactccgggggggtcaacacaaaaaaaaaccggtgtttgaaaaccgccccgggggcccattttcaaccccccggggggttttattagggcccacaaagccccattgggtaaaccaaaacgggggggggggaaaaaggccgccaaacaaaaaaaaggccgggggtttcaactgttaaaagccgggcgagttgcctaattcccgggggcaaacttgaaccccttttaaaaggaaaacttgagccccaccttgaggctttccacccccttttttttaaagggggggagctcacccaaaccaagcacttcctccaatcaatttttgccgagcccaaccttgggggcaaaaaacggcaactttgtcacgggtgattgcccaaaaaagccctttaaaatggccggaactccattaaaacccttaaaggatgcttttgaaaaaacagcccccgcatttgccagggacaatgttgcaaaccc

SEQ ID NO: 72089 - DNA, 238 bp, Zea mays
  Clone ID: MRT4577_165747C.1
tcgataaatattactgtaccttgttcctatgattgggtgacatatgaagctctattatccatctctttctttggggcatcattatcattcattatgtgctataaccttatgaacataacctggagtaggactatatcaaacagatccttgtgaattaacatatgcctaaaacatttctattatgtaaagctgctgtatcttaagagatcagcattttaacgggagagatttcattaca

SEQ ID NO: 72090 - DNA, 393 bp, Zea mays
  unsure (1)..(393): unsure at all n locations
  Clone ID: MRT4577_165748C.1
gcggggggggnnnnnnannnnnnnnnnnnnngagcagcaaaaagcnaancncagggcccanannagcgagcggancngncacagangggagcaggaagggaaacaaaagggcaaaacanggccagacncagcangaaccnggcgacccagaggcgccggccanccacannnanncncggcanacacaagcagcaaccanccaagagaagcaggggggaaaaaccccnaccgggncnngaacangnggcggancagggcgacgacgcggnngcngnagccccacncgggggcgnaccacgagacgagcnngacgaagnggncgnncagagcgancccggccnnggcgncgaagaagcncgaccngcngncaccaaggaagncggnagaaaccag

SEQ ID NO: 72091 - DNA, 428 bp, Zea mays
  unsure (1)..(428): unsure at all n locations
  Clone ID: MRT4577_165749C.1
gcagccgcccgtttgctctctcccgtctccccactcctcccgcgatgagcgacccgcgggggggcgccgccggtcccgaccgctacngggacgaaccgcacgacctcccgctcgccgaggacgcaaacggcgaggaagcgtggcagacgcccgagaaagaggcggttgccgtgtcggaaggggccgctgcgcggagtggggatacgaccccggacgctgaacaggagagcgatgacggagaggaaggagtgggctccccggatcaggcggaacccaatgcgagcggggagggcgtaccgcccgtggccgcgactgtggagccggatgggattgttagcggcgcaaaggtggagacgaacagcgaggacgccatcagccatgacgccgacgaggaggaggaggacgacgactatgactccacccaggat

SEQ ID NO: 72092 - DNA, 217 bp, Zea mays
  Clone ID: MRT4577_16574C.1
aatcacccctggatcgccggtgatggagatcctgcgtccgtcgccgccacccagccactgcccactcctacgctgcggcggtcactgggagcagcaccacggcgagacgtgggtccacgtggctgtcgggaggtcgccggagaagacgctttcgctgctacgatgggccctgcgccgcttcggttgcagccggatcgtcctgctccacgtccaccac

SEQ ID NO: 72093 - DNA, 423 bp, Zea mays
  Clone ID: MRT4577_165750C.1
caaaaagggaaacaaaactcgggaaaacggtaacaaggtaaacaaaagggtccagctcaaattaaacagctgagtggctagcaaaacttaaactttgacaataaagcctggggcagttaacaccattctggactaccgaaggggaccaaaaacctgggcttctccttcttctcctggaagagggcaagcagcgacacaccaaacacctaaacaaccttgaacctgacaccagaaaggtctcccacagcaggacccttacaaccaaatccagcaatcaacacctcatcattctcctggaggtagttaaggcacccatcattcggcacaaaggcagcaatcttttttccattcttcaccagctgaacacgggcacacttacggagggccaaattgggctgctgggcctcaaaaccaatcttctcc

SEQ ID NO: 72094 - DNA, 654 bp, Zea mays
  Clone ID: MRT4577_165751C.1
cattgggtacctcgaggccggccgggatcctgctgccgcagacaatcggctcgtcttcccttcctcccagcccgtctctctcttctctctgtctctcttctcggacacgcgtccacctcgcagcagcaagaagcgcgaccaaatggcgcctctacgatacgctggagctgctgccgcggtggcctccaacaacctggtgttgtcgttcggcgtacatgctgatcgacttcgtccccgacgaggccggactgtcgctggccgagacgggcggcttcgtcaaggcccccggcggtgcgcccgccaacgtcacctgcgccatcgcctatgtcggcggaactggacctgcgcctggtgcagctacgcgcaaggtgttccactacatctccatctcgctcatctccgagtcgtgccgctcggcgtcacatggatcgccatgcgcgcaggcaatgtcgtcggcagcggtctgctcctacgacctcgacgtgcgcctcccgctctggacgtcatccgacagctgacgatagggtatcctctgcatctggaaggaggactgcttcatctaggctactgacgacaaagtggccttcctcacactcggctacgccaacgatgacaacaacatgctgtgcctgtgtgttgacattgttaaggtgc

SEQ ID NO: 72095 - DNA, 382 bp, Zea mays
  Clone ID: MRT4577_165752C.1
taagggggtattgatcaagattccacagaaaatgggggaaggcggcataacgtgtaagggatgaggtgcctgataactgggccccgtaggattaattgggttgaactagatgatcggtttacagtcgcaagtaatgtagtaccacagtaacgttatagatccgcagcacgcgcagcagaagcgatttgggtatcaggaggtcttaaggttgataaatatgtggctatcctaggtcggatggatcggctccagggaccagtattcgggaactcccacgcactggtgccaatagggcaacatgacggggtaatagccaacggcggatataggggaaggggaacgcaagggtgcaaatccctcaagggacggggttctccgcgtt

SEQ ID NO: 72096 - DNA, 309 bp, Zea mays
  Clone ID: MRT4577_165753C.1
ctcttccgctccaagctagcagcagcaatcctgggtggtgtgggccagatccacatcaaaccgggggctacggttctctacctcggggctgcctcgggcaccacggtctcccatgtctctgacatcgttggtccggatggtctagtctatgcagccgagttctcccaccgctctggccgtgacctcattaacttggccaagaagaggtccaacatcattcctgtgatcgaggatgctcgacacccacacaaataccgcatgctcatcgcaatggtggatgtgatctttgctgatgtggcccagccagac

SEQ ID NO: 72097 - DNA, 812 bp, Zea mays
  unsure (1)..(812): unsure at all n locations
  Clone ID: MRT4577_165754C.1
tccttccagttccttccctccgccattgcccgcccgcccgcacatggcccgccttccgcgcggagaggacgaatatcccgccgcagccgccgccgccgcgtctccgctccctcgacccgccgccacgcgctcctcctaaggttaggaggttgggaattgctcagtcagccttatactgagcagtgagcactgaccgggggtttgttgtgattctggtcaaccgtttgcccagttcatgtcttccaagcctgcctcccaaagtatgccggagcaagcggcaaagccaaaggaaatgggggaagatgacaggcagcgatctgctgctgaggaggtttcaggggagccggaccagcagcaagaatctccagctcctgtgctggacaaggatgctccagatctctcaccagactctggggtcctggatgtgcctctagccccagaggcagagtctgatgagtcaaaggagaccaagaactccgattccaacgagaatcaagaaaagaagtcttcgcaaaagagtagtatcagtgatagctttatttcagctaaagtgagtgatgggacaaatagtctgggtaagaccagtggtagtgctaagaccagtggtcgagatttcaccgagagtggcaagagcagcatgtgccgtgttagtgcaagcagtgatttgagtgatgagagctcctgcagcagtatgagcagtgccaccacaaagccgcacaaagggaatgattcgaggtgngaggccatccaagttgtcaaatcccagggagggcgttcttgggctgaacaatttaggctgcttaagaaactgg

SEQ ID NO: 72098 - DNA, 481 bp, Zea mays
  Clone ID: MRT4577_165755C.1
aaaaaaaaaaaaaaaaaaaaaaaaaaaaaaaaaaaaaaaaaaaaaaaaaaaaaaaaaaaaaaaaaaaaaaaaaaaaaaaaaaaacccccgttttttgggaagggggttttttaaaaaaaaggaaaaaaccttttccccttaccgggtaaaaaaattccggggccaaaggccaagaatttggaaatttataattttcccagccccattttaaaaaccggccaaattccggcccgggtcccgaaattggattggttggcctaattaaaatggaaaacccccttttaaaatttatggaaaattggaagcccttttttaaaccttcccaccaattttggaaccccccttttggggggccaaaaacccagttttgggtttttgaaaatagaaagccgaatcctgcccaattcggaccaaaaaaaccggttggggtaaccggcccttcccccccttggaataaccgggaaaggattataaaggagtg

SEQ ID NO: 72099 - DNA, 215 bp, Zea mays
  Clone ID: MRT4577_165756C.1
caaaaacagcccagccgaacccgtgcgaccaactcataggcagcaacatacgctacgaaggaataccccgacgcgggcaccttttcgtacgcaagcgtaagcctcgcgcgtccatctgaggctagccgcacaatctatatgctgcgtcctggtaaatgatcctacatcccaacaacaccgagcaaggaaccggggcaagggactactacattatg

SEQ ID NO: 72100 - DNA, 856 bp, Zea mays
  unsure (1)..(856): unsure at all n locations
  Clone ID: MRT4577_165757C.1
attgaacaacattataattaatataatataaataagtacctttcaatatctcataaataagcattgtcaaacaactcatacataagtgtactctaaatctaaactaaaatacaactgtttgcactaatgttaagcctaactttatatgaatttaagtttccacacttttgcggccaccaaatttaaatttcattctatcttctcctaccttttcatgtacaacaaataggagaaaactagacatagcaaaaaactccaagcagcacgttcagagaacttatgcgttggcagcagcctgggcaatgaaatcgcgcctcctctgctcctcgatgatgctgagcttgatacccctgcccttgggcaggctcacccacggcttgttgcccttgccgatggtgaacacgttgcccatgcaggtggcgaactggtggcccatggagtcctcgacatggatggtctcaaagctgcccttgtgtttctccctgttcttgatcactcctacacgcccggtgttcctcccgccggtcaccatgaccacgttgccgacatcaaacttgataagtccatgattttggttttcaggttttccctctccaatatctgttggattgccaggaagctttatgctgtaaatttcctcatcatactttccaccacctttgacaagaacggaataatgtcttctcagttgctccatttctggttggagcttcgacctcattaatgaaagcaactcgtagtgatgggttcattatcatgagactgaggatattctgatagcgctttttcatttaaatcctttgatgtnttttgcnatgccataaacttgacatgagacaactagggatttgtcgga

SEQ ID NO: 72101 - DNA, 1387 bp, Zea mays
  Clone ID: MRT4577_165758C.1
ccccgcatctcctagccccgctagagatcattggacacatatcgaaacagctctctagctagcgcgctcgtcgtctaacctggcttccggcgtggcttccaagcagatcggagtcttgacctgcttcattgccatcaccgctctcgccttccgtccctgcgcatccgccgtgcccatggacggcggctggtcgaacggcggcgccacctggtacggccccggaacgccggccgcctgcaagtccagtacattcgggtggcgtgcaactggaacggcttggacatcgccttcagggtggacgccggctcaaacgccaactacctggccatggccatcgagtacgagtccggggacggggacctgcgcgccgtggaactgaagcagagcggcgcggcggcgtgggcgcccatgcaacgctcctggggcgctgtgtggcagtacaagtccggctccaccaatctgcaggcccccctgtctgtccgcctcacctcgggctccggcagggttctcgtcgccagcaacgtcatccccgccggatggcagcccggcagaacctaccgctccgtcgtcaacttcggaggaaaccatgcataacgagtggtattaagatgtcgatcgtctgcagatgtctccatccaacaataagatgcatgcatatatgatctgtgtggccagctagctgctagaccatctcactccctgagtctgctgatgctcagccaataatgaatcattccatctcgatcggaaattcaacatatataataatgcaagcaccggaaataaaattctactgtgttctgtgacgacgtacgttgttcgtgttgtgctacaagaatatacgcatgtcagtgctgtttgccaaaaaaaaaaaaaaaaaaaaaaaaaaaaaaaaaaaaaaaaaaaaaaaaaaaaaaaaaaaaaaaaaaaacccaaaaaacccaaaaaataaaacccataaaaaaagaaaaaataagagggataaaaaaaaataaagggcgccccccccccccccggttttttccccccttggggggggttatcgcccccttggggcaaataggggcaaagggggtccccggggggaatttgtttccccctcacattccccccaaactttgggcccggagccctatttggaaaccccgggggggcctaggggggggctttcccccctttattggcgggggccccccggccccttttccattgggaaaccctgccggcccacctgctttaaggaaccgccccccgccgggggaagggcgttttgggttttggggcttttcccgtttccccgataagggaccccgggggccggggggttcggtggggggaaggggtttcccccccccccaggggggaaaacggtttcccccaaatccgg

SEQ ID NO: 72102 - DNA, 605 bp, Zea mays
  Clone ID: MRT4577_165759C.1
ccaaacaaccaccgtggcttaagcaaaaacagagaagcaaaacaagctggcatggtgtcgacaacacggttcaacaatatatagaaagtcgaattaaagcattacagctagctgcaaacgctgttcaagaaccaaaagcaacaaaacatgatgataaaacgtcttgggaaggtagctctatatccttgcagataaaaattaaactagacatagcaaaaagctccaagcagcacattcagagaacttatgccttggcagcagcctgggcagcaaagtcgcgcctcctctgctcctcgatgatgctgagcttgatacccttgcccttgggcaggctcacccacggcttgttgcccttgccaatggggaacacgttgcccatgcgggtggcgaactgggggcccatggagtcctcgacggggatggtatcgaagccgcccttgggcttctccctgttcttgatcacacctacacgcccggggttcctcccgccggtcaccatgaccacgttgccgacgtcaaacttgatgaagtccatgatcttgttggtctccaaatcgatcttgatggggtcgttggccttgatgaacgggtcggggtaacggatg

SEQ ID NO: 72103 - DNA, 786 bp, Zea mays
  Clone ID: MRT4577_16575C.1
cttggccaaacacacatagcgcatatgcaaatccaagcaccgcttttttttttttttttttaatccaatacaacaaaggtgtaaccataatatgaaaagaacatgatagtgtcagagtttggtttgcacgaagtacgaacaagacatacaatggttagggctgcaacagcgctcccaaacagctcaaataatagcaggtacttttttctgtgtacatgagagcacaaacttcgaatatgtttttgctctcttctttcaaccaccggtatcacccagggtagttcccatcagtggtagctcagcaaaaaaaaccaatgagcagacaccgaggaaatgaatggatgggtatctaatataaacctatactaatgtacagctgaggagtctgtgccttagttaattctccatctgtagtatccattgtgcgtctgcagtagaaagaacaacatgagcttcacagcttcaccccagcatgtggcttggccacccggcgtgagcacctggtcctcttcttggacaggcagcaagcacagccttggagaagctcaaggtcctcatcgcaggtaagaatagaagccagctcggggttctccagcaacatttttgaggtcaggaaaccagcaatagtccatgtctgataagatcgggattgcttccctacgaacctcccagaccgggtgtcatagtattctggccacttgtcatctgagagtctctcctcggccacagcaatggctctccgggccaattctggtctgcccatttttatgcaggccaatgtgaact

SEQ ID NO: 72104 - DNA, 297 bp, Zea mays
  unsure (1)..(297): unsure at all n locations
  Clone ID: MRT4577_165760C.1
ggcaggtttttccgttactgcgcgccgtgagacctacgagaaaccgctgggcaggggggcaacaatgaccgggtgcccccccgcagaccactaggagtaccttgaggagcgccgcctcacggatctgatcaagaagnccatcccgctcatcatttacccagtatgtctctggagggagaggacctctgagacggagagctccgcccatgaacatgaggaggataataacgatgacgagggtcgggatgaggatggggatgccgcacatgaacaccagcaaaacaggaagaagacgag

SEQ ID NO: 72105 - DNA, 992 bp, Zea mays
  Clone ID: MRT4577_165761C.1
ccccgcatctcctagccccagctagtagatcattggacacatatcgaaacagctctctagctagcgcgctcgtcgtctaacctggcttccggcatggcttccaagcagatcggagtcttgacctgcttcattgccatcaccgctctcgccttccgtccctgcgcatccgccgtgcccatggacggcggctggtcgaccaacctccgttctcgtcaatgatcaccgccggcagccaatccatcttccaggacggcaagggctgcggcacctgctaccaggtgaagtgcaccggacacgagtcgtgctccggcagcccggtgacagtggtcatcaccgacctgtgccccgacgctacgtgccaggtggagcccgtccacttcgacctgagcgggacggcgttcggtgccatggcgaagcccggccaggccgacaagctccgaaacgccggccgcttacaagtccagtacactcgggtggcgtgcaactggaacggcttggacatcgccttcagggtggacgccggctcaaacgccaactacctggccatggccatcgagtacgagtccggggacggggacctgcgcgccgtggagctgaagcagagcggcgcggcggcgtgggcgcccatgcaacgctcctggggcgctgtgtggcagtacaagtccggctccaccaatctgcaggcccccctgtctgtccgcctcacctcgggctccggcagggtcctcgtcgccagcaacgtcatccccgccggatggcagcccggcagaacctaccgctccgtcgtcaacttcggaggaaaccatgcataacgagtgatattaaggatgtcgtgtgcagatgtctccatctaagatgcatgcatatatgatctgtgtggccagctagctgctagaccatctcactccctgagtctgctgatgctcagccaataatgaatcattccatctcgatcggaaattcaacagaaaaaaaaaaaaaaaaaagcggcc

SEQ ID NO: 72106 - DNA, 803 bp, Zea mays
  unsure (1)..(803): unsure at all n locations
  Clone ID: MRT4577_165762C.1
tgattcttaatatttccacgccgctggtcctgtatctagtcgcttgtgcaactagcgattctctcctcccgcattgacactcagagacgatgctccttctctttgatcttctctaactcgatctcaagccgaggatgttgttcggcttgaggaggcacacgacgtctctcttctatgtgtggtccggactcttcaccgtagtatctcgggcacagcccaatggtgtgccttgactcgcaacgcagaagcgacgcgccctcagtgcgtaggtcggcagtcagctgtacaagtcagggtgcacgatcatgcggagacatacacgtcagtccggaaggtagaatcactgctattgctcatcatctaaacatatatatcgtgactgactatgcacccagattcatagcactcatgatatcgtatccactctccgtgccgtcgcatgcattgaatgctacgcgctactatgaatgtgaggactcctatttcttcatagatagctccatggtgtatactctgataaccgctgcgcacttttctgcatattctcgttttatgngcgattgtaactatagatctacccacccgatatcttgcttgcgaggtgcgacaccatgccgttgacgaaactcttatcatgattaatagcccatctgcagctggaagtaatcgacctactcaccagaacctgcagctaggcgtataactatgaacagcagtgcaagcgtgtgcgctcaagtatatccacttatatctggtgtactgccagaaattccttgcgactacggatgtctgctctgtgatac

SEQ ID NO: 72107 - DNA, 1294 bp, Zea mays
  unsure (1)..(1294): unsure at all n locations
  Clone ID: MRT4577_165763C.1
gcatctcctagccccagctagtagatcattggacacatatcgaaacagctctctagctagcgcgctcgtcgtctaacctggcttccggcatggcttccaagcagatcggagtcttgacctgcttcattgccatcaccgctctcgccttccgtccctgcgcatccgccgtgcccatggacggcggctggtcgaacggcggcgccacctggtacggccccgccaagggcgctggatccgacggtggtgcgtgtgggtaccagggtgccgtcgaccaacctccgttctcgtcaatgatcaccgccggcagccaatccatcttccaggacggcaagggctgcggcacctgctaccaggtgaagtgcaccggacacgagtcgtgctccggcangcccggtgacagtggtcatcaccgacctgtgccccgacgctacgtgccaggtggccatcgagtacgagttccggggacggggacctgcgtgccgtggagctgaagcagaggtcgacgcagagtacgtgggccacgggcgctgtgtggcagtacaagtccggctccaccaatctgcaggcccccctgtctgtccgcctcacctcgggctccggcagggtcctcgtcgccagcaacgtcatccagccgtggtaacaacgcagagtacgcgggcgctccgtcgtcaacttcggaggaaaccatgcataacgagtgatattaaggatgtcgtgtgcagatgtctccatccaacaataagatgcatgcatatatgatctgtgtggccagctagctgctagaccaccatctcactccctgagtctgctgatgctcagccaataaagaatcattccatctaaaaaaaaaaaaaaaaaaaaaaaaaaaaaaaaaaaaaaaaaaaaaaaaaaaaaaaaaaaaaaaaaaaaaaaaaaaaaaaatatgaaaaaaaaaaaaaaaaaaaaaaaaaaaaannccttgggggttgttcccccgttttaggggcaaattttgaaaatttccataacattgggggccgtttaagcttgcttttaaagggcccaattccccttatagggaggggtataaaaattaacgggccggggtttaacaacgccgggatgggaaaaaccttggggttccccaatttaatcgctttgcagaaaatccccctttccccagtgggggaaaaaggaaaaaggcccgaccggatcgcctttccaaaaagttnccaaccctaaagggaaaagggaccccccctgtatcggccctttaaggccgggggggtggggggttcccccaaagggaaccgtt

SEQ ID NO: 72108 - DNA, 580 bp, Zea mays
  Clone ID: MRT4577_165764C.1
gggtacctcgaggccggccggggtacagcttcttgtatcatataccacgtcgctcgacgagctactcctacgcgtgtccggctgccgcgaagatgcagcagaacacaggtgaggtaggtggacccctctgagacggaggaaggatgttgacgacgacaatcgcggagtcgtcttctcggaagactcgatggatcacacagaaaatgaccctgagtgctctgcaccaggaactgcaagggcatcatgagtgaatgacacgcaacggctttgcacatggcccgggttcgatgcacaagagcgtgtgaatgatgagtgggcacatcgatctcattagacttcctgaatgacagaacgacaaagggtactctatgctccagtacatggacgagggaggggcgtctgatatacgagctatggtggagctctcctgacgacgatgacgtctcatgaaatatgctagagtatgatgagctccgtcgaaggtcagatgcgtcagaactacctccagatcaaggactacgacctagagaaaatgtagcaaggtaccttcctggatacatataccaggatggggacctga

SEQ ID NO: 72109 - DNA, 290 bp, Zea mays
  unsure (1)..(290): unsure at all n locations
  Clone ID: MRT4577_165765C.1
caacctaacaaactttaacttccttttccaattacttttactcttactcaatttcctcggtgccctgtctttttcctaaattgttttgtcctataaccctacttnaatccctttccttttttaaacattcctccaatttttcgtttccgttccctcccaaaccttcaaatttttccccctacttaattcaacccttcaaaattccgttaaactttttccttaattctccttattccaatttttttcccttcaattaatcgaaccttttgttgtccgaaacacctttaata

SEQ ID NO: 72110 - DNA, 985 bp, Zea mays
  Clone ID: MRT4577_165766C.1
cattgggacctcgagccggccgggaccccgcatctcctagccccagctagtagatcattggacacatatcgaaacagctctctagctagcgcgctcgtcgtctaacctggcttccggcatggcttccaagcagatcggagtcttgacctgcttcattgccatcaccgctctcgccttccgttctcgtcaatgatcaccgccggcagccaatccatcttccaggacggcaagggctgcggcacctgctaccaggtgaagtgcaccggacacgagtcgtgctccggcagcccggtgacagtggtcatcaccgacctgtgccccggcgctgcgtgccaggcggagcccgtccacttcgacctgagcgggacggcgttcggtgccatggcgaagcccggccaggccgaccagctccggaacgccggccgcctgcaagtccagtacattcgggtggcgtgcaactggaacggcttggacatcgccttcagggtggacgccggctcaaacgccaactacctggccatggccatcgagtacgagtccggggacggggacctgcgcgccgtggagctgaagcagagcggcgcggcggcgtgggcgcccatgcaacgctcctggggcgctgtgtggcagtacaagtccggctccaccaatctgcaggcccccctgtctgtccgcctcacctcgggctccggcagggttctcgtcgccagcaacgtcatccccgccggatggcagcccggcagaacctaccgctccgtcgtcaacttcggaggaaaccatgcataacgagtggtattaagatgtcgatcgtctgcagatgtctccatccaacaataagatgcatgcatatatgatctgtgtggccagctagctgctagaccatctcactccctgagtctgctgatgctcagccaataatgaatcattccatctcgatcggaaattcaacataaaaaaaaagaaaaaaaaaaaaaaaaaagcggcc

SEQ ID NO: 72111 - DNA, 595 bp, Zea mays
  Clone ID: MRT4577_165767C.1
aaacccaggcaaaaaaacccttttctttttcccgggaatggggtaaccaaacggaaaaaaaaaacagccccctggggggctggaccgggggccccgcctttaaaaaaaccccaaaaggcccgggcccggggggggggcccccggaaaaaaacaaaaaaaaccggaatgggaccaaacaaaagggggggaccctaagggaccgacacccttttggcccgaaaaacccctggaaaaggccgggcccccgaggaattcccccacccgggcccccgcccacagcaaaaagaaaaaccccggggggccgccgtggggggcagggggaaaccacccctggcccccccgggcggggggccgggccccccccaggggaccccccggggggttaccgtttccccccggggacggggccaaaaaggggacccccaaacacaggggggccagggccccggggccctcccctaaaaaaaactcccggggggcggcgcccgaaaaaacgggggggagcgccgggaccccaaggggggggggcccccccccggggccaaggtatgcccggcctttccggtggcgagctcccgcgtcccccaaggggggg

SEQ ID NO: 72112 - DNA, 502 bp, Zea mays
  unsure (1)..(502): unsure at all n locations
  Clone ID: MRT4577_165768C.1
acatatcgaaacagctggggagctagcgcgctcgncgactaacctggcttccggcatggcttccaagcagatcggagtcttgacctgcttcattgccatcaccgctctcgccttccgtccctgcgcatccgccgtgctcatggacggcggctggtcaaacggcggcgccagggggggcgggcccnccaagggcgctggatccgacggtggtgcgtgtgggtaccagggtgccgtccaccaacctccgttctcgtcaatgatcaccgccggcagccaatccatcttccaggacggcaagggctgcggcacctgctaccaggtgaagagcaccggacacgagacgagctccgtcagcccggagacaggggatataaccgacctgtgccccgacgctacgtgccaggtggagcccgagcacttcaacctgagcgggacggggatcggtgccatgacgaagcccgaccagagcaacatggtacaaaacgccagacgactacaagac

SEQ ID NO: 72113 - DNA, 658 bp, Zea mays
  Clone ID: MRT4577_165769C.1
gggtacctcgaggccggccgggacgcatttcctagccccagctagtagatcattggacacatatcgaaacagctctctagctagcgcgctcgtcgtctaacctggcttccggtatggcttccaagcagatcggagtcttgacctgcttcattgacatcaccgctctcgccttccgtccctgcgcatccgccgtgcccatggacggcggctggtcaaacggcggtgccacctggtacggccccgccaagggcgctggatccgacgagtggtgcgagtgagtaccagagtgccgtcgaccaacctccgttctcgtcaatgatcaccgccggcagccaatccatcttccaggacggtaagggctgcggcacctgctaccaagcgaagtgcaccgcacactagtcgagctccggcagcccggtgacagcggttatcaccgacctgtgccccgacgctacatgacaggtggagaccgtccacttcgacctgagcgggacggcgctcggagccatggagaaacccggtcaggccgacatgctccgaaacgacggacgtctacaagtccaatacactcggatggagtgcaactggaacggtttgcacatcggcttcagggaggacgccggctcaaacggcaactacctggccatgggcatctagt

SEQ ID NO: 72114 - DNA, 517 bp, Zea mays
  Clone ID: MRT4577_16576C.1
accactgggtacttaagaacattagactttatctactaccagaaacgcaggagaacccgatcgacagctgaggggtgttgttcgtttcactgagtgtcactgggtctccgtgcgagcagccacgtccatgcatacaatcctgagctagagtgtgacaccgcaccaaaattcgaatcatcatacgatcccgaagcatatacgatctagactggaaaggctaaagactgagcatagcctaaagagagagctaactgacaactagggggtttccatcactgacacctttccagccagcaaacttaatgaaccagccgactcacggaaagaggcaactcgcggagagaggcctcttgcgcattgtgcgctattgagttgcctcgctcagtgattcggtggggtcgagcggtatgatgtgactagagggatcaaatcactcaaaggacggaatccggggatcccccaagtcagagcatatcgccagaaagaccatgtaagcccaaggcccgcaaaagggccg

SEQ ID NO: 72115 - DNA, 252 bp, Zea mays
  Clone ID: MRT4577_165770C.1
ccccaaaaactgcgaagcggctcgggaaaaagcacggacttttttacaaacacaccacgacgtaaaatgcagggaccaggtagaatacccactaattacaccttttcccaattgttttcttctgacatccaaatgagggccctcgtgtttcccaaaactaaaacactgtcccaaatgcccgccccccgctggatcccccttttatgattcccccccttaagggggcgaggccacgggtgggttacgttcaat

SEQ ID NO: 72116 - DNA, 458 bp, Zea mays
  Clone ID: MRT4577_165771C.1
ttgggtacctcgaagccggccgggcccgcatctcctagccccagctagatctttggacacatatcgaaacagctctagctagcgcgctcgtcgtctaacctggcttccggcatggcttccaagcagatcggagtcttgacctgcttcattgccatcaccgctctcgccttccgtccctgcgcatccgccgggccatggacggtggctggtcgaacggcggcgccacctggtacggcccagccaagggcgctggatccgacggtggtgcgtgtgggtaccagggcgccgtcgaccagcctccgttctcgtcaatgatcaccgccggcagccaatccatcttccaggacggtaagggctgcggaacctgctaccagctgaagcgcaccgtccacgagacgtgaaccggaaaaccagtgacagtgcccttcaccggacctgtgcccccgacgctacctgcc

SEQ ID NO: 72117 - DNA, 591 bp, Zea mays
  Clone ID: MRT4577_165772C.1
ccggccgggatcaaaagagcaaaaccctaccccagcagctaagccccatctcttggtctcccggccgggagtctcaggcggaggcggaggcggctagcggccaggctcgccgctcatagcctctcctatcctcgtctccctcccgatctcgaactctagatctcgagcaggcggcgagcgtggccgcggctcgacgatttggccctcgcttcttggtgcctagacgtttgacggcttgacttaaccagataccctggtccacttgcgggcttgcgacatcccctgtgaccaaggccagcgcaacgaggagccgacgtcgcccgtggttgggagctccagccgcccgctattctttctagggagctttgacctctttcttctcccctctgtgaagtctgctaaatgctctctgttcttgacttcattagtttccagtagagttctttgctattaatagcttgtccttgaacttttttctgaaggatatgtaatgaagagttaagattgtctgggtagagaaataaaaaattgaaaaaatttatggttagaacccaaatttacagcaaaaaaaaaaaaaaaaaaggggcggcc

SEQ ID NO: 72118 - DNA, 555 bp, Zea mays
  unsure (1)..(555): unsure at all n locations
  Clone ID: MRT4577_165773C.1
cgacggtgccgcggcggcagcaaccccgcatctcctagccccagctagatctttggacacatatcgaaacagctctagctagcgcgctcgtcgtctaacctggcttccggcatggcttccaagcagatcggagtcttgacctgcctcattgccatcaccgctctcgccttccgtccctgcgcatccgccgtgcccatggacggtggctggncnaacggngnngccacctgggacggcccagccaagggcgctggatccgacggnggngcgngngggnaccagggngccgacgaccagccnccgnncncgncaaggaccaccgccggcagccaanccagcnnccaggacgttttttgctgccccacctgctaccaggtgaagtgcaccggccacgagtcgtgctccggcagcccggcgacagtggtcatcaccgacctgtgccccgacgctacgtgccaggtggagcccgtccacttcgacctgagcggcacggcgttcggaggcatggcgaagcccggccaggccgacaagctccgaaacgccggccgcctacaa

SEQ ID NO: 72119 - DNA, 278 bp, Zea mays
  Clone ID: MRT4577_165774C.1
gtaagacatacagggcaaatgcagccaaatattcggtgccggctccccacgagcgcggagcggcaacctcattggaggactggcgctctcttctcttgcaggcggccaggtaggataaggagccacgacagcatgcagtacagtgcgcaccgcaccaacccggtcgcgaccacagcggttaatatactggctacacatagcttggacgtctactttttcgacaacagcatcagcccgacacccactgccttatcaaagatcgtgaaattaaaacggat

SEQ ID NO: 72120 - DNA, 618 bp, Zea mays
  Clone ID: MRT4577_165775C.1
ggccggggcatctcctagccccagaagatctttggacacatatcgaaacagctctagctagcgcgctcgtcgtctaacctggcttccggcatggcttccaagcagatcggagtcttgacctgcttcattgccatcaccgctctcgccttccgtccctgcgcatccgccgtgccatggacgggtgggctggtcgaacggcggcgccacctggtacggcccagccaagggcgctggatccgacggtggtgcgtgtgggtaccagggtgccgtcgaccagcctccgttatggtcaatgatcaccgtcggcagccaatccatcttgcaggacggcaagggctgccgcacctgctaccaggggaagtgcaccggacacgagtcgtgctgcggcagcccggggacaggggtgatcaccgacctgtgccccgacgctacgtgccagggggagcccgtccacttcgacctgagcgggacggcgttcagcgccatggccaagcccggccagggcgacaagctccgaaacgccgggcggctacaagtccagtacactagggtggcgtgcaactggaacgggttggacatcgccttaaaggtggacgtgcggtcaaacaccaactacct

SEQ ID NO: 72121 - DNA, 231 bp, Zea mays
  Clone ID: MRT4577_165776C.1
cacacggcgcacaccaagccggctgcgccaacaactggggcttcggcgcttcgcttcgcgttccatccacaaagatatggcgcaagactctgaccaagcaggcgctggaccacctcctccggcgcccacgacgactagggtggcgggcaccatgacgctcagcagcatcctcaccgtggcgggcatcctcctgctcttcgtcatcttcgccttcggcatcgtgaccctcca

SEQ ID NO: 72122 - DNA, 650 bp, Zea mays
  Clone ID: MRT4577_165777C.1
gcacttctttcctaggtcagtaatggaggcggcgctcctcgcggccgcaggcaccggtaggaaggatggtggtagtgaggagagcggtgtggtgtgcgaggtgaagaagcagttgtacctcgccgggccgctcgtcgtcgggttcctcctgcagaacacggtccagatggtctccgtcatgttcgtcggccaccttggcgagctcgcgctggccagcgcctccctggccacctccttcgctggcgtcaccggcttcagcttgctggcaggcatggcgtgcagcctggacacgctgtgcgggcaggccttcggtgcgcggcagcaccacctgctgggcgtccacaagcagcgggccatgctggtgcttgctctcgtgagcgttccggtggcgctggtgtgggcctacaccggcgacatcctggcgtggtgcgggcaggacccggagatcgcggcgggggccggcagctacatccggtgcctgatcccggccctgctcgtgtacggggcgctgcagtgccacgttcggttcctgcagacgcagaacctggttggtgcccggtgatgctgagctcccgcgccaccgcactgtgccccccggccgtctgctggctgctggtgcgcgggcttcgggctgggctgcaacggcgccc

SEQ ID NO: 72123 - DNA, 290 bp, Zea mays
  Clone ID: MRT4577_165778C.1
cctctctccccctttttttttttttcccccccccccccccccccccgggggaggcccgggaaaaaaacaaaacccacaccccccaaccaaaaccaaaaaaaaaacaaaacccccacccccttttttggaagggggaaacatatcttttttacccattaaccgccctcaccaaaaaattggtttttataccatctaccccctcaacaaccaaaaaatttacatttgaaattttaaacccaacacttttactttttcaggtcttcattttattggtcaatcttaattacaaa

SEQ ID NO: 72124 - DNA, 383 bp, Zea mays
  Clone ID: MRT4577_165779C.1
aagcaaatgggagccccacaaaagcgaacactggaaatttgttacaggaaggggggagttgaactaaaagggttctaatttagataggggggggggcgggaacaaccaaagaagggggacaacttttattttaaaaaaattcttttaaatagagcctggacggggcaaaagcaaattgtccacgggggtacaacaaaacggaaagaatggggcccaaaacggacacccgcaggttctaaaccatgggtttgttttccttagccttaggtcagatcacaaattaaccccgggccttactgatgcacacaaagaggtttgggcggggaaaacggggtcaagtgaggggccttgaggaagacaacttgggctttttgagccccccc

SEQ ID NO: 72125 - DNA, 312 bp, Zea mays
  Clone ID: MRT4577_16577C.1
gtaagaggctgccagttctaaactgtgctgtggctatggccctatttctattcatttttaactaaaatttatttagggtcttatcattttgttaagaatcatttggatggtgacccattaccatctctagttgtggctcgttattgcatagaagctagccgacagtggaagatcggctttgtacagggatgttcgaaacttcgaatcaggttatttgtggtgtatatataatgccaaattaccaatcacaagaagtaaaaaaaaagtcattcactgtcaaaaaaaaaagggcggccgctcgcgatctagaac

SEQ ID NO: 72126 - DNA, 342 bp, Zea mays
  Clone ID: MRT4577_165780C.1
gggggagccaaaaattaaaccgtttttacttatttttgaacacaatttttcccccctgcaaagaaaaccaagcgggttccggaaccccccttttttgaagtagccgggcccacgcccaccaccttttttcccttaattttactcaccaaaagctccggactccggggggggacttatttttgggaaccattaaatttcccacccctgcggtacaaaattaacaggtgtttggttttggtgccccggaacttgtttgcttggtcgcgccccggccggtactactgtaaagcaaaaggggggggggcttttttttgccgcttgcctctcggggtccttgggggc

SEQ ID NO: 72127 - DNA, 383 bp, Zea mays
  Clone ID: MRT4577_165781C.1
ctagctcctgccccgccgtcagcaagcatgacaccgatcagtgaacagcaacaagccaacaaggagcctcctcatcacacacagtctgcaacatgccatattgctccagctccaagcgaggtagcgggagtggtcggggacgcggagaacgccgaccaggagcaggagcaggaccagcagcagcaggcagcgaggcgggagcgggacttccttgcggggatcaggaagctgttcaagagcttcaagagcctctcccacatcttcgagatatacaaggacgacgacgatagcgacgacgaggacgacgacatggacacaagcatcgagatcgggcttccaacagacgtgcagcacgtggcgcacatcggcctggacggctccac

SEQ ID NO: 72128 - DNA, 147 bp, Zea mays
  Clone ID: MRT4577_165782C.1
ggggatgctccgaggcgtcctgtcctgattggcagaagcctcgtagtcagctggggggtatgtagccacctacactggcatctttcgcccggggcttcaaaggaagtatcactctaagaactctccgtggcgacccatgcatggccc

SEQ ID NO: 72129 - DNA, 584 bp, Zea mays
  Clone ID: MRT4577_165783C.1
aaaacaaaaaaaaaccccccggcccaattttcaaaaaatttaacggaacccaaaaatggggaaaaaaacgggaccttttgggggaaaagggtgtttccaaaaccccccccccggaaaaaaaaaaacaaaaaatttttcagggggcccaattctgaaattggccccatttgggaacccaaaaccgggaaacttcaaggatcaaattttttcagggggccaaattcggggggggggaaaaaaaaatcttcccttcacgaaacccaaggggattgttttcctccgaaccaacgaggtttggattgggaaaccatttttcatccaggacggattatttttgaaatcggagaacaggccccttcctttttacggaaaaggttcctcccgcccctggaaagggggacaaaatttgacgggacagcaagcccgatctgggttccccccaaaatcttggcgggcttggccccgattccgaaaaaacccccaagtagggccgggggaggaaaaaaaaaaccaatcgggccgggggggggggccccaaaaaactggaacgcccccacaatgtttgtgttgaaaagggccccaaa

SEQ ID NO: 72130 - DNA, 378 bp, Zea mays
  Clone ID: MRT4577_165784C.1
ccgattttgtttctctctctctctctcccttgtctcaggggctcttatttaatcctctcttcttattatcgctttcctttatttaaggaaggagttgggctctctctctttctctgagtctgaatccccacgagacgagaaacctagcaaaaatctcgtctttcgccgcgctctccctcctctgattcctgctgttcttgatcttggatctcaattcccaaccaagaacacacagacagagaaaggaaggagaagaagatgtcgaacgacatcaagaaggtgtctaccctggaggaggtcgccaagcacaactccaaggacgactgctggctcatcatcggcggaaaggtttacactgggtcgaaattccttgaggac

SEQ ID NO: 72131 - DNA, 179 bp, Zea mays
  unsure (1)..(179): unsure at all n locations
  Clone ID: MRT4577_165785C.1
aggaactctttttgcttggggattttgnggagggaaacggaatacatccctcttgtctaactaccctttaaataaacaattttaactgggtctggagaaccagggacagcaacatttaacactttagctactgcaaggcctactgatattttttttaaaatactctataaatcttccac

SEQ ID NO: 72132 - DNA, 490 bp, Zea mays
  Clone ID: MRT4577_165786C.1
gtcaaaatggctgatacccataggtgtagatgggtttgcataggcgtgggcttccatgggtcttcacccatccgtagaccgcatgactgtattcgagtcgactcccaacttagtcccaagtcccaacatacccaactcaaccctaactccccaagtcttcacccgtgcaccggcagccgcatcctgcttcttgccccggcgaccagagtctcccctctccccaagtcttcgcctcggcggacggagctcccctggcccctgctgacgaccgacgctaattagacactttcacacttagaagccggcaccccctgtcccctagcgcacgctcttgcgtacgaagcgaacacactgccgtctcggggaccgttcacacatggttcttttcttttcacttccagggagatttatgcgtcgtttcgtgggcttctgatgctacctagatgtgcccttccactgttgctagcttcgagcttgatcagagactctt

SEQ ID NO: 72133 - DNA, 414 bp, Zea mays
  Clone ID: MRT4577_165787C.1
tttaaagctttttttttttttttttttttttgattttttttattttttttttttttttttttttttttaaatttttttttttatttttattttttttaaaatttttttaaaaaaaattgagaaaaaattcaaacaaaaatttgattaatttttaagaaaaaaaatcccgggtttaagggaccatttaaaaataacttccccgggggtccctccaaagggcgaaatcttcctaaattcaaaaaactggacagtgggttgatgtttcattttaaggggcccttttaccctatatggaggcgaaattaaaataaatgggcccctttttaaaaatctattccttgaaaaatccctgcatttaccaacctaaatcctttaaaagaaaatcccctttttccaatgtggtaaaaatcaaaa

SEQ ID NO: 72134 - DNA, 586 bp, Zea mays
  Clone ID: MRT4577_165788C.1
ccgggttcttacccacgcgtttttgagcctcggggttccgcctctgctgcttccgccatggcgaacagctcctatggctcaagggaagggctaactatcaggcctgctgcatcatcaagctctagcgagatttcgctccagattgacccaatcaatgctgatttggatgatcatattctcggactgcatggacaagtccgcgggcggagaggagttgctcaagagatccaaacagaggccaagtatcaaaatgatttcatatctcagttgcaaatgactctggcgaaggcccaggctggggtcaacaacaacatgaggagaatgaaccaaagcatcattcagaatggttcaaatcatcttgtccatgttgtcctgtttgcccttggctgcttctttctagtgtacctcatatcgaaattctcccggagatgaaattccatgtctcttgtcttaataaagaaaggggagaaataaatcaaactatattggtaagattttgtttgactgcacctcattccatactaattttccacctgaatatatgtggatgatggataaagagtacagccaaaacagggcagtagct

SEQ ID NO: 72135 - DNA, 857 bp, Zea mays
  unsure (1)..(857): unsure at all n locations
  Clone ID: MRT4577_165789C.1
attctctcattaatcttaggacagattcgaaatacatagttccaagaaaactacaaaacaagttaagtttcatgctctcatgaaacaactattagagcgaagatttcatcgcatcattccctccaccgatgaccacaatcagggctgcagcacacaaagaacagggtcnnnnnnnnnnnnnnnnnnnnnnnnncctggaagaaaacaacctctccatgcccacagagattgcagcggacagtcttggttctgggaagagttggatcagaagctacatcctgcaagacctgggttcgttccccagcagtgtggtgcacctcgttccgatagacacagttattgtcagagacctcctgccgaataggactgtcaaatnnnnnncaacaacctttgagctaagtcagcagctaaatgaagtaactggtcatcataagattggattctcatacccatatccatancgagtggaagagtgccagttgttgatctactcttcnnnnnnctctcactcgtgcagaagccatgaaggcacaacaccttggctctcttgtcctgcttcatgagctcaactctccacttcaaggctccatgtcgctttcacccaactccagttgtaccataactcgagcaccncatgacaacatgttgaaagaagagaagaggttgtgttacctaagtctgggaagtccttgtatccgannnnncagaagtggaaggagtctagaaggttgaagaatgatgcagtcatatgcagacttgaagaattatggacataagctgcccatatccaggcaaatgcattacacaaatagatataggtctgtnnnnnnnnnnnnnnnnnnnnnntggtgccgaat

SEQ ID NO: 72136 - DNA, 1360 bp, Zea mays
  Clone ID: MRT4577_16578C.1
ggtaacttagccattattcaggagcactggacttgggagaacataaaaatctggactttgaagaattgttggagctttgcatccgtactcaagagagttgctcaggattcagaaggtttgaattatttcagatcattgacgctacaggcaatttcccggaaagtagaatcatcgggtcgggtggttttgctatagtttacaagggtcagttacctgatggatccatggtcgccatcaaaaggatggatgaaggtgccacaatgtttgatttcagcagtgaatttctggctgcgaggcttcagcataccaatctaattagacttttggggtggtgtatccatgggaaagaaaggattctagtgtatgagttcatgcacaagggtaccctgcacagtttaatctttgacaaaagaatggggttgttgctagactggtctaaacgaatcgatataatcagaggggtagctcaaggactgccgtaccttcacaagcaggccaagttatggattgttcatagggatttgaagctccaggaacgtcctattagatcatgacatgaagccaaagcttgctgattttggatcggctagaactctgacttcggattccgctgaagagtgtacaagcagggttgtggggactagtggctacaaagctcctgagtacacgtctcgaggtgtctattcactgaagacagatgtgttcagcttcggggtggtggttctagtgaccatcagcgggcgagagaacaccatactggagaagcaaggagactctgttggcacccttgtacgagatgcctggcagctatggaacgatggaaggctgcatgagcttgtagatccagtgctgggtgacggattcgaacttgctgaggtgatgcagtacgctcaagtggcactgctctgcgcgcaggaggagccagcagatcgtcccaccatgtccgacgtcgtgtcgctcctgaactttgaaagcataggtctgctgccagatcctaagcagccgtctgagctttgtaagggaggtggtggtacttctggtgacaggttgccgacatgtggtagccagtcgagcaggaccatagacatcacaatcacaagttcagctcctgtgtcaactagaactagggtccgcatcattgtggacccagagacctaaaatgtagacataaaccgatgttaatatgtaaaagaacatggacaacttttagggctaaaaaaaaaaaaaaaaatatgccccatggtgattggggctatctgagggccgaggggaaaattagtccatttctctctcaattccctccattctccataaaaactcatggatccaaactagcccaaaatgtgatgggccttgggct

SEQ ID NO: 72137 - DNA, 221 bp, Zea mays
  Clone ID: MRT4577_165790C.1
tgatcctgtcacaggtgccgagcatagactgccccatggcgctgcgcatgatgcgcctgctccaacccctaccccaactgtgcagcaagatggcactcctccaccggcgcccgcctgcgctagatcatgagcatgcgggacgtctccccgttgcctcggatcaacacctgcgtcggcctgtactgcgtctactatagccccaagtagaacgacaagccgga

SEQ ID NO: 72138 - DNA, 1328 bp, Zea mays
  Clone ID: MRT4577_165791C.1
cattgggtacctcgaggccggccgggaatttcttggagcccagccgtgacgtgagaaatgattccaacgacaaagctagtcacatcatgagaaagagtgagggttctcatcaaatactctaccgcctgcaggtgcagaagattggaacaaggatagcctttcttcctgtgcagccactccagtgcacgccgccgcagcttgctacacgtgccgggcaagggcaatggattccagcagcagagtgatcgccttcgattgcagctccttcaaactctacatggacggccaagtcgagcgtgcggcccaacgcatggaaaccgtgcccgccggcttcgacgcggacacgggcgtggcatccaaagacgtcgtcatcgacgtcgccaccggcgccaccgtgcggctctacctaccaccagtccagggagccacgacgaagctcccagtcgtcgtcttcttccatggcggctacttcatcgtcggctcagcccgcgagcctatgtaccatcgctatgtcaactcgctggtcgccagagcacgcgtcgtcgctgtctccgccgactaccgcctcgcgccagagcacccgctcccggcagcctacgacgactcctgggccgcgctcaatgtgggcggtctccggcgcggaccagtggctgtccgaccacggcgacctcggccgcgtcttcctggtcggcatcagcgccggcggtaacattgcccacaacatggccatctctgtggggcgtgagcggcttgccggccgctgaaccaccgcgcatagaagggcgtgatcctgcttcacccttccttttccggcgaacagaagatggatgtagaagaagaggagttctggcgatctaacaatagcaggtgggcggtcatcttcccgggcgcgaccggcggggcggacgatccaaggattaacccgatggcggacggcgcgccgagcctggagaagctagtgggtgaaaggctgctcgtctgcacggcgtctttggacccgagggcgccgagggggcccggatactgcgaggccgtacgggccagcgggtggcgcgggaaggtggagtggttcgagacggaaggtgaggaccacggtttcttcgtcctcaaccccggcagccacaaggcggttgaggtcatggatcgagtggttgctttccttgcggaccagtgatgacctcctcagggcacagcaaggtctagcagctcgccgcaaaaccggacgtcctagctacggcgcagccgttctcaggcgattgtttactgtctgtactcccaagagtgtcctagatgagttattggaataaacactacagtcaattcaaacc

SEQ ID NO: 72139 - DNA, 619 bp, Zea mays
  Clone ID: MRT4577_165792C.1
caccaaggagtgttcgtggtggagcagccatggcttcatcggtggctcgatcgcggcgagcacattcctgggacacccgcctggcggcacccggcgccacacaacggacgcatagtggcacctgttctggttcgggttgggcggaaaggcgaaccctgctccgaagaggaggccaagacatcgacctcctctgaccggccgctgtggttcccctgcgccttggcgcccgactacctggactgctcgctggtcggcgactacaggttcgaccctttctgtctggggaagcccgtgaagtacctgcagttcgagttggactcgttggaccagaacctggccaagaatgaggtcgacggcatcatcagcacccggttcgagtccttcaaagtcatagtccacgcctcgttgcagcgcctacagcgaggtgttcggcctccatctgttccgcgagtgcgagctcatccacaggcgctgggccatgctcgccaccgtaggcgccctgtgcgtcgagtggctcaccgtcgtcacctggcacgacgccatcaaggtggagctggtggacggctactcctacctgggccaggctctgacggtctccatatcgacgcttatgtgggat

SEQ ID NO: 72140 - DNA, 247 bp, Zea mays
  unsure (1)..(247): unsure at all n locations
  Clone ID: MRT4577_165793C.1
antgaatttcttttacaaagacatgctgtgcttgccctttaataagctaactaggcataccgtgatgggctgtattatgacaccaacctagcccccatccatgctaagcatggtaccatcattccaaatgacattcaactggcaaagaaaatccgccactagaaggcctaatcgccacctcaaacatcgtgacaaaaacatgaagtcctggggttattgttaaaactcttgccattataaggacata

SEQ ID NO: 72141 - DNA, 284 bp, Zea mays
  Clone ID: MRT4577_165794C.1
tcgccgccaccctcgccgtttcgtcggctccggcgcattgatgccgtcgcacaagaccttccgggagcaataagaaggtggcgaagatgatgcgccagaacctccccatcttctacgtggatccgcatgcacacgggacagaaccgtagtgtacccatgcctggcgcgaacgctagctgcttacccagctcctatgaaggcggctggacaatcgttcacactgtagttttccggaccataggcactctacctttgtctttgttgtgtagccgatattgtacttg

SEQ ID NO: 72142 - DNA, 1132 bp, Zea mays
  unsure (1)..(1132): unsure at all n locations
  Clone ID: MRT4577_165795C.1
accgcaaataagaactccaccctcctccccaccttggatcagcttgttccccaacccgaacccaaccctcgaccgcagcgactcacagcggcgcaaccatggtgctcgagtcgacgatgatctgcatagacaactcggagtggatgcggaacggcgactactcgccgtcccgcttccaggcgcaggccgacgccgtcaacctcatctgcggcgccaagacccagtcgaacccggagaatacggtgggcgtcatgacgatggccggcaagggcgtgcgcgtgcttgtcacccccaccagcgacctcggcaagatcctcgcctgtatgcacgggctggaagttggagctgaagcaaacttggccgcggctattcaggttgctcagctggcgctaaagcatcgccagaataagaggcaacagcagagaattattgttttcattggaagccctgtgacatacgacaagaaggtcttggagacaatagggaagaagctgaagaagaataatgttgcccttgacgttgttgattttggtgaaactgatgatgaaaagcctgagaaactggaagcgctgatcgctgctgtgaacagcagtgatagcagccacatcgtccatgtccctccgggtgaccatgccctttctgatgttcttataagcactcctatctttactggcgaagaaggtggaagtggctttgctgcttctgcagcagctgctgcagccaccggagctactggatatgattttggcgtggacccaaatgtggacccagagttggcacttgccctacggttgtctatggaggaagagcgagctaggcaagaggctatcgcgaaaaaggctgcagaagacaacaaggatcagccctcaagctctaccgatgctattatggctgaagcggaacttaccttaaatgctcctgctgatgttgacgcagatctactcaaggatgatgatgatgctcagctactacagcaagcacttgctatgtncatggatgagggtgcttcaggagctgcagccgtggctgatgctgctatggcagaagctgctgcagatgaccaggatttggcattggctcttcaaatgtctggtcaggacgctgaggcggctggtcaatctgatatgagcaa

SEQ ID NO: 72143 - DNA, 464 bp, Zea mays
  unsure (1)..(464): unsure at all n locations
  Clone ID: MRT4577_165796C.1
ccggccggattttttgtccacgatacatacgacatgcctcgtttgatgggactaacacattggctatgttactcactaccatttatctatcatgcgggcacttgtggagttaccactgcactacatatgactaccaaggtgtcctctatatgtngaagcagccataatcactgaagagcattaacagctattgcaatgctgcgacctccaacaccgttggtttacgactcagtgtctcttgctacattgaaactactataccgcttactgatgagagcattgactatcgctccgagaatacgttcacttgaccactgttactgctcctgcctgtataacgaaaactgatcgctgtgtctctactgctcctccatgaagcgtcccaggagcacgtgacagacgagctccaagagcggcatggaagaaactacagacctgatgaaggcgcttccagagacatactt

SEQ ID NO: 72144 - DNA, 237 bp, Zea mays
  unsure (1)..(237): unsure at all n locations
  Clone ID: MRT4577_165797C.1
tcggagagatgtcactatctctagttcgtcgtcactcgtttgccatgggtnccaatggtctcgtctgtggaaactctgcactttcagtaggtccanntctatcgtcggtttctagtctatatgccacgagttttgtcgctaacgaacaaactcagtcagatcgttgttggtgaactctattcatcgatggagcctttaatttgtctgcttaactatcgactcgtacctgttaaagta

SEQ ID NO: 72145 - DNA, 341 bp, Zea mays
  Clone ID: MRT4577_165798C.1
ccacgccacccgtctgtccacacatacattgacgcgtgggtatctgccactcgccgagtagatggggaacgggccagaccgtttaagctgtccctgctctgtaccattctactacgcctgcttttctgagactctgacacggatgttggcaagaccaccagcaccgtctttggtgactgctcaaactcctgaagtcggcatcttcattacagctcgcaacgtctcgggtgcacttgtcgccaaactttctggtaacaaaaacaagtgtggaggaagatcgaatgttcggcaacggaacattcaacctgtgaaaaggggctgtcgtccggagtggcgggcgc

SEQ ID NO: 72146 - DNA, 990 bp, Zea mays
  Clone ID: MRT4577_165799C.1
tgaagcgtactaacaaaaagcgcccgattcgcctcgcaaaatcgccgccgccatcacctacctactcacagaagttccgccttcctttcctccggcgcgcgccgcgcctgtcgccatggtgaagcgatggcttcccctcgaggccaaccccgacgtcatgaaccagttcatgtggggactgggggtccccgaggacgtggggttctgcgacgtgtacggcctcgatgacgagttgctcgccatggtgccccagccggtgctcgcggtcctacttctctacccccaggaccggagcaaggagtcccaagcttcagctacctcgtcggtggagaccaaggagcccagcaagaacgtatatttcacaaagcaaactgttgggaatgcctgtggcacagttggtattattcatgcactggggaatgctacttccagaatcaagttaggtgaggggtcatattttgatagattttataaacgaactgctgacatggatcctatccagcgtgctgcatttcttgaggaggacgaggaaatggagaatgctcattccattgccgctactgctggtgacacagaggccaaggacggtgtaattgaacattacatttgtttctcttgtgtcgatggagagctttatgagcttgatggggggacatcacagccaataccccatgggccttccactcctgataccttgttgcaggatgctgcagaagttataaaagcaagaatcgccatgtattcacagtcaaacaacttcaatgtcatggctctttcaggcaaagcgatatagcattatagcactttcagtcataggcactcgatatcccacatttgctttgcagcagccttagtccaacactgcagtatgttctattgttttcttgccttcgttttattatttaaacacgttaaaacaagataaataaaagcgtggctacagaaaagttcccgttggtagcatcacttctcttgaggagagcttcgtgc

SEQ ID NO: 72147 - DNA, 374 bp, Zea mays
  Clone ID: MRT4577_16579C.1
gggaaccagaacaaaactccgggtttaaaggggaatcctccagaacccacccgaaaaccaatattctaaagggaaaagcccctatttcacccccaaaaggggcatcccggggcaaagatagctttttcccggggaaaagagccccctacagtctaaataaaatatatatcggggaaaaggaccggtggacaccaaaattgccttattgaccccaaacggcggctaaacgccccaaaagaccggtttaacccatgaggaggctccaaattggcaaaaaaaaacagtcaattgaaggaaaggggggggggttccaaacaaaaaacaacgtaaaattttcctgggacgggggggcagactgaaaaaaacccgaaaat

SEQ ID NO: 72148 - DNA, 377 bp, Zea mays
  Clone ID: MRT4577_1657C.1
agaagattgagctgctagttgacaaaactgaaaacctgcgttcttaggcacaggattttagacagcatggcaccaacgtgcggcgaaagatgtggctccaaaacatgaagatcaagctgatcgtcctgggcatcatcatcgcgctgatcctcatcatcatcctgtcggtgtgccatggcttcaaatgcggcagcaacgtgaagatggggggcgtgacttacaaattgctggtgtgccctggcaccggcgaagagaaaaaccattgggagggagttttgctctgcggtccgcgtgttggtgacgcctgcgcttattattcttggtgatccgcagacggagttattgctgatgtcagtgttgattgctgttggatggga

SEQ ID NO: 72149 - DNA, 327 bp, Zea mays
  unsure (1)..(327): unsure at all n locations
  Clone ID: MRT4577_165800C.1
aactaacggagacaaacttttttttagaccancanggccgcccagtggtgacattattgcactctgttaaaaaaaaggactactagtacaataaggtaagaacttgattaacttccttctatgctgccacaaaacacaatttgacattcccaaaggcagacagacttctatttgtgcgggggcaanggatgttacattgtccaaggtataccagtgtcatctatgattaataaaaacttgccttgatttatgtaaaaaaggacaagccctgaacatgtntttaatgtactataaaaacanagttaaattaaggagaaggtactttgg

SEQ ID NO: 72150 - DNA, 320 bp, Zea mays
  Clone ID: MRT4577_165801C.1
taggtcatatattgtgttattaaccaaaccatcggggcaaggggacatactgaaccttcaaggaacccacattcacactttaaatcatttccctgtaccaaaaaactgaatcgataattccatacattaccttaagtacatttactaaatgatcataacaactctcaactatacgcaaccgatctaattaaactacaaaaccacagtccgcttataaactagacatccaaaggactcattcaaaccctcctatactttaagaattgctcctcaacacttagatggatcatacgattactttttggacctcacttttcaca

SEQ ID NO: 72151 - DNA, 821 bp, Zea mays
  Clone ID: MRT4577_165802C.1
ggtacccccggtttggccgggaattcctcgcttcctcctcccttctctagttctctgatcctcagcacttagcatcaagcttagcacaccgaggagctgttccgcgggagggcgtacgaaggtgcctcacttaacttctacaagggcgccgagaaggtgcacgaggaggaggccatcggccccgagcggctcgcgggcgacgtcctctactacggcgacagccactcggcggtggtgcagctgcactcgcgggaggacgtggaggcgctcatcgacgagcaccgcggcgacaagggcaagctcgtcgtgctggacgtgggcctcaagcactgcgggccctgcgtcaaggtgtaccccaccgtgctgaagctgtcgcggtccatggtcgacaacaccgtcttcgcgcgcatgaacggcgacgagaacgacagctgcatggagttcctcagggccatgaagatcgtggaggtgcccactttcgtcttcatcagggacggccagatcgtcggccgctacgtcggctccggcaagggggagctcgtcggtgagatcctccgatacaacggcgtcagggtcacctactgaagtgaagtagtgaacaacaaaccagtcagagtcagagcaagcaccagccgacaagcaacgcttcgatacaaaattgaagacgatacaaaattttagattactgcgacgtccatcgacgattggtcgatgtttagactgtttattgtgtaccattaccatacttgcccgttaatcgctactattcaatagtaatagtaggcttttgtagggctagcagctgcttgctgctttgcaac

SEQ ID NO: 72152 - DNA, 1455 bp, Zea mays
  Clone ID: MRT4577_165803C.1
tcccgggcagcagtggcccctttggtgggtttggaagaaatagcagccacaagcaagccggcccgggtgtcatcttattccgatcctagcccctccggccgggaattcctcgcttcctcctcccttctctagttctctgatcctcagcacttagcatcaagcttagcacaccggcgagatggcctccacctccaccttcctgtccaccctcgccagcaggtccgcggcagccgatagcctgcgcagcgccgtgccgtccttcgccaagatcgtcaggttcttgcccgcgcaggcgcagatcagccgcaggcggcgcgcggcggtgctgcccacgccgagggcggcgctgtcgggcaccgagaaggcgccgtcgagcaagcacgagcgcgtggtcagggtgcacagcacccaggagttcgacgacgcgctcaaggccgccaagaaccggctggtggtggtggagttcgcggcgagcgacagcgaggacagcagccagatctacccgaccatggtgcagctcagccgcacctgcggcgacgtggacttcctgctggtcctgcgcgacgacgagtcggaggccaccgaggagctgttccgccgggagggcgtcacgaaggtgccccacttcaacttctacaagggcgccgagaaggtgcacgaggaggaggccatcggccccgagcggctcgcgggcgacgtcctctactacggcgacagccactcggcggtggtgcagctgcactcgcgggaggacgtggaggcgctcatcgacgagcaccgcggcgacaagggcaagctcgtcgtgctggacgtgggcctcaagcactgcgggccctgcgtcaaggtgtaccccaccgtgctgaagctgtcgcggtccatggtcgacaacaccgtcttcgcgcgcatgaacggcgacgagaacgacagctgcatggagttcctcagggccatgaagatcgtggaggtgcccactttcgtcttcatcagggacggccagatcgtcggccgctacgtcggctccggcaagggggagctcgtcggtgagatcctccgatacaacggcgtcagggtcacctactgaagtgaagtagtgaacaacaaaccagtcagagtcagagcaagcgccagccgacaagcaacgcttcgatacaaaattgaagacgatacaaaattttagattactgcgacgtccatcgacgattggtcgatgtttagactgtttattgtgtaccattaccatacttgcccgttaatcgctactattcaatagtaatagtaggcttttgtagggctagcagctgcttgctgctttgcaactttaatcttgtttggtgatctatcaggttgattgtccaactagtgtcttgcaaagttccaagtttacatgttcctgcagtcgagaaaaaactgtaatttttcatttcacacatgacaagattttgtttcaaccttgcc

SEQ ID NO: 72153 - DNA, 497 bp, Zea mays
  Clone ID: MRT4577_165804C.1
ccggccgggctatacacactagtacgtgtttagagatggaagaagcacacccgaaccataactaaagatcagggagaacaaccacctggcgcgcacacggatgaccgcaatcggaggccccagaccggacggatactaagggatctaggcgccagcaaggggacgcaaagccgcaagaagtggcgaatgctgtccagccgccagaatggaggcggcaagggcggaagggacgctgcatatacggggtgtaaacggcaccaagttatccgcgaatacatgcgcgagcgccacgactggacccgtgaaagaggcaccatccgggagctcatatacggcaagaacgtaccagacgaggatctacaacggaagcacactgaacgacgagcgctctctatagagctatggcggtcgaaacaccaaacacatcttaattctttatgaggagcgggcacaccagctggctgcatggcaagcgctgctgcctaccccattgcttc

SEQ ID NO: 72154 - DNA, 343 bp, Zea mays
  Clone ID: MRT4577_165805C.1
atagttcaatgggggttgttaactcatttggggaaaaaccaccacccttggtgcctttcatttatttgggccaaaaaagaccttgggttccatgttcaacggtttagaagaggaaaaaaggttccgcagggattattgttgtctccggcacggccaagcacaggaccctcatgatggacaacagcactggccacggttcttggtaaaaaaagggagagagaaaggattcaataggggccctggtgtggtcaggcgccgaacctttccgtgttggggggggccttgcagccgaaggggggcccagcgggggttaactccggtggggttatggggggttggcttc

SEQ ID NO: 72155 - DNA, 247 bp, Zea mays
  Clone ID: MRT4577_165806C.1
gttttagatgctatgccagaaggcatcaggcaaaatagggctcgaactatattacagcatcttagtgaggcatggcgttgctggaaggcaaatatcccatggaaagtccctggtctacctgtgcctattgagaacatgattcttcgttatgtgaagtcgaaggcagactggtggacaaacgtcgctcattacattcgtgagcgcatcaggcgttgagctacagtttacataattgttttatttaaca

SEQ ID NO: 72156 - DNA, 2510 bp, Zea mays
  Clone ID: MRT4577_165807C.1
gttgcgcctgccgccgccgctctgcctgtcaaacccaaactaaaaccctcgccgacggcgcgcctgttgttaaaccctagaaaaaccagcggcgacaggagtggccgcaaccccgccgccggagggggctccacgaccagcatagaagagggagagaggatgaggatcttcgagccgttccgtgcgatcggctacatcacggcgagcggcgtgcccttctccgtgcagcgcctcagcaccgagaccttcgtcaccgtcagcgtcggcaaggctttccaagtctataactgtgctaagctgaatttggttcttgctggaccccaactgcccaagaagatccgtgctattgcatcctacaaggattatacatttgcctgcttatggaagtgatattgcagttttcaaaaggactgaccaggtggctacttggagtagacatgaagaaaaggtcaacatgctatacctatttggagaatatgttctaagcgcagatgctaaaggtaatgtattcatgtgggccttcagaggagcagaaccaaacactgaaccagttggaagcatatcattgggagacaagttcaccccaacatgtatcatgcatcctgatacttatctgaataaggtaattgttggtagcgaagaaaggctcttgccgcctgggaatagccccacaaaaatataactgtatgatttcaatggttggaactcacctgttcggtgttgtgtctcttctcctgccctggatgtagttgctgtcggatgttctgatgggtcagttcatgttcataatgtaagatatgatgaagaattgatgtctttcaaccaccagattcgtggtgctgtgactgcactgtcatttcgaacagatgggcaaccccttctggcttctggaggttcttcaggcgttatcagcatatggaatcttgagaagagacggctgcattctgtgattagggaggcccatgatggttcaatagtttcacttcacttttttgcgaatgaacctattctgatgagttcagctgctgacaattcagtcaaaatgtggatatttgatagtaatgatggaggtgctcgtctgttacgatttcgaagtggtcacagtgcaccacctaggtgcataagattctatggcaatggaaaatgcatattatctgctggccaagatcgtgcatttcgtcttttctcagttatccaggatcaacaaagtagagagctttctcagaggcatgtcgcaaaaagagcaaaaaaactaagagtaaaggaggaagagatcaagctaaaaccagttgttacatttgactgtgctgagatacgtgcacgtgactggtgtaatgttgtcacatgccacatggatactccacaggcatatgtatggcgtcttcagaactttgttattggtgaacatgttttgacaccatcatcaagcactgtgacaccgattaaggcttgtgtgataagtgcatgtggtaattatactatcttgggcactgaaggtggttggattgaaaaatttaaccttcaatcagggtttagtcgtggtagtcacattgacacctcgttggcaatgcaatgtgcacatgatggtgaagttgttggattaccttgcgatgccagaaatggctttttgattagtgctggataccaaggtgatattaaggcatgggattttaaaccttgcaagctgaaatctagattggatgttggtaaatctgttactaaaatcgcatttcaccggccaaatggtcttcttgctccggtagcaggtaatatggtactcatattgtttgatccggtgtccatgaaaatggttcgtagatttgaaggacatacagacgcacgagctgatttgtgcttcagtgaggatggaaaatggctcatctcgtctagcatggatgggactcttaggatttgggacatcagtttagcaaggcagatagatgcaatgcatgttgatgtatctataacatctatctctatgtctcctaatatggatgtgttggcaaccactcatgttgatcaaaatggtgtctacctctgggttaatcaatctttattctcggtctcaacaaatactgaaaattatgccagtggtaaacatgtacggaatgtgtgtttgccagctgtttcatcaacagagagatctgaggaagaacaagttcagaatttaggagagtcatataagtccagtattaaaccttttgtcataacggatcatcaaataccgaatctagttaccctctccttacttccaaagagtcaatggcaaagtttgactaatcttgacattataaaggttcgcaataaaccaattgagccacctaagaaacctgagaaggcaccattcttcttgccttcagttccatccctttctggggagatattgtttgagcctcctgccagctcaaaagatacagacatcagtaccacgaagaatacaaatcataagatgtctgaactctcctctcatttcagtcagcagttgcaattttgtggtgaaacaaagaact

SEQ ID NO: 72157 - DNA, 101 bp, Zea mays
  Clone ID: MRT4577_165808C.1
cacacaacggcagagaccaagaagccgtgaccgtgggagagctccgagcgccagccgcgtgcggcgtgtccatactccatacacggaggaagaggaacaga

SEQ ID NO: 72158 - DNA, 493 bp, Zea mays
  Clone ID: MRT4577_165809C.1
ctacagcacggttcagcaatatatagaaagtggaataaaggccttacagctaacctgaacacgctgtccatgaaccaaacgcaacaaaacatgaggataaagttttgaggaaggtagctatatatccttgccggtaaacgttatttttttcttaaaaaaaagttccaggcagaacattccgagaacttatgccgtggcagcagcctgggcagcaaagccgcgcctcctctgaccctagatgatgctgagcttgacaccctggcccttgggcaggctcacccacggcttggtggcctggccagaggtgaacacgtggcccatgctgctggcgaactgatggcccatggtggccccgacgaggatggctttgaaaccgtccttgtgcatatacgtgtttttgataacacatacacgcccggtgtacgtcccgccgggcaccatgaccacgttgccgacgtcaaacttgatgaagtccatgatacttgatggaata

SEQ ID NO: 72159 - DNA, 512 bp, Zea mays
  Clone ID: MRT4577_16580C.1
gggaaatagaacagccaaataaactaagcaactggcacgacttggctaaaacatacgatgaatcaaattgccttgactcgactcggattcgcatgaaaaattacactttgccattttactggggggaacaaaaaatcctggttaattgaaaaaacagacaaaccaatgcaatgcattttttttgttgggcggggccttgacaccaaaaaacccccccctttttttgtccacccataaataaaaccttgatgcttaaactgaggaggaacttgttaaagccaacctttcaaccgccgccgccttttctgccatgggttggatcaatagccttgaatccaccggtgccctttctgccggggcttaaggttgccctcaaaacattggaccccgggtggttgggggggggacccttagccgaaaccttttgccaaaacaagaagttccggcacccgttgaaactgatccttttgttttttccgagtggcccggatcccccgttggcggtggaaaag

SEQ ID NO: 72160 - DNA, 194 bp, Zea mays
  Clone ID: MRT4577_165810C.1
ccagcccattaacgctcgttcctgtagcgcagccacgacctccacttcacatctccaccggcggcggcgcggtcagttgagcaatggcggactccaacgccacctcggcggtcgacctccgcagccggaagttcatgaccaaccgcctcctggaccgcaagtacttcgtgattgacgtgatctacgccggcagc

SEQ ID NO: 72161 - DNA, 400 bp, Zea mays
  Clone ID: MRT4577_165811C.1
aaaccgcaggacgggcatggtattgaagtggttaataaaagctttagcagcacatgattttttttataacgcccgtttttttttttttaggtaggctagtagggggcgggcgggtgttttttttcccgcccgcctaagatgaaagaaagagagagggcccccttgcccgctgggtccaattaaacccccgaaaatccccggggaaaccaaaaactgggggtgggggcctttctaaaggggggggggaaagcctggttagggcctaaggctttacccccccccccacggaagcttaagggaaaaaccattatggatacctggggggggaaacgggggggctgtacatttttatacgggggggggcacatgatcttaaattttgggggactgggaaaggaaa

SEQ ID NO: 72162 - DNA, 259 bp, Zea mays
  Clone ID: MRT4577_165812C.1
gccacacgtccggtccagaacaagaaaccacccgcttgcagagcggatggtcgaacacatcactatataaacgggcatggctgtggtcgagggccaagatgtgcaaagttatacaggctctagcatggacatgccgtagcggatgagcaccataaaggtgttgtacgtgaaccccaacgcgctgatctatattctggcggcgtaccggtaggtggaggaattttttcccgagtggggagagctagttaaaaccacctgg

SEQ ID NO: 72163 - DNA, 781 bp, Zea mays
  Clone ID: MRT4577_165813C.1
ccggccgggttttgccggccgcgttgccctcccccgtcgcggcgcccggccgccgcggcaagggtggtaagcgcaagatcaagccatcagcggcaacccatgaggattccaacatgatcccgcgcaagcccgtcgaagcagtggtggtgggtaagggtaaggtggccaaggataccgtgtccgagtcacctgctccaagccccgcccccgtctccgccccttagttgcgtgttgggcgccgctgcccgccggcccccggccaccatgcgtcgtgtctgcgcgcgcacgcacgcattgaacgggagatagaatatggtatcgttcaatgcagattgccatgctatagctccagagtttatctacctggtagcaccatgacacgatggcccgttcgtattttctggcttgctcgtacttttcagttccatgggtttacaacaccttttactcccagcagaaaatacataatatgcatgtactcctctttttttccgtatagtaatataaacaaattttcacaaaaaaaaaaaaaaaaaaaaaaaaaaaaaaaaaaaaaaaaaaaaaaaaaaaaaaaaaaaaaaaaaaaaaggttttttacccggggggagttttggtttttttgggtttttttccctttttgggaaaaaaaaaaaaaaaaaaggggccccccagcccaaggatcaaggcgtacgaaagcgtggaagcagcatcacatgtactgaaaagtggaacggaaaattaattcacaggccgccggtaaagaacttcgtgcagggaaaag

SEQ ID NO: 72164 - DNA, 848 bp, Zea mays
  Clone ID: MRT4577_165814C.1
aaaacttctatctctcctataattaagcccatcaggtcgccctcctcctccgacctcgtcccgcagcaacgcagcagcagcgtcagcggtaccgccggcacggctcctcctccctcctagccattcggccatgtccggcggcgggtgcagcatacgcgccatctggatccttacgcccaacgacacagtagccttctccaggcggttcgctgtggtggagaagcggtggcgtgccgcgtgggaggaggaagaaggagacggagagagacaccgttggggcaccggggcggcgaagatgccgctgcccgccgaccacgaggtcgccgccgcattcgccgagcgccggagaagggagggcactgcacgcagttcaggcatccgaacaaacgtatcatctgtgggactggattcttgggttgatgatccaattacccgccacattatctcattacacatggataaagaggaaggagatccctttatgctgtggcctgtggtcctacaaaagcgtggagggtactatgtccttgtgttgcctctggtggatcctcagccatttagagcatatgagaatctcttgaaaaggtctgattgtgggggttcggccaaggagaacaacaatttttcttcaatcctgttcaatcttccatgcataacaggagcatttatggttgcacaagttgttggggacataattactggtgatattgctgaacctgaggtgattgttagctctgggccatctgttggtggactcttggattcattgactggaagtataggtatttcagcacgagcgaagcctattgccgcacctgttgcagcaccaactgcatcagtctcttccc

SEQ ID NO: 72165 - DNA, 397 bp, Zea mays
  Clone ID: MRT4577_165815C.1
ttttccaataaataaactatacccctggctggcggcctaaatacagaggggacggggaacacccaaaagcgctagcgtctccaagatagtgctgcaaaacgacattgacttactcaatttaccgtcataacttgagatgctaacccccaagaagaagcggctagtccagtcccccaactccttcttcatggatgtcaagtgccaaaactgtttcagcataaccactgagattagccactcccagactgtggttgtgtgcccatactgccaaactattctgtgccaacctacacatggtaaggccaggctcacctaagggtgctccttccttcaaaaagtcgattaggtcctgcttcccttaacctgagaagagataaacttggcgctttgcaacttt

SEQ ID NO: 72166 - DNA, 257 bp, Zea mays
  Clone ID: MRT4577_165816C.1
agccccccttttttttttttttctgcaatgaaaagtatgttcttaaaaacaacccactattattttcgataataaaattcagacatatctctgactgccacctaataaaaccatctcttaacccgctcaaacgctcgtctatatcccatccctttcactatcccccacccaccgctagacccagccacccatccatcctcgctccttccctcactaccgcttctcttatgtcacccgttgtggaacacttttccctt

SEQ ID NO: 72167 - DNA, 587 bp, Zea mays
  Clone ID: MRT4577_165817C.1
cctcgaggtctcggccggaaaaaaaaaaaaaaaaaaaaaaaaaaaaaaaaaaaaaaaaaaaaaaaaaaaaaaaaaaaaaaaaaaaaaaaaaaaccgataaacgcaacctgaaaaaaaaacccgctacccctctgggttggggtaaaccccgggttttttggggacggcgggggcggaaaacacccccggtgcccaaccgggaaggacaggccccctccccaaaaaaaaagggcgggggatcagggaggaccttcttgggggagggcgggaaaaactttggaaggcgtaagctagggtttgggaaggatgtttcccctttaaattgggttccggtttcccccacaaaagtaaaaaaattgcgtttccttcccgtaaaaaaaataaaaggatgggggccggttcaacaaaacttttttaccggggggggtgaacaaaattttttccaaaggaaggttaacatacgtgggtcccaccaaagggaaaaaagccagggttcccttcttttctcaaactggagaatccgtccttgacaaaaaacttgaaaattgaacccccacccatttgttgccggggaactttggttggtt

SEQ ID NO: 72168 - DNA, 144 bp, Zea mays
  Clone ID: MRT4577_165818C.1
aaataaaactgattgcgaagacactgaggggatacttgcataaaggcactttattgtatccgaaatgtgccccgctgtatggaaggccagactagactctcactcaaacaattttttgggtgcccatagcctccaccttgaccg

SEQ ID NO: 72169 - DNA, 741 bp, Zea mays
  Clone ID: MRT4577_165819C.1
aaaaaaccaaatatcatccgcaatccccatcttaccctgtcccttactattaaaccaagccatggactgagctaaaccaaaacaccgagaaaagaagatagacggatcctcccggtgaacgaacatgtcgccaagagagtggatccacgacggagactacaccccggtaatcgtggtcatgattttcattgtgctgctcacagtcgcgtccgtgcttttctcccattattgcgtcggggaccgggcgttcatgcgcactggttatgactttgaaggctatgtgatgcgcaagttcgccgtttgcgtcgacagtggccttcccaagcgggcacatcatgatataaagaatacaaaccctcatgaggttagggttgaggtcgtggaagaggtgcatgcatcagagccctctactcctgctcttcctcttgctacgcctgctcctcctactgctccttaccatgttgctacgggagcaagagcagaagaagtaccatcggcggccgaggaggagcaggaggaagatgaggactgggaggatgatggcgacgatgaggaatttgatttcgaggaagaaggagaccttctaaacctatgatctaggtttgcggaacttctagggtcctttaaaactagccttcatgtgtttcttaaaatatacccttttcaaggtattcaaggggcaacgaatctgatcatggaggatcgagaataatgagaactaaaagtgttgtcaatttcctt

SEQ ID NO: 72170 - DNA, 513 bp, Zea mays
  unsure (1)..(513): unsure at all n locations
  Clone ID: MRT4577_16581C.1
gatgtcatgcagcaaggtncccctgacttgggtctttccaccatatgactgaacatctgactactcttcgtatattgaccatcttgcatccatgtaattcactacgtatcactctatgctcgcattagctaatttaatccaggtaaagagtctctgcactcacaacacatgctatcatgtattatacacatccgtctattcgaccgaaatgacactacacaatcacatggctgtgtctaactgggcccctacaacacccatctgctgatcgcttacaataacggccacacttatacacactgttagacgtgatactgaacctacgcgcctgaacctattcttctagcatgactactcctaagattctggtatctgccagaaccgtatggcttgatggaccccacccacataggcttcattgatggaatacaacttgatatttcaaacggttgcggngaaagatatactccgcacaaatatcctggagaagcatatcgacggatgcttccttga

SEQ ID NO: 72171 - DNA, 207 bp, Zea mays
  Clone ID: MRT4577_165820C.1
agccaataaagaggaacacatgaatttggactcaggacctgaagcctaatacataaaaagatcacatgtgctggcgatccaacatgttccgataactctgaaaagacaaagcaagcgtcccctacctccctgtgcacaactacaaaccagtttcatcttcattaccacccaaatattgtaataccataacctgggacccctgaaccc

SEQ ID NO: 72172 - DNA, 379 bp, Zea mays
  Clone ID: MRT4577_165821C.1
agcaattggaagaggtcaggagcagtttgcatgctgaaattgcataagtacgtgcagagaaggagacagctctatcagagttacatatgtctcagacttccatcaggaacttagagagtgtggtagaaaagcaaactgagaacattttaactctagaaaaagctaatgataagttaaacaataaaatatgtatcttgacagagcaagtagaacaagccaaggctgagctgcataaggaggtagcggcaatacaagaagagaaggatacagcactaacacaattaagacagtcagagttttcaatacaagatcttgagaatgaggtgacacgactgaaagacgaacttcaattcaacttggaaaaaaatccaccctggac

SEQ ID NO: 72173 - DNA, 438 bp, Zea mays
  Clone ID: MRT4577_165822C.1
gcctcgcgtactgccaccctttctactgccgtgtgtatgaccaggccaccaggctgtgtgacatctttgccacctttttggcatgctacttctatgttccatgcatgctgtagatctctcacgggtgcaaatgtaggccctccaaggagatggtcatataccatcggtttaaagcagcactctacaccctttgatgaacaatgagaatgttgtgcctgaggatgatgaattcgtgatcaccgcgaggatgacctatcgatacacaggactacgctaccccggggcccaacaactaccacaagccatctgcaagctggagatcaactcggggctacacttttgatcagagagtcatgctcttgattcacgaaacttgcaaagccagcttctttttgcaatgttgtttgttctagctacttttccatgtacctattcatt

SEQ ID NO: 72174 - DNA, 333 bp, Zea mays
  Clone ID: MRT4577_165823C.1
ataataaggggaacaagggcggaccaagggaacaacaatgaaaagtacaaggcatcgggaggggggaaatatatttattcctacgcgaccaacccgcacgagaaaaaaaacacgatttaacttactccccggagaagggtcaacaaaaacaaaaccaaacaccaacagagggggaaagaaaaactcacgctgaaaaccccaggaaaaatgtttggtgggcgaaaccccactaggcccacacccaagaactagcacttgacccggggggacacccatcaccctaaacaagcaacccactgcaaaaatggggggggcttggaaagaaataccaaa

SEQ ID NO: 72175 - DNA, 327 bp, Zea mays
  Clone ID: MRT4577_165824C.1
aagcttaactggccccacctcctatccattggttgggcttggctggccccgagttaacgagttcaaacccatgttattttttggggggggccggggttgacatcaaaaaaaaaaactcttggtttaaccaaaaggaaaaaaaaaccccattccggtgggggggggagcataaaagccttctggctccagaaccctagacgcgtttaccggacactgctttttttacagggggggattaacacaccttcttcattgggccggctttctgatcatattccttcttgaaaaagctttgagggcgccctcacttgtcggttcaagggcttc

SEQ ID NO: 72176 - DNA, 1817 bp, Zea mays
  Clone ID: MRT4577_165825C.1
gggtacctcgaggccggccggaaagaaatctcgacgggaggagtagtttcaaatagaagtgaagtaaacagattcaagttagcccagtgtagatccttggaaaagcagttcaaagcaaaggttttgttattgaaagcactacttttacatatacatatatatgaagatgagttttatcaaatcctgtggtgacttcccaagccaaggtaaaaatgtgaagtaaggatttcccatatatatgaaactaaaatgaaccctcctcggctaaggttgaatcagatatagaagaagcggaagcaggaagctgaaggatatccgtagcgaatgaggaataggacatgcatgtgagctagcgaaaagggaatagcacattctctagggttcgtatcaagcgctagcaaatggagagggtcaatcgaatccgtatcctcgagcgctgggtctgtcctctaatgaggagctccttgcttttttgatccgtgaatccggatctgtaccttcatctgaaaactattcgccggttgtccgcattcctctcctcgagcgaaaggtgttcccacgcaatcgctatcgctgttcctaaggcaggcgataccgtaccgagagagttgaagctgagaaagaatggcggggctctacgagaagcagtcggagacgtacgccaagaagcgtccgcagtaccccaaggagtggttctccatgctggccagcctcaccgcggggcaccagcgcgcctgggacgccgggtgtggcaccggccaggccgccatcagcatggcggagcactacgagagcgtggtggcgacggacgtgagcgaggggcagctccggcacgccaccgcgcacccgaaggtgcggtacctccacaccccggagcacctctcggaggacgagctggtgtcgctggtcggcggcgagggctccctggacctggtcgtggtggccacctccatccactggttcgacgtcccgctcttctacgccgtcgtgagccgcgccctgcggaagcccggcggcatgctcgccgtgtggggctacaactacgagatccacccgttcgaggacgcgctgcacggccagctctacccggccctgcggccgtacctggacccgcgggcgggactggccatggagcggtacaggtccctgccgttcccgttcgagcccgtcggggtgggcgccgagggcgcgcccgccgacgtggacatcgaggtggagatgacgctggaggacctggtcgggttcctgaacaccggctctgtcgtgaccacggcgagggccaagggcgtggacctggaggcggtcacgagggccgcgctgaagcgtgtggaggagcagtggggcggcgcgcccaccgtgccgaggaagctcgtgttcaaggcgttcatgctcgccgggaggcccaagtgctgaagtgataatgccgaataagtgtttgcttgtcagtcagcgtgagattgagatgagatcacagactacaatacatcatatagccagccactggattatgtctggcgatctaatgacatctgaagccactacatccaacccaggtagaggtagcaaactgcgtattcctttcatgctgtatgcagaatgaagaagaaatacctatttccattgcctagtgaattcccattagtatttcttctttcactggattatgttgtatgcagaatgaagaagaaatacctattttcattgcctagtgaattcccattagtatttcttctttcactggattatgttgtatgcagaatgaagaagaaatacctattttcattgcctagtgaattcccaaaaaaaaaaaaaaaggc

SEQ ID NO: 72177 - DNA, 227 bp, Zea mays
  Clone ID: MRT4577_165826C.1
gtacactgtcaactagtggcttgctgttggactgtacttctctgagtgaggtgctgtgaagacgcctggaaggacacaagggcagaatagtgaaggccgacgctgacttccagaagcaatgagtgggagacatcttcctggcagacactgagcattacagttgtgaagagtaaatagacactagtagcttctagagctcttccgaattctcatcacatacaatatct

SEQ ID NO: 72178 - DNA, 113 bp, Zea mays
  Clone ID: MRT4577_165827C.1
agatgaatgtacgatgagaaattcaacgttaataattctggattttcttatgcacacacagagaatgaaggacctcaaagcacctgaacagtttatcgaccagtttgaatcta

SEQ ID NO: 72179 - DNA, 278 bp, Zea mays
  Clone ID: MRT4577_165828C.1
gattcatgctggagcaagaactaacaagtcagtggatccttggcattcagacttctagggtgattaaggaggactcaactaggaggtttatacacaagagccagagcgcatgttagctcggggagctcgaaggaatcaaaagcggcaacaactaaggaggtctagaagaatagatcctgagtatctgaccatgcagaaagacgcagtaccttcgcacagtctcaacggtgcagaacattaccacgaactgacccagatagagatcgccgtacacagga

SEQ ID NO: 72180 - DNA, 320 bp, Zea mays
  Clone ID: MRT4577_165829C.1
cccttcacaaacgggctgggcaatatacttatggttctcccccaccccacacacctgaaccaattccaccaccccttataacgccaactcccaaacaaacgccacaactagcttctatcaaactcaccccccactaacacctcttacaactaacatgcattcattcataatcagaaacacgtattctttactccactgactttccaaccaatctcaaagaccacatttaccaatcaaatcaacctcccccactaccataaaaaaaaatcgcttatctaaaaaaaaccgaaaaaaacatacacttctcacaacttaataaa

SEQ ID NO: 72181 - DNA, 800 bp, Zea mays
  unsure (1)..(800): unsure at all n locations
  Clone ID: MRT4577_16582C.1
agtcgagatattcttcctgtaacctccgcatcgagcaccgccgggagagggccgccgccgcctaccaagctgagggttgtggggggtgtgagccgcctacagcgccgagatcgagcgccacagccgcgtcgggaagggccgccactccgtgaggaaccgaggggatggagccccccgtggccaagaaagcgacgcaaccagaggaggaagataggttgagcgtgctgatggatgatgttttactgtctatcttgcggaaagtcgacataagcaccactgtaaggacaagttcgctgtcaacgcggtggaggaagctgccctggctgctgcctgagctcagcattgatgtcaggcatttcctacctgttccatgcccagactcgatcacggcaaatgactgtcagcaagctatggtggctctaaccaaagcagccaagtgtttgcttgctaaacctcacagacaatccaccatcacaactctgcagcttaagctctacttgatcagcactttcttgagcgacattggccctctattaggtgatgtgatcgacagtggtttgctgaaagatttggacctttgcctgcttgatgatctgaaacctggtgactcttctgagttgcacatgatacagctcgccanagacatgtatggtttcttcatgtctaccccagtgtgtttggttgcctcacaagacttctctggcatggtgtttgttttatcgagttggatatgcaccatctcctgtttgactgctgcacacagctgaagcatctaagcctccattaattgtgatgctggt

SEQ ID NO: 72182 - DNA, 771 bp, Zea mays
  unsure (1)..(771): unsure at all n locations
  Clone ID: MRT4577_165830C.1
ccggccgggacatcaacaccgccgaacatcgatatcattcaccaaactgcgcctactcgcatcaccagagcattaaaccaggtggtaaacatacaattgcttgacattgatcgcgacacattcaacattgactcaaagccatcttattcattgcaactaccacaatggccgctgtagccaccgcgcctcgcggtcttcaaccaaattcatccttgccggccaaggtgcaacctattccacctaatcagactctctacgttacaaacctcccctcttcaaaaatccagaaagacgaccttcgaaccgctttgtacttgctcttctcaacatatggatcagtgctggatgttgtcgctctcaagaccatgaggatgcgtggccaagcccatattacgttccgagacgtacagtctgctacacaagccatgaggtctcttgaggggcaatcattcctcggccgcgacttgaaaatacaatatgccaagtcaaagtccaactttgtggccaagctcgatggcactttcaagattccttccatgaacgcaggcgccgccaatgtcgaacagaccgaactgcaacagagcatcttcaacgcgccccctcccggatcagcacctgcacctggctccggccttcccccgaaacctactgcgaacaccgatcaggttatggaagacgccggcacgccaggtgatcggnggcagaagcgaactcgcgacgaagaaggatagtgattcgatgtggcaatggnnagagacagtgatgatgatt

SEQ ID NO: 72183 - DNA, 285 bp, Zea mays
  Clone ID: MRT4577_165831C.1
gcacgcccaccgcgccagctcatagattgctcccttttcacaagaagctgtgcagaaggccaatgccggtgcgcaatcaccctcttctccagacatcaatcaccacctggccaagtggtatcggccggaccagatgacctacctgccggatgagctagatgaaacggtcagaggtgtcgcagtacctcaccggagaggtacctgtaaactatgattaccaccctattgcgccggagaagaacgcagagtactgctccaagaaccatgtcgtactaactgatccat

SEQ ID NO: 72184 - DNA, 162 bp, Zea mays
  Clone ID: MRT4577_165832C.1
gtcgactcacgcgtccgctcttcccctactcggtgttcgcccgctctcttccgccctacgtcttggcggctttgccatccgactcaccgtccccggggactgccgcatccacctggagcatggcttccattagggcgttgctgccagcactctgacattccc

SEQ ID NO: 72185 - DNA, 289 bp, Zea mays
  Clone ID: MRT4577_165833C.1
accgagttcaacacagcatgaaggtgacctttgatggaattcagtaccgtagctggaccagctgcctctaacataacaggaacgacacatctcatttgttgaagtagttactacgtaactacatcctttagctcacaatccaagatggatggtcaatacacgtgccaaactcaattgagtacatgccaagatggttgatacacagagcatcccaaagtacattacattatctaaatgagagaacgacgactggtcgagggaccaaccaaaatgagtcactcggcactta

SEQ ID NO: 72186 - DNA, 518 bp, Zea mays
  unsure (1)..(518): unsure at all n locations
  Clone ID: MRT4577_165834C.1
aaaagggagacaggggacaggacaaaggcaaacgcaggctggggatcggggaaaaaaaggctaatgagcgaggcaaaccagaattgggaaccgcaagacaatctcacaaaagtaacaggggaaaggctaaaccaacgtgccaaaaacaagccgaacccacaaaagaaaaacccaaggcgcccctgggggcaaaaaaaaaatgaacgagggccagcactactgggggggcacaaacggaatcttgggaaccacggggtccaaggacttcccgaaaacgaccaccttaaactccgtccaaacctagggcatccccgactcaaaggagcccatagggaggttttttttcaggaacgggcggaaccctccgggggaaaccgggccgagcctctccccggagccgnaaaccagctggggggggccccgaggcggggggcccctgcggaaccatgcccacgcgcgcagaacttgggccctcccgggacgctgttaagaaacacgcaggcccccagaaaaccgcc

SEQ ID NO: 72187 - DNA, 1137 bp, Zea mays
  unsure (1)..(1137): unsure at all n locations
  Clone ID: MRT4577_165835C.1
gataacctctgtcccacactcaacaatcgtcatgtgtgtgtgtttatacataaacaagattaagctttctaatgctgtagtaattgattagttcgcaatggttcggtacataatgtgttttctctcatcgttgtacatttcactatactgctgatagccacaaaaaaacagcaacgatattggatttcaggcttctatgcttacatattcagtgctgttcgctcgtgctgtatctgtggccgcgtgagcaggaaatcaccatattagagcttacaaccttcgcatcaactgtttgtgcagcaatgagtttatcttaagttatgtttttttggtaatatcggttgactgcacttaagttctaataaagcatctttgatgtcacttgtaggaagagtttgacactcatgatccaaaggagaacactttgctactcccttacttgaggaaaaggtcaaaaatcattgagatagttgcagcgcgtgatatagtctttgctctatcacagttaggagtatgtgctgcttttagtagcggtacgttcgccgaggacaagacaaaaccggatgctggtttccctctttttgactcaccatgtcaacatggcaatttcaggacccaacgtctctgcgagagaccttgggttcccttatccgaaggcaggcaccgctaagcctacagacgtggtggtgaagttctacgtcctctacgagaagtggcggaggggcgagctcctgggttcttcgtcagttgcgcggtacttgaaaagcatcactcattcgaacgggcaacaagaatttccgggtgtgggtggacagactggtcacatcgccgatcggtacaagcaactggttggtgaggtttgataactgggagatggaaggtggcgttcggtactgctgccgcactactcttctgctgaataacaaggtaaaaattctctggttctgcgaggatcattgcttgtcctgctgttgcttaatttcgtgcacctgtatacataaagatagcagttaatttttttggcaaatcactgaactattgaaaacaaattgcatagacaatatttcttaaatttaatttgtggtccacaggcttttactttctctttctctaaatncatgctgcaagaaatagtct

SEQ ID NO: 72188 - DNA, 406 bp, Zea mays
  unsure (1)..(406): unsure at all n locations
  Clone ID: MRT4577_165836C.1
aaaaccctttttggccggccggggnagcgtgcaggacgaggagcgtcgcctcctcccttcccccaccccgccgccgccctcgcgtccgtccgtccgttattagggttcggtcgccgccatggcgatcctctcggcgctcgccaccgaggtgctcatccccgtcgccgccgtcatcggcatcgccttcgccgtcgtgcagtgggtggtcgtgtccagcgtcaagctctccgggggcgggtccggcggcggcggcggcggcgccgggtgcgccgactccctcatatctgaggaggacgggctcagcgcccgcagcggcgccgcggcgtgcgccgcgatccagaacgccatgttccgaggagctacgtcgtttctttgctccgggtccccatgtgctgggcgcttcctg

SEQ ID NO: 72189 - DNA, 228 bp, Zea mays
  Clone ID: MRT4577_165837C.1
gactagtgctatctcaagcgacactcttactgcctagtataattagcagagcagaggagacaggatctctctccccagctgcgctgagagcaatagcatcagttgtgccagaaggaattatgccaagccgaagtcatatatttgggaaggaaaccgaaaatacctgatctccaagacgtgcagtcttcaatagaatcagcagagccgagagactctggcgtaggtacc

SEQ ID NO: 72190 - DNA, 356 bp, Zea mays
  unsure (1)..(356): unsure at all n locations
  Clone ID: MRT4577_165838C.1
gaanngaaggnccgacccgagcgacccgaactgttacgcctttacggacacctcttcctaacacacaggacatcacaattataccactggagtggtgatttaattaccaaacttttacaacccacaaaggatatttactctacttttcacttcactcttcctttggacatcactaactgcgactgatatctaactgcaactacactaaagatcacactgccagccaacctagaccaatgcaaccagcaccagcaatacaaacaactaatggtgtgcagccccatgtgcaacactactaggagcaagaagctcccctccaccagaaagtaataggctaaaaatacttaagcataggc

SEQ ID NO: 72191 - DNA, 471 bp, Zea mays
  Clone ID: MRT4577_165839C.1
cgcgcgggaccctgtcaccaacaagaagcacagggtgagaaaaaccgatggcgaacccctacagacaccaaaggacgcatgcgagtgactgcctgacttcatgaacgctgaccactacgcagtggttactgctctgaccacagctaccgttgctgcactgatggtgacaacctatcttggcgcacggacctctataacgggtgctgacaaaccccgcgagatactctcataagcagctagttctggaattcaaacgaatatgttcattgagcgctgctgatcatgcgcgacagcaccatctaccagtcaaacagctacctgctgcctacccccactagtggctcccatctaaccacctagcatgatggaactctcctgcttattgacagcagcgacaactactaccactcacccatctagctggagagacccctgctacccttttgacacaaccacaggtgtggccgatgt

SEQ ID NO: 72192 - DNA, 663 bp, Zea mays
  unsure (1)..(663): unsure at all n locations
  Clone ID: MRT4577_16583C.1
gggtccccggttccccccctcgnatttttttttttttttttttttttttttttttttttttttttttttttttttttttttttttttttttttttttttaaaaaccccccccccttaaaaaaaccaccgggccattttaaaagggtccccccccaaggggttaaccacccctcccaaacaaattcttggttaagaaccaccccaaaaaaacgggggcctcccaaaaaacacccaattggccaacaacccttccaaaaaaaaaaaattttgcgcccccccccaaaatttaacgttttaaacccccccccccgggcaggaaaaaaaattttttggaaaaatttttttaaggtccgcccttaaaaaaaaaagaagggggcccttttacttgggggccccctttttaaaaaaactgggcctttgggaccccctcaaaaaagggttgggtttttttaacacccggggatcccttcccagggggaaaggtttttttgccccaccccaaaggggttccctcgcccaaaatttccccttcaaaaagggttttgagaaaaagggaaccctttttaagcccctaggggtgcccctcccccccaaaaccctaaggggcccaaaacaaaaagggttgggcccccttttttgggcaaaaaaatggaagggtctttt

SEQ ID NO: 72193 - DNA, 465 bp, Zea mays
  Clone ID: MRT4577_165840C.1
tgttgatcaaaagttaatggtaggaacatatctagcacacaaagatcaaaagagtatgcgtggtttcttatctcatgcatcagacataacatttgagtcatgtgtactaacgcatctgagtgatttggacctgtgaatcgactaggtaattttttgttgtattttctatcattatagctctattgtttatgcttataataatttgagatattttttgcaattgtagcaggatgatccatgtaggagatgaatggtgtgatagttgggtttttttgcatttcttctaggttgatggatggcaattgatggagatatttggtggttgtgactgctgttacattgctctttttgttgatttttaactttgagggtaccaatgagcatagtgcatagcaccagtaccttttacaattatggaatctctgcaaagcaaggaaggtattggactgtaataatttttgctcc

SEQ ID NO: 72194 - DNA, 2620 bp, Zea mays
  Clone ID: MRT4577_165841C.1
acatcagccatcaggcgtctgcactaggggagggttcaccgcacgtccgcactagctaaggcttcaccgcttcagtccatagctgaacgcctgaacggcatcatgcggcatgcgcattgcgcagtggcagactggcagtgtggcacaggcactagctcaggcacaaggcgcacaacggcacaagtgcacaatggcacaagcacaacagtcaatagagaacagacaacaggtggtcaggtctaagcaccgcacaacagaacagacaacatcaattcaatccatagtacctatctccatgtctaagcaccgcacaacaccaattcagacaacactaagcactaagcagtaagcaccgcacaggaccactctccaatctccatgtctccatactagtacctgttgttgttgttgcttcttgttttccttttcctttaccaccaaattcttcttttagttctttttctagcatggttaattcttcaaggttttcttcaatatcaataggtattgaccacctcaaccaatcttgtgcacatactagagcttcaagcatgaatggagtaaaggaactacggaagtcatctaaaatgcacccacttgtgctaaatgctgactctgatgctacagttgatattggtatagcaagcacatcacgggccatgcgagctagtattggaaatatctgctcagatgccttccaccatactaggagatcaagcttcatttctgtgtcctcagtttcttcagaaaggtatttgtcaagttcagacttagtgttgttgcttgaaccaatgcctttgccgagcctcattttcttagcaacaatttccttcagcttccctcctctacctctaccttcctttgatgttattgggtcacttacattggttgtatcctcacccgaagcatacattttcatatactcctcgaacaactcatgaagacaagtgttaattgcttccgaaactatttgtcccctttcctcgctaaatatctcttcaacggttatcttggtatacaaagatagcttgtatttgccactagctagattagtggaactcaattgcctcctcaaataactaatactggtatcattggcacttgcattatcaacagttattgtcatcactctctccaaaccccattcaaccatgcatctcaacacattttttccaatatcatcgcccttgtgtccctttaccaagaagaaaccaataacttttttatggaacttccaattatcatcaataaagctagcagtcacagtcatgtagctatctagttgcttagaagtccaaccatctgttgtcaaacaaacccgttgacaggagtctttgaagaatttctttagcttagctttctcttgggagaaacatcgtactacatctctagtacatgttcttctagatggcactagaaagcgagggcatgctttggacataaactttctaaatccaggtttctcaccaaagcaaaatggcaactcatcctctattaccatctcggcaaaagcaacccttagtgtgtcttgatcaaatctccacgtgctaacaccttcatgttgagttgcttgtagagtaccttgagatggatctttgttaaatttatttggattgcgtttgcaagcaaccaaatgcctcttcaatgaagatgtgccatggcgtccagcctctgccttcatgtttctatggcaatatttgcacttagcatgcctaacaatgtctttatcatcttttatcttaacgaaatgttgccatacatctgacctcggtgctatttccttcctaccaccatccttagtcaactcaggttcctcttgtctagttgttacatcatgtgactgagatgttggggcaacgacaatctgaatatgtgatgtttcagtaccaagtgcaactgattcaacctccatatctgtgtgttcctcaatttctggcatcttccggtggcgcactggcgcagtggcttgccgacgacgacttggctgctggagcgttgggcgctggccgaggggcgagggcgctggccgcctgatgctgtcaagctggctagctgggtggtgcgcgctggccggctggccgcctaatggttgtacgtctgtaccgctggacgctggtcgctggccacctgacgcggtgacgcctggtcgcctgtcgccggcgaccgtcgtgctgggctgctggcttgctgccttgccttgcctggtgccgactgccgagtgccgacccgcaaatgctattcgggtaacgggttttgggctatacgggttcgggtattttgggtacagggcttcgggctcgggttttatgcccagtgctaccctcggctcgcccgaagcccagctcgggcaggcttcatcaagaagcaaccttggccaaatcgccttaccaaccgaccgtatcgcaggcgcattcaatgcgaagatcacctgacaccttatcctgacaggaaaacagtgtcgctcgccccgctccgactgctgtatcaaccacccgggtaaggcccaggactcggcctcagcctcggcctcgggaggaatcgcgtcctcgcccgaccccggcctcggcctcaggagaagtctctgcctggcccgaccttgggctcggactgaccgcgccat

SEQ ID NO: 72195 - DNA, 337 bp, Zea mays
  Clone ID: MRT4577_165842C.1
aaaaaactttatatcattttttttatattttagaaaaacatcaaaacaacaactacaattaagaataacttatcaataataatgactatgaagagtaatttgttggttgcggaaagcagagtttcaaagagcaactcagcctcaaaaacgcgaggcccaggaaaaaacattaccaagaaaagaaaaaatacaagagagagaagagacagagtgggttccaaggcaatctatatcgaggaccctaacacgcctcaagaaatcgtacttcgccttgcgcgtcgtattcgtttttctgtaagaggcatcgcttcatcgcgaactattgatgtgacacttc

SEQ ID NO: 72196 - DNA, 641 bp, Zea mays
  unsure (1)..(641): unsure at all n locations
  Clone ID: MRT4577_165844C.1
gcttgttgtaatggctcagcagttggtggtcgaagtttaacggaagcagagttagaaagattacaacaagcattgaagattctttctgatgctgaaaagcagataagcctttcaagtgagcgtcccacgtggtttactgctgccttactacaacttgggtgtggtcatagttcagatgtgaaccaacaaaaaggcagtactcaagaacaccataaagtagccaatgatgctatgtctgagatagcaagggaatcatccagcagaactttttctcattcattatctgcctttggcatttctaagagaacgcttgactccaaaacaattagtgtgcactcgagtcctcaggtccttgcctcacattcatctcggttgagactgaatgacaacttggtttatggagagtgtaggtctgttgatagagttccactcaattctaatcaactgaatggcaactgttcccagcaaagggccctggtaaatggaatctcagatagccttgctcaggtttggataagatgcattgagaactgccactcgaagacattacagcacctacttcttgaccatgggaaactagtatcaatcaggcaatttgagggccacgcgactgcttttattgcaattgangactgtggcat

SEQ ID NO: 72197 - DNA, 352 bp, Zea mays
  Clone ID: MRT4577_165845C.1
tcggtgaggatgacgatgacaatgacgttgacatcccgcttgtgtccatttacttccggtaaagaggggctcgctgcctgtttacatgatcctgcgcgatatttgtcagaaggatcgagtgtataagttgcgaatgcaaccgtgaaactagattcggtttaagcactgatgttttcccccgctaccatctgggtagagttggctggggattgtcattgagatttgggtcaccgttatggaattcttgagcataacatcatgatagttactgcatggtactgttgttgctaaatgttgtcttagtacttgggaaatgcatttgacagtgtgacgctattctggttgcaatttc

SEQ ID NO: 72198 - DNA, 1749 bp, Zea mays
  Clone ID: MRT4577_165846C.1
gagccatccctccgtagttagcttcttagagggactatggccgtttaggccaggggggttctcaactatgagttcccgaaaaaaaaaaaaaaaaataaaaaaaaaaaaaaaaaaaaaaaaaaaaaaagggcggctctcgcgatctaggaggggcagcggcaatccaccctgcctctgcctgcgcgagggcccagctcacggacctgtcctgtgtcctccgcagcacagcacgaccccatcggcgtcaccccggcgacttctgcgtcctctgccctccacgctcccccgctctgccaggcttcccagaagatttggttgatttccccccaatccagtgattccatccctgttctccacttccaccggaacctcccagagacttccagaaggctctagcgacccccgccgctttagagctacccgcggcgagattcaggagctgcctgccatggtgaaggacagcgcctactacgatgtcctggggctcagcgtcgacgcgtcccccgccgagatcaagaaggcgtattacattaaggcgaagctggtgcatccggacaagaatcccgggaaccctgacgcggcactcaagttccaggaacttggagaggcttatcaagtcctaagtgatcctgggaaaaaggaggcgtatgataattatggaaaggagggtattccccaggataacatggtggatcctgctgctgtctttgggatgctttttggaagtgactattttgaagattacgttggccagcttgctctagcatctatagcttcagtggaggttgaggaaaactcaaatagtcaagaggcaagagcaaaagttcaagaaaagataaaagaattacaaagagaaagagaacaaaagcttactcagagtctgaaggaccgacttcaatcatatgtagatgggagaaatgatgaatttgtgagctatgcaagcgcagaagctaggcgtttatccgaagcagcatttggcgaggctatgcttcacaccattggttatatttatgtccggcaagcagcaagagaactcgggaaaagtagaatttacatgggtgtaccttttatagctgaatgggttagagacaaaggacaccacattaaatcacaggttaatgctgcttcaggtgctatttctctaatacaacttcaagaagggatgaaaaagatggaggggagtgaggacagcgaggagcaacttatgaagagttttgaggagaaaaaagatgccatgctcagctcgctttggaaaatcaatgtggttgatatcgagtccacgctctcacgtgtctgccaagcagttctgagagatagcatggtctccaaagatgtcctgaagctgcgagccaaagcgttgaaaaagctcggaacgatattccaaggcgcagagtctatgtaccgtcgtgaaaacagcctgcgcgttgaaacgagcacagaccaacaagccgcttcgtcacactgaagccacctgtggaccaccgtgtaggaatggatttggtgttttgtgtgtgtgtgtggctttcttctttgtttgtaattgtgtatgctatattaattttcttgtagaagatgtgaaacatttaacacaaagattttaactgctattgatgcagaaatataacctgcagctgccttttttccttcttgatggtagaattgtatttgtacacttatttgccaagtgtgtggcttcattggttcactataaaaaaaaaaaaaaagagagaaaaagaagaggagggaaag

SEQ ID NO: 72199 - DNA, 105 bp, Zea mays
  Clone ID: MRT4577_165847C.1
gcttaacattggatgtctgacatacggtgagaaagctatgaacttatcagaatctgtagatcaagcggatgagatcacaaaggcactgtctacgagttcagaaca

SEQ ID NO: 72200 - DNA, 1500 bp, Zea mays
  unsure (1)..(1500): unsure at all n locations
  Clone ID: MRT4577_165848C.1
tgggtaccccctcgaggggccggccggaaaaaaaaaaaaaaaaaaaaaaaaaaaaaaaaaaaaaaaaaaaaaaaaaaaaaaaaaaaaaaaaaaaaaaaaaaaaaaaaaaaaaaaaaaaaaaatggccctccacgctcccccgctctgccaggcttcccaaaaaatttggttgatttccccccaatccagggattccatccctgttctccacttccaccggaacctcccagagacttccagaaggctctagcgacccccgccggtatcgacctctgcctctccttcgtggcggaagatccggcccttctccccccgtcgattaccgtcggcctcctccattgccgctggcattaaccgtctcttggtgcctgtagctttagagctacccgcggcgagattcaggagctgcctgccatggtgaaggacagcgcctactacgatgtcctggggctcagcgtcgacgcgtcccccgccgagatcaagaaggcgtattacattaaggcgaagctggtgcatccggacaagaatcccgggaaccctgacgcggcactcaagttccaggaacttggagaggcttatcaagtcctaagtgatcctgggaaaaaggaggcgtatgataattatggaaaggagggtattccccaggataacatggtggatcctgctgctgtctttgggatgctttttggaagtgactattttgaagattacgttggccagcttgctctagcatctatagcttcagtggaggttgaggaaaactcaaatagtcaagaggcaagagcaaaagttcaagaaaagataaaagagttacaaagggaaagagaacaaaagcttactcagagtctgaaggaccgacttcaatcatatgtagatgggagaaatgatgaatttgtgagctatgcaagcgcagaagctaggcgtttatccgaagcagcatttggcgaggctatgcttcacaccattggttatatttatgtccggcaagcagcaagagaactcgggaaaagtagaatttacatgggtgtaccttttatagctgaatgggttagagacaaaggacaccacattaaatcacaggttaatgctgcttcaggtgctatttctctaatacaacttcaagaagggatgaaaaagatggaggggagtgaggacagcgaggagcaacttatgaagagttttgaggagaaaaaagatgccatgctcagctcgctttgggaaaatcaatgtggttgatatcgagtccacgctctcacgtgtctgccaagcagttctggagagatagcatggtctccaaagatgtcctggaagctgcgagccaaagcgttggaaaaagctcgggaacgatattccaaggcgcagagtctatgtaccgtcgtggaaaacagcctgccgcgttggaaacgagcacagaccaacaagccggnttcgttcacanggaagccacngtggggaccaccgtgtaaggangggtttnggtgttttgtgtgtgtgtgtggg

SEQ ID NO: 72201 - DNA, 195 bp, Zea mays
  Clone ID: MRT4577_165849C.1
tattcggcacgaggcgcactaccggggccgccggcgttaccgcacctacggttaggggtgagaacccgccagtccaaggagattggtcccggcgagagaaaacgtaccccgccggccacgtgaaaaaatgggaggaaggccaagaacgagagggcgcacacactggccccaagagggatttcggggggggggaac

SEQ ID NO: 72202 - DNA, 404 bp, Zea mays
  Clone ID: MRT4577_16584C.1
atggagagatcgcccttagcgatgcccagaggctgggaccctcccttacacttctaactcgttccacctatgctagagatctaacatttctggacttgaccaagatcctcccttcctgaatggatcgacttatctgaatgcattaagcctagatctgatggacttcgattgtggaccctaagaattgatgtatgatatattacttagatgacgatatctaaaaatgtggtattctatgggattggagtagttcttcgattcgtcgaactactccaatcctcttgaataccacatttttgagatatgaacttctatggataatacatttcgtattttctttggattccaattcttagacatctttactttgtttatgcttcatatactgtcgatgcattcaggaa

SEQ ID NO: 72203 - DNA, 382 bp, Zea mays
  Clone ID: MRT4577_165850C.1
acccaaccccaacacaaagagcgctggatggaaatccaaaaacagaaacgcatctaccgggggggctccctgccggcggacttactcgtctaaaccaaaaaggacgaggcctgccaccaccgaaagaaccagcacaggctcagcagaacaacaaacacagtagaaaccgcccgctccacactgggcccggcaggctcatgcacacggcgggcaagggcaagccctggaaccgcctctacaccggaagggcatgccccctcgaccacaccagaaaagaggacgacctctacatacacggcgactattgaggagccccctcgcccgccggcgaccggcattgaaccacccaagtcttcttggtagagagaaaactactaaatcc

SEQ ID NO: 72204 - DNA, 1253 bp, Zea mays
  Clone ID: MRT4577_165851C.1
cacaaaccctagccgccgccagcaaggaatggccgccctcctacggctcaccgcagcccgatccgccctcccccggcgcaccctcgccccacaccggaggctccacacacgcaagttcatgaccaaccgtcttctctctcccaagcagttcgtgctcgaggtcatccaccccggccgccccaacgtctccaaggcggagctcaaagagaggctggcgaagatctacgaggtgaaggaccccgactgcatcttcgtcttcaagttccgaaccaacttcggaggcggcatactatgccacggccggaggaggaaccgctgtcggcctactccacctccacggctccacctgtctgctctctgtctgccccgcctcgaggccggccgggctgccctgtgtcctccgcagcacagcacgacctcatcggcgtcaccccggcgacatctccgtcctccgccctccccgctctgccaggcttcccagaagatttgattgattccccccaatccagtgattccatccctgttctccacttccaccggaacttcccagagacttccagaaggctctagcgaccccccggtatcgacctctgcctctccttcgtggcggaagatccggcccttctccccccgtcgattaccgtcggccgccgtctcttggtgcctgtagctttagagctacccgcggcgagattcaggagctgcctgccatggtgaaggacagcgcctactacgatgtcctggggctcagcgtcgacgcgtcccccgccgagatcaagaaggcgtattacgttaaggcgaagctggtgcatccggacaagaatcccgggaaccctgacgcggcactcaagttccaggaacttggagaggcctatcaagtcctaagtgatcctgggaaaaaagaggcgtatgataattgtggaaaggagggtattccccaggataacatggtggatcctgctgctgtctttgggatgctttttggaagtgactattttgaagattacgttggccagcttgctctagcatctatagcttcagtggaggttgaggaaaactcaaatagtcaagaggcaagagcaaaagttcaagaaaagataaaagagttacaaagagaaagagaacaaaagcttactcagagtctgaaggaccgacttcaatcatatgtagatgggagaaatgatgaatttgcgagctatgcaagcgcagaagctaggcgtttatccgaagcagcatttggcgaggctatgctt

SEQ ID NO: 72205 - DNA, 1169 bp, Zea mays
  unsure (1)..(1169): unsure at all n locations
  Clone ID: MRT4577_165852C.1
ggccgcttttttttttttttttttgctccaaatcaatggcattgtttcattgactaccaattcctatatcaaattattgaaggcacaagaaaaactttatcaaagcatgcatgacgctctggtgttaacagtgatcctccgtgtcgttctagtacagggtcaaaggtatgaaacaccgatatagactacagtggacaacaattggatacactgaaatggcaagctaacactcttccactgaagtcagctccgcatcaaattttctaaactgaaatggttgtgtcaaaatgtcctcgatggctcacaacctcttggctccaatgacaccaacgcatacatgaagggtcaagatactcagtgcgaaaactccactattacaactggaacttgttggccatggctagatttgcagttttctgtattcccttctacaatttctgttccgctcgcctaatgggatcttggaagtattggagggaaatgagaagtgcctcctctgttcttattggtctgctcccttggttggggcatgtattcaaataagatgtgaatacatcatctgcacgtttcccttcaagtttggatcttcttcaatgctttcttccaaaccagcaagtccaccaaatgcaatcagtaggtgcctgttcaagctttataagtgacaggatagactcaaaatggtggctaatatacatggcaagggtcattcgtaaagcatacaaattacaaatatggttataagtgcatatgcccctcaggttggtttcagtgagagcgagaagagaaagttctgaaaagacttagatggcttggttagagcagtacccaccaatgagaagcttttcataggaggagatctcaatggtcatgtaggttcaacaaatgcaggttgagctggctcatggaggtttcgaatacggtagtaggaatcaagaagatgatattttggactttgctgtagcctacagcctagtgataggctacacnnnnnncagaaagagagattctcatttggtgacttttagcagtggccatcgttcgagctagatcgacttcgttctcacaaggtgagaagataaacaagcatgtttgaattgtaaggtgatacctggagagtgttgtgccccaacataatcttgtggtggctgacttccgttttcggatctcgt

SEQ ID NO: 72206 - DNA, 340 bp, Zea mays
  Clone ID: MRT4577_165853C.1
cgccaacgttgcagcctaccgggcctactttcgacgccgcgaactcatacacctcggtgggcgaaatcggtaaacgccactgtcacctaggcatcaaaattctcatgggcatgtgccttaacaattctatcgacctcgccaacgccaccattccattgactcacggcttgtactacaaaccccttgagtcttgtaccaaagccctaatctctttgttaaacatcattaagccattttttgtccttttttatttaaacccctttttcataataaaacctttctgaaaccttttttctaaatattattttggaatatccttatccttattttttggcttttt

SEQ ID NO: 72207 - DNA, 791 bp, Zea mays
  unsure (1)..(791): unsure at all n locations
  Clone ID: MRT4577_165854C.1
ccggtggcttctagcaaaaaacatgtagtgtttatattactcttaaaattgtgatttgtagtacgtgcaatgtcccctgcactttttcaatatgcaatattaaaatttaactgtatctttgtttcagtatgttacttgcaacctgcaacattaactagatggctgctttgtcaatggaggacatgatagattggatgcatggtggaggcaggtaagttggtgttgcataacctgcatgaaataatgaaatgttgcactcaatctgaccggatcaacttgtccctaggttggtatatttgacgcaacaaacaacacaagaaagcgaatatatatactaatgaaaatggctgaaggtaattgtaaggtaattgatagcattcatatttacattggatatgattctcttatattttgcatatttaagcatcttcaactatattttatttgacatgtatggaagtcggcactaagcagaatacgctgcggtacttgatgtttatttaataatttagaggtttgtaaccgtgcttgnggaggaaccactggttcctccacacatgattattatgaccatctgtcaccactggtttttttcctaactatatcttttaggatatgtaaacatccacttttagtgatgctaacaaaagtatagaataacaattagtgttttagcatatcaatgtattttatcatattgattccgtagcaatgcacggacacatacctattacatttgaaaggattagtatttgccacctgtattgacctcttatgctttgctagaacga

SEQ ID NO: 72208 - DNA, 556 bp, Zea mays
  Clone ID: MRT4577_165855C.1
gggggggggggggtgtttaaaatttttttttttgttttttttttttttttttttttttttttttttttttttttttttttttttttttttttttttttttttttttaaaaaaaaaattttcaaaagggagcttttaaatgtaaaagggggggggggggggggtaatttttaaacaaaaaaaaaaaatttttttcacctggaaaaaataaaaaaaaaaagccttttggaaaactaaagggccccggaaaaaaaaaaaaaaaattggtgaacggtgggttgaaaaaaaactattttgaggggaaaaaaatttactggggggcctaaaggggggaaaaaacaccaccggaggaatggaattggttaaacctttaaaaaaggggggccttcccctggtaaaaagaaaagttttgggggggggaccttttaagctcctttgggggggggttggggggcttaaaaaaggaaggaacggcccggatgggaaaatggacctttttttacaaggttttttttttaataacctaaactcccttttaaaagaacccaataaaatggt

SEQ ID NO: 72209 - DNA, 241 bp, Zea mays
  Clone ID: MRT4577_165856C.1
gggcttcgagtctccttatttcccagggcaataataaaagcggccgtgatgctgatcactacgatgtccctcgcatcgacggacttcctcggcaaatgcgagagcgtgcctgcggcgtcgggcttcgatgaggcgctcttgacgatgcgcaaaacgatggcaaagagcaagtcatcaacagggtccgaaagcccgaggtagcgccccgacatccagctgtacctggaacccctgttcggcg

SEQ ID NO: 72210 - DNA, 322 bp, Zea mays
  Clone ID: MRT4577_165857C.1
ggggttaacggcgctgtctcaatggcaggggatttagtattacaccaaaattggctgggggggccaccattggccaaccccagggccactacactggtttaaggggtaaacaaagaaggaaaactaatccagccctttgggggctttttttttcccctgggcttccagctccggtataccaacctttaatgggctggccaaggcttggtttcctaataaactttttaggcccatcaaaaaagcgactccagaaaagacaagacaaaatcctgctagttatggcaacacccatatttttttaatccaatatatcaggacatgg

SEQ ID NO: 72211 - DNA, 522 bp, Zea mays
  unsure (1)..(522): unsure at all n locations
  Clone ID: MRT4577_165858C.1
ncggccgggcgcaagnntgtggacgcgagtgagtgaaannagncgnattgtcccgactcnnnnnnncgaccgatcctcgcctgctgcagccatggcggnctccgcggcgcnntccaccgccgccaannnnnnnngcttttnnnntcccgcgcttcgntgggcnnnnncgtgaaggggcttggggtgagcatgggccgcgagcncgnccagcggagcattgcgtgggaggcggnnagcagcnnntcnnccgannncgnnnnnnantggagaagcggaagctgatgaacctcctcctcctcggcgccatctcgttgnnnnccgtcggcatggggcgnncctacggcgnnnnctnnntccntggcggnncnnnaaacgcncgcggnnncacctacgncanngacaagnnnggcnnnaacatcacnngtggaggcgtggntcaacacgcacnnncccaacgatcgcannnnnncgcaggggcncaagggnnannccannnncctggtnngtggagcaggacaagac

SEQ ID NO: 72212 - DNA, 279 bp, Zea mays
  Clone ID: MRT4577_165859C.1
cccacgcttccggcgccgaccttcacctccggcgccggagtactacactctgagctcgggttcaccgcaccgcacagagcacccctaactccccatccgatccgagctctactcttccacctttcaggcatggaacaaacagctcccgagggttctcagaacgacgcttatcactatgattctaaaatgcacgagctgctgatcaccagcgagactgaggagttgtacacatatcataggtcgaaagcctcactggcaagagcaagctcgatgcttcaa

SEQ ID NO: 72213 - DNA, 364 bp, Zea mays
  Clone ID: MRT4577_16585C.1
cccacgcgtccgataaaaaatatgtatatataaaaaaatactataatataatacaatagtttgaacaaagctaaaaaatggataaaaaaaaaaaaagtaataaatggacggtccaaccatggggcctaagcttatcaggccccaaggttatctacgctggcttgcacatgttaccgctttagacttcgatgtcactctaatttcaattgacatgcccatgactatcaaaggccagactgatacaaccttgattgtcccgaagttaatcacattgtacagattgccttttgtccagttggcctattaccgaagaggccatcgacgatcggccttaccagaatttggactgcctgaatgcctattg

SEQ ID NO: 72214 - DNA, 131 bp, Zea mays
  Clone ID: MRT4577_165860C.1
gcgatcccaatcccaatccacccgcaggtggcagactcaacacacagggaggctcaaacctgggggtgggggcgaatccagggggggggatccatagcaatttcatcaaggatggtcttctccgaccgccc

SEQ ID NO: 72215 - DNA, 713 bp, Zea mays
  Clone ID: MRT4577_165861C.1
taaaactgaactaacttctatggttcaacttattcttcctagattagctacactggagggagaagtgaagctacataaggctgaagtgatagcagcatttcaaggagttattcagaaaccagtggagcaggaagagatgacaaagaaggagaagtttgaattggtttccaaaattcaggagatgcttcaatgtcacaaagttgatgtttttgccaaacagaataagatggaagcatcagtcttagctcactgtcagaagctggacactacattcgttcataagcaaaatagtttggaacagaatctcatccgacagatgaagcaattggaggagtctatgcaatcaaggcttcacctaatagaggaggaaaacctaaaaaagcacaatgagatgactgaaaagtttgacacaatgatagggcttctgcagaagttatctgacacctcatcccagtaagtaccaaaggcttcctgactcaatatctaatttgtaggacataaagctttgcctgtattttgctacaaaaaattagtactcgatctttttgattcaagttggtcgatcttgtacttcaaattgaatatgttattatcttcgcctcatggtttgcgacatgaataattcctgcaaacaaaacaaataatcaagaattgtgaagctgctgtatggcagtgaatcgttcctggaaaaaaaaaaaaaaaaaaggccccta

SEQ ID NO: 72216 - DNA, 424 bp, Zea mays
  Clone ID: MRT4577_165862C.1
aacacaataacttctattatatttattcctgaaacctggaaccattttatagtctcgatgccaagttgtcaccggcctcctcctcctccgcgttgtcctcgggacgccccgcccacggacgaaaacctttccgggttcgcccctttttttttcttctccaccgttttcaacacgaaaaggccggggccacgccccgccgccgccgccggcgggcgggcgttgtttcccgggaataatccaaccttatgggcccgggacggtctttttttttcttgcccccccggcgaaaaaggggttgccctgcccgtacccccccaccggggggccgggccccacgggcgccaaaaaggacattgggttcggcccccccaaccaacgggggtggttttattaaagggtttgagccccaaaaccccatgggcac

SEQ ID NO: 72217 - DNA, 1386 bp, Zea mays
  Clone ID: MRT4577_165863C.1
ccgggcagaaggagtccaccttgcatctggtgttgcgacttcgtggtggtatgcaaatctttgtcaaaacgttgaccggcaagactattacccttgaggttgagtcctccgacacaatcgacaacgtgaaggccaagattcaagataaggaggggatccctccggaccagcagcgattgatctttgcaggcaaacagttggaagacggccgcaccctcgccgactacaacatccaaaaagagtctacactgcatttggtccttcgtctccgaggcggtatgcaggtctttgtcaagaccctgactggtaagaccatcaccttggaagttgagtcctcggacaccatcgacaacgtgaaggcgaagatacaggacaaggaaggcattcctcctgaccagcagcgtcttatctttgctggcaagcaacttgaagacggccgtacccttgcggactacaacatccaaaaggaatctaccctccacctcgttctccgtctccgtggaggaatgcaaatctttgtcaaaaccctcaccggcaagaccatcactctggaagtagaatcgtcggacaccattgacaatgtgaagaccaagatccaggataaagagggcatccctcccgatcaacagcgtctcatttttgctggaaagcaactcgaagatgggcgcactctggccgattacaacattcagaaagaatcaacactccacttggtcttgcgtctccgcggagggatgcaaatttttgtgaagactctcacaggtaaaacaatcacccttgaggtcgaatcatcggataccattgacaacgtcaagaccaagattcaagacaaggaaggcattcctccggaccaacaacgtctcattttcgccggcaagcaacttgaagacgggcgcactttggctgactacaatatccaaaaggagtctacccttcatctggtcctccgccttcgaggaggaatgcaaatttttgtcaaaaccttgacggggaaaaccatcaccctggaggtcgaatcgtcggacacgattgacaacgtgaagaccaagatccaagacaaggaaggcatcccgcccgatcagcaacgtttgatttttgccggcaagcaacttgaagatggccgtaccctggcggactacaacattcagaaagaatccactcttcacttggtactccgtcttcgtggaggcgtatagttgattcatggacaccttatccatattccatttgtgtaacgatacttgtgcgaacctgttagctccctcgttaaattgcgatgctgtacccttgttaatacaacctttgatgggcaccactgtatcgcgtgcccagttgctagcactctgctgccttacaccaactaaaaaaaaaaaaaaaaaagcggcc

SEQ ID NO: 72218 - DNA, 900 bp, Zea mays
  unsure (1)..(900): unsure at all n locations
  Clone ID: MRT4577_165864C.1
ggcctgctcctcccccccgcacaaaccactcgttcgtcccgtcaacaagaggagcagaggcgccggagagggaagagggtgcgcgcgctcgcgtgtgtggtgtccgccggcccgatctgccccgctcccgccgcctcgaccaccacccctatcagcatcatgggtgccggcggcaggatgacggagaaggagcgggagaagcaggagcagctcggccgcgccaacggcggggcagcctaccagcgctcgccgacggacaagccgccgttcacgctgggtcagatcaagaaggcaatcccgcctcactgcttccagcgctccatcatcaagtccttctcctacgtggtccatgacctggtcatcgtcgcggccctgctgtacgcggcgctggtctggatccccaccctcccgagcgtgctgcagctgggcgcctggccgctctactgggtcgtgcagggctgcgtcatgaccggcgtctgggtcatcgcgcacgagtgcggccatcacgccttctccgactactcgctgctcgatgacaccgtcggcctggtgctccactcgtggctgctcgtcccctacttctcgtggaagtacagccaccgtcgccaccactctaacaccgggtcgctggagcgcgatgaggtgttcgtccccaagcagaaggaggcgctggcgtggtacaccccttacatctacaacaaccccgtcggccgtctggtgcacatcgtcgtgcagctcaccctcgggtggccgctgtacctggcgctcaacgcctcaggccgcccgtacccgcggntcgcctgccacttcgacccctacggcccgatctacaacgaccgggagcgagcccagattttcatctcagacgtcggagtgctgggcgtgtcattggctctgctg

SEQ ID NO: 72219 - DNA, 815 bp, Zea mays
  unsure (1)..(815): unsure at all n locations
  Clone ID: MRT4577_165865C.1
ggccgggccgggactacagtgcgcgaaaccttggtgagttcccgccgagattgcgtcgttggatccttgaaacctggagagcgagcaaaatctggaacatgttgatgttaaatatcacattagcatcaagaactcactccgatatgccattcaagagatgaggaggcaatcttcactgttacataccattgatgggttgtgttgtagtatcccggaagttgaagggggtaaggttggaaagcctgctggccatttgaaggttatctgccagagcctcgagaaaacttcaattgtgtgtgaagaagatttggagaataaatctcctggttgggaccttcatcatcccccttcagatgttgaaggctccaacccttcagatattgaggacccaatggatggatacgtgtcagaagatccggagctgtgggaaatggtgtttgatgacatgaagtgggaggagaataaagtggctgtctctttggccgagcattgtcgtatttggggctacgactatgaccaggtgtatgatcgtgagacgaagtaagactttctgtgaatcagcaagtaacctgttatgcagccttttggtgatgtcaagtaaccagttatgcagccttttgtgatgccaagacatttagtttgtgtcaagacatacttatgaacttgtaatctgtgaggtggttgattgtgcttgtaatagaattgtaaaactatctatctgcttgtaagatcaggctgctcgttctgtgagacgaagtaagacatagttattctaaaaaaaaaagaanaaaaaaaaaaaaaaagcccctagggcc

SEQ ID NO: 72220 - DNA, 697 bp, Zea mays
  Clone ID: MRT4577_165866C.1
gcgattttcgttgttgtcagcagcatcatgggtgccggcggcaggatgacagagaaggagcgggagctgctcggccgcggcggcgccggcgcgaccttccagcgctcgccgacggacaagccgccgttcacgctggcccagatcaagaaggcaatcccgcctcactgcttcgagcgctcggtgatcaagtccttctcctacctggtccatgacctcgtcatcgtcgcgaccctactgtacgcggcgctggtctggatccccaccctcccgagcgtgctgcagctgggcgcctggccgctctactgggtcgtgcagggctgcgtcatgaccggcgtctgggtcatcgcgcacgagtgcggccaccacgccttctccgactcctcgctgctcgacgacatcgtcggcctggtgctccactcgtggctgctcgtcccctacttctcgtggaagtacagccaccgccgccaccattccaacaccggctcgctggagcgcgacgaggtgttcgtccccaagcagaaggaggcgctggcgtggtacgccccctacatctacagcaaccccgtcggacgtctggggctcctcgccgtgcagctcaccattgggtggccgatgtacctgtcgctcaacacctgcggccgcccgtacccgcgcttcgcctgccacttcgacccctacagcccgatctacaacgacc

SEQ ID NO: 72221 - DNA, 162 bp, Zea mays
  Clone ID: MRT4577_165867C.1
tcgctcccgcattgaccacaagttcgacctcatgttctccaagcgcgccttcatacactggtacttcggggagggtttggtagaaggcctgttctcctaagctcactatgatctagtcagagcttgagaaagactactatgtggtctgcgctaattttgact

SEQ ID NO: 72222 - DNA, 108 bp, Zea mays
  Clone ID: MRT4577_165868C.1
ggagtgaacggcggctcagatgccgagaacgtctgttatctgcgcgacatcgcggacgcggataagttagtccgtgtgatgagatcatgtcctgctggcgccgacgcc

SEQ ID NO: 72223 - DNA, 324 bp, Zea mays
  Clone ID: MRT4577_165869C.1
gcagtcttttcggcccgaggtcttggaccgattggatgaaatgaatggatttccgccgctgacttaattggaggggaaggggaatgctggccttatgcttaaagaagtgtttgaccggcttaaggccaacgggattaatctccaagtcaccgagaagttcccagatagagttgttgaccaaaggtattaccccagctattgtgcccgacctttgcggcgtgctattatgagggttctggaggatagtctggccaaaaaaatgcttgctggtgaggtgaaagaaggggactcttccctcgttgatgtggattcaaaaggcaaggg

SEQ ID NO: 72224 - DNA, 180 bp, Zea mays
  Clone ID: MRT4577_16586C.1
gctaaggaaaatgtgttgcacaaggccgggtttttgattttgcaccccctcaccctaaaaaatactaattagtaactatatgcccataaccaaacatgcacgtctggaccatgcacaactcatgtaataaagctcgtggtgccccatagttgccatacaaggggtatcacaagatctgac

SEQ ID NO: 72225 - DNA, 107 bp, Zea mays
  Clone ID: MRT4577_165870C.1
agtgggaagcctgcgaagatcggatagtggggtggatactccagcgatcggcgggatctgatggctactcctgaccggcttatctacgttaaggtcacggcggacaa

SEQ ID NO: 72226 - DNA, 198 bp, Zea mays
  Clone ID: MRT4577_165871C.1
agactcattaatgagaaccactttggtttttggctttgatgagcttgttgaatctgggttccagggatacaggcgtggacaatattctagggtggaaaatatattcgggacactagcacatcacaaaccctgtttactgacaggccgtacaaaaacacatactacgggatttgcaattggttgcaagatttctaaatt

SEQ ID NO: 72227 - DNA, 347 bp, Zea mays
  unsure (1)..(347): unsure at all n locations
  Clone ID: MRT4577_165872C.1
ccaggccaagacccagaacggacaccaaagcaaaacgcaccaaaaaaaacgaccccggagaaagccgacaggggagccgaacaaaacccccccggagacggccaaaaagcacccggaacggggcggggggggggccggccccgacaccgggcgacacggcaaacggaacgcggagaaaacccacacccgcccccacgcgggggacnnagcccgcgccaagggcaggcacgcccnccgggaaccccgcccggggcaggaccccccggaccgggcgaaacagccgggcgccaacacgacaaccaccaccgggcggggaccccaggcaccccggcccgggggcccggaag

SEQ ID NO: 72228 - DNA, 406 bp, Zea mays
  unsure (1)..(406): unsure at all n locations
  Clone ID: MRT4577_165873C.1
ggaacccccgggccggccgggaaaaaaaagnaaaccacacgccacnccaggaggggacacggganggangcaggaggcagcnagcnaggcngaancacaagggagccgaccaaggnccggccggccagnagccacgacacgacggggacgacgacgaacgcnggcgcncccgggggggacgacaacgaggcacggacggggggggcgggggggcccanccngccggaggacaagcaccgggncgagaagggggggcacgncgcgcgggagcgcaggcgggagcgcgnggggggcgcgcgcggggccnncggcnaggggngcngggggggggcgcgcgggggggcggggggggggggggcggggggcggggggggcgcgcccggggggggggcgggcgggggggggg

SEQ ID NO: 72229 - DNA, 403 bp, Zea mays
  Clone ID: MRT4577_165874C.1
gagaatctggcccctcgccagggtaagataaccaagaactcaagaggcagaattgttcatatctgaatcggaactattggccctcttaccacgcctatgctgaagccataggatatgatagcgaaaccgctcggggaataccaattgcacattcccaagaaataaggaggcttttttgcgcgggtgtgaatagcaattatctgctctgttattatgcctatactgaagccaaaggacatgagatcggaatttcttggtgaatcccaattacacattttgcagaactaatgaggcaataatgttcatgtctgattcgcaatgatctgacatcttattaagcctatcctgaagccaaaggacccgaaatccggaatgcctcgggggaagcgagctggaattccct

SEQ ID NO: 72230 - DNA, 462 bp, Zea mays
  Clone ID: MRT4577_165875C.1
acaagcttttttttttttttttttttttttttcttttttttttttttttttttttttttttttttttttttttttttttttttttttttttttttttttttttttttttttttttattttttttatattggtggttttttttattgtttcctttcttgtttccaattttggggaaaacaggggcaaaaccgtttcgggggaaaaattgtaatccgcgcacaattccacaaaaaataagacccggaaacaaaaagggaaaagcctggggggccaaaggagggagctaaaaaaaaataattgcggtgccctaaccacccaatttaaaagcggaaaacctaaagggccacctgcgttaataaaaaggccaaccccccaaaaaagaaggtttgggaattgggcccccttccccttccttaaaaactgactcggtggcctcggtaaaaaagctcccccccccgggta

SEQ ID NO: 72231 - DNA, 293 bp, Zea mays
  Clone ID: MRT4577_165876C.1
tgttcgcttacgcgtccaactgcaacaaggttgtccactattttttagcgtgccacaccgctcgcaactgagtgctttgggcggcttcgacgggaccaaagattacaagggcccggcagatcaagatccattacgttaaaccatctgtgtagacaggtgcttgctggccggtcaatactaatgacaaagaggagaaattgagatcacaatccgctcttgaccccatagaaaaaaataccagtgctagacacaaaactgccaagcaagatgaattctccatgcctactttcaga

SEQ ID NO: 72232 - DNA, 133 bp, Zea mays
  Clone ID: MRT4577_165877C.1
cccacgcgtccgcccacgcgtccgatatcatctgatggagctttgctagttactggaagtttgtgcccataaaggtttaaagatggtatgtccatacagagaactggaagtttgtgcccataaaggtttaaag

SEQ ID NO: 72233 - DNA, 401 bp, Zea mays
  unsure (1)..(401): unsure at all n locations
  Clone ID: MRT4577_165878C.1
accggcctnnctttttttttttaaccttttattttttgtggggggaccgtttcacttggtcttttgggaaaatccttaagaacggaccccttgaattgggtttgaagtcacctgttgagacaaacatttttaattccacaaggtgtaagggtcaagcattgagcatatgtaatttctcctggtgggagaaactcatattttcaaaggaaaggcgggggggccacaaataagtttcaacaattaagatatttatgttaaacatgtgcactccatttggtgacaacttgacaaatttgtttttgcgcgatcttcaggcatgtttttaccactatttttgaatatattcttaaaaaccttccgatataaaagattttgcatgaatttcgaatgcagatcgacat

SEQ ID NO: 72234 - DNA, 373 bp, Zea mays
  Clone ID: MRT4577_165879C.1
gatgaaattgcacaacatgcatcaaatgtgggaaacaaatcacatcatgcgtatacggtcagcaagggacaggatgggggatcatgatgtctgcgctgctatgtctagagcgctgatggataaaagtgaaacaatcacactagatatatgtacctctattatgcctgtcgtcaccaatcttctggacagcaaaatagacagacactcaatcatcgcatcggaatcgttcgtgaagcttgtaacgacttcatgtccaatgatacatacaacagtatcgacaggtccttgtgttggactagaccttgatgcagaacatacgacgcagcgctgcaacttatgcttcatcgaattggagaaagccaaaaataatctt

SEQ ID NO: 72235 - DNA, 629 bp, Zea mays
  unsure (1)..(629): unsure at all n locations
  Clone ID: MRT4577_16587C.1
acaaagaaaagaaggataaatttgtagagcctgcgccgtggnggaacaaatcatcctcttcaaacaggcatgacagcctcttcatttgtgccgcataatggccaaaacaatatgtttatatctggaggttggtaggtcacttgattacatgagtatcatgtctaattgtttgcttccatctatcttctttgtttcttgttatatgttgttaactgtctcgtgcaattatcaatatcatgatccggcatttgaattttttgcatttgagaggatatataaatactgctgccaatactagagtgactgaactacttcattttattaatgactccattgccaagtttatcgcaggtaggcaccccaccggagcttgatatttaatatataatcataatgcatctgtttttacttgtaagtcctgtatgcctataatgatatatattgtcagagtttctagtgtcgagtggcagaaagggataaaaaaaagttgacactttggatgtttactgttcaagaacatgaatgagaatagctttgggcatgtggaacttgttagaacaaatttgggattacacagccttctacttgctactattcaaaactacacacaaacatgtagcgtgctgttt

SEQ ID NO: 72236 - DNA, 586 bp, Zea mays
  Clone ID: MRT4577_165880C.1
agggtctcctagagaaagtcttgcaggtgctaactcagagacgggaacaactcgcgcccagtgagactaagccggagaagaaagggttagatccgaagtggccagatttaccagactggatcgacagggcaggaagggacattgagagaatgattaaagatgatatgttggaagagctggtccttgagctactgttcagttaggttagggttccacggccgtagtaggttttattacagcagtacagatcccttgttttcttatctgggttttttagtcagttatacttgttagtagtagggttccatggccgtagtaggttttatgggatgtctgtaggaaaattcttttctgcctcggaaaggagtggggtttgtaagaatagaagtctttcctgtcgagttttgtcggctgtgagagttaaagtctgtaaatgagggcaaattgtagtccccggggcatttgtatttggattggactgttcttgaaaggaagaataagcggcatgttctttttgtctgttcacctcgtttaaaatgcctacacattgagtattccttttctccgactatgtgtgaaattcttt

SEQ ID NO: 72237 - DNA, 188 bp, Zea mays
  Clone ID: MRT4577_165881C.1
tccatccaggcatacgttcgaattgaacaatccgctcaaacataaattttacagtactgcggggaactatagtgatacatactttagagagaaaggtcataccctacaatccacaaacaggcgtaatcctttggacctttagctatttgcaatgcacaactttatgccgctaaacacaatctctacct

SEQ ID NO: 72238 - DNA, 258 bp, Zea mays
  Clone ID: MRT4577_165882C.1
gataaacatttgatatgcacagataataaaaatatatagtagtaaataataggccatagatatttttattatctgtggataaacatttgatatgcaaaaaaaaaaaaaaaaaaaaaaaaaaaaaaaaaaaaaaagggagaaaaaaaaaaaaaaaaaataaagaaataaaacaaaaataaaaaaatgataaataacatttattgccactaatcccaatttataaaaggagaaggtaaatcattgaaaaaaacactaggg

SEQ ID NO: 72239 - DNA, 391 bp, Zea mays
  Clone ID: MRT4577_165883C.1
ggcctctatgtgttctagatggccagcgaggcggccaacaatggctaggacaagtgtgatcagtgctactggttgctcccctgcaccaccaccgtgctggggaatctcttcctcgtgctgacgtacagataccttatgtacaacgcggccatgggggtggttccggcggatgtctacctactactcaatgctgaagacgcgcacttagttgtcgggcctgtggaccaccggctacttagcagacgcacaggagctagctcggcagcatgttcggcagacgtctctcgaaaccacccctgtataggagactgctctggatgcacctattgcctggggatactggcaggagacggatctgaaacaggcggtcccaccctactctggacaagga

SEQ ID NO: 72240 - DNA, 247 bp, Zea mays
  Clone ID: MRT4577_165884C.1
cccacgcgtccgcccacgcgtccgatcagtggaagctgctttccagccggagacaactgcatactcccctggtttgaagttgaaaatgatcaagtggctgcagaactctgagtgtgcaccttctgttcaggttaagtcatttaaagagggttcattggcacaaggtacattgcctaggagtgaaagcaagaacttaaccactgctacatttcaatcaggacaggaggaagccatttcatcgattgac

SEQ ID NO: 72241 - DNA, 537 bp, Zea mays
  unsure (1)..(537): unsure at all n locations
  Clone ID: MRT4577_165885C.1
aatcgccattaggcccaagccacctcaaccatgcacgtctccgctgctacctgcctagctgctcgcgctgctaactccaggccctctgtcgacgacttgacatccattctgcacccagctgtgtgggacattcatcgatgaaaagatgngactccttctgaccctgctgagtcacagggacattacctagctcattgctgccggcaggaacaattatgctccgaccccaagggatttggagggagcgccccctagactgagctgcgcccaggtgctgggggaactcccgcacatcaagttaaaaaacaagacatagcgctggtagaacacacaaatggcttgaaacccgtgattcagcctcattctactaagcctgtgcaataagcaagagtattgtgtttgagtctgcgtcagcgacgtgaagacaacctgaagccagagtggcctttctaatggctttatgatgtgaagtacaacgaagactatttcctgaggtaattctaagcgttacttgatcgtgcgtggcggacactgtac

SEQ ID NO: 72242 - DNA, 145 bp, Zea mays
  Clone ID: MRT4577_165886C.1
accaagacttgctatttcaccctgctgcatttagcaatatgcacatccagaggagtgaggggaggttcggatcgacaaagtggggatgttgacgtgtatagcatagaggagcgaataacgcgcgttatccattgtggcactacta

SEQ ID NO: 72243 - DNA, 340 bp, Zea mays
  Clone ID: MRT4577_165887C.1
gccctacggacctctacaaccagctctacatacaaccgcatcctcaaccccatagtctgctgcatagcattcagagactcattcagagactccttctggtgcggggtctgcaacaagaactacatataacaaatcatctacaacagctacgacgacagagacccatccaacgaacgatattaatgctgttgtagaatgctattaagaacctcatcaagaaattcatccagctattcatcaacaccttgtacaacaccttccgcgagggctatcactatggtgctgacatacccgcgtagacacacgtagagtgttaacaacggcgcttacaacggcctgt

SEQ ID NO: 72244 - DNA, 219 bp, Zea mays
  Clone ID: MRT4577_165888C.1
tgtattttaatacactttttattcaaaagggttggttttttacaaaattttacattttaaggggtttttttttatagaaaggtatgtttaaaaaattccatattggttaacttggggggcaacccaaattttgaggggggagctttggctttccccaaaagtttttggtaggggataaacccttccaaaaaggttatttggcccagaagatccggctta

SEQ ID NO: 72245 - DNA, 240 bp, Zea mays
  unsure (1)..(240): unsure at all n locations
  Clone ID: MRT4577_165889C.1
gtttggtttctcagcggtgcccgtgtttatgttctacaacatatggtcaacttgtgaagtcatcaagtcaccgcagaccaacgggaccacgggtgtggagcagatctgtgtggatatccgacaatacggtatcattccttggaatgctttccccggaaaaatatgtggctctgccctnggagaacatctgcaacacaaacgagttctacatgtcctatcacctgttcattgtggcctgtg

SEQ ID NO: 72246 - DNA, 271 bp, Zea mays
  Clone ID: MRT4577_16588C.1
cagagttccttcgcatcgtgcatctccagctcgccgagtctgactccaaaccgtcgtgcgccgcctgggcccggtgtctctttctcgtcaccagctcgcgcgcccctgttttctttgtcgtcggtcgtcgtcttcgagttgatttttagctgttgtagtatttttagttatcccggctgcgtctgtggccgtcaaatcatcggagtcgctcaactcaccaatcgtatcttggtcagtcatcgatttcatgtttttcatggtcctcacgtca

SEQ ID NO: 72247 - DNA, 326 bp, Zea mays
  Clone ID: MRT4577_165890C.1
cggacttttgttttgacccaaacaaaaaaacaatctcagggaggggccgtttttttatgacaaactgtaacgtcagatatataccgatccctgcagatgaccttggcgacccatcctgggaattgaaacttggtatatttcagatgggtatcaacaatcaaactccaccatgttattggcaagcatggtctctgccatgttctaccattgactagaaaagctccggaaggaaggaagaccatgggcctgacaagttaaaaggctataaaagcgtgtaggggaaaatctatattgaaccatggcggcttttaaagaccaatgcacct

SEQ ID NO: 72248 - DNA, 1248 bp, Zea mays
  Clone ID: MRT4577_165891C.1
agttccttcctctatattactcggattgagtggcactgggtgggttaaggaaacgaaatcggagcacaaacacacacacacacacagaccatggtgatggaggagacgatagacgacagtgagatgagcttgtcgaacatggtgctgggcttcctggaagatttcgagagggacgagcgacggccggagaacgacgacgacaacaacgaggaggagggctccagcggcggcgacaccgccgagagcaaggccttctggcagacccaacacttgcagctgcgcgaggcactggccaagggcagcccagccgagagcaggatccgcgcggacacggaggaggccgtcaagagcatgcgcgccgcggcctgctcctgctcctgcacggggcggcccgccgcccgggactgccggccgtgcatgctccggcacgtcgccgaccggctgcgcgacgccggctacgacagcgcgctctgcaaatccaagtggacgcgctcgccggatatcccttcaggcgagcacagctacgtggaggtggcggtgcagacgaggagcggcaagtccgtgcgcgtggtggtggagctcagcttccgcgccgagttcgaggtggcgcgcgccagcgccggctaccgcgcgctggtgaccgcgctgcccgaggtgttcgtcggccgggccgaccggctgcgcggcgtcgtcaaggtcatgtgcgccgcggccaagcagtgcatgaaggataacaacatgcacatgggaccctggaggaagcacaagtacatgcaggccaagtggctcggcacgcccgagcggggagcggcggcggtggcggcggcggagacgccggtggtggcggttccgtcggtgacggtcggctcgccagagaagcagaccaagttcagggcgtccatgctgaccttcgactttggccggaccgcgctggaggtcgcgtgatgaacgcacatacgctgccggtcgagcggcattagtagttctctaaatatagacagaggaggtaactttcgagaagaaaaaaaagttatatagagtgtacctgggttttaggtttttgtcaggattcagaaagctgaatctgtaatatcaatcgagctaggtgtaaacagataaggcgagcttgtcacgcgtactccgatcgcgtcactgtaatggaaatgaagctaaaagatcatgggtgtcggttcacatgtcagtaacgaaatggataactgataacgttaaattaaaaaaaaaataaaa

SEQ ID NO: 72249 - DNA, 454 bp, Zea mays
  Clone ID: MRT4577_165892C.1
atgggttaaattgtttggaaaccatgatgaacggttcatcccactgttccaggaggggcacatttcaaacccacaaataggtccacgcgtttacccagagtgttgggcgggacaactcaaaggcccataatctgcgccaaagttttccccaaccaaaccgtgggccaaattcctcagcatttggttctcagggaactggaacctacccatggcctcaacgccgtcctcagtctccacgagctttgggcccgggccctcacgggggcctaaaagcaccactttcaggaacagaaccccaagccccgccctctatgtatcccctgacctcaccaaatcaataaatgctgcaaaggctccaccatctactatggcaactaaatgcccaacaataaaactcggggggggaccactgcctgctggaacaacacacagggtgccaaactcggacgcgggg

SEQ ID NO: 72250 - DNA, 1366 bp, Zea mays
  Clone ID: MRT4577_165893C.1
acatgaattgcaactcatcagcatgcagcagctagtaccccggctgttctgttctgttctgtccgctagtgtcgtcttctgctggtgagcgaggcaaactatgcgtgcgtggatgtggatggtacaggaggcactggccaagggcagcccagccgagagcaggatccgcgcggacacggaggaggccgtcaagagcatgcgcgccgcggcctgctcctgctcctgcacggggcggcccgccgcccgggactgccggccgtgcatgctccggcacgtcgccgaccggctgcgcgacgccggctacgacagcgcgctctgcaaatccaagtggacgcgctcgccggatatcccttcaggtaacctgcgtctcgcgcgtcgtgattataacttcgtcttttcgttctttctaccgcaataaacgcaacgttgaggaatatcctgtacaagctcacatggttcacatggacttggtcatcctcctatgacactgacagacgccgcttcccagctgatactcctacacagccgccctaacaaacattccaacaaacagccagccaaatgccaggaacgcgtctctttctccgacggttcagcgttagcggaggcgtccacaccaaccctctaggtctcggacccaaggatgcatgttacctgcccaacatcctaaaaaatctgaacccagatattcgatgccgaacaggttggttcgttcgtttgctgacgtgttctcttccgatccgccgaaacgcgtgtgcaggcgagcacagctacgtggaggtggcggtgcagacgaggagcggcaagtccgtgcgcgtggtggtggagctcagcttccgcgccgagttcgaggtggcgcgcgccagcgccggctaccgcgcgctggtgaccgcgctgcccgaggtgttcgtcggccgggccgaccggctgcgcggcgtcgtcaaggtcatgtgcgccgcggccaagcagtgcatgaaggataacaacatgcacatgggaccctggaggaagcacaagtacatgcaggccaagtggctcggcacgcccgagcggggagcggcggcggtggcggcggcggagacgccggtggtggcggttccgtcggtgacggtcggctcgccagagaagcagaccaagttcagggcgtccatgctgaccttcgactttggccggaccgcgctggaggtcgcgtgatgaacgcacatacgctgccggtcgagcggcattagtagttctctaaatatagacagaggaggtaactttcgagaagaaaaaaaagttatatagagtgtacctgggttttaggtttttgtcaggattcagaaagctgaatctgtaatatcaatcgagctaggtgtaaacagat

SEQ ID NO: 72251 - DNA, 215 bp, Zea mays
  Clone ID: MRT4577_165894C.1
ccgggcggcatgggccccgacggcgagctgcgcgacccggcccacccggacagcaacggaaacgggaagatcccaggaaccagcgcctaccagccgcaacgacaggggacagggccaagcccactgcaggcggcagaagaagcggcccgcaagccaggagtggggccacggagggacaaccgacgcagggggagaccacaaccgggcaggggaca

SEQ ID NO: 72252 - DNA, 457 bp, Zea mays
  Clone ID: MRT4577_165895C.1
ccccacatgaaagctcataacccttgacctggcgccaagggccatggtccaaatgcaccaacagactctgacgtgcatacggacggacggacagcttgcattttagctccacctggggtggatgcatgcatgaagcacaattctccatgggttacgcagctcatgtcggctctgtattattactcggcctccctgcccttcagacctctgtctctccctgtatcgatgaagtccgatgacgtgtgtctactgactctctctgcgctcgatcttgccagtgaaagagcctatcagagctcatcaattctgatcttgacctctacaccagagagaatccacgcatcaacatgctcctgtactataacaatgtctttttttgctacctgacactacctctctctctgtctttgttgggcacaggatccaaaggcacgctgctcctgatcaaagggccttc

SEQ ID NO: 72253 - DNA, 1195 bp, Zea mays
  unsure (1)..(1195): unsure at all n locations
  Clone ID: MRT4577_165896C.1
cacgaggcctgcagcagccactcgctgaagatgcttccctctgacgtcgattgtgttcttgtgccacacaaatacgatgaatgggttgtggattatcagcgatgctcactagcaagcttgcaaaaggactttgctgccagggtgaactggggcagtgtgcttctaccggtagagtgaaggcttggatgacaacataccgttggatagcagagaagtcaatcccatttttgaagaaggatccaaatatgggcgcaaaaaagttacaagaggagctagaggataaatataatgtgaagctaggatactcaacagtgtgggctggtagacagaaggcggtggaacaaatatttggaacatgggaagaaagttttgcagatttgtataggttcaaggcagagattgacgcaaaaatgcctggaagtgttgtcgatttagaggtgcaggaggaagaggatggtgtgtattttcgcagattcttttgttgtttcaaaccaagcattgatggttttctgaacggttgcagaccgttttggagcgtagactccacagcgctcaatggcagatggaatgggcagttttctgaaaaggaagagtcacgccaaacaagggcgaccattaggatcagcaagtacttgcacgcccaaaaggcaaaaagttgtgcaaaacgagtcaactaatattagtccggggcctgttacaagaagccaatcggcgttatcaacgattggtgaaggctcaagccaggaaatggccacacccaaaaggcaacaagttgtgacaaatcaatcaactaatattagtcctgtccctgtcacaaggaggcaattggcattatcaatgctcgatgaaagcacaagtcaggaattggccacaccttcgagggcaaccaaatccccttccaagcctacatcaaggattgcaaggaagatcactccaagaaaattcaaaaagtgaatgtttttgtgtctacaaaactatgatattggatgcttttgtaatcttaattaattagaacggaggcatttggatgatattttggcatatgtatggattgttgacattaaacttgttattgtgcttgctgttatgcttctgtatgggattattgacatttggatgacatttgggcttaatatttaaatcaaacttgctattatgcaaaaaaaaaaaaaaaatttgcggccnnnnnnnnnnn

SEQ ID NO: 72254 - DNA, 662 bp, Zea mays
  Clone ID: MRT4577_165897C.1
ggccgcttttttttttttttttttctttttttacaataacttactttatattaaagtaagaaagagttgtattattacagaccagaacaaaatataagagtgctgagtaatattattacataacctgggaggcaaaaacccctcccgataaacagtaaaaagtttttcttaacggaggacccttcctcccgcagcttcagtcttgattttcttctttaggtaccaccttggaacagaagcaacaaaaatttgctgcttcatcaccttgactgataggtgaatcaggctctgctccacagatatcaaagtaaaagcagtttcctgcctgaggttcttcaggtggtggtggtgtagtcctcgcttcttcaacttctatttcctcctcgttctctgagacgagatggccacggcgaggcctctttcacggtggcggaaagcaggtttgggggaaatgggaaattggcgagctctggtgatcaattgagggcacggcttggtggcttggtgcttgactaccctacagagttcatggcgtgctcaatttataaagtccgtgagcggtgttgcttaatttggacgaattgcgctggcggtcgagaggggaatgagtcacggcggtgatctaccgtggcaaccgcagagcgactgaactatccggccgg

SEQ ID NO: 72255 - DNA, 274 bp, Zea mays
  unsure (1)..(274): unsure at all n locations
  Clone ID: MRT4577_165898C.1
agcagaggggagggagagagacgaaggagggcacggggaaccgcaccgacaaccgcaacgccancacccccccgccccgcggcgcgccccccaaggccggccgcaaggccgagcccaggccccgcccccagcccaccgcccccgccnaccgccccgggagcagccacgcgaccgacggcaccaccaaggacgagccagacagcgccgcagaccgggacaaggcgagagagccagccgaccagccagcggaggcaacggagaggaacggacggcc

SEQ ID NO: 72256 - DNA, 315 bp, Zea mays
  Clone ID: MRT4577_165899C.1
cccacgcgtccggcaccacaccacaagcgcaccgccgtcacctctgcagctctgccccatcgcggccccatcccgccgctcgtcgacgacgccacaccgcccctcggccgcggagaggagagggctgatgtgttcgcggtggagggcatgaagctgcgcagtgcgaacgctaagctagaggagaacaacagggagcttgctgcaggacgcgattgagcaggcctcctcgacactggtgtgccaccggcccggccctgtcccccctcgtcgtcgccagtgcgcggacgccccgccactctccatcgagcggcaagg

SEQ ID NO: 72257 - DNA, 704 bp, Zea mays
  unsure (1)..(704): unsure at all n locations
  Clone ID: MRT4577_16589C.1
ggccgaccgacgcgnncggctggaggaaggagttgaacctttctaaatatcatataatgtcctcatacatgcgttatgcgggatgggcagaactcaactggcttctcatcattttcatgagatgctagaaaggggattggtggcaaacaaatacacatatactttgttgatagatgggaactgtaaagtgggcaactgggaagatgcaatgagattctattttgaaatgcatcagaatggtattcatccagattatttaacacataaagccttgctcaagggatttgatggtcacgtgcaccatacaattgagtacttggataacgttattttgggtgaatagattgattgacctctgaaagcttgtccttttgtcctcgcttcgctgatatctccctgtcagaggtgatagatggagttcctgggcccttcatttaaactggaaacaaaaagagagtttgaaacaatattctctgattaagccgctgggtggtttctaaacaaatagttgagcacaaacaggccttcctcttgctgctcagagatggtagaggaagtttgggccttgggggcaattccatccaaaaagaagaaaaaagaaaagcaagacctttttagaccatgttctcttagttaatcagcttggtgcttcccaaatgaatagttgatcacaatcaggtcttccccccttgctgcttaaacct

SEQ ID NO: 72258 - DNA, 258 bp, Zea mays
  Clone ID: MRT4577_1658C.1
atggccgacccggagtccggcatggtggacaaagccgcgtacgtcctccactccatggtgagctccggcagataccgcgccgccgccgtcgaggaaggcggcatccccgtcctggtcgagatggtggaggtcagcacctcacgccagaaggagatcgccacactctccctcctgcaaatcgggatcaatcgcgatgggacggatgacggggatcacggagcagagggggaggatgtcggtggggtcgatggaaggtag

SEQ ID NO: 72259 - DNA, 219 bp, Zea mays
  Clone ID: MRT4577_165900C.1
atggcggcctcgtcgaagatcgtctcggcgacgatggcatccccggtggagactccatccatgaagacggcgggctccattgtctacttcctccatggtcactcgtgccctgtcctcatcctccatgggcgatactgctactacaagtcagcgcctctggccgccgccgacggctcgtgcgatgagaagttgagaactaacgagggagttgagtcctag

SEQ ID NO: 72260 - DNA, 455 bp, Zea mays
  Clone ID: MRT4577_165901C.1
ccttgcataggttgttgtagggagtgtgtgtgggtgttttttatggatcctttcatgtacgagtgttactggcctccatagggagggcgttgttattttttttgggtctcttagacctttctctcttcttaatatatatctaaaacgcagtcctgctgcgttttttcgagaaaaaaaatacttcgcaattgtcatggcagtactatagttttggacagctccaagaataccatggttttgagaaacattgtttggatacaacattataaatcatggtatttaggcaaagctagccatgccatgaaaactttaggttgtagtggagtttctaatactccaaaaagaccatggtatctagaataccatggttttgaaaacatagtttttaggaatgcaaccaaacactttatgacataaaatactctggtattcctatataccattggtgttgccta

SEQ ID NO: 72261 - DNA, 1461 bp, Zea mays
  unsure (1)..(1461): unsure at all n locations
  Clone ID: MRT4577_165902C.1
ttttttttttttttttttttaaggaattcagaactaccatatattgtagtttacattatattattacagtttcatcgactaaaagagcaagcacagattatgaagcatgaaactgagagcgtcgctgaaatttctaatgataatgtcagatctctaatggccttatttttttcccgtgtaacgtagtctagtgggagaatgctgttgccactaatgcacgaggctgaccagtgctatggcatgcttacgacttatggaatgagatccatgtctggtgggagaatgctgttgccactaattgcgccagccgatgcacccgtttatgtgaacccgaaacagtacgaaggcatcctccgtcgtcgccgtgctcgcgctaaggcggagagcgagaacaggctcaccaaaggcagaaaggtgtgagaagactcttcttgtagctgggtgannnnnttgacccttcctacttccatgacagttgacagcgagctaccatcgcaagcagcatttgcgatgctcccatgctttacagtcaccacgttgactggtgatcagtgatcgctgtgtgcctgttcatgctgcagccttatctccatgagtcgcgccacctccacgcgatgcgccgggtgagaggctccggcgggcgcttcctcaacacgaataaaggagggcacggcacggacgttgctgcaaacnnnnncagcaagatggcggcggcggcggcaccatcccgtctcgccatgnnnnntagcgctgagcctccatggctgtcagggctcagcgacggcagcaacccgtgctgccactcccggagtagtgtctccagcttgtccgggtcctacgtggcgagcatctacggtggcttggagcagcacctccgggcgccgcccttcttcaccccgctgccgcccgtcatggacggcgnnnnnnnnnnnnnnnnnnnnnnnnnnnnctcctccttcaagtgggcggccagcgacggctgctgcgagctcctcagggcgtgaaccgaggagggaggggatggctactcagacgaacggccttctccccgatggctggttgtctgtaggcaaatcattcttggctgttctgcattggggtgcgacctacacatcatccgcctaccgtacctaccccacccgtgtccctgaaattccagggtgcttgggttacttacaggggtcttgtgtggtgatgtggctnnnnnatatgcatttgctgtaacatagcgtacccaaaccactgttgcttggtacttctcgctatcactgcctcatcagtatggattctgcatttctgcgttgtcacagtgtatgaataattgaggcgtcagacttcagggttgctccagttcttggagataggtctgggtttgtttgaagcttgcctggaggtctgaaactttgtgtttggtgaagatgctacgttattgcagtttgaatctgtaagtttgggatcagc

SEQ ID NO: 72262 - DNA, 348 bp, Zea mays
  Clone ID: MRT4577_165903C.1
ttttatttttttttttaggtcgttttcagggtaattattggtgtttttttttatctaaacaaaaaaacaaattcgggatcccctttaattattgtgccggatgaacaatccgaaaaatgcgtccatttttttgctgggcttattattgagagatttgtgcttgttacaagcttatttcttttgcactttgcttttcgcagttactttggggggttggtccccgccccgagaatccaggggcttttggcgaccccctttgtgggggccaggttatcctcggcctctgagagaggggggggggagaatccttttggacttccgagggcagccggggaggacctttagggg

SEQ ID NO: 72263 - DNA, 200 bp, Zea mays
  unsure (1)..(200): unsure at all n locations
  Clone ID: MRT4577_165904C.1
nnntacgcgtgggctagccgccatatctcacgntccactctggcaccaagccgagggaaggtgaggagcgatggcgcgcggcgtggtgtcggcgaagggcggcgcggtcgcngtcatgaagaaagggtcggttncctgtatgattgggtgtatgatagtcagtggaggacaagatcatggaggncgtctcgctcgagaag

SEQ ID NO: 72264 - DNA, 628 bp, Zea mays
  unsure (1)..(628): unsure at all n locations
  Clone ID: MRT4577_165905C.1
gtaagccaaagttcacctaattaatatgcctgactgttttggtcagtgctcccagccttaagcattaacctgaattgacaaaaggatttgactaattcaatgaattcagaactaccatatattgtagtttacattatattattacagtttcatcgagtaaaagagcaagcacagattatgaagcaagaaactaagagcgtcgcttgaaatttataatgataacttcagatctctaatggcttcccttgtttttttttccgtgtaacgtagtctggtgggagaatgctgttgccactaattgcgccagccgatgcacccgtttatgtgaacccgaaacagtacgaaggcatcctccgtcgtcgccgtgctcgcgctaaggcggagagcgagaacaggctcaccaaaggcagaaaggtgtgagaagactcttcttgtagctgggtgacccccttgacccttcctacttccatgacagttgacagcgagctaccatcgcaagcagcatttgcgatgctcccatgctttacagtcaccacgttgactggtgatcagtgatcgctgtgtgcctgttcatgctgcagccttatctccatgagtcgcgccacctccacncgatgcgccgggtgag

SEQ ID NO: 72265 - DNA, 400 bp, Zea mays
  Clone ID: MRT4577_165906C.1
acccatgcgtcagcagacgaatctgcactgatcacagatgcgcaaagacaccatattgagggaacccggacccgatccaaggctgataacacttgcgtcccctaacctggccgacctgcatcccagcaaccatggcattggcctacaatacatcgacctaggccatgaacgcgaatgaggagtgccaacgctggttcatggatatgaagacgaacaaagtgcaccgcttcacgctgtacaacatcgacgagcggacgcacgccgtgctggtgtacaaggtacagcgtccaccagcaaggacacatcaagctcgtggtcgcactgcccgacgacgactgccagtacgccgtcttcgacttcgacttagtgactgttaactactgtcagaatagcatgatct

SEQ ID NO: 72266 - DNA, 963 bp, Zea mays
  Clone ID: MRT4577_165907C.1
atgggcgcgcctgacttctgcgcgcgctgcgcgcgcatttattgcgcagcaggcgagcaatggagcgccaggggttcatcagcagcagaagaggctgctctcagtgcttgtagcgcccaaggttgcagaaaccagcaatgttgtgtccctcaagctgatgggtggtgcccttattgggagacgcatgaatcgagtgcggcagcagttgactccacggacccgccagctgagaagcatgagtaccaggttgaggtcaacaggctcatggttttgatcgtacacaacctgtatagtaacaaggaagttttccttcgagaactggtcaggtatgactctggtgaaaccgtgaggtcggcaaagtttatttcaaggaaacaatgggttgtagctggtgcagacgacatgttcattcgtgtctacaactacaataccatggacaaagttaaagtttttgaggctcatactgattacatcagatgtgttgcggtccatccaactctaccatatatgttgtcatcatctaatgacatgctaataaaactgtgggactgggataaagggtgggtgtgcactcaaatatttaagggacattcacactatgtgatgcaggttactttcaatccaaaggatattaacacctttgcaagtgcatcccttgaccgcactacaaagatatggagtttgggttctccagatccaaacttcacacttgatgggcatcaaaagggtgtcaactgtgttgactacttcactggtggtgacagaccctatttgattactggttctgatgactccaccgcaaagctccctataatcattactggatctgaagatggtacagttcgtatatggcattcgacaacttacagacttgagaacacactaaactatggccttgagagagtctgggctgttggatacatgaaggggtctagaaggtcaatgcttgttgcaacatcatag

SEQ ID NO: 72267 - DNA, 3334 bp, Zea mays
  Clone ID: MRT4577_165908C.1
ttcctctgtcgccggtcctggctccgcgcctgcgccaccgggttcgcgtcggattcgctccctcttcgccgcgccccaccactccatcgtcgctgggggatctctagggtttagcgcagtccccgcgccgtcctcgccgccggccccgccaccaccaccaccaccaccaccatgccgctcaggttggagatcaagcggaagttcgctcaacggtcggagagggtcaagtcggtggatttgcaccccacggagccatggatcctgtcgagtctgtactcggggagtgtctgcatctgggattatcaagcacaggcaatggtgaaatcatttgaagtttcagaactgccagtgaggtcggcaaaatttatttcaaggaaacaatgggttgtagctggtgcagacgacatgttcattcgcgtctacaactacaataccatggacaaagtcaaagtttttgaggctcatactgattacattagatgtgttgcagtccatccaactctaccatatgtgctgtcatcatctgatgacatgttaataaaactgtgggactgggataaagggtggatgtgcactcaaatttttgagggacattcacactatgtgatgcaggttactttcaacccaaaggatattaacacttttgcaagtgcatctcttgaacgcactacaaagatatggagtttaggttctccatatgcagacttcatacttaatgtacaaatgtttactgggctgatagtggtgacctagttgcaatagcaagtgatacatcattctacatcctcaagtacaatagagatattgttgcttcttatctagaaggtggaaagcctgtggacgaagaaggcgttgaagatgcttttgagctgcttcatgagatcaatgagcgagtgagaactggaatttgggttggagactgctttatctataacaactcatcgtggcgcctaaattattgtgttggtggtgaggtcactacaatgtatcatttggatcgccctatgtacttgttgggatatattgcgaaccaaagtcgagtttatcttattgacaaggagttgaatgtcattgggtacacattacttctgagtttgattgagtacaagacccttgtgatgcgtggggatttggatcatgcaaacaaaattttatcatccatacctaaggcgcaatacaatagtgttgctcattttttggaatctagaggtatgttggaagaggctcttgagatagccacggatgctgactacaagtttgacctagctgtgcagcttggaaaattagatgttgcaaaggctatcgtcatagaagcacagagtgaatctaaatggaagcagttgggtgaacttgccatgtccacaggcaagctagagatggcggaggaatgccttcttcaagcaaaggatttaagtggcttgttgctactgtactcatctcttggagatgctgaaggaattgaaaagcttgcttctttggcaaaagaacacggaaaaaacaatgttgctttcctctgcctttttatgcttggtaaagttgaagattgcatacagttgcttgtagacagtaaccgtatacctgaagctgcattactggcgcgttcatatcttcctagcaaagtaccagagatagtggcaatttggagagacgacctgagtaaaattaatccaaaagctgcagagtctctagcagatccttctgaatatccaaatctatttgaagactggcaggttgctctaactgtagaaaaaagtgttgcgtctcagaggggcaattatcttcctgctgaccagtacttgaatcatgctgagaagtcagacatgactattgtggaagctttcaaaaggatgcaggttgttcagcatgaggaacctgaagatgtggctgaggaaaatggagaacttgatcaacaggcatttgaagagactgaaatgcagaatacagatgatgatgctgatgaacctgaagagacagttttagtaaatgggaacaagggtgaggaacatcagggtacggacaatgaaggagctttatctgcctagaattcttggcaaatatgggaaccccaagttttgcctacgtgctaactcaacatgaataggggctgaaagaagcacagctcattggctgcaaattttttttttctgagggtaacaaatgtgggccccctgttttactctgaagcaccggaactggtgatgctggaccgcctgatgcttgtcatatagaaggtcgctatactttttggtgtcaatctgcccatccagtcatgcttctttttgtaaacaacgtaggcaattctttcttcttggaacgtttgcagacccaatttccatgccgtgaaatcaatggatcgggtgtggggccagctgcaatgaatagtgtttgaataattggtatagaggtatgtagtaaaaatatgccagattaccataggagatgacagcttttgttacccattcattgtaatgaccttattcgataaggttacgtgtagtctacgattgcagttgcgggccgggagttttttcccatgttatgtagcatcattctatcggaaaaaaaaaaaaaaaaagggcccctatactgatgcctaatcaatgccgatgactgcgagaattcaatgcctagatatgcagtgtaacagtgtctcgctgcacaccaaaaaaaaaaaaaaaaaaaaaaaaaaaaaaaaaaaaaaaaaaaaaggacaggccctatttgattactggttctgatgactccaccgcaaaggtctggtattaccagacgaagagctgtgttcagacacttgaagggcatacacataatatttctgctgtttgtttccatcctgagctccctataatcattactggatctgaagatggtacagttcgtatatggcattcgacaacttacagacttgagaacacactaaactatggccttgagagagtctgggcagttggatacatgaaggggtctaaaaggggaaggcaccgaagagggtgaaggttgtagaaaagggccctaaaaagggtacgatgaaagcccaacttgctaagagaggtaggaaggctaagaattgatgacatgttgatttcctcgtcagagaataaaatgctattgagaacctgagatggcaacaaagatgagaattcttcaacgcattagccatcgttgtgaggcgcatcatcagttcaacgtcatgtagtgttggttttagagagaaagagaacatgtaaagctataaatgttgtgtactctatgagtgttcagctttggatcattgaaaagatcaagatgttcaactaaagttgtagttgaattgacctctctaaaacttatttca

SEQ ID NO: 72268 - DNA, 487 bp, Zea mays
  Clone ID: MRT4577_165909C.1
ctcctttttgtaataagcacatcgattaaaaaggttaaatgagggagaggtgaattgacgatctggtaatctattattgtaatttcatctcctgattaattgtcaatattgtgtattgagatagattggaatggctacccaaactttgaggacagctatggattcaagtgtactaaaactcaaaaattcaaagacagtgaatcaccgtaggcaaaacttggggttcccatatttgccaagaattctaggcagataaagctccttcattgtccgtaccctgatgttcctcacccttgttcccatttactaaaactgtctcttcaggttcatcagcatcatcatctgtattctgcatttcagtctcttcaaatgcctgttgatcaagttctccattttcctcagccacatcttcaggtttctcatgctgaacaacctgcatccttttgaaagcttccacaatagtcatgtctgacttctcagcatgatt

SEQ ID NO: 72269 - DNA, 447 bp, Zea mays
  Clone ID: MRT4577_16590C.1
cgtcaggtcagcgcgacgtctggcgaccgccacccccaccccgcgccacgtgccgagggcttcgccgggcccttcgccgctcgccggtgacgagcacacaccaggagcaagaagacgatgttgaaaacatttcatttccaaaaagtttggtggagagcaactagattatccttttcatggaatcatggatgaacatgaactgttatttgtatttatttatgttctatttctggtggacagcaacagcatggatgaactgttctgtaatctactttttagtttttggatgaagaactatgcaaatgcaactatgcaagtatctgttctgtttagactttagacaatatatgctatcatgttggcatgctggcatgctgcttattctggacttgagagtatctgttctggacaatatatgctatcatattgttttatcatggagatggg

SEQ ID NO: 72270 - DNA, 412 bp, Zea mays
  Clone ID: MRT4577_165910C.1
aaattgggaacaaagggggacctttttttcttttaatttaaatgggtcattcagggcattgctaaaactgacactgccacccagggggaggcgggacaaattattactaaatcatcgccgttaaaggactaaactagctagctagccaggggttatactacaaaaaaaagttttttaagggggggacacccccggcagaaacgtaggggcatggaatcggttgttgcaggcccaaaaacgccgaaagttgctgggctatttgggccgccaaaagccccgaaacctggccgttttggggttgttgctgcaggatggactggaggaccaacccaaaaaacccctggaaccggggctgggggtccacttgcctgaacggggggcaacactgttgccgaaactactggcactgagg

SEQ ID NO: 72271 - DNA, 586 bp, Zea mays
  Clone ID: MRT4577_165911C.1
gaaataaattttagagaagtcaattcaactttagttcaacatcttgatcttttcaatgatccaaagctgaacactcgtagagtacacaacatttatagctttacatgttgcctttctctctaaaaccagcactacatgatgttgaattgatgatgcgcctcacaacgatggctaatgcgttgaagaattctcatctttgttgctatagcatttttttctctgacgaggaaatcaacatgtcatcaattcttagccttcctacctctcttagcaagttgggctttcatcgtgccctttttagggcccttttctacaaccttcacctttttcgatgccttcccctacatgtcacgtgaaacatgttggattccccatcaggtgcactatgatgttgcaacaagcattgatcagtgaatacacaataaatccagccagaaggatccctccatagacaaaagcctgggatgactgctttggatgactatattcaatgctacagcatttcatcttgtctctctcgttagctagaacaccgtccacatactgttgtgtaaaaatagtgctttgcaggatgccggtactgttt

SEQ ID NO: 72272 - DNA, 567 bp, Zea mays
  Clone ID: MRT4577_165912C.1
ttgggtacctcgaggccggccgggacgaaatcagctcagatacctccgtcacctccaccctagaatcgttgcccacacatgtgcgtcacaggaatcctccgacttcacctcactccagtagggccctcatgaccccatcctcggattgatggttggctacgacaggatcccgcccctgaatgcaagctcgtagttggcgtctaccgcaccgagaaaggcattcccctaatgatgaacgcgatcagacgagccgagcaaatgtggatcaataatctcgtgacgtgtctaggagtacctaacagtcaccgacgctggctgaattcaataacctcgatagctaagcttatctttgatgctgacaggcctgctattcaagttaatagggatgataccgcgtagtgcctatctcttactggttctttacagtttgatatgaatttcttgaaaggaactatcatcagaggactatctacatcacattaactacctgtggatatctcccgaaagtcttcaccctatctgtcttgaaggctatgagctaccgcatattatgatcctgcaatgtgc

SEQ ID NO: 72273 - DNA, 467 bp, Zea mays
  Clone ID: MRT4577_165913C.1
cccaaaaaaaagggaacaaaaatttttaaaggggggggattggacgggccaaaagactggcccagggggggggttaagaggggtttccaaaacaaaaaaacgggaggttaaaaaccagaaaaaacgggggaaaaagttccccccttgcccccaaaaaattcccccgggggacaggggatgtaaagccctttaatcccgccattaaaaacattttaaaatttaaacccttggagaatcctaatgggctacttttaaccctgccctttggttaaaaagccaaaaaaaaaaacggggggggccccaattggcttttgagctggcttaaacccccaaggatctatgttccccataatttggggcatcacaaagacccttaagaccataaaaccaaccctcacccccttgggacttttaaaaagggacatgacgggaaaaaggcccccaaacccaaaagaacggcctttttt

SEQ ID NO: 72274 - DNA, 1738 bp, Zea mays
  unsure (1)..(1738): unsure at all n locations
  Clone ID: MRT4577_165914C.1
gccggccgggccgggctttttcagttttctccgtgcctcttgctccctcctggctccgcgcctgggccaccgagcccgcgatcggattcgctccctcttcgccgcgccccaccacccatcgccgctggggatccctagggtttagtgcagtcgctcggctccgcgccgtcctcgccgctgctgccaccatgccgctcaggttggagatcaagcggaagttcgctcaacggtcggagagagtcaagtccgtggacttgcaccccacggagccatggatcctgtcgagcctgtactcggggagtgtctgcatctgggattatcaggcacaggcaatggtgaaatcatttgaagtttcagaactgccagtgaggtcggcaaagtttatttcaaggaaacaatgggttgtagctggtgcagacgacatgttcattcgtgtctacaactacaataccatggacaaagttaaagtttttgaggctcatactgattacatcagatgtgttgcggtccatccaactctaccatatgtgctgtcatcatctgatgacatgctaataaaactgtgggactgggataaagggtgggtgtgcactcaaatatttgagggacattcacactatgtgatgcaggttactttcaatccaaaggatattaacacctttgcaagtgcatcccttgaccgcactacaaagatatggagtttgggttctccagatccaaacttcacacttgatgggcatcaaaagggtgtcaactgtgttgactacttcactggtggtgacaggccctatttgattactggttctgatgactccaccgcaaaggtctggtattaccagacgaagagctgtgttcagacacttgaagggcatacacataatatttctgctgtttgtttccatcctgagctccctataatcattactggatctgaagatggtacagttcgtatatggcattcgacaacttacagacttgagaacacactaaactatggccttgagagagtctgggctgttggatacatgaaggggtctagaaggatggtgattggttatgacgagggggccattatgataaaaatgggccgtgaagtacctatagcaagtatggataccggtgggaaaatcatttgggcgaaacataatgaaatacaaactgtaaatattaagacagtcggtgcaggctttgaggtcacagacggagagagattaccgttggctgtaaaagagttaggaagctgtgatttgtacccacagagcttgaagcataatcctaatggacggttcgttgttgtatgtggagatggtgagtacataatttatactgccctggcctggaggaataggtcatttggatctgcactggaatttgtttggtcatcagaaggagaatatgcaattagggaaagtacatcaagaataaagattttcagtaaatcatttcaggagaagaaaactatccgcccttcattttcagcagagcgtatttttggtggggtattgttggcaatgtgttctagtgatttcatctgcttttatgactgggttgattgtagactaatacgccgaatcgatgtgaatgttaagaacgtttactgggctgatagtggtgacctagttgcaatagcaagtgatacatcattctacatcctcaagtacaatagagatgttgttgcttcttatctagaangtggaaagcctgtggatgaaagtgtcgaagatgcttttgagctgct

SEQ ID NO: 72275 - DNA, 375 bp, Zea mays
  unsure (1)..(375): unsure at all n locations
  Clone ID: MRT4577_165915C.1
ggccgggttgcgaagacggngccccaaccnccgcagtagcacaaacgggggccacaccggcagccgaaacgacccgccccganccagaatttgacacgaggagagggggcgaacaggcgccagagaggganccagcagccgccggccgcggagcaggaggcncagcaaanagcgaaggccgccagagcagccaagacagcgaggcccaggcaagcaaaagaggaggcagagcgggaaacagccgaagaccgngcccagacggaggccgacgcacagaggaagggggcagagagcagcggcgaccccggggcaaacgccaagcgccacgaggaagaaacggcggagaagaacgagcaacacacccagcaggccgca

SEQ ID NO: 72276 - DNA, 349 bp, Zea mays
  Clone ID: MRT4577_165916C.1
caggcacgcctgcgggagctgggccggaagttaagtgcggggttgacgagcttatttttcggcgggcgtcgggacatccagctgggggtggtgtatacagagacgtctcactataccatacaagactgatatcgatcgcgcagaccgacggcatgatgggcaaggacaataccatggggcgcaaacaggagatccccgactggaacgccgatggactgccacccgctacaagcccggtgcaccgcacgtgacactacagccgggggctggctcatccttacctcgtgggacgaggcgttgaccatgggatgctaccggcactccatgctcgagaagggtctctgcccgc

SEQ ID NO: 72277 - DNA, 382 bp, Zea mays
  Clone ID: MRT4577_165917C.1
aatagaccatcgggacagtcatatgttcctgtatctcttcggtgacactgccaaagttttgtttgtgatttaaaaaaaaaaaaaaaaaaaaaaaaaaaaaaaaaaaaaaaaaaaaaaaaaaaaaaaaaaaaaaaaaaaaaaaaaaaaaaaaaaaaaaaaaaaaaaaaaaaaaaagggccggggggccgctcataaaagcgaaattttccaaaattataaaaaaacttgtgggccgtccaaaaacactttaataggggggaaatttccaattaaaaaagtttattaatttaaaaggccaggggtttaataaaatctaaatggaaaaaaccttggggtacccaaattaaaaagcttagcaacaaaccccccttttcccattggg

SEQ ID NO: 72278 - DNA, 241 bp, Zea mays
  Clone ID: MRT4577_165918C.1
agcagtggtaacaacgcagagtactttttttttttttttttttttttttttttgagcagcaaactttgccttcgagaacgtcctcaagacgtcctcaagacggggcatgcccggacatcagattattattacaacactgtttaaataacctacagaaaatacaggctgagacctggaaagagaagggctacttttcgaatcagaaagtaggtcccgcgtactctgcgttgttaccaccttt

SEQ ID NO: 72279 - DNA, 339 bp, Zea mays
  unsure (1)..(339): unsure at all n locations
  Clone ID: MRT4577_165919C.1
cccacgcgtccgcccactcgttcgctggcttctccttcctctcttaccaattcctcttcaagttanctttacttagtgttttgtatatgggccatggcatctgctaatgtgtactaccgttgcttcgtcaccgggcttgcctgggccaccagcaaccattcgctcgataatgccttcgcctcctacagctagatcctctactccaacgtcatcaccaaccacgagacagcgaggtctcgccgcttcgtcttcgttaccttctcctgcgacaactccatgctcgacgctatctataacatgaacggcaaggatctcaacctccctaacatcaccgctaac

SEQ ID NO: 72280 - DNA, 2033 bp, Zea mays
  Clone ID: MRT4577_16591C.1
atgaaggcggcagatgctgctcgtgcggcggcgacagagctcgaggctctgcgcggcagtagcgccggcaactctgtttccggcgacggcagcaccaacaacgagctcgggctggcaagggaggcaatgcaagtgcaggcgacacaatgggcagccgcgcgcccgcgcagcgatagcctagataggcgcaggcgcgtcgacggcgctccaagcgagaacgcacgcagcggcagcccagatgggcgcggacgcaccgacggtgctcccggtggcagcggccgggtcgacagagatcgcggcctctacaggcggcacggctctccctccccagatcggtaccatggtcactgtggggtccaggccgttgtcagggacatcggtctcggcggtgggttgcctaccctcaccaagaccgactacgtcgagtgggccgcgatgatgagggtacggctccagttttcactttctcagaagtggactgccaaggaggcctgggacgccatcgctgcgacccgcatcggcagcgaccgtgcccgcaagaccacactacaggcacttcctaaggagtgggagaacctggccttcaagccaggtgaggatgttgatgactttgctctccgcctcaacactctgttgcagaagatggtgcagttcggcgacgacaactacgatgaggagagagctgttgagaagctctcccgttgcatccccgagaagtacaagcagattgctcgctcgatcgagtctctgctagacctctccacgatgacaatcgaagaggcgataggtcgtctcaaggtggtcgatggcgacgaaccacaggctccctctgggcctatcactatcggcgggaagctacatctcactcgggagcagtgggaggcctgccagggtgacaagaagaagggggagtcctcgacacgaggccgcagacgcggcaaaccgcgcaaggcgcgtggaggcgcccaggccggggtgcgaggacatgctgaggttggtgcccatggaggtgcccaaggcggcgccgtcggcaacaagaagccggcacgagatgacggctgtcacaactgcggtaagcttggccactgggccagggactgtcgacagccacgacgtggccaggtcaacgttgcacaggcagaggcggaggaggagaccctgctcttggcacatgcaaacatcgagccatctccagcggcatcggctgcagcggcactcctccaccttgatgagtcgaaagcacgcactttcctcggcgacggctccagcaaggacatgatcgaaggatggtgcctcgacaccggcgccactcatcacatgaccggccgacgggagttcttcaccgagcttgactctagcgttcgaggctccgtcaagtttggggacacctccggcgtagagatcaagggcgccggctcagtcgtcttcaccgccgcatctgatgagcacaggctgctcaccggagtctactacatccccgcgtcgaggaactctatcattagcttgggacagctgaatgagaacggttcgcgcgtggaggtcgagcacggagtcatgaggatctgggacccctctcgtcgccttcttgccaaggtacgcaggggtccaaatcggctatacatcctcaatgtgaaggtggcacaaccttgctgctcgtcgagacgacgtggcatggcagtggcacgagcgcttcgggcaccttaacttcgaggccctgaagcggctcagtgccaaggagatggtacgaggcctgccgtgccttgaccatgtggagcaattctgcgatgtctgcatgttgacaaagcagagacgactcccctttccccagcagtcaagcttccgagccaaggagaggctcgagctcgtgcatgggaacttgtgtggcccggtgacaccagccacaccaggaggacgacgctacttcttgctgctcgtcgacgatctctcccgctacatgtgggtgatgatccttggcagcaagggagaggctgcgaacgccatcaggcgtgtgcaggtcgctgcggaggcggagt

SEQ ID NO: 72281 - DNA, 686 bp, Zea mays
  Clone ID: MRT4577_165920C.1
gaaaaaaaatggagggcttcttatagagtttattgatctgcacagttacaagaagcaatttgctgctagtatataagtatatatatatatactttcctgctccactgaacaaagcggcataccgtgcaaaagtgccagtagaaaacatccatgcgacgccaagtggacagacgggcccaccgacaaccgagcgttgccgccgttcccggccggcctctcaactcgcagtcgccgggtttccggatcgggaagcagcagcgagccgcggatttccgtcggccattgcccagaacgagcaaccacagggaagagaaagaacatgcctagactagacactaaagcgaaccaacggttcctgtaacgcgaagtgtataagcttcagcttcacttgtagtctagtactgctgccccgggtggccgctcaagcacatgccgtgagaaagagcgtggacttgccgagggagtggagcggcggagtgttcttttctctttctttttgtttcagtttttttctatgggaggcaccgatgaaccgtgctggacggtagcggcgtcgcatgcatcagtcgagcgggtagcatgtgtcctcgccgcccgtgttccacaggaagtgcgcgtaggctgccgcgtggtgcgcgttgccggggtcggcggcgatggcctcctggtacgtctcctccgcggcc

SEQ ID NO: 72282 - DNA, 361 bp, Zea mays
  Clone ID: MRT4577_165921C.1
ttcaagtcttataaccttatcatgaattttaaaaccttaccggggaaaccccaatcaagccgaggccccctgggggttaaaaatccccaccttaaccggttaattaaaccgggaaccattcctgattaacttaaacccccccttaaattaccaccatttttttcaaatccaaaggaaccgaccccgggggagtccaccattaccgaaggaaggcggcccaaccaaccaaatcaaaaaaatcttagaaaacttgccccaatcaacgaccttgaccaccttggaaggggaacccttgccggtgcccaactttttgattggctttaacaacttcattcccttgaacaacctgcccaaaaacaac

SEQ ID NO: 72283 - DNA, 1055 bp, Zea mays
  unsure (1)..(1055): unsure at all n locations
  Clone ID: MRT4577_165922C.1
acttcctcggggtcggacccaccgggctctcatctagtcatgttattcaccgagcgtcacagctcaactgccgtgccaaaagttgcttcgttgctgagtggagtggcggcagtttattagaccccattcaaatagggtttattcagttgattcagtatacactgtacccccccgttttatcagtcttatcccgtactaagtaatttaagcccctttatgtagcgatgtgtcgagtgtgttttcccattttaattttattattgtacatccccatgataaaaaaaacctaaaaaaaaaaaaaaaaggcaacgctggtaggcgtgactccaggagcttatcgtaccgctgcaatgcgacgcgcgttgtcatagctctttcgttattgagtgtcacctaaaaattcacaattcactgggccgcgtttcgttttacaaaacgtcgtgacttggggaaaaacccctgggcgttacacccaaaacttaatcgtcgccttgcagcacaaatccccctttttcgccagcgctggcggcgtaaaatagcgaaagaaggcccccgcaccgatcgcgcccttttcccaacagtagttgcgcagccgcgaatggcgaatgggacacgcgcccttgtgtagcggcgcattttaaacgcgcggcgggtgggtggtggttttaccgcgcagcagcgtgacccgcttacacttttgcccagcgcccttagcgcgcccgctcctttcgctttttcttccctttcctttttctcgccacgttcgcgccggctttttcccccccgtcaagctcttaaatatcgggggctttcccttttagnnggttccnngatttaagtgcttttnnacggcacctcgnacnncccaaaaaacnnttgattaggnngtgatggtntnncacgtagnntgggccanntcgccctttgatagacgnngtttttcgccccttttgacccgttggagttccacnngttctttaatnatgtggaccctcttgtnntccaaacttggnaacccaacactcaacnccttatcttcgggtctatttcttttt

SEQ ID NO: 72284 - DNA, 313 bp, Zea mays
  Clone ID: MRT4577_165923C.1
gtgatgaccatcaatatcccatgtagagcgtactactgagttttgaattttgtctggtgatggtgctgagtacaatgtaaagcctgcatagaatgccccatctcgagatgccatcgttctaatactaaggctattcaagatgaaagctgttgagaagagcaagggaaaaataaagggcctcttcttcaagtacttagtacttgtagcactattactacataaaggcatggcatgttgactgtatctgttacctatgttttcgcggatcatgtctgtacaaggatagagcaagttgcctgcgtgcttatgtaaa

SEQ ID NO: 72285 - DNA, 644 bp, Zea mays
  Clone ID: MRT4577_165924C.1
atgtaattcggcaggaggcgctagcccgctacagtgccctccatgcaaaatacagcgctcaagacaacagcagcgaatgccaatgccaattaataactagctactgtctcgtccgtccaggaaataggccggagaaggagacgcctcggcctctcattgctgggtgcgctccatgttagcggccgtaatggctgatagcggcgatgcggccatggccgttgttcttggctggtcgtcatcttggatctgcggggaagaggacggcgggcggctcaccctcaccgtcgcgtccaagtgcgtgcagaggacactcatagactgcgtcaatgtggtcctgttcatcgcgtacgtctgcacgctggctgccgcctgcgtcaggcggcggcagcgctctgcagatgcgagcagcgggaggagcggcgctcctagtaggtgggtgctgctcgtcgtctccacgtgctgcgtggcagctgccgtggcctactgtgtcacggctctccaagacgcctacgacatcaagacggcggttccttacttcgtcaggggcctggtctggatcgcgctggcggcctcgctgcacgcccagccgacgaggccggcgaggggtcgtggccgtgctctggtgggtgctcttgtcgctgctg

SEQ ID NO: 72286 - DNA, 673 bp, Zea mays
  Clone ID: MRT4577_165925C.1
acgtgccctaggcgcagccatggaacaaagaaactgatgtgagccggccaaaacgaacccacgtccgtcgcggcggtgagggcgcggccccgagtagtcggcgctcggccgcatcgggttctccagtccaaatccaccatcctaaaccagccccgtacctccatagcctccctgcgaatccaccgccgccgaccattccccggccggtcggccgccatcgcgcttcggatccgatggacacgggcgcagatcctccacgccaccgtcggctgaggaaggcctccgatgtccgcaccaccgccgccgcctacccaccccgaaacggctagatgcgcggacagcaacagagaccactatcctttcaaagcaatggcgggatctctatacacactcgcacacaggttatgaccttacggttgatgacattctccctccacggtaccacagactgaagcaaattgtggtggaggcaaaggcaaggtatgaggcagagaagaatgcactgaagttggacggcagttatgcttctagagactggttatattccttcaaagactggaggtggaaagtctgtctgctaacacccatcctgcaacgttatgagcgttgggccatgcgacgctatgttaaacgggtgaatgcattccttctggctcccgacaatgttcagcaa

SEQ ID NO: 72287 - DNA, 682 bp, Zea mays
  unsure (1)..(682): unsure at all n locations
  Clone ID: MRT4577_165926C.1
cgcggcgctgaacacgtccctgttctactgcccgcaatggccatggcngcccattccgttctgcacgcggcggccgtgttccggcccataccgttcttcaccccngcgcngccggngttccngttccngctgcnacggctgccgttcttcaccccgccgtcgcctccgccaccggcgttccctttcccgctgccaccactgccatggacgacgccaccgtcgcctccgccgtcgccatcgttcccgtttcctcatctgccgccgatctttacaacaccatcgcctccgccaccgccaccgccgccaacaattcccgttccttatgccaccgcttccacacctgcctcctctcccgcacttcccaccgctaccgtcactttactcaccgccacctcctccacctccaccaccgcctccgccgccgtcgttcccgtggacgtttccgccgttaccgtttttccctcctggtcctggttcttctgggccatctcctccaccgttgatcagtggttatcgtaaagatccaaccacttggtctccttccaataaacaaccatgaagtaaataatacttggctccttctgggaaggataatgtgcattgcaaaagactatgttatatgtattttttttntgttttatatccctgagctgtatggatacgaatgtaagtttctgcttgc

SEQ ID NO: 72288 - DNA, 311 bp, Zea mays
  Clone ID: MRT4577_165927C.1
tttttctttttttcaaatccatccatcctggggtagttctttccgaaggatgtcaggcccatttccattatcatgatcgggatcaatgggttctgcaggatcggaaggctgtttgccattgttttcctgcagagtgacgatgtcgagctcttcgccgtgaactaccccttcatcttcaccttctacatgacctacatgttcaatttcgacactgtgcactttcagttttagcaccatgaagtcaatgtgtaagactccataacccttctttttggtgagaatgatgttgctgtttttgtcttctgtaaccc

SEQ ID NO: 72289 - DNA, 286 bp, Zea mays
  Clone ID: MRT4577_165928C.1
cccacgcgtccgcccacgcgtccgattaagaattcattgaaaaatgaatgcaagcattcaggggatggtactgctcctaatgctagggtagcattcaaggttaatattatgtatgcaacatccatcaatgagtgagacacctgaatgagatcatgaccttacatactgatgtacatgcatactcgaggcatatgataccttactgctcaaacatttgacaactggcactatctataagtagatatgacctatctctctatcacagaaatcattgattgtgaccctg

SEQ ID NO: 72290 - DNA, 276 bp, Zea mays
  Clone ID: MRT4577_16592C.1
gattggcaaagcgtttgaacaaataattggcgaaaccataatatacatgggggggatgggggacacccgtaaactgttttctgaaacccaaaaaaccttttttatttggcttccaaaaaaaggtgggaggggggagaaaccggtaaaacgaccctaaaccgggtctgagtggggaaaaccggtcccactaggctaaaactgggatcagcaaaagccgggtgaactcacgtactttaattggggccgagggacacgcataaagtggggggggacaaa

SEQ ID NO: 72291 - DNA, 483 bp, Zea mays
  Clone ID: MRT4577_165930C.1
ccggccgggactccgagtacaccacggtgcgctctccgcttcccgtcttccccagccccacacccgtttttattcctccccgctccgcacctcgagctcgctctcggcgctataggcagctcacggacttggcggttttacattggggggctgcctgcaactgcaagtgcatagccgccctccactcctccctctctttccccgccgcttcctcctcccgcctcggattcccacccccagctccggctcctcacctcacggcaccaacccaaaactctagcccgcgcatggcgtcccccgcgcgccccgctgacgcctccgtctccggcgccttcagcctgcccccggacgtttgctgctcctacgatcagcccctgccccgccgccgcgaggagaccgcactccgctccgctccgctctgctctcgtcgcgctctctcgattccgaattatctacctatcctttcccttaactcgtagtttg

SEQ ID NO: 72292 - DNA, 1038 bp, Zea mays
  Clone ID: MRT4577_165931C.1
gggggcgtcgagcataatcaaagtattgaatctgaacaaacgttagtgatacagaccttgtcaacaaggaactgacagagtgatacagagctcaagaaaacagggtaaggccaagaaagatacatgacatgagaatggggataaaaaaagaatgggccattgcaataagcccccggcatagtgtaccgtctgagaggattcgttaaccacatgaatacacatgcctgaagaaatcgagaaacatcatcattacagagcccgggatatgttcttaaactcgttcaaacaggacagcaaaatcttctgccgtttgagaagagaatggcgctcattctggataccatcaactgccccaggcaggacaaacatgtccatgaacttattgtcactcacagcaaatagctcaaagccaagtgccagaaataacctttcacggcatggtgttaagaatccagagttcaatgcagagggggcatttctttcaataaggacttctcgcattttggcaaaatattgagcagatattgcgcatatggtggagtatgatgaccctgactttgagcccatgtcatcagcaccaatcatactgttatggtgatttctgtttgtatatgctgccatcctggcatgtcttttccttgggccaccgtcatttgggatcccattttctttcttcctaccaccatgtatatcagatggcagatcaggagaaggtgtctcaggtactgttagctggctttctctgaggacctcctttgagtcattccctttattaataggcggtgtcatatggtgctgatcttttggaggcaagttctcctgagcttcctctagtgctgatccactgtctgctaggtcaaaggatgtaactccagtgaagtggttaaacctacacgtggagtttgctacagatccaacaccactcaaaaagtcgtcgtcgtagcaaatatgggagtaggggctcgtaacagaatcaaggtgatgacgcactatctgcttgcattgcttggacagttctttgacgaacttataatccgg

SEQ ID NO: 72293 - DNA, 651 bp, Zea mays
  Clone ID: MRT4577_165932C.1
acctacgcaggagcgccaccaaaaattctcgccatgaggttgggatccatgccggtgctctccctcttcgtcaacgcgctccccctcttcgtcgtcctccggtccgacgcgaatgcgttcgccacccccacagataacatcgtgaggcagctatcgtcggtggtgaagtggccacgcggttctcccccccactcgcccaagcagtcctcacacccccagtatgatgggaatgtagcagtgcaatttgagagtggctactttgttgagacgcttgttgaaggagacaagctcggtgtcacgccccacaccattagggtgtccccagttgagggtggagagcttcttgcagtagactcagcacatagcaacattgtgcgaataaccccaccattatctgaatatagcaggggaaggctagttgctggttctttccaggggcatgcaggtcatatcgatggtaaacctattgatgcaagattcaaacgccccactggtgttgctgtggatgatacaggaaatgtttacattgctgatacagcaaatttggcaattcgaaagattggcgagtcaggggtgaccactattgctggtggaaaatccaatatcccagggtatagggattggtccagcggatatgcaaaggtctctact

SEQ ID NO: 72294 - DNA, 264 bp, Zea mays
  Clone ID: MRT4577_165933C.1
ccttgggggagagaaaccacacattcgttactcgaacaaaggaaagtcactcgtataaaacaagggggaaaggcaccatctgtacaaaaggaacctcccaggtggcctggggcgccaatagccacaagaccccccaaaattagcctcgcgcgaggcacagcagataacgaactatgtctggccgagggaacttgacctgatgctggcacaacgggtcacagaagatggaggcgggtctgagactccatgctgggaggctttact

SEQ ID NO: 72295 - DNA, 683 bp, Zea mays
  unsure (1)..(683): unsure at all n locations
  Clone ID: MRT4577_165934C.1
tggatctagattggagaccaaatcatccatgacctcgagcggtggctgcgccggatctactaggaacgccgaggcgacgcagccggagctccaacgatcgcctccgctctgctcacggagttctcagccgatgaggccgcaccacatatggcagctaactctcctaggtcaggcgctaatatgatgaatactctttccctcagcggcatctaagaccacaacagcaaaggcaaaagctgatgcaagcatctcaacagcggttgatgccatcagctgctgggcgatgctagcgcagagcgcacttcctcaactagaagatttacagggggcaagttcaacaaaaattacaggtcccaggtcaacaacaaatgcaatacatccaagcattgtcgcaacaatttcataactttaacagatagatggaaactggacgtatgcaaccaggcaaggctcagagtcaattgaatcaaggaactcagctacgaagtcatctaggccactttattggagcttcaaatagtgcgatgttcaatgctccaatctcaactaaagactgagaggcaagaaaaagatagaattaggcatgaaatgaatgatagaaaagttgtgtgccctcatgttgtttcatggaaatgcatgcacgatttggtttgaattcaattaaatgtntgttttttattgag

SEQ ID NO: 72296 - DNA, 412 bp, Zea mays
  Clone ID: MRT4577_165935C.1
agagaacgcggcgagctgagaagccgcgatgcagggacgttcggccggacgcggcaggcggagagaggaacgcgtgtcgacgagcagagcagacgcgcgactgggctgggcgaaacttggaggacggccgagttgggcgagctcgaagctaagcccgtcgagcaggaggccgagaggatacgacgaccagagaaacgaagctccgcgacgcgcagtggtcggacgagctggggacgagtaagcagaggacgccggcgaacagagagctgggcgagtagcgagcaagacgcgcgcagagagcactcggcagggagttggggctgggcaccgggctcacggcaggagaaatagagagagagcaaggcgccagaagctggacgcgcgccatggaaatccggccgagcagagcacg

SEQ ID NO: 72297 - DNA, 403 bp, Zea mays
  unsure (1)..(403): unsure at all n locations
  Clone ID: MRT4577_165936C.1
agcgcgccccacncncccncncgcgggncccnggggcgngccccnnccaggcgaccggaccccngcaagcggccgcgccgncnccnngcngcncacccctggtggctncgcccggggcgccnncncnnggagcgcgcgngccgcaagaacaacacaaaacacgcncncccnnagngcccngccccnnggacggcgcgccccccacccgggnccgncccaaggccanggggaagcccaggccgaaggcggagccccccagacccgnaccagngggcggacccaagccggagccagaaccagaggcggnnccggngccggagccccgagccaaccccgcgccaccaccggaggacacgaaggaggncgaccgggcggnggacgcccccggacaccggagggggcg

SEQ ID NO: 72298 - DNA, 393 bp, Zea mays
  unsure (1)..(393): unsure at all n locations
  Clone ID: MRT4577_165937C.1
aagggcaacaggggagagccggacgaaaacagaggggctaccccggcaacgagcaaagccccgggcacaaacaggcccaagccaacgaagccgcgaaacggggaggcaaacgaaggcagcggaggagacaccgccccaggaacggccacggaacgcgcacgcaacagangaagacgccgagcgccgaaaccgcacgccgaggaccccggaaaggcgaacacgcacgagcgcccccgggcggccacgccggccacacggaccgagccgacacagggaccacgagcaaggcgcaacgcccacccagaacagcggagaacgacggaaggcagaggaccgagccgccagccagcgccgccgggccccgcgacagccacaggacgacaggaaacgaca

SEQ ID NO: 72299 - DNA, 479 bp, Zea mays
  Clone ID: MRT4577_165938C.1
gctcgaattccgttgctgtcgggtaaggcccaggtctggcattcggcatgtggttggcatttgcgtggatcatcgcctgctgctgccgatatggagcaggaccaggataccttggtcgctgcatgttgtgtggcggcatcataacgggagagataggccccattcccggaacgaagtgttgcggaaacccaaatactgcgccctgaggaggcgcgatcgggccaggtgaagaagggtgaccaaaatagacctgctgaggtccggcatattgagaagctgccattgccaggttacgttgagcgaaatgcgccattagcatggcttttctttcctccttaggctgggctaaaccaacgtagagtggtttcttcccaacaatcctaccattcattcgatttatcgccctttggccagcttcagcagtagcaaacgacacaaaccctgaacccttgctccttccacgagcatcaaccattacc

SEQ ID NO: 72300 - DNA, 493 bp, Zea mays
  Clone ID: MRT4577_165939C.1
ctcgaggccggccgggagaccatagagaagagacctctgcagctacagcctacaacaaggaaacccccccatccaggcatgtgagcaaagccgacggacgacgtgtagataccaataccatactactagcccgcctgcatcgccatccaccaggctccaggctgcgaccatggggaagaaggtgtgcctgctcatcgtcgacgagaacatcctcatagcgttggccgttgtcgccgtcgtcgtcctggcgttcgtcgccctcctcctgcccccgccgcgccgccgcggcttcttctgagagcacgcccagcctctgttacgtgcagctagctggtcgagtcccagctctcttccctctgcctgcgtgcgtgtatgatcggtacagaggttcgttgtcaaccattctccagcgccttgatgtctcgttgatctggaatctaaacgaaaggcatgcttagttattatggcgaaaaaaaaaaaaaaaaaagcggcc

SEQ ID NO: 72301 - DNA, 859 bp, Zea mays
  Clone ID: MRT4577_16593C.1
ccctaggtccaggcagaggctcaagcggtggcttggggaggctcgtgacaggtgttctgaggaagagtctaaccaatttcagctgaataaactaggtgatgagatttcagtgctggagaagacgctctcggggctccaacagtcagtaggattctgccataacgatctgcagtatgggaatattatgatatatgaagagaccagacaagtcaccttgattgactatgagtatgcgagttttaacccagtcgcattcgacattgctaatcacttctgtgagatggctgctgattaccatacagcaacaccacatgtgttggattttacgaaatatcctgacactggggagcagagaagattcgttgaggcataccttagctctgcaggtgaaaagccaacggatggggaagttgaagaactgctagggttgattgcaaagtacactcttgcgagccatctcttctggggcctgtggggaataatctcggcgcacgtgaacgaaaatatcgacttcgagtacaaggagtatgcaaggcagcgcttggatcagtactggcaaacaaagcctcgaattcttggacccaagtgatgagtcgttgcttttagtagggggtccttggccagctagtcatgtgaattctgtttgtcagtagcggctagtagctgccagtttttgactgcagattgttcagctcgctgtgacctgtgtcgtgaccatattcttgacttacggggtgtaattattttgcctggtcttaggctaaggtaaccagtctttctatcctaatgtaaatagtacagtctataatgaccttatcctcacatggttctgaacaaaaaaaaaaaaaaaaaagcggcc

SEQ ID NO: 72302 - DNA, 395 bp, Zea mays
  Clone ID: MRT4577_165940C.1
tcgcttctgcatctgcgattgctaacgatatccgtctacctgatgactaccctcccgctaagccgcggctgtacacgcgtgagctgggatcgcggagccgcttgtctactcgcttccggtcccagatagccttcctctccaacaaatattggattctcttacttcattacgtgatggcttgaagttctctggcagatgccgctaatcgatgggaaaggagttgattagagagatcactgatctaggacacaggcatgacatttatgtgagcacaagtcatcgggcacagcatttgctgcgccgaggacccttttctttcaaacgatatgtagatgcatgcaaggccttaaggtttgacactactgagctgaatgctcggtctctcaacctccctg

SEQ ID NO: 72303 - DNA, 612 bp, Zea mays
  Clone ID: MRT4577_165941C.1
cgaaaaaaaaaatattgggccaaaaaaaaaaggggccctgtttacatacaaccttcaaaaattttagggacaaatgggggtttgttttacaaaaaacaacaaagggacccaccgggcgggcccggggaattttaaccagaaaacaggggggttgaaccggaaaaacaattaaaccctttcgaaaacccggcccccctttaaatttttgttcagggaaaaaacatgcccctcaaaaaaaccaaaacccgcccccccatccggaaatttgaaaaaaaaagtaatttgtttcccccccctttggttcccaaggcctaaggttgggggggcccaaaaatgtccttaaaagggctttcccccttgggagggccaaaaggcccccccatggggggggcccccccaccccccccttgaaaaaacaacctttttttgacgggcccaaaaaaccctcttttttaaggggtttttgcccctttggccgttgttgggcaaaatttgcccctcccaaattttggggaaaccatgtacctcgggaccaacgggaacctcgggaggttttaattccccccaagggccaacgccggggttttcctggccctccttgggcgttaaaac

SEQ ID NO: 72304 - DNA, 344 bp, Zea mays
  Clone ID: MRT4577_165942C.1
gctgatactctggtccgctatcgcgctacggtagaccttgactcctccccttcacgcgagcgcatgcggcacctgctcaccgacgatagatctctcagctcgaagatcctacatgctctcgacgacaacggagatcgactgcatatcaacaaaagatcctggaccatgaatgcgactcgctgcaagacgaatccatagggaccgctagttccaccacctgataggccaggtcgatgctgtatcgtaaacgatccccatgtgatcttcccagagatactccatgttatggctcgagatatgcagtgctatgactctgaggaagagttcaaggaggtcttccgtga

SEQ ID NO: 72305 - DNA, 1536 bp, Zea mays
  Clone ID: MRT4577_165943C.1
cattgggacctcgagccggcctgcccagacacggcgagggccggaggcgtgttcctacccatcatcaagtcgctctcgctgtcggctgagagcaagcccaaccatccatcgtcgcggaagcttgggtcctatcttgtcatgacgcaattccaggcatctggtaactcgagtgctttattcctcactgctgcagcacaaaacctgctgtgcttgaagctagcagaggagcttggtgtaatcattgcaaatccatgggtatcgtggttcaaagctgctagtttgccagctcttgtttctctgctagcaacaccatatttgctgtacaaaatcttcccccctgaaacaaaggacacccctgatgccccagcattggctgaaaagaaactgaagcgcatgggccctgtgactaaaaacgaatcggttatgattggcacaatgattcttgcagtctccttatgggtttttggggatgctattggtgtgtctagtgttgtggctgcaatgcttgggctctccattcttctcgttctcggtgtgctagactgggacgattgcttgaatgagaaatcagcatgggatacattggcttggtttgcagttctggttggaatggcaggacaactcactaacctgggaattgtttcttggatgtcaaactgtgttgccaagctgcttcagtcgttctcattgagttggccagtggcattttgtgttctggaggcctcctactttctgatccactacctatttgcaagccagactggacatgttggagccttatactctgcatttctggctatgcatatagcggccggtgttcctagtgtgctgtcagcacttgctttggcattcaacacaaatctgttcggtgcaatcactcattatagtagtgggcaggctgcagtatacttcggagccgggtatatggagcttccagatgttttcaggctgggttttataacagccttggctaacacgttaatctggggagttgttggaaccatctggtggaaatttttgggtctgtactgacagtggcagacatgtggttgaccaaaattttcatttggcactggtcgaattgctcttgctcattgttaggaagggcagaatatctagttaactaccgttgctccctccggtcagctatcgctgaggtggtcagcagttagcaattacgcctgtgtcgtgcagttccttgttttctctttggttccgtagaagtccttgggcaatttttctgcgcttggaaccaacgaattctcacaaaacatcagcgaactcgtcggcttgatgggcgtagaggctttgcgtcgcaatctggataatcacatttatttattttggcgcgaatcctggatggccgcagcatctgtgtcagttgtcacctctgtttctttcactcctactgcactcagaagtaaaaaaaaagattcatgaatggttgtagttgtagctaaacaatacagaccacagtaggcacttgggctacgaacagtaagacaaggcagtttctaataggaatgaacttgtcac

SEQ ID NO: 72306 - DNA, 201 bp, Zea mays
  unsure (1)..(201): unsure at all n locations
  Clone ID: MRT4577_165944C.1
gccatgatcatgangngtgtnggaatcgcnntcctgaaagatggtggancnngttcgcaggcagtntcancaccagtccngggtttatggntngaacantcaaggccgactacgcanccngtgtganagnctccncngatggcttccatcaaggagatgatncctccgggngcnctggaanatgctgactccactcatcgg

SEQ ID NO: 72307 - DNA, 182 bp, Zea mays
  Clone ID: MRT4577_165945C.1
gagccaataacaccaaacatcttggggtcccataaaaccacagaagccaacacagaggacaatttctcctagggttgaccacacaaactagggcgtgatgtccgggcatgatcaagcatatcccggcggcgcgatagatgtcatcggtcaaggacataaatgcgtctaccaaacctggaaca

SEQ ID NO: 72308 - DNA, 735 bp, Zea mays
  unsure (1)..(735): unsure at all n locations
  Clone ID: MRT4577_165946C.1
aatcgtcctcgtcccgtctccatcgagtcgagccccatccccacgcgcgcctccttcgacaccatccccgcgaggtccatccccacgcgcgtctcctccatcaccatctccgcgagcacctccgccgccgctccaacatattctccgacgctatcccctttccctcgacaaggtcagatcctatagttcttgatcctgctctggatcccatcttgttgtgccttgttgcgcccccttcctgcctgctcctgttgatctcgacaaggtttgcgcggggtaggcaaaaccgcctagcaccagtcgagcctccccccccccccccccccgcgagtcgcgacaacccgcgggcgcgtcgatccaccggttttccatcagaaaaggccactcacggtttatcgtgcacgccgcgtccaggttggaatggtccgtttcttggactcgcgactttcagccttttggtactcacttactctcctagaaaacgtagtgccgccctgggaatgggccgntggctgggctgcctgctcgtggggttatggggggtagggcgtaggcccctttcgtctgcctccggatttctcactactgcatcgactccgaaggaaaataggggggtagaggtattaggatttatgaaancttttggtggtggggagggtttaataaaggggcattattggttcttgcgtcattgagaccaacaatgattcgaaattcataaattaagatgtagga

SEQ ID NO: 72309 - DNA, 355 bp, Zea mays
  Clone ID: MRT4577_165947C.1
gccacacgtactctctattcatcactatctctacgtccttatggaagctgggtcaggtaaactcatagctgcgttgaacagcagcacattccacgagctgctcacatctgatggcattctatccttactgtatacatgctacaacaccagcatgtgcatcttcaaaaccccagaatctacctacaacaccgagaaagctatacttatcaccctatttctaggtccatcataactgccgcttgacctaactcatttagagacacaatgaccatcaattatgtgccgaaactcttaatcataactccagctgactttttcattaacaatattatttcgtttcttaagctgatcctta

SEQ ID NO: 72310 - DNA, 3225 bp, Zea mays
  Clone ID: MRT4577_165948C.1
ccagggtcacaccgaatctcccctctcgtctaccctcctctccttcctcgccgcacacacagacacacgcaaaaacatttctcccccctcccgactgctactgccgctgcctcctccccctttccgcccgccttcgctctcctcgtcgtctcctccgtctagggttctccaccccaccccgccccgccgccgcccgatccgaggcagatgccgcccgcaacagccatggcgccgccgtcccagcccccgtctaactcaggggatccgctgtacccggagctctggcgcgcctgcgccggcccgctcgtcaccgtcccccgcgtcggcgacctcgtcttctacttcccccaggggcacatcgagcaggtggaggcgtccatgaaccaggtcgccgggaaccagatgcgcctctacgatctgccccccaagctgctctgccgcgtgctcaacgtcgagctcaaggcggagacggacaccgacgaggtctacgcgcagatcatgctcatgccggagcccgagcaaaccgatgtgccggctgagaagccgagttctgcacctgctgcgtcgccgaggccagcagtcaggtccttctgcaagacgctcaccgcctcggacaccagcacacacggtggcttctctgtgctgcgccgacacgctgacgagtgcctccctcccctggatatgacccagtcgcctcccacacaggagctggtggcgaaggatctgcatggcatggagtggcgcttccgccacatctttagagggcagccaaggaggtatcatgatcagatcgtgtggaggaagccgacgatgatgcatgcgtgatgaacccgttccttgtgcaggaggtggtgccagcccgggtcccagggaagtaaaaactcctgagatcttttgcttgtccgttgcagccccatcccctctccctttgctagtcagaggatgcacctcagagtcctggctactgcatggtccgcgaagaacactgaagtccatgtgcactgtctactacaaacctaggacgagcccttcagagttcatcataccgtatgatcaatatatggagtcagtaaaaaagaattattctattggcatgagattcaggatgaggtttgaaggggaagaggccccagagcagaggtttactggtacaatagttggctgtgaaaatcttgacccactatggcctgattccagttggagatacttgaaggtgcgttgggatgagccttctactatcccgcggccagatagggtctctccttggaagatagagcctgcttcatcacctcctgttaatccactcgtgcattcttctagagcaaaaagacctagacaaaacgttcctccaccttcacttgaatcatctgttctcacaaaagaaggtgcaaccaaggtcgaaatcgattcagctcaaacacaacaccaaaattcggtcttgcaaggtcaggagcagatgaccttgaggaacaacctgactgaaagcgctgattctgattccactgttcagaagccgatgatgtggtccccatcactcaatgggaaagcccacactcattttcagcagagacctgctatggataattggatgccattgggaaggcgtgaaaatgacttcaaggacacccgttctgccttcaaggatgcccgcaccgcctctcaatcatttggagatacacagggtttttttgtgcaagcttatgatgacaatcatcaccgtctttctttcaacaatcagtttcaagatcagggttcagctcatcgctttgcagatccatacttctatatgcctcaacaaccttctctgacggttgaatcaggcacaaggacgcaaacagcgaacaatgacttgcgtttttggagtgagcggaattcgatgtatggtaatccaagtgaccaacagcagggtttcagctttgggcaaaacacatcaagttggttgaaccagccacttccccaggttgaacagtcacgagtggtcaggccgcatgcaacggttgctccatttgatttagagaagactagagaaggcagtgggttcaaaatatttggtttccaagttgatacaaccaatccatcacctgtccaattgagctctccattgtctgctatccgagagcatgtggtacaaactcgaccatcggcaccagtgaatgaattgcaacctgtgcaaattgagtgcttgcctgaggtgtccgtaagcacagctggaactgcagctgagaacattcagcaagtccagcaaagttcgaaagatattcaaagcaagtcccagggcgcttcaacaaggagctgtacaaaggttcataagcaaggagttgcgcttggccggtccgtggacctctctaaattcaccgactacggtgagctcaaagcggaactagacaagatgtttgacttcgaagggtgaattggtatctggtagccaaaactggcagatcgtctataccgacgacgagggcgatatgatgcttgtgggagacgacccgtgggaagagttttgcagcatagtgcgcaagatttacatctacccgaaggaggaggtccagaagatgaactcgaaatcagctgcgccaaggaaggaggaatctccggcaccgggcggcggaggttgcgccgccgccgccgcaaacgagtagtatgtatggtggttctccgtttggttgcttccccgcggtttgctcttggcggcaagttgaggccaaggttttactactgctattgttattgccgatttgctctccccgccttccggtgtaaatatctgtgtgtacccagtcccggccttgtgctagtaagtagcaagcagtgttaccttttggtattttaaccagcagctaagttcgcggcattttagtccctgtaagcggtaagcagctctgtagcgtgagatagatggccaagcgccggtacgtacgtgtagtgttgtctggtcttctcactgagtgtactataaagagttaatataggagctgaccctgtgaacccgcgtgatggatgcatatgcttagtgcaaagcttgtagtgagcagtaacaagcagtagcggtaccttcggtattattaaccggcagctagctatttcgcggcattttaatccctgtaagcgtagctctgtggcgtgagatagatgacaaacactgggtatatgtatgtctgatctttctcactgaatgtaccataagagaggtttgtagagtaaaaaaaaaaaaaaaaaaggccccta

SEQ ID NO: 72311 - DNA, 783 bp, Zea mays
  Clone ID: MRT4577_165949C.1
cggccgggaaaaacctttcagtcagaatttctcaagagtcacacccacaatcctctcttcctccctccacgatatcatcactcatcgctcgtcgatcacaatcatggccgaccaagctaccatccagaacgaacagcagcagcctcccgccgctgctgcacccgctgccgccgatggcgccgaggagctcaaccccgatggcacccctctctccgaaaaccagaagaagaagcgagcgcagaaggccgaaaaggagcgcatcaaggctgagaaggccgccaagctcgccgcagagaaggccgcgcgcgaagctgccgacgtcgactttgcctcgcagaactacggcaagcttcccttgaacatgtcccaggagcgagccggtcgcaagtttaccaagatttccgaaatcagcccagagcgcgacggcgaggccatcatcctttccgcacgagttcagacgagccgtgcaccctctgcaaagctcgtcttcctcaccttccgccaaggcgtcgactgtgttcaggctaccctggcgcaggctcccgaaaaggtttctcgacagatgaccaagtgggctgcgggtcttgctgccgagacgatcgtcctcgtcgagggtaccattgtcaagacacccaagcctgtcgagtccaacaccgtcactgtcagggaggccgagatcaagatctccaagatccattctaccagcgagatcgccttcgaccagcttcccctttggtgtcgatgatgcaacccgatctggagtcgagatccagcttcacagca

SEQ ID NO: 72312 - DNA, 360 bp, Zea mays
  Clone ID: MRT4577_16594C.1
gtcgctgctagacgatttcgcaaatgtagtatgtagtggtagatggatcccataaattttctgtaattttgacgaggtaatcaggcaatcgtctcgagattgttgttgtaaaaaaaaaaaaaaaaaaaaaaaaaaaaaaaaaaaaaaaaaaaaaaaaaaaaaaaaaaaaaaaaaaaaaaggggaaaaaaaaagccaaaacgcccaaaaaaagggggggcccctcaaaaggaaccaaggttacaaacccgtgggtggggggttaaaaaaatccaaaagggacacaaaaattcaaaacccaggcccgggggtaaaaaaaggcaacaccgaaaaaacccgggggccaccaaacaaaaaggccg

SEQ ID NO: 72313 - DNA, 367 bp, Zea mays
  Clone ID: MRT4577_165950C.1
taagctcggaattcggctcgagctcctcgcggccgtttattgccactcacccaacactgcacataagggggcaccaagggggggtggggggtgcatcaccaacaacagggggtccatagtcacagacgcaatgtacatcctgatgaccaacctggtcaccgaccccctcaaggtgcagtaggtcgagaccctgagcaaccagctcacctgcgccatcctcaagaaccagaccgagctcctcgccagcatctggaccccgtagatatacaacaacatttgacatgggtcccggccgccgagtctgagaaaaaggacggagttctaggagcgcatgcaaaatgctcagctaaagcacgacatactgtga

SEQ ID NO: 72314 - DNA, 309 bp, Zea mays
  Clone ID: MRT4577_165951C.1
gaccttgtcaacattcactcctgatgggcagcatatagttagcgcaaggggagacttctatatttatttatggaaccatgaaaacctagatgaggcttaactgaaacaagctaaaaccatatggtcctcatagcgcttctactccaacaatgcatacatcgcaatacacctggaatgtctagtgacccataaacactttctatgtgtactctcataatctgacatcacaatgagataacttgaggtgcatgagtaaagctgagatatgcagtttaagacagttctaaaattctgctattaacatgtttt

SEQ ID NO: 72315 - DNA, 658 bp, Zea mays
  Clone ID: MRT4577_165952C.1
ggctagcggagaggtgggggatggcgaagccgacgccggtggcctcggcagaggaggcggcggcgatgcggcgccggctgaggcgcctggtggccgcggtggcggccgggagcgccgacgccgaggccttcgacgaggctgcagaggcgctcgccaagctcagggacgccgagcttggcccccgcaaggacaggaccggcgacggccgggagaacaagcgcagcacggaggccgccgtgccggagcacttcctttgccccatctcctcagagatcatgagggatcccgtcgtcctcgcctccggccaggtagtccacaaatcataggcatagagggtataatagcaaagtgtcaacacttgggtggcgagattgcaaatatttccgccacatcgccttcccttgccttctccgtggcttggtccttgctttttgctcgctgggtttttttattttaccagcgtgaaattgccgtttctcagcctgttggtaactgcgacgtttgtggaagcacaagctgagttttagcctgcctattagtacgattttttaagaacataattgaagtgcgattttattattttctataagtaatagagtgatcgacgacgaaaaaaaaaaaaaaaaaaaaaaaaaaaaaaaaaggggcggccgctcgc

SEQ ID NO: 72316 - DNA, 312 bp, Zea mays
  Clone ID: MRT4577_165953C.1
tgccagttcccccgtgccaatgccggatccggccggcggggcctatctggcatgtcccctgtaactgcccctgtccgccgccgcgggttccgatgctcgtgtgggcttcaggagcacgagagggagcagcggccgtcgtgcgcggcggctttgtgcgaatatgcagatccggctgtcgcccagcatgaggagcatgaccatgtccaatagccatgggcagatagacttgatgaggctgaaggacgcctggcgacattttttctaccgcaccgtcgtccacaccggaatgattcttgtcttcctactgccctt

SEQ ID NO: 72317 - DNA, 2010 bp, Zea mays
  Clone ID: MRT4577_165954C.1
gtggattcttcatccgtggtcatgcctggactatggatacaatttcttttgcagtgcatttctggtcaaaaggagaggcacaagctatgtttctgcgccatgagggctttctaggagctcttggtgcatttatgagttatgagaagcatggtcttgatgacttaagggtacatcatttggttgaacgcttcccaatgggtgctccatatgttggtggaaagattcacgggccacctcttggagatctcaatgagaagatatcatggatggagaagtttgtgcaaaagggtactcagattatagcccctgtacctatgggagttccagctacgacaggtatgggaggctttgaaaggccgactgctaagggtgacatcttgcggtcagatgcaagtgcagcgctaaatgtcggtgttctccatcttgtacccacattggatgtatttccattgttggaagatccaaagacgtatgaaccaaacacaattgatcttgaccaggatgagttcaagtactggttcaagattttgtcagatcattcgccggacctcgtggacaaggcagttgctagtgaaggtgggactgatgatgccaaaagacggggtgatgcatttgcacatgccttttctgctcatctggcaagattgatggaggagccagctgcttatggaaagtttggtttggccaacctgttggaattgagagaagaatgtctgagggaatttcagttcgttgatgcatatattagcatcaagcaaagggaaaatgaagcttcactggctgttttaccggatcttctgatggaacttgatagtatgaatgaggaagctaggctgcttgcactaattgaaggtgtccttgctgcaaatatatttgattgggggtctcgagcttgtgtagaactttatcacaagggaactataatagaaatctatcgcatgagtcgcaagaagatgcaacgtccttggcggattgatgactttgacatgttcaaaaagagaatgcttactgataggaaggaccaatcatacaaaagagcactgctttttgttgataactcaggtgctgatgtggtccttggaatgcttcctttagctagggagcttttacgccatggaacagaggtagttcttgttgcaaattcgttgccggctttgaatgatgttaccgctaatgaacttccagaagttatagctgaagcctcaaagcactgtggtatccttcggaaagctgcagaagctggtggattgatagtcgatgcaatggctggcatccaagatgatctcaaggatgagacagtgtcagtgccactaatggttgttgagaatggatgcggcagtccatgtattgatttccggcaggttagctcagagcttgctgctgctgcaaaggatgcagatttgttaattttagaaggcatggggcgatcactgcataccaacctcaatgcccgttttaagtgtgatgctctaaagcttgctatggtcaagaatcagcgattggcagaaaaactcttcaatgggagtctatacgactgcatctgtaaatttgaaccagttccttaacaacatggtagcgactgcggaggcaactagcagaagcagcttgattggtgtagccggtgagacagaaacaatcatacagcgtacggcataaccgatccttccatgtacggggtacaagaaacgccctttcaataaaacaataacagtgttttctgaaacgatataataaaggctctaaaggctctttccagaaatattgaagggaaaagtttgagccagcaactggagttcgtgtttaagccagaactagttagcagcctaccatggcgaaagtaacatactcgaaccaatcttggaaagatcctgtcattcttgtgccatgctcgaatcaatccataaattgttcagacaaaaaaaaaaaaaaaaaaggactctagggccaagaatcagttattagtcttcgcatgtgggcaactataataaatcaataaacgacacagtagtc

SEQ ID NO: 72318 - DNA, 296 bp, Zea mays
  Clone ID: MRT4577_165955C.1
tttcactcgtacgaccatggtcatgctccggggccttgagtgtgcactctgggacccatgccgcagcgtgctgcgcggggcatactgattagcgcgcgctgatcactgatcgcctggttcgtgatgagtacgacgcgcataggaaaatccatgagtccgacgccggagctgaaggtgaacaaagactgaaacggtttactcaggtaatgctccggaccccaaggtagcctacgagcaaaagaccctgttcaacgggcacatcaacaaatggaggaactaccgtggggaggcgcttg

SEQ ID NO: 72319 - DNA, 135 bp, Zea mays
  Clone ID: MRT4577_165956C.1
acaccgaaacgaccacattgatgatttatggtattgctcctacaggataaaaggcaattgaggcctggacacacgcgaactggggcatcctgcagaggggttctacactatacactcaccgcgcacaaaaacact

SEQ ID NO: 72320 - DNA, 1970 bp, Zea mays
  Clone ID: MRT4577_165957C.1
tgcaaaggatgcagatttgttaattttagaaggcatggggcgatcactgcataccaacctcaatgcccgttttaagtgtgatgctctaaagcttgctatggtcaagaatcagcgattggcagaaaaactcttcaatgggagtctatacgactgcatctgtaaatttgaaccagttccttaacaacatggtagcgactgcggagggttggtattgctcactagtttttccacggcattgctcaaatctggtatctgttcttcagtttaatcacccgttttcagttgtgtcatcttgcagcaactagcagaagcagcttgattggtgtagccggtgagacagaaacaatcatacagcgtacggcataaccgatccttccatgtacggggtacaagaaacgccctttcaataaaacaataacagtgttttctgaaacgatataataaaggctctaaaggctctttccagaaatattgaagggaaaagtttgagccagcaactggagttcgtgtttaagccagaactagttagcagcctaccatggcgaaagtaacatactcgaaccaatcttggaaagatcctgtcattcttgtgccatgctcgaatcaatccataaattgttcagacactgccgggacaatgccatcactcaaatgctaagaatcagttattagtcttcgcatgtgggcaaccataataaatcaataaacgacacagtagtcacgagacatgtaaaacaagaggggatgtgaggcattttttcttcagcatacaccagttgatccactaatcaacaagccgtccatcgctccagaaactaccagctctaggcaaagttgatgtcatacgccttactgccgtccgccctgaagatgccaaagtggcgctcgaactcggggccgggcttgccgtcctcgtcgtacaagtcgaacaggaacacctccacgggcacgccgggccgcttcggcgtgccgacgccgcgcgccgccctctccacaatcttggcgttgtacgctgcggcgttctgcggggtggcggccgggtgccccgcggttggccacccggtctcggtcaccgcgaccggcacgccgccgaacccctccttctccagcgcggccaccagcgcgtctaccgtggcgtcgaacaggttcgtgtacaccagcgcgccgtcctgcaccggcgccgcgcccgctccgaagagcgcgtacgcgagctgcacgttcgccgggtcgttcacgtggctgatgaaagggtaggcgttcaccatgaagggcgcaccggtgtcggccaggaaccgcagcatggggcggaggacggggagggaggcggcgtcgaacgcgccggcggagggcgggtacgaggcggccagcaccgaggaggcgtgcgcggaggagaccttgaccctgccgtccagccccagggtggcgagcgcggcgtgcaggttccgcatggccggcacgaggtgaggcgcatagaactggttgttgtacagcacctcgttgccgacggcgaggcaccggacgcgctcggcgggggcgtgggccaggaccgcggaccgcagccactgcgccgcgccctcgggccccgccgcggccaggaaggtgaggttctcgttgggcacgcccaccatgaggtcgatgcccgccgcggcgaaggccgggagcacggccgggtccggcaggaagagccgcgccttggtgatcccgttccgcttgagcagtgccgcggcggccgacggcggcgggaggttactgccaacgcggccgtggcagatgccgatcttgcccgcgtcaccggccgccgccgccactgccatcgacgcgacggcgaggaggacgtggccgagaagacacaaggctattctcgtggccattggtgaaggaaagaaggaaggaagaatcccacgctttggttgtgttgtcgccgttaaatagattctgctttggcaagaattgtatggttctggttgctt

SEQ ID NO: 72321 - DNA, 439 bp, Zea mays
  Clone ID: MRT4577_165958C.1
aaacaggggcccagaagaatcaaaatgggggggaagcccccccccaaaaagcccaaacccttaatcaattgccagcccctaaaataaaggccccaaccaaaggaggaaacagggggggggcccacccaaaacaggaaaccatggaaaaagcagggatccaaaaccgggcttttaggaaaattcaggcccacccgggccgaaaatatcacctcaaaaccccacccacccgggtcagggtcaccaggcgggcccccccctcaccacccctgccggagggaaaaaacggggggggaccccttgcttcctgaaacccggaaacccccccctagcccccgggggaaccctgatggccccgggcccccggggggccaccacccctttgaccagattttgcaccccggccggggtttccaaaccgggggccccccccctgcccccc

SEQ ID NO: 72322 - DNA, 286 bp, Zea mays
  Clone ID: MRT4577_165959C.1
cctgcgcgcatccttgccgcaggccgacagcatgctgagcagaacgagtgcaagcagcgccggccggcgcatcctcagtggtcgggcgtggcgtggcaacggggtgtgcaggaggttcatcggtggccgggattccgtgcgccggggggagacgctcggcgccgaatatagaagacccgtgcgtggattccggcgaatcacgcatgaaacatttttcatttgcagtcaccgcgcgcggttgcgaggatggcagccatccaacctgcacaatggcccatgccgcgcg

SEQ ID NO: 72323 - DNA, 343 bp, Zea mays
  Clone ID: MRT4577_16595C.1
actcctgcccgtctttcttgatgacgagcctcgcgcttgtagacgtaaccctcggtcttaactcgcttgccggtcttgcctaccttaccctagggctgcgggagggggtcggacgacgacgagcaagcagacgaccacgtacgtgcgagaccgagccgtggaacgggacgtgctcccgcggaccgccggcgcaaccacgctacgggcgacacctgcagatgtgcatcacactgactggacgatctagcatgcctctacaaggcccgaggatgactatactgaggctattacaattcactagctcggcgaatacggccggccagactggacaaaaccttgatgt

SEQ ID NO: 72324 - DNA, 610 bp, Zea mays
  Clone ID: MRT4577_165960C.1
ctcaccataacgattttttgtttgctcacagcattcagcgcaacggcaatcttaaaaaaaaaacaagacgcccaccacaccacccggggggggggggcatgtttctttaaaaaaacagaagcagcaccagccctggggatgcgcgccccagcagcacggccacgggttggcccagcaccgagcgccacagatccgctgacacttgaatcagacaacacggcaaacccatctcggagggggggcggaagagcatactctgcaggaggaacgatggccactgagcgtgggcacaccccatacggggaacacaagccgctggggaaaccccccaccccaacagccggaaataggttctcaccccacaaaacaaaaaaaggggcaggacggcgggaccccagaatgccaacgggggggggcaggcagaaatccaactcggccgcacgggaaaaattaaaacccaccgggggggccgggattatgccccccctcctatcgggggcgcccccccccccgtcaatattaacaacccgcctggtggggttaccctaccggcacccggcggagggaacgggaagcggcccatcagaaggcaagggggcccaggcccccc

SEQ ID NO: 72325 - DNA, 487 bp, Zea mays
  Clone ID: MRT4577_165961C.1
gcattcataacaaattcaacaggacagcacttggtagaaattgcttcttcatttggcctatctcctcagaagtgacattggacagtggatttgcacactaccaggtctgcccgttgcactgtgatccaagttgtacctgtcatattgaggggaaaagctgtgctagtgtgaaactttctccttccaggatatcctcctcaacgacctctctttaaatcccagcatttggaatctactccaaactagagtaggaaggaagcatagggatgatcaaatgtacaacatacattttgcatgctctgtaggaatttagcttccctatgcattttttgtgtacattaagactgtaattcttttgttgtgccagttttgattcaattgcagtgacatgccatcatggaccagtatgtagacagatttttgtttcgagaaaaaggatgtaaccagaataaaatgtccaggaatggaactccttttgcattgcctc

SEQ ID NO: 72326 - DNA, 281 bp, Zea mays
  unsure (1)..(281): unsure at all n locations
  Clone ID: MRT4577_165962C.1
ttccacttttcgctggaccgatccatggatgatggtagaggccacggccctcgacctcgataaggaggagactccaggactactgaggaggagcgacagacaaagacgtgtcagattggcttcacggtgtgtaactccacacgcgntagcagagcaggcattagcaatggagctagcgtgcgcggatcgcacaggttcgcggttttcatgagagctagctgctgtaagtctagagattgatcccgtgctatccagagattgcagagtcatgagctatccgt

SEQ ID NO: 72327 - DNA, 341 bp, Zea mays
  Clone ID: MRT4577_165963C.1
ttcttaccattccttccaacaccacctcgcctgcgatctccgtagccttcgtggcgtggagcatcgatcatgtcggcctactgcggaaagtacacggatgagctcatcaagaatgctgcctacattgtcacccctggcaagggtatccttgctgctgatgagtccactggcaccattgtcaagcgcctttccagcatcaatgtttagaacgttgtggtgaaccgccgtgccctccgtgagctcctattctgcttgtcctggtgcttctcagtacatcaacggcgtgaatccaatctagcagactttgtacaagaagagactggttggctcgcctttctttt

SEQ ID NO: 72328 - DNA, 107 bp, Zea mays
  Clone ID: MRT4577_165964C.1
ctgatgccagtcaccatgagtcgctcggttctctcgcaagggagccggccttacaagagcgcgaatgtcgcagcgaagaagctggaagaggcagcgctctcctgcaa

SEQ ID NO: 72329 - DNA, 321 bp, Zea mays
  Clone ID: MRT4577_165965C.1
caccttcattcgaacctttttgggtttttcgatttttattaaaccaacttcttcttatattttttggcttctccaagtaccagaggcacccgaattccccattctaaaaccaaatgtcaattgcatgcatcaggagtggcgtaacttcccaactgcatacaagggcatgtaaaccggccactataaacaccctacaatgatccccaaacctaatgcctcatatgacctctgcatttggcatgcatacttcggcatgcccgttaactgtgacgacccctaaaaatttaacaggagttggtttcctgaaataacacccccaaa

SEQ ID NO: 72330 - DNA, 712 bp, Zea mays
  unsure (1)..(712): unsure at all n locations
  Clone ID: MRT4577_165966C.1
tcgcccacgcgtgccgccacggtccggaaaccataagagcttctgaagagcgaaatacttcagtctagacactagatacagtaagccttagcgcaccaacagaggatacttcaaatatgtctgcctcgcggagctcctctcccaactccatgtcacagtggagccagaaagagaacaagatgtttgaagaggcactcgcctactatggcgagggcacacccaaccggtgggacaaggtgtccagcgccatgggaggcatcaagtctgccgaggaggtgcgctgccactatgaaaatcttgattacgacgtcaagatgattgagtcaggcaatgtgccgtaccccaagtacaagacacagggattctggacccgaggttaaaaaaatgttggaggctcaaagaggcagaaaacaaagctctacggatccaagaaggaaccaaaggaaatccagctctggttggagaataaaatgatgaaccagtgtgtatatgtcaatatgtgtatagtatagtttatgatcaagtttatgtctgtctacctgtggttgtaggatcctagtgtacataagattgataaccacatgtattcattgtccccttgaactaaagttatggagggtgtaaagtctaaaagtcatgtatttatgcaaactaaaaaaacaatgcctcgtagcattcgttgcctcaaaaaaaaaaanaaaaaaagccccta

SEQ ID NO: 72331 - DNA, 279 bp, Zea mays
  Clone ID: MRT4577_165967C.1
cgagctctcacagtgccggaactcacccagcaggtcttcgatgccaagaacatgatggctgcctgtgacccccgccacggccgatacctcaccgtggctgctgtcttccgtggtcggatgtccatgaaggaggtcgatgagcagatgcttaacgtgcagaacaagaacagcagctactttgtggaatggatccccaacaatgtcaagacagcagtctgtgacatcccacctcgtggcctcaagatggcagtcaccttcattggcaatagcacagccatc

SEQ ID NO: 72332 - DNA, 1579 bp, Zea mays
  Clone ID: MRT4577_165968C.1
cgcattgactacttgatcatgtttgtttttgcgcttatccttataataggggaggacattatttagagtacttgtcttttttctgtaaagtagtggccattggtcaacaaaatattacctttgccaaagaattaggagatgcaactgcatgttggtcacttctctctttttccttgaaaacctgaaagttcaatttacttagaaactagatgaaacacaagttgttatttatcctcaagtagattaattaccactaagataactaaacaccatataggtattcaccaaacagtcactgtaagtcgataactctgaagtccaaaataaggcatgttgtagcaagcaatcattcaactatttcactgatattagttcagttctcactagctgatgggcagaggtttgatctatggtgtaaatagctattttttcttgtttattttcgtagtcgtgatcttgttttatgcaatcatatgtacttaccattttgcatcgtttgaggtgcagatcagtggggtgcactcaaaactgagaatttgtttccccaagaagattctttatttgttttaacaaactagattcatccatgttgctttaagattcatccatgttgttttgcatactgaatattacttctaaagaaacatgttacatccataatttttgttttgggctattacacaagagaccgttttcactgcacaggtaatagccattgtttatattttatctgttctatccagatttttatcgactacagttttgtactaaccaattctacctacagaaacaagacctgcctacagtgacgaacttgcttaatataaaacacacgagccctcctcatccaccaccgatggaggatggatggcatatatgattctctaggcatatgttatgtactaattgaattttaatttcagtatacactgtgtaatggtaaaaggagaaaacttgatgaatggagaatgtacaaagatcaaagtatggctaaatgaccttgctggaagtgaatgggcagcaaagacagatgcacagggagaaaggttgaaacaagcacagaacgtaaacaattcactttctacacttggtgatgtcatatgcactcttgtaacgaagacttcacatataccctttagtacaggtggagattccaaaactttgatgtttgttcaaattagtcctaacgagaacgacgtgggtgaaactctttgttcatttaacttcacgagcagagtacagagcatagagcttggacgggctaaaaaacaagtcgatgttggagaattgtcaagatacaagctcatggttgggagagccaagagggatagcaagaataaaaatgctcataatatgagtatggaagaaaggatacaagcacttgaagtgaagaataaggccaaatacatgctcactctgaatctccaagagaaagcaaactcaacccaatatcttgtcatggaaccaaacccaatagatacgcaatcaggatttaacaataggctatccattatatatgcaatcaggacctaccaacaatgtgtggtacacataatagaaggtgttgttgtcttaacac

SEQ ID NO: 72333 - DNA, 1384 bp, Zea mays
  Clone ID: MRT4577_165969C.1
taagagcttctgaagagcgaaatacttcagtctagacactagatacagtaagccttagcgcaccaacagaggatacttcaaatatgtctgcctcgcggagctcctctcccaactccatgtcacagtggagccagaaagagaacaagatgtttgaagaggcactcgcctactatggcgagggcacacccaaccggtgggacaaggtgtccagcgccatgggaggcatcaagtctgccgaggaggtgcgctgccactatgaaaatcttgattacgacgtcaagatgattgagtcaggcaatgtgccgtaccccaagtacaagacacagggattctggacccgaggtaaagtccatggcacttcgaaagcaaactggaaacatataacataagggctttttttctgtactgataagcttttggttaactatatggatgtttgttggtgatagtcgtaagaagcaggcctcgggctaagagtaattcagtcaccatatcatattttttttatgaataggtcaacatgcatcgctatgccatcgatggctcaagaattcagacgctcgagcgtctgagtgttttatgttctttagctgttccattccatacatgggtgaccacatcaacattgtataggccaaattgcagacatccttgcctttggatctaattactcggtgtttgtccactaatgcccactaatagtctgggatccaaagtactatgacaaatatctcctacctccaatagaaaagtttggatcttgcactctaatccctcatgcatccagcttgcacccgacatgcagttctcatattactctaggagtcacaacttatgccaaaagggcatctccatggcctttttagcgtgtgactaggcaagctttgggtagttctttgttgtcctttcttttgttttttttttcaagtgggtgatttctggtagggaggtctttactaaaaagctatagtagcagcttcaaccgaaatcagtacaagcacatatcacatagtacaaattagaataaatgtttacaattcagagaagcttacggtgtgcatattgacttttgctttcaggttaaaaaaatgttggagggaggcagaaaacaaagctctacggatccaagaaggaaccaaaggaaatccagctctggttggagaataaaatgatgaaccagtgtgtatatgtcaatatgtgtatagtatagtttatgatcaagtttatgtccgtctacctgtggttgtaggatcctagtgtacataagattgataaccacatgtattcattgtccccttgaactaaagttatggagggtgtaaagtctaaaagtcatgtatttatgcaaactaaaaaaacaatgcctcgtagcattcgttgcctc

SEQ ID NO: 72334 - DNA, 441 bp, Zea mays
  Clone ID: MRT4577_16596C.1
gcaccgaatctatgcgttccatgtaaacacgggtctcaaggggcccacgtgtggcggtggactggctatgaacgacatgccatcgtgatcacaccagtggatgcttacgtatgacagcggctcatgtaatatatagagtcgtgccagtggcactcagtcgctagcttgtaggaagatcaggaatatagtgggaagtacggtggctatttggatacgttactataatgctggagtgaagatgaacaacattgcacgggtctctgcagcgagagcctgtaatgcattagtcttctcctggtacagaatgtccgctatagagcgatgtgctcagtgcacttaatgtgaatatgtcctgtccgagtcggatgtcctgctgtgtctagtatgttccatgtacttggaaccaacactcacatgattgaccccacgtttgtggatcct

SEQ ID NO: 72335 - DNA, 716 bp, Zea mays
  unsure (1)..(716): unsure at all n locations
  Clone ID: MRT4577_165970C.1
ggnagcacgaccctccactccatgcgtccgcgcgcgccagcgcaaagaactttcgaacagcagagacgccaaccgagccccaccacggttcttgaagatagactggtcggtctatttcttggctttctagactagaaagggaatccaactagccaaggtccaagtgaccatcacgtttcagtttcattctctgggtaggggagctgctgcagccgtgtgtatggcgtcctcttcctcctccctgacgcggttatttatcccgcctcaccgagcgcaccatgaggcagccatggccgcttcggccggcgcctctctgcgtaacggcggcgggatgcagatgctggatcttgtgatgcagaggtgggccgagatggtgttgtgctgcggcgcggattggaattgcgtgtcgcagctgtggaacagggtggtgctgcgcaagtggctaaacatcggcgcggggtccggggattccgacttcagcgccgacgagcacgatacctcggagggcgagaccgaccgcgaaggcatgtctggtttgaatcatgccctatgtaacgaagaaaggatattaggtggattgggtgcaagcacgactggtgacgaaatgagcaatttaccttactgccttagaatgcacagatcagagatcagtcgtgctcagtatgttgatgttagagaactcaggatttatgtagggacatggaatgttggaggca

SEQ ID NO: 72336 - DNA, 686 bp, Zea mays
  Clone ID: MRT4577_165971C.1
cattgggtacctcgaggccggccgggaaccttttcactgctccagcgaaggacacacccgccgccgtttcttgattctcccatctacatcttcctcgcagcgccggcgcggcggcgctccatcttccgctccctcccttacttgcgcttggcacgcaggcgacagcggcggcgcccagtctcgtactctctcagcggcggcgtcagtggcttcccctcccgcctctcgccagtcgcctcgcgccctcgcctccggtcctgcgcacgccggcctgttaccctgccaggacattgttgaattctctgaagtgtgtgctcttgtaaaggcttgctaaaatggcaaatttaaacataaccaacatcttggagaagatgacagggaaagataaagactacagatatatggcaacatcagatctgcttagtgaattgaataaagaaagcttcaaagctgatcaagaccttgagccaaagttaacgattactgttcttcaacaacttgaggatgcttcgggagaggtttctggtttagctgttaaatgcttggccccactcgtcaagaaagttggtgaggacagggttgtggagatgaccaataaactttgtgataagttgataaatggaaaggaccagcatcgggatacagctagtatagccctcaagacaatcattgctggaggtactaca

SEQ ID NO: 72337 - DNA, 813 bp, Zea mays
  Clone ID: MRT4577_165972C.1
gtaccctcgggcttgccggggcgatccaagctgaacgagagccacctagcaagctagtttagcaggtcaggcatggccagcgcgacgacgactgagcagcgtgtcagcttcatcgtcgacggagaggctgatgagcagcagcagcagcggcagcatgacgacgaccttgttagccgcgccgccgtggtggcgagggaggtgagcaagcgggtgtctcgcctgtccgtcgaaggaggaggagacgctcagggcgcctacaaggtcggcagtgaaggcggcgttgccaggccaaggaacggacatcctcacgaggccgacgcgggggaggggacgccgcggttccggcgctcgtccggcggcgcgcgggcgctgccgccgccgcacgcgtggctggcgatcgaggacacgaggaagcttcaggaggagcaggggcatgacgacggcgacgacccgcatgcggagcaatgggcgcggctcttccgtggcggcgggacgacgcagcagcagcagcagcggctgaggctgcggcggagcagcttcagcatggtgcggcgcgagcgcgagcgcgcggcgcgggaggcgtggctggaccacgcatgggagatgaagcggagctggcaccagcgcaacggcggcgctcccgacgcgggcacccccgtggtggtggtggtggggacgtcgtcgtcgtcgtcgtcgcactcggaccatcaggccaccgcggcgggcggcagggtggccatggacgtggcggaggtcggcgcgtggcgggacctcgggctggagctgccctccgactggcacgtggagatccag

SEQ ID NO: 72338 - DNA, 212 bp, Zea mays
  unsure (1)..(212): unsure at all n locations
  Clone ID: MRT4577_165973C.1
cagcctagcaattagctcatcgactccagattggagaactcgacaccatgnaagtgctgatcgttgcccttgctctcctggcgctcgctgcgagccgccgctcaacaagcngggctgggctgcagacaccccgttatcaccgctcgttattccgctcgttatctgcgcgacacagcgagctggatcccctaccccgagtacccgccacagtc

SEQ ID NO: 72339 - DNA, 426 bp, Zea mays
  Clone ID: MRT4577_165974C.1
gaattcggcacgaggccatgcgacgtgaggtcgaagagaaatagagggaaccaccatcgactaccgtggccttcaccgccaagctagccatggcccagcccaagctgacatcgacctccggcgttgctcactgccctggtcatgggcaggccttgtcgtcacgttgtgatctcggaggtcacgtgtaatctgaagatcatcctggtacctggaatctcaagtcccaggtcaagaacaggtaccacaggatgaggcacataaaggatgctgtgacgagttcatgagaggtcaggccgtcgtctcccagtcaactttgggttgctggaccgttgtctccttataatgtaattatttatttattttgtatagaactcctattatatagtaaagatgtgacattcgatccaaaaaaaaaaaaaaaaaaaa

SEQ ID NO: 72340 - DNA, 380 bp, Zea mays
  Clone ID: MRT4577_165975C.1
gcagttttctgaatgcaaatcaaaacttatttgaaatcaaattcatttataaaattttaattttactttaattttgtgtttcagcttgtttctacatttgataagaactcatttgcatattcaatcatgactactgtgaatccaaaaattttcggtttttacgaacgtactggcgacctgtggtggtccgactatcgaacccatttctaccaaacttggaatcaaattcgagttccatactttgtgcgttctattgctggtgaaaatgcctggcaaaaatgggaaaatggcgacgaaaacgtgaaaagaaatcacaaaccattgaaaggtatgaagattttggaaatcggcctgtggaggaggtcatttgactgaaactc

SEQ ID NO: 72341 - DNA, 257 bp, Zea mays
  Clone ID: MRT4577_165976C.1
tctttatgtttgctgcaaactgccaaccgcatactgcaaactaaaatggaaacatacaagtactcagacctttcttcttctgatatcttacgcctggtccaacgcaatgttgatcctgcgaatgagatacgtacactggtagaagacgtaataggtaatgtaaaacagcacggagaccgggctttgtatgattatgctcaccagtttgataaggtattgctgcaaaagctttacctggataaagcagaacatacaaa

SEQ ID NO: 72342 - DNA, 289 bp, Zea mays
  unsure (1)..(289): unsure at all n locations
  Clone ID: MRT4577_165977C.1
gcctgccgcgncctcctcatcccnaatcgtcgntctttntcttgcgggtcggcaacaacaaattccaaaacggaatcccggcggaattcggttcccgggggngaaatgggntaagggttcttnggnttttgggtnaagggtcgctgaattgtcttctggtcgcnngntggtgacttcaatnaatgttgatggnnggctcctgtagtgtttaatggcggcnccaatngttgaangtttcggaagcngatcntttcggtgtagtggtgaaagatttcttcnaggttctttt

SEQ ID NO: 72343 - DNA, 1131 bp, Zea mays
  unsure (1)..(1131): unsure at all n locations
  Clone ID: MRT4577_165978C.1
gggtaccctccgggnccggccgggaactttaacaaggttcttagaccccgcctccccccnggaataatttttttaaggcaccccggagctccgcgctctagaactgagggcctggcccccgagtggccggccggggcggcacgagcaacaactttgcgtcttcccgaatcggggcctccaccatctccaactgcaaccccaccccataccgccgccgcctccgctagggttttggagtgaggatcgccgatgtcgacggctcccaggcgccccttccgaggccgcggcgccccgccccctggcaccggctacgtccgccgcggccccgcccctgccccaggccccgccgacggcgccaagaccctgcgcaagcccgtcttcaccaccgtcgaccagctgcgcccccagacgcacggccacaccctcaccgcccgcgtcatctccgcccgcaccgtcctcgacaagccctccacgcacatcggccgcacccgcgtcgcagagtgcctcgtcggagacagcaccggcaccgtcctcgtcaccgcccgcaacgaacaggttgaccttctgaagccagatacaacagtgatcttccgcaacgctaagattgacatgttcaagggtaccatgaggctggtggtggacaagtgggggcggattgaggtgactcagcctgctgatttcaaggtgaaccaagacaacaacatgtcgctggtggagtacgagctggtggatgtggacgaagaggagtgaccagaaacgaagtcgggctgtggacatatattttggttatggaggcggtagcgttaggctcctatctagctattgttatcctggaccgctggcgattgggactttgttttaagtttatcttgaagaagcatgtcgaattatgtacagcagcagcaggtctctgtctgactgatgctttacgtttccgtgacgctttgactcttaatgctagtactacctttttttttctatctaaaaaaaaaaaaaaaaaaaaattcattggaggtggcgttaatcctttttgacctgtagttttggtagattaaaatctagattctcttagaaaccttaaaaaatcttataaataaaaacatatttcagagtaaaaaaaaaaaaaaaaaa

SEQ ID NO: 72344 - DNA, 463 bp, Zea mays
  Clone ID: MRT4577_165979C.1
aaacccacccaaaaataacaacgaaaaacgatcgacgacccacgatcgggacatacacgggaacaggttttattttttttaacgtatttccccccctccctccttttttcctgggggttttttacttgacgttgaggggcaggggtttgcccccccactccttggggcactcaagcagggggcccaaaagcttgccctggttgatgccaaaaaacaccttgttgcactcctcgccgggggacttgagcctttcgccggtaagaaacacccagccgagctccttgggcacaaaggggtacaggggaaacaaccggttgtccgaaatccggttcgccacggggggggggcccttgggaaccgccacgcggggggcctccaccttcgggggaaaaaccgggcggagctcctcctaaaacctggggatcttggaaaaacggggggctcccgctccgcgtccccgttg

SEQ ID NO: 72345 - DNA, 777 bp, Zea mays
  Clone ID: MRT4577_16597C.1
gatgtattattaaatattgtacaagaatcatatcagggtttgaatgctaatgaattgcgcacaccacgagatgaaaaagaaagagtaatgcagctattccatttccaagtaacgattgagcggacacatgatctggtcatcgggcgaggcagaggcttccacaaaatacagtctgcagcacggcgtcccgtcgtcgggatttttctccaccgacctgggcagcttcctcagtttatcgaacaggttctccgggtgactcagcagcccaaaatgcgcttcggggtctccaatctgcgtcagcgtcacccgggagaaccccatagaaggcagcaggaggtcagggctgtcatggtagaagtggtacatcgtcggagagagcagcgtcgcgttcttgttcatgaaatcgaccaggagcaccgcgctggccgaggagcggctggcggcgatgctctggaggacctgcatcgcgtccgcgtggtggaggtagtagatgatgccttcgagcacccacacggtgttcctcccggggacgtacccgcagctctgcagcttcgctatccagtccccgtctcgtatgttggcaggaaccctagccaatgatttcgccgccacggtgagtttctggcggcttgcggaactcgccgctgcctcgcgcagaaggtcggatttcagttctaggagctccgggaagtcgagttcaaataccgtgcatccctttaggcagctcagccggtaggctcttgcatccatccctgaaacacaatagagtgagagagc

SEQ ID NO: 72346 - DNA, 1085 bp, Zea mays
  Clone ID: MRT4577_165980C.1
cattgggtacctcgaggccggccgggataataataaaaaaaaaaaaaaaaaaaataaaaaaaaaatgctcgagcgtggccggtatcgtcttcgacccttcgccttcctcgtccctttctctctcccagattctgactccgtcgggctcccccgtgtctgtgtcttggtaaacatcggtctctccccatcccacctggcagttgccatctcgcaaagtcgcaataacttgtcttctcgaatcggctgcaaccccaccccagaccccaccgccgccgccgctagggttttggggtgaggatcgccgatgtcgacggctcccaggcgtcccttccgaggccgcggcgccatgccctcgggcaccggctacgtccgccgcggccccgccccaggctccgccgacgccgccaagcccctgcgcaagcccgtcttcaccaccgtcgaccagcttcgcccccagacacacggtcacactctcacagcccgcgtcattgccgtccgcaccgtcctcgacaagccctccacgcacctcggccgcacccgcgtcgccgagtgcctcgtcggagacagcaccggcaccgtcctcgtcaccgcccgcaacgaacaggttgaccttttgaagccagatacaacagtgatcttccgcaatgccaagattgatatgttcaagggcaccatgagactggcggtggacaagtggggccggattgaggtgactgattcttctgttttcaaggtgaatgaagacaacaacatgtcactggtggagtacgagctggtggatgtggatgaagaggagtgagctgaagcgatattgcattgccatctgttgggccaagtcgtgctgcggatatgtatttccagctaaaggagggcggtagcgtttaggcttctatctagttatttattattattattatcctggaaggctggcgattgggacggttagttttaagaccatcctaaagaagcacgtcaaattatgtacatcagcattaggtgttctgtctgactgatgctttctgttccgcgacgccgaagtctatcctaatgctactacttttttccctctaaaaaaaaaaaaaaaa

SEQ ID NO: 72347 - DNA, 806 bp, Zea mays
  Clone ID: MRT4577_165981C.1
aacacaactttgcgtcttcccgaatcggggcctccaccatctccaactgcaaccccaccccataccgccgccgcctccgctagggttttggagtgaggatcgccgatgtcgacggctcccaggcgcccccgcccctgccccaggccccgccgacggcgccaagaccctgcgcaagcccgtcttcaccaccgtcgaccagctgcgcccccagacgcacggccacaccctcaccgcccgcgtcatctccgcccgcaccgtcctcgacaagccctccacgcacatcggccgcacccgcgtcgcagagtgcctcgtcggagacagcaccggcaccgtcctcgtcaccgcccgcaacgaacaggttgaccttctgaagccagatacaacagtgatcttccgcaacgctaagattgacatgttcaagggtaccatgaggctggtggtggacaagtgggggcggattgaggtgactcagcctgctgatttcaaggtgaaccaagacaacaacatgtcgctggtggagtacgagctggtggatgtggacgaagaggagtgaccacaaacgaagtcgggctgtggacatatattttggttatggaggcggtagcgttaggctcctatctagctattgttatcctggaccgctggcgattgggactttgttttaatttatcttgaagaagcatgtcgaattatgtacagcagcagcaggtctctgtctgactgatgctttacgtttccgtgacgctttgactcttatgctagaactaccttttttttttccgaaaaaaaaaaaaaaaagcggccct

SEQ ID NO: 72348 - DNA, 224 bp, Zea mays
  Clone ID: MRT4577_165982C.1
cccgcacttcctgcactcgcactttagaatgcactactcatccgcccgacgacgggctcggtcatactgatgatacaccggcgcccatgtttaaaaacgtcactaactttagccagatactaggcgcatcatccacaagcgacgagcacacacgaattactggccaatacatgacattgctcatgtcctttgccgagcaccctcctttaccataccttattgaa

SEQ ID NO: 72349 - DNA, 265 bp, Zea mays
  Clone ID: MRT4577_165983C.1
cgtgctcataggcgaccgcccgtgctaatctgatctacactatagcgttatttgcgggcgggcttgattcaggcatacccatcacgacactgacgccgttctccatgctgtaatccatctcctccagcttgtgcttgctgcaccagaccaccatgcacgtgctctcgccgtatacgagcctctccgagacctcgctcatagctcaactgttccagagctatgtccagatgcagcaggcctctactcctttaaacgacatgttgcg

SEQ ID NO: 72350 - DNA, 179 bp, Zea mays
  Clone ID: MRT4577_165984C.1
gagttcatgtgtcggcggccgcccttattgtttatttttcttctaacagcatgtggtaacacacatatactttcaaaatgaggcgcgaagctgacccatggcagtgtcaagttgtccaacgtactcgttgaccaaaaacacaatcatttcatctagaactatggcctcatatctctgac

SEQ ID NO: 72351 - DNA, 332 bp, Zea mays
  Clone ID: MRT4577_165985C.1
aaaaaaaggataccctacaagaaaaaaaaataggcgaaatgggatgaccaaatttacattggggggggatgggaaataacagtgcttgccccagaacattttgaaaaaaagaataaggggggaattaaaataagacaggttttttttcgggcaaatactgaaatggttacattaaaagatcctgactttgactattacaaggctcaacaccatattgaatttccaaatcagatttggcaagactaaagacgcttgggacacttttagcaaattcctccccttgttttccgatgcgaaatggtggccacattagtttgtaagactggcctgaa

SEQ ID NO: 72352 - DNA, 482 bp, Zea mays
  Clone ID: MRT4577_165986C.1
ggtgcttgatctttacacatgtttgttttattaataagaggggcaaaaaaacataacacaggtgttgtttaagaaaagaaaaggtacacaaaaaaaaaggggggagaaacttacaagacctgggccatgaaaaaacaaacggggaaaaggaaccaacaccaaccaggggggctccaggcaaaacccaataagaaaaaaactcccctctcccacaaacagggagggggacaaaaaaaaaaaaaccctcaggactcccaaaaaacggaggataaaagaaacgaaaacggcggaggaccccaccggaccaagggaaattaaccgaaaacggcgtcccaacaaaatgcgcccccgggaaccagggaacccccccggaaacaaaccccttgccaagcggaggggcgggggccccaaaaaaaaaaaccttggaccgagaccccgcccatcttcccaaaaaaaaaaaccggggggggaaaacccgaacc

SEQ ID NO: 72353 - DNA, 210 bp, Zea mays
  Clone ID: MRT4577_165987C.1
ataaatcccctacttttcttcctccatatataggggccatcagatccagtaaggggaatgcaccaggggcttcgcgcccgttcacgatcccatgttcccgacgaattcttagagtgacctcttatcccttcagacaccttcaaggctcttggtgtagcttgccactctcaccaatcaagttctcatgtctgatctcgacattcagatccc

SEQ ID NO: 72354 - DNA, 670 bp, Zea mays
  Clone ID: MRT4577_165988C.1
ttcgggcacgccgcgtcgcctgcttcttcccccaaccaaagacacgaatcagccatggcgctcgcctccgccacgtcccgccccctcctcggtcgccccgccggcaccgcgcggccccacctcgccgtttcctcatcctcccccgcctcctcgatccgcttcccccgcggcgccgacggcggcgccagcagagcggccgtctctctccgcgcccccacgcctccagtctgtgaccccaaaagccttcttttcatgtttggaatggagctggactacagcgacgccctcattggtggcggcttcttgttccagaatccaaacgcaacaaaaacctgtgggtgcggcaaatctttcgcgactggaaaggagaccgaggccgcggcaaccacttgcaacaactagagtagagaaatattgttagctaaacgtgatgtggcatgttgtatagcttgctcatgttgaagccctgtggctacaccacagatacataaagaggcatagttcaaaggaattacaccattaccaatggcctaattcagattttcttgtttggtgatcattccgaagtccttaaacttgtggtatggtctctcaaaatgcattgtattttcaggtaaaaaaaagaaaaaaaaaaaaaaaaaaagaaaaaaaaaaaaaaaaaaggccccta

SEQ ID NO: 72355 - DNA, 1114 bp, Zea mays
  Clone ID: MRT4577_165989C.1
ctttttttttcttgtctcgtcaatccgccagcgcgagcccggccgccggccaccacgcaccacctcaccagatctttcttcctgttgcttcctcggctggtttccttctctcgccgcgtcgcctgcttcttcccccaaccaaagacacgaatcagccatggcgctcgcctccgccacgtcccgccccctcctcggtcgccccgccggcaccgcgcggccccacctcgccgtttcctcatcctcccccgcctcctcgatccgcttcccccgcggcgccgacggcggcgccagcagagcggccgtctctctccgcgcccccacgcctccagcggcggcaacagcaacatctggtagcattgctccagcaatttcattgactgaaaaggccttgaaacatctgaaccaaatgagagctgaacggaatgaagttttgtgcttgagaattggagtgaaacagggtggatgctcaggcatgtcttacaccatggaatttgaaaatcgagagaatgccagccctgatgattctgttgtagagtatgatggttttgcaatagtctgtgaccccaaaagccttcttttcatgtttggaatggagctggactacagcgacgccctcattggtggcggcttcttgttccagaatccaaacgcaacaaaaacctgtgggtgcggcaaatctttcgcgactggaaaggagaccgaggccgcggcaaccacttgcaacaactagagtagagaaatattgttagctaaacgtgatgtggcatgttgtatagcttgctcatgttgaagccctgtggctacaccacagatacataaagaggcatagttcaaaggaattacaccattaccaatggcctaattcagattttcttgtttggtgatcattccgaagtccttaaacttgtggtatggtctctcaaaatgcattgtattttcaggtatccaaacttgtcttgacgtgtcgtccaggcctacaagtactaaaattttatttttacatttttaaaaaaaaaaaaagcggcctttcgtttcaaaatagtgggctttgttttttttttcaggatactttgatcagattatacaagaaacattaatacttaaaaaaataaaa

SEQ ID NO: 72356 - DNA, 881 bp, Zea mays
  Clone ID: MRT4577_16598C.1
gttatctttttcatttttaaaaccgagcgggaacctcgaggtcgagatggagcacacctagtacttgtttgagcacgtcgcctaataaaattccccattccaatacacagatctcgcacccgtaagtggcgacgaatctcgcggtgcggaggcgcgacagaggcggtgtcgactccgacggactcgcagccaccggtggagacgccccaccggcgcactcctccaacgttcatagtttaagggcttgatttggataattagtcatcaacagaagtgataaaaaatggtggttcttgcagcatcaatcgtttcaaagtcgggaaaagcacttgtttcaagacagtttgttgacatgtctcgcataagaattgaaggattacttgctgcgttcccgaaactggttggaactgggaagcagcacacttatgtcgaaactgaaaatgtgcgatatgtttatcaacctattgaaggtttatatcttctacttatcacaaacaagcagagcaatattcttgaagatctggacactttgaggctcctctccaagctcgtgcctgaatactccccttcattggatgaggagggtatttgtaaaacagcatttgagattatatttgctttcgatgaagccatatctcttgggaacaaggaaaatgtaacagtgcaacaagtcaaacaatattgtgagatggagagccatgaagagaaggcacacaagctgatgatgcaaaccaaaatcaatgaaaccaaggatctcatgaagaagagggctaatgagcttgacaaaatgaggatggaaagaggcaaacttgacaaaggaggatactcatcaataatctggtccacgcgtgattgaaaaaactttcagtgacatgagcatc

SEQ ID NO: 72357 - DNA, 250 bp, Zea mays
  unsure (1)..(250): unsure at all n locations
  Clone ID: MRT4577_165990C.1
atcgcgtgnactcgngaatacagctcgaggccaacgcgactgctgccggaaccggcatgggggcgtacaagtatgtgtcggaactatggaggaggaagcagtcggacgtgatgcgcttcgtgcagcgcgtgcgtgctgggagtacaggcagcagcgtccatcgtccgctcaccaggccagccgcccgaaaggccgtcgtctcgctacaggccaacaggaagtgtctacggtcggtaactgtgcagaagct

SEQ ID NO: 72358 - DNA, 395 bp, Zea mays
  unsure (1)..(395): unsure at all n locations
  Clone ID: MRT4577_165991C.1
gaagacaacaacaccttttattttggggaccacacattggtgggggggcctggttgcctatttaatgggtagcctattggtaaatcctggttgggtttctattgggtttggttccggggggggggattgggttgggtttgctttctcttggggattcagggggggggtgtttttggcctttttcttcacttcaaggggttgggtcctttcttcccttctccttttttggggctttttatttttggtgtccctcttgggtctcccaaccctgagcttgtttcttggcntttcttccacatcgtcttgttttttagcccgtccaagctctttgctctgtgctctgctcgtggggtgttttgggcaagggggttcacccccgtcgttctcgttggggc

SEQ ID NO: 72359 - DNA, 339 bp, Zea mays
  Clone ID: MRT4577_165992C.1
ttggggtttctgaacaacaggagggggggcaggggctccattaggtttttcgcccattccttcttacgaggctcacgtctgatgtataaaagggcctacctccaaagacagaaacactccttaaagtcggaatgcctcagatgcaaaagcagcactatcgtgctctgcttcagaaggattcggaggttattaatgctggtggtgaacgcacgcgattgcttaacattgccatgcatttgctcaagtgctgaaaccattcatatttattccaaggagctgaacctgggccaccctacacaactggtgaacatttaatcgagaatgcaggacaaatggtct

SEQ ID NO: 72360 - DNA, 489 bp, Zea mays
  unsure (1)..(489): unsure at all n locations
  Clone ID: MRT4577_165993C.1
cagaaaagcacactcttcctgatgggcaggttataacaattgaaaaagaggggtacattgttggtgaagctttatttcaaccacgtatattgggcttggaagattatggtatcgttcaccagctagtcactagtgtctcaaatgtttcatcagagtaccatcgtcagctgcttgaaaataccatgttatgtggtggcacctcatcaatgactggttagttattgatttcatatgccagatgccttttgttctttatgtgcacctttgttttattcaacattgtgagctagctatatatcaaatgcatatctattagctagatagggtaagtaatactccctccattcacagatatatgacgccgtttacttttttcaaaaactttaatcactcgtcttattcaaaaaatagtaagttatcatttattttgttgtgatttgttttatcactcaaggccgtttgagcatggcttanaagtttaattttttg

SEQ ID NO: 72361 - DNA, 244 bp, Zea mays
  Clone ID: MRT4577_165994C.1
atctccgatttttagttttaaggcccagctttttggaaccgggtaggggctaatttcggaagcctaaggcccacgagtagcaagttagccctttaagtactaacaaatggcttaagctgacataaccattggcaagctgactgcaggtgacgctcatagacaccaactagacatcaagactattccataccctgcacccggacccatcactccaatgctgcctcatgccaagcttcttcatact

SEQ ID NO: 72362 - DNA, 369 bp, Zea mays
  Clone ID: MRT4577_165995C.1
tgtttttttcttttttctaaaaccttttctttatcttttttttaaattgggcaacaaaactcacacccgatctcgatgggggggtccatatgtccgataaaaaagggaacagggcctgaaaacaaaaccggggatgatccaagacgcacattcaccttgtttccggggaacaaaattgagccccctctgcacacaatttaagaggaaccctcctttaaaaaagactacaggcccaaaagaaggcactaaaagaaaacccagggaagactttttttcttcacacaaccaccacaaaaaaccgattaaaaggatttcactgtcccataattacaagtttttgggacctgcgtgccaacatggggctaattt

SEQ ID NO: 72363 - DNA, 296 bp, Zea mays
  Clone ID: MRT4577_165996C.1
ccgctggaagtattccgcacgagggttgtgaccaatcagagcaagatataagaggcgtccgagcctctccttaaaaaccctactaagtatgaagattagagagctaatatacccaaaggggctctactaggatgccctcctaggacagggaagactttgctcgacaaagctacagcaggagagtctcggtggccattggtgactattactggtacacaatttagtggaactcctcctggatattggaccgtccatggtacagaacttggcccaagaagctcggcagggtgctgcta

SEQ ID NO: 72364 - DNA, 475 bp, Zea mays
  Clone ID: MRT4577_165997C.1
gaatctcttgtagtttcttgtcaacgggcaaaaaacactcgcaaacgggcaagggcaggcaagcacctgcccaggggttggccccaccctcagaaccacggcacgcccgcgggcgaaacgaaaaccacggggggcacccccgagggccgagggcgaacgtactagtctctagacccgcccgacggccgacacggggaccccatacagggaggcagggctcacaccccaaccaaccccgagagagaaatgcgggccaccccaggccagggggacacccaccccggcgggagaagccaggcacggaaacaacggagaacctcacggggagataaaagcccacaggaggccgccccgaagaacaaagaagacccaggatggcgtcggcgccaacgggggcccgggccccccgggcccgttctggacagaaaacccaccccgaaggacccggggcgagaccctgcccacccaaggggag

SEQ ID NO: 72365 - DNA, 452 bp, Zea mays
  Clone ID: MRT4577_165998C.1
tttcactcgtccatgttggttgtttggacgaatttattgcgctcctcgtccgctgcagtccgtttacgagcgtgccaacagcagtttccatcgacactcattttaattggacataattcccgtttttattctacccccgccccaactgcaaattccacctcaaaatcctcgtcattacccccgccagcgccaaataacactcgcaagcctaaagtcgaattacgccctgcccccgtgagaccacaaagaggctcccagccttcatcaagtaccgagtccgcgacacgtacgccagtaaaacccacacttaactcaaatctccaacccaagactcctccgtcctcctcgtccagtccattcttgtcagaaatcaagaatgaagcagttccgtgacatagagctagcagaggctcatggcatcctttaaccaccaccagccgacgcgaactggt

SEQ ID NO: 72366 - DNA, 822 bp, Zea mays
  Clone ID: MRT4577_165999C.1
cgggtccatcacctaataaaaagttgcagagttccgtatgacagtgatgcataccagaaaaggcggaatcgacaacttattagcatgcatatgctcttcttttaacggcatcatacgctgtagttcatttttaaatactagtagctggttttaacacgtacgtgttcacgctattgtacacgtgttcatttttaaatacttggataacgtgacaattatccaagccgatcacccacacggccacacgcacgcaggagaagtttccgctcgaggaaatgtgtacagtgaagtcagaaatgttctctagagagtcagaaacggggagatataattaactaaaagcaccggtagggaagaaagaggagcatttggatcgagattgtaccatatatgaatatcttgttctgaacctttttgtttatatatccttttgtttgagataaaggaaagctatagcggcgtatctgactgtcacaaccaacgtttaatattgccaatccatgattgcctacgaatttgaaacgtggcacgggagtagtataatgttaggcttggcggcaaaacgagatgaatgttcagcgatggaactgcggagatactaaattatatggaaatattatagtagcaaagggggcagggggcgctaatagttctctgtataaaacaatgcaacgcccacggacggacgacagataatttgggcaagctaggtagtgctaatcacacgcctccccttatatcatgtacaaaaaaaaaaggcaactggcaacgcatgcatgaaccatgcacgatagacacacagatgtgatgaatttacaaaaa

SEQ ID NO: 72367 - DNA, 952 bp, Zea mays
  unsure (1)..(952): unsure at all n locations
  Clone ID: MRT4577_16599C.1
cctcgaggccggccgggtcattttatattccgcgaaaacgatctagctagaacatgtacttatatttcccgcaaatcaagcaatataaaaacctcacttctttcctcgtcnnaaaaaaaaaaaaaaaaaaaaaaaaaaaaaaaaaaaaaaaaaaaaatcccggcagtggcgacgaatctcgcggggcggaggtggtggcgcgacagaggcggtgtcgactccgacgaactcgcagccaccggtggatacgcaccagcagcacgcggcgcactccaccgacgttcatatttaaggacttggtttggagagttctactcgtcaacaaaagtgattaaaacgggtggttcttgcagcttcaatcgtttcaaagtcggggaaagcacttgtttcaagacagtttgttgacatgtctcgcataagaattgaaggattacttgctgcgttcccgaaactggttggaactgggaagcagcacacttatgttgaaactgaaaatgtgcgatatgtttatcaacctattgaaggtttatatcttctacttatcacaaacaagcagagcaatattcttgaagatctggacactttgaggctcctctccaagctcgtgcctgaatactccccttcattggatgaggagggtatttgtaaaacagcatttgagattatatttgctttcgatgaagccatatctcttgggaacaaggaaaatgtaacagtgcaacaagtcaaacaatattgtgagatggagagccatgaagagaaggcacacaagctgatgatgcaaaccaaaatcaatgaaaccaaggatctcatgaaaaagaagggcaaaggtgagggcatgaagcgtaagcgtgatgatggcaccgaagatgtggatgtcaaggatgggaagaaggtaaagaaggaagctgaggagaanccagatatcatgtacgcaaatgtgtttgttgac

SEQ ID NO: 72368 - DNA, 357 bp, Zea mays
  unsure (1)..(357): unsure at all n locations
  Clone ID: MRT4577_1659C.1
acctctncccggctagggcgtttcgcctgccgggcgaaggggtgcgctgggggcgccgnctctggcccggnggggcggcagatggctggcggctgcagggaccgaatgcggccaggccctgcgcgccttgcttgccagaggtggccgaggccggngagcgggatccccgtcttagccctcgtgctgtcgcctggggggggggcggngcccgtggggacggctgcgnggcggccctccttggccgccgtcggctccgggtcggggttccgcgccggcgccggcgcggcggccggggtttacgccgcctccgtgcgtggggggctgctcgttccgcactagagcgctctggcggcgctg

SEQ ID NO: 72369 - DNA, 283 bp, Zea mays
  Clone ID: MRT4577_165C.1
aggaggtggaggtgctgaaggagcagatccgggaactggcggacggaacgtgcgctggagcaggagaatgggctgctgcgcgccctggccagcccggagcagctggctcagctgccctcctcgggggtcccacggcttgggcctcctgcgcccaatgggccctccgtctgagcctcccttcccttacaatgtgcctttggggctgcccggccttgcgtcaccgcctgccccctcttcctatgcagctttaatgtccccgtgtccccggggtgggagttcaagg

SEQ ID NO: 72370 - DNA, 2186 bp, Zea mays
  Clone ID: MRT4577_166000C.1
ttgggtacctcgaggccggccggggcatcattcgcaatctcaggtcacggaactctatccactcgtcagcaccaagctagctagtactcgtgcccttcggacgagaggcgcatgtgactcggtaaggaggaggagggtggagatggaattcaagaactgcgggtcgtcgtcgcagccccggccggcggtggtagtgggcgaggcggcgttggcgagacagggatcagtctactcgttgacgttcgacgaattccagagcgcgctcggcggggccgccgccggcggtggcggtggcggcagcatccccaagggtttcggttccgtgaacatggacgaactgctccggagcatctggaccgcagaggagacccaggccatggcctccgcttccgctggagcgggtgcggggatgccccccacgccgctgcagcggcaagggtcgtcgctcacactgccccgcacgctcagcaccaagacggtcgacgaggtgtggcgcaatctcgtgcgcgacgaaccgccgcagggggcggacggcggcgggcaccagcagccccaccgccagtcaacgctcggggagatgactctggaggagttcttggtcagagctggcgcggtcaaggagaaccccgcttctgctcctccagcgccgccacccatggtgccgccgcggccggtacctgttgcccctaaaagctccgccttttttggggatttaccgggtgccgacgacgacgcagctacggcagcggtagggtttgcaccggtcggcatggtggatctggccctgataccgcccagggcggcaggcatgggaggcagcgccatggctgtgcaaacagcggtgagccagcttgattctgtcgggaagggatacagcgacctgtcgtcgctgacggagccgcaaactttttcgtttgaaagaatgattcgggggagaaggcatggaggcggagtggagaaagtggtggagaggcggcggcggaggatgatcaagaacagggagtccgccgcgaggtcccgagcgcgcaaacaggcttatacaatggagttagaagccgaagttcagaaactcagagagcagaatcaggaactggagaggaaacaggcagaaattatggaaatgcagaacaacgaggtatcagaaatgttgaaggatccattcggacggaagaaacggctgtgcttgcgaagaacgttgacggccccctggtgacgattgcctagaacagcacatgacttgcacttgctacgtacctgcaggggcgtttgggatctgtagataatttctctcctatagtgtagcgatgaacccatgaacatgaacgtaatctaaatgattgtactgttagctcccttctgccgcttacgtagtactgcagtaccgtagtggtggagtcgaaaactgacatgtaaattatgtacgtagtagagaacaaaatggagtgaagccggtcgcaagagttgtggcttcagtcatcctccagagcttgtgcagagttgcctaggttttgcatcttgctggcacatccagagcttgtgcagagttgtctaggttttgcgaaaaccctagcttggtgtcgcctcaccagcttgccaaatctctaaccctaggtgcagcggaggagatggcccccaagcgctcggctccacctccgccgcctccgcccccggatgcctcctccgagagagaccgcctctggttcgatctccgaggaggatgaggaggaggatgaagaggtggtggtcttatcaccagtggttttgaaatgtagtcagaagcttgcaacactcaaatataatctactacttattgtggtcaacagttgttaatatgtttatcgccttatcggggatagacttgtgaaaccatgctacctcactctggcaaaggactgtaacttagtcctttgcaatggaatgagcaaagaaaagatccaaagaatattgcgtttatggaagcaacttgataggttctgttacatgctaggctgctagctaatccatttgtaccagacatctgtaatcgctccatatttttttgtatttcctagatttgtctagaatcttacatttatcattgcatgaacgttcattttgtgctacatagcattcatttatctttttttttttcccgggatatatatatcaatcaaaatggtcctgggatatccagcgttctaaatcgc

SEQ ID NO: 72371 - DNA, 1796 bp, Zea mays
  Clone ID: MRT4577_166001C.1
gggtacctcgaggccggcatcattcgcgcacgagggtcacggaactctatccactcgtcagcaccaagctagctagtcctcgtgcccttcggacgagaggcgcatgtgactcggtaacagtcttgaggctttgagctctcctcacctcgtatccgtgtctttctggtgctgagctgagtctgagagacaggtaaggaggaggagggaggagatggaattcaagaactgcgggtcgtcgtcgcagccccggccggcggtggtagtgggcgaggaggcggcgttggcgagacagggatcagtctactcgttgacgttcgacgaattccagagcgcgcccggcggggccgccgccatttttcgggcggtggcggcagcatccccaaggatttcggttccatgaacatggacgaactgctccggagcatctggaccgcggaggagacccaggccatggcctccgcttctggacgcaggagcgggtgcggggatgccgcccacgccgctgcagcggcaggggtcgtcgctcacactgccccgcatgctcagcaccaagacggtcgacgaggcgtggagaaatctcgtgcgcgacgaaccgctgcagggggcggacggcggcgggcaccagccgcaccaccgccagtcaacgctcggggagatgactctggaggagttcttggtcagagctggcgcggtcagggagaaccccgctccggctcctccagcgccaccacccatgatcccgccgcggccggtacctgtcgcccctaaaagctccgccttttttgggaatttaccgggtgccgacgccgacaccgccgcagctgcggcagcgctggggtttgcaccggtcggcatgggggatctggcccaaataccgcccagggcagcaggcatgggaggcggcgccatggctgtgcaagcagcggtgaaccagcttgattctggcgggaaggggtacagcgacctgtcgtcgccgacggagccgctcccgttttcgtttgaggggatgattcgagggaggaggcatgggggcggagtagagaaagtggtggagaggcggcagaggaggatgatcaagaacagggagtccgccgccaggtcccgagcgcgcaaacaggcttatactatggagttagaagctgaagttcagaaactcaaggagcagaatcaggaactggagaggaaacaggcagagattatggaaatgcagaagaacgagctaccagaaatgttgaaggatccattcggacggaagaagcgtctgtgcttgcgaagaacattgactgggccttggtgatgactatctgaaacagcagacgagtcgctgcatacctgcagtggtgcctgggatctgtacacaatttgtctcctatagactagcgatggacgtaacgtagtggggatgattgtactgttaccgcttatagtggagtcgggaaactgacacatgtagattatgttagtagagaaccaaatggagtgaagccggccgcgcaagactcggcggcttcggccatcctccagagcttgtgtagagttgcctagctttgcatcttgccagagccagcacgtcgtgtagagattggacggttttaaaagatcggtggctgggtgtaagtaggttggtgggattacaagcatgggcatggcgacgttcaggatgcaaccggcttgacgactgtacgtacatctgatggctgtagagctgtagtatgcaaactgtcccgctgctgcttgtgtgtaacggtgaaaccagatgaatcggttatttgtgtgagaaaaaaaaaaaaaaaaaa

SEQ ID NO: 72372 - DNA, 342 bp, Zea mays
  Clone ID: MRT4577_166002C.1
ggagagcctgatggaatcatttcttgacattggagattgcatgttcaataaaattttactgcgggaacataatacaagcgcggggaatagagaccgtgtaataccaccctgcctcatttgcaggcaggggaagtgtcaaaactgctcacacaaatttttaaatcttggagggccgattttaaataaccccagtgcgtggcaaacaattctttaccgaactttgcggcttggagaatcaccttgacactctcttggataaactcccccattgacctcagaagccaccaactgtgaagtttttaaccgaggtaacagcggccgggccacggaactttatgttcc

SEQ ID NO: 72373 - DNA, 280 bp, Zea mays
  Clone ID: MRT4577_166003C.1
cgagacctcatgataagtttgaactttgatgcctaccgggtctgagtgttatggtccaggatcttgccggttggcgaacggaaagtcaattcacatggtgtgcccaatttcaataatttgatcaactatatggttcagaaaggattgactccttacaataacccttacccactttgatcttcctcttgcacttgaaaagatatacggaagtaggtaaagcccgaagattccggacttgtttacagactatgctgacttctgctttaagacctacggcgat

SEQ ID NO: 72374 - DNA, 601 bp, Zea mays
  Clone ID: MRT4577_166004C.1
ctggccgggaatccttaacccaatctttgacggctgcgtcccgttgtgttccgttgtgtcacgcatttgctgttggagccgctctctgctgcgagaggatctgacgcgtataaggtcatgcaggagacgtaattatcgtctgctgcttcgcgaggaggcggcgagcttttcatcgtatgccctccggccgtacctagactccgaccaaaccaactcattcaccgacctctccctcctgcatgcctctcctcgtcccattcgaaccccacaaagtgcaccatctcatggccgtatacaaacacaccgtagctccactcatctccgaacacctagaacccaccaatcgccaccatgcccctatactcgcgcagactgcagagaaatgagccctggacgcacaagcacagaactcctagcgcctgcatgcctccctgaaggacctgctcatgatcacacgacagtgtaccgcaaagactaacttcagtaaatacgtggtccgcttcaacatccgctagctaaacaccatcatcattgaatccaccctgcgctactagataatgtacaacttcctgaataggctcatcaaccttgggctcccaag

SEQ ID NO: 72375 - DNA, 523 bp, Zea mays
  unsure (1)..(523): unsure at all n locations
  Clone ID: MRT4577_166005C.1
ggccgggctcgagggccggccggttccgcngaaaaaggaaaaaaaaaaaaaacaacttttcaaaagaagaaaaaagaaagagaagaaaaaaagaaaaagataaaaaaaaaaaaaaaaaaactttcagcacgcaccccaatcgcccacaagggttcgcaggagagggggaaacccaagttttgggggggggggggaaaaaaaaggatttacgaggggaactcccccctcttcggttctttcctcagcaaaaaggggggggccgacaagaggaaaaggggggagtttaaaccaaaggaggagaggcccagggttaaggaaaacagcccggggaggaacgaaggaatatctccaaaagtttggttcatggggcaaccaaggccaaggaccgttggctcgggccggtttaaaacaaaggtttccaaaaatcctatatgggggcctaatttcccccttaaagggttatttgctcggtttgaactgggcaacggaaaggaaacttgaagtacctagggtacggccttcg

SEQ ID NO: 72376 - DNA, 1994 bp, Zea mays
  Clone ID: MRT4577_166006C.1
ccacgcgtccgtgccctctatgtggatcggatatttctgatttaagcgaggagctccggcagctgcatactaacaattgccttgacgaaccagctaaggaatctagtcccaaccataaaaaagagcccagtgttggacaaaatgttgaaactggacgtgttgtcgaatggttaagaaaccttgggttatccaagtatgaggaagtttttatcagagaagaagttgactgggaaaccttgcagtggctcactgaagaggacctgttgggtattgggatcagctctcttggaccaagaaagaaaattatccatgctctaggagagttactgaagaaacatgatgatcccagtgaaatggaagctgtgttaaattcaggaaatactaagaagactaaacttccgatgaatggtaataaattaattaccgaatactttcaatgttcctcatttgatcaaagacaaagaagggtatgcaaagcaaacaagccatctaatctgaacgagaagaaaatttctagtgctaaagtacccactagaagaactgctggtaaaggaaagattaaggatacgcctctttggtgttgcatcccagggaccccttttcgagtggatgcatttcgctacttgagaggtgattgttctcactggtttctcacacactttcatgtggatcattatcaaggcttgactagaagcttttgtcatgggaagatatactgttcgtcaattacagcgagtcttgtgcatcataagattggtatcccatgggatagattgcatgtattgaccctaaatgaaaagctcaatattgctggagttaatttgatatgttttgatgccaaccattgcccaggatcaatcattattctctttgagcctccaaatggtaaagctgttttgcacactggagatttccgtttttcttccaagatggccaacaatcctgttttgcagtcttcctgtgtccacactctaatacttgacacaacctattgcaatccacggtatgatttcccaagtcaagaaatcgtaatacagttcgtcattgaggccatccaagcagaagctttcaatccaaaaacattgtttttgattggaagctacacaattggaaaagaaagattgtttatggaggttgctcgtttgcttcagaagaaagtatatgttggagctgcaaagctgcaaatactgaaacatttagagcttcctcaggagattatgcactggtttacagccaatgaagcagaaagtcacatacatgttgtccccatgtggactctagcaagcttcaagcggatgaaatatctatcgaatcaatatgctggccggtatgaccttatagtggcgttttgtcctactggttgggcatttggcaaaggtaggaaaaagacaccaggcaaaaggtggcaacaaggatcaatcattagatatgaagtgccctacagtgaacacagcagtttcacggaactgcagcagtttgtcaagttcatatcaccagagcacataatccctagcgtaaacaacgacggccctgagagtgcaaacgctatgcttgcccagctgttaaacgagtagaggaattcgttcgtcgcttcaatatcttcggcttggctacagttttctcttcgaaaaccatttgatgaaagggatggacgctggacgagctaacttccaaggactaatacagtgatggcggaagcattcctgatggtgccacccagagttctgacgtggaaatccagagatacagggtgcatagatgcgcacgcagacacccgttggcgccgtggaggtgctggttgacaaatcgtcagccaagattctgtactggaatgggtaccggcgatagcgtgtattgccgaaaccatgtgaaccgtgatttgtgactgtcaagccaagcgagtgaacttgcatgtcattatgagcccatttgtacacgaacttgtccagggtttttctagtgatggtgaaaaaacctgccaaaaaagggaagag

SEQ ID NO: 72377 - DNA, 631 bp, Zea mays
  Clone ID: MRT4577_166007C.1
tgtccgggctgccgccgccgccgctcccgctcccagctcgtgttccgcttcttgcagccgtcgccgcgaagcgctccagagaacttccgtaacatggggaagacacgtggtatgggagccgggcgcaagctcaagacccaccgcaggaaccagcggtgggctgacaaggcatacaagaagagccatttgggcaatgagtggaagaaacccttcgctgggtcatcccatgccaagggcattgtcctggagaagatcccaattgcggtctacgaaagcgtgttcgttatcagctagtgaagaatggcacgaatattgctgactgggagccaaatggctgccgttggaactacagagaggagaatgatctagattggagtgatggatgaggtcgtgaggggcacgctgggggagatggtgctggctgccggatatatgtctggagggcttccgaagggcgtctaggtgccctttgcaaggataatatggatattccaggggattagatagctctcgctgccataaatagctagcgctgccaagataagggagggcggtagatgatcaagaagaatggatgctagctataatagcagtggattgctgcgattgctaaccttagatgcagttggtg

SEQ ID NO: 72378 - DNA, 860 bp, Zea mays
  Clone ID: MRT4577_166008C.1
atggctcgcggtccaaagaacatttgaagcgtttaaatgccccaaaagcatggatgttggacaaattgggtggtgtgtttgccccacgtccatcataccggtccacataaattgcgtgaatcattgccacttgtcattttccttcgtaaccgtttgaagtacgctttgacaaaagctgatgtgaccaagattgtcatgcaacgtttgattaaagttgacggtaaagttcgaacagactccaacttcccagctggattcatggacgttattaccattgaaaaaactggcgaacatttccgtttgatctatgacgttaaaggtcgtttcacaattcatcgtatttcagctgaagaagcaaaatacaaattgtgcaaagttcggaaagtacaattgggtgccaagagcgttccattcttggtaacgcatgatggccgtaccatccgttatccagatccaatcattaaggctaacgataccatccaattggacattgccacaactaaaatcaccgaccatattaaattcgaatcaggcaacttgtgcatgattaccggaggtagaaatttgggtcgtgttggtactgttttgaaccgtgaaagacatccaggttcatttgacattgttcatattaaagattcgcaaggccacgtatttgccacacgattgtcaaacgttttcatcattggcaaaggcacaaaggcttacgtatcgttacctaaaggcaaaggtatcaaattgagcattgctgaagaacgtgacaaacgtttagctgcaaagattgcacattaacatttttacttattctttccattaaaaatgaagaacaaagactgaaataacgaaaaactttgtttcttact

SEQ ID NO: 72379 - DNA, 290 bp, Zea mays
  unsure (1)..(290): unsure at all n locations
  Clone ID: MRT4577_166009C.1
tagactatctcaaaaccaatcncaacaacacctgttgcatctaaaattttttgcgtccccaaaacaanaccccaccagccaanaaaaatacattctataatccataaaccatctccaagacacccacaatctaatccttcacttatcaaaaccgaatccacaactacttaatctacagtcttaccgcccccatcttaatccacacctcttcaataatatacaaaccacccccaaacattacagaacccaaaacacaatttaaatttccaaaaatcacaaaacactactct

SEQ ID NO: 72380 - DNA, 440 bp, Zea mays
  Clone ID: MRT4577_16600C.1
caggcacactggtataatcatctattgtatgagcattaggaggcagaagaaaatgacaatgggagctaaaagaaaatatctctggtcccttttctgttggttattgctgtgctagagtattacttgtttggtccttttgcagctcaaggtaagttcaagctttatgtgacgaagcgtttctccttgatcattgctcaaacaagactgtctcgaatatgtgcccgaatatgaagtgtttccgccttttaattggtcagaaaggatgttttgaacacatcatgctgtataagttggatggcctgcaatttttgtattgcatctggcattaatcctcctttcactatgcaataaaatctacttaggtctggaacaattttaactatctggaacttaaaatgcaatatgttgcatcttctttcctttgctgaagctcatgccac

SEQ ID NO: 72381 - DNA, 623 bp, Zea mays
  Clone ID: MRT4577_166010C.1
taccggcgcccctcctcgagtttttttttttttttttttttttttttttttttttttttttttttttttttttttttttgggcaaaggaaaattttgatctttagcatgccccccaaggaacaatcagacccaatccctgaatagggggaaactcacccactatttcctatttatacacaaactacactcctgaaggggagggactattaccttagggattcatattcatgctatactcttacaggaaaaccaaagttttgaaatggtctgatttgacctccacggcctggtgggacaatcactaggccccaggccgaccgattaaaagcttgatctccctcgttggcatggcaggtagtacccctgaaactttgatttgggggggggttaagtttttcaggccaagtcggaaatgtccggccaccattattataattcgaggtgctactcgggatatttgggctccggtactcaacatttggcatttcctgggccttggaaagtttggtttgcaaattttgcgggtaaaacccaccctaaagctttttttgcttcccggggttcattaaacaagtcattgcggtgctggcaaaaggccaggtaacagcaactgtcacacttt

SEQ ID NO: 72382 - DNA, 834 bp, Zea mays
  Clone ID: MRT4577_166011C.1
cattgggtacctcgaggccggccgggctctgtataccccggctcctctgcttctcggttcccgccgttccatgtccgccacaaggtgcccgccacaagggcagaccggcggcagaggttgtaccgatcgctctggcccacgtcgccggccggaccatcaaccaccgcgcggagcatcaagcagctgccattccaaagcccgttgaagcatcgaaggatttccagccgtgagcgtgtgcgcgtgtgcggtggcggcgcggccgggtcgccgggatgggcaagatgaactgcttctccggcctgctcagcggcaagagcaaggcattcaagggtggcaacaagggcgcttacgccaagaaggcggccagtggtggcaacgattgccccaaggtgaagccggtagagttcgtggacatggcggacactgccgtcgacgacttcgtcagcagacgcggcggaggcagcgttcatgcgtccgcatgcagcagtagctttgtcgttcacgcagccaccgagctgccacgccatgccactgccgagaacggtgaagacgaggccgcggttaacaaggactcatcctccgccggcgctggctcgcccggttacagcattggccgcatgtcgccaacggcatcgccgaagctgacgcgctcctgctccaacatggagacggcgaggtctgtccccccgccagggtccgactccgacctgccggcgaggtcacgctcccacaacgacctgctgaagaactgccccccggaaagccgacgaccgcccgcagcggcttgaggccgacggcgtccttcaggtcctcgtgctccgccgaccgcgtcct

SEQ ID NO: 72383 - DNA, 372 bp, Zea mays
  Clone ID: MRT4577_166012C.1
gtaagctcggaattcggctcgtggcttttgagcccccatgttccttggtcggcgcggcaatgactaccacgcggttccctttcagagccgacgcctgcaatacctggctccgcccgccggaggggccgtgctgcaccaccgcacgcccgtcctgctgccttgcgcacacgggactagggtgccgccgccaccgggaccgtgcgcgccgcctgggccgtttttactgccgacagggcccagccggacgccgccggcggagtcgtgtgcacctccgcgcctgagccaacgcccgagcgcaagcctccggcggagctaacggcgcccgagcccaggaggttcgaggtcaggcccggccagctgggcagctgcctc

SEQ ID NO: 72384 - DNA, 1579 bp, Zea mays
  Clone ID: MRT4577_166013C.1
attaactcgaggccggcaaactaccgcagcttatcaagcaagcgctacggagcgcaggtcaccgagctctggcccgcccaagttcactacccgacccgccgcgccgcagtctagaagcttctgccggccgtctgcggcccgcccatccgcaacccatggctgtcgtcgaagaagacgctgcggcgtctgcagatcccgccgccgcgtccgatcccgccgctggctccagcgaaaacgagatcacagtagaagaggcttctttcgtgcattctgaacctccccaggatggcagcgccccacccgtggtttcctctgacatggaggcccttcacgacaaggttaagaagcaaatcatcaaagaaggccatggcaggaaaccgctgaagttcgcgacgtgctttgtgcactatagagcatgggttcaaggatcatcgcataaatttgaggatacctggcaagagcaacatccaattgaactagtacttggaaaagagaaaaaacaaatgtctggtttaggcatcggtgttggcagcatgaaaagcggggagcgtgcattgttgcatgttggttgggagctaggctatggcaaagaaggaagtttttcattcccaaatgtccctccaatggcagaccttgtttatgaagttgaactcattggatttgatgatgttaaagagggtaaatcccgaagtgacatgacagttgaagagaggattgcagctgcagacaggagaaagattgagggcaatgcatatttcaaagaaaagaagcttgaggaggccatgcagcaatatgaaatggcgattgcatacatgggagatgatttcatgtttcaattatttggaaagtacagagacatggccttggctgtgaaaaatccatgccatctcaatatggctgcatgcctgatcaaactaaagagattcgatgaagctattgcgcagtgtagcattgttttgacagaagatgaaagtaatgtcaaagcgctgttcaggcgaggaaaagctaaatctgaacttggccagacagaatcagcgagggaagatttcctcaaagcgaagaagtactccccagaagacaaggagatcattcgggagctccgtttgctcgcggaacaagacaaggcactataccagaagcagaaggagctctacaaaggtctctttgggccaagtcctgaagcgaaaccgaagaaggcaaagtacctcgttgtgttttggcagtgcctggtgtcatttatcctttatctggctgggatgttcaaacggaagaacgagtaggataatttaccagaaaattgtgtagaactggtggcctaattgaccaaccttgtattataaggagtgttgaattttctgtagaactgtcggccggtccggatcaattagttgttatgaactctatacgatgttgttcactattatgccatagtttcatacagtctttcaactggagctcaaagggccttttatgccattgtatattgcagctttcatatttagattatgctagtaataatactgttgctacaaaaaaaaaaaaaaaaaaaaaaaagaaaaaaaaaaaaaaaaaagcggcc

SEQ ID NO: 72385 - DNA, 306 bp, Zea mays
  Clone ID: MRT4577_166014C.1
cccacgcgtccgcccacgcgtccgcccacgcgtccgcgcgggcctccgcggtgacgcctgcggcttcccttccctcgccaaatgctgcgccgcgctgcgcctgccggggctcggccgcgccgtccacgccctcgcatttctcgcgggcgctgccgtctctcgcgacgccttcgtgcgcacctatctcgtcgacatgtacgccaagtgcggcaggcttcccgacgcgcaccgtctgctcgacgaaacgccgtgctcgagccggacgctggtcggcctggaactgcatgatcctggcgtacggacgga

SEQ ID NO: 72386 - DNA, 253 bp, Zea mays
  unsure (1)..(253): unsure at all n locations
  Clone ID: MRT4577_166015C.1
ggggggggggccacaagcaacaacagaccccngcgggcgagccgccnaacaacaaccaaggggcccaagngcaacaacaagnccgngccacagcgaacaanacaaagccagcacaacgcaacaacaacaacagggccgaccagcacggagccaccgaaccanggggaacccngccgcccacnggcaaaagcagccgcccgcacccaacccacgcgcncnggccaacgcagcggcaaaccagcaacaacaacag

SEQ ID NO: 72387 - DNA, 363 bp, Zea mays
  unsure (1)..(363): unsure at all n locations
  Clone ID: MRT4577_166016C.1
ctccacgcgttccgtcccacggtcgacccatgtgtccggcgtcgcaggtagttccctcttccctgggtggtgcccgnatgtcgcggttcctttcggtcgggtgtgacggtcgatcgctgaccccgttgcgacatcgtcggcctttcctcgtgctgctgcctcccgggtggctgttccgtgtctggtgtgcgtacctgtgccagcccggggccgctccaccccggtttgccggtttctccgccgtctgcggcgtgcccttccgccgtctcgccgtgtctctcccgcttggtggcgctcgtttgcctttgttgctgctgtccggtttctctctctgcttgttgtgttctctggggcttcggcttt

SEQ ID NO: 72388 - DNA, 325 bp, Zea mays
  Clone ID: MRT4577_166017C.1
atttatgcccacacattctcaatctcatcttacattttctctccttatagctacaggaaagtcaggtcataaagcttatcctattccaacaactttcattaactatctgcattaacaaagcatgactccttacatcaacctttaccactatgatcaccctcttgcgctagataagaaatatgcacggattgtaacaccataaatcgctgacttgttaacagactatcctgacttctaaactaacacctaccaacaacgctttaagaactcgattacatgaactgagccaacgatagtatctctactcccttattacacatgtcta

SEQ ID NO: 72389 - DNA, 701 bp, Zea mays
  Clone ID: MRT4577_166018C.1
aaaaaaaaaaaaaaaaaaaaaaaaaaaaaaaaaaccgggtattggggtctggaacaaggcccgtcctggcggcggccgccgccgccgccgcttgaaaggcggtttccaacaacgggggggccgcttccgcaacaagaccggcggcttcggggggggccctaaaaaccgggaccgggaccttggcaagggccaccaagcccacctttttgaccctattttgggtggaaactttttgaaccttaaggggtttcctgacccggcccggcaaaatggtggtggcctggacaagggccagaattccaaaaaaatttcgaagaaccttaacattaaaaatggatttattccttggggagaaaaagaaaacccgaaggaaaacccaggggcccttcaagaaggggggggcggattcaatggaggccaaagttccggggggccaccaccaaggccaccttaaggtggcccaaagggtggaaggattttgggaagcaatttggttggcaatggtttggggaaaaattaagggggcaaagggcgggttttaacttattaccctgaaaggcctttggttggtggccttaaaaggttaagcccatttggctttatacccaatcaatccctgggggagaattggggggatcccttgggaattttaagggaaaaaaatttcaatggtggggggaaaaaaaaaaaaaaaagggggc

SEQ ID NO: 72390 - DNA, 279 bp, Zea mays
  Clone ID: MRT4577_166019C.1
atgcggcgctcggtctcctccgaatccgcttcgtcttcctcggcggcggcgggtgcgtcatccttccgcgagtgcggtagcagctgcttctcctgctcggcctccttctcctccacttccgtcggcgctgcacagcggtcgtccgcgcgcgagatctggctgccggaggacaccggaacggacgacgccaaggcgctgcaggagaaggctgccaggaaggcggtgcatgccgcgggaggcgcctgcgccaagggcggcaagaacaccggcaagaagtag

SEQ ID NO: 72391 - DNA, 392 bp, Zea mays
  Clone ID: MRT4577_16601C.1
cggacgcgtgggacaattcaaggctcatttcctaccttacatgcctgccaactaatatgacctactgcactcctgccaaagcttcttgccttcgaaggaggaggaggaagaagatgatgagcagctaagaagaattcggcaacatctacatgaactctccaaaaatggagctttctccatggcttgtgttctccttgggttttcttgcgcaggctctcgtcatcttggctgacacgaatgcacaagatgcttctgggctgaatgggattcaagattcctggaacaagaagccatcaaactggagggtgggcactgacccatgtggagataaatggaacgggataagctgcaccacaagccgggtcacggctataagactctcgagtttcgga

SEQ ID NO: 72392 - DNA, 352 bp, Zea mays
  unsure (1)..(352): unsure at all n locations
  Clone ID: MRT4577_166020C.1
tcngtgggaccatgttttttttacacgtctgtagctgtagggatggtgtgataccaggtacgtgcgttgttaggtgatgctgttagcacgtaggttccaaacctatgagaccttgggctctgctctgctgtgaggtgagagggtttatgtcgaactcgtagttgtgttataagaatcctactgtgatggacttaactgttctgcagctgtgagatcttttgaactcatcatcctgagcatgggtaacctgttaggatttaaaaaaaaaaaaaaaaaaaaaaaaaaaaaaaaaaaaaaaaaaaaaaaaaaaaaagagaaaaganntaaaaggaagaaaggttgaggggggggg

SEQ ID NO: 72393 - DNA, 347 bp, Zea mays
  Clone ID: MRT4577_166021C.1
ttttttttttttttttttttttttttttttttttttatttttttttttttttttttttttttatttaattttttttttttattttatataatataattattatttgaatttaatggaagttgatttagaaactcataataacatataataaaaagaacacacaaaagattaattagagataatggttaacctgatgtaaaaaaacaggccaaaaacaagagctcaaaatagaaaacataatgtaaaaagaaaaaaggacgccaaagcatgtagggataagaatgaactaagctgaaatcttttcagaatctatcttgcttgtgatctaggattggtaatggatgaac

SEQ ID NO: 72394 - DNA, 333 bp, Zea mays
  Clone ID: MRT4577_166022C.1
actaggtcaagatcgcgagcggatgccctttcttttttttatttctgattgatgcaataaaattttaataattgtaggcctgagcgacacgtcaagacaagtttggagacctggacatagaatgcattttgagagacgagttcacacgtttaaggacgtccgaatgatcaacaaacctgacaatctcagataggccactggaatcggtgtaaatcctttgaactaagccctcgtatgtagctgtcgtgtatccacacgagctcaccatgagcaagctatacaacatgcaacatcacgtttaccaaacaatacttcacgaaactagttgttgca

SEQ ID NO: 72395 - DNA, 544 bp, Zea mays
  unsure (1)..(544): unsure at all n locations
  Clone ID: MRT4577_166023C.1
gcaattgactcgcgcacgctctctcagtcccagactccagtctcaaagcccccttctctccctgctgcaccgtgtcccagcgagctcgtcagccgcagtaccttgctccgcctccgaccccggcgcgagcgggaatctacacccacgtgctcgcggccgtccatgagctggccgccgagcagcggctggggccagcggcgacggaacgtgtccgccgcggcgctgctcttcctccacctgctgctgctcttctccgcccccgggacgtgcacgccggcgagaggggtggcgccgccgccgacgacggagcaggacgggtactcctggtcctggtgggacccggcggcgacggcggcgcgcagggggctggtggggccggggtcgtcgccgcccacgtgccgcagccgctgcgggggctggcacccctgccgccccgtnccgtccgcatccagnccggccggagcttcccgctcgtatacctacccggagggctggcgctgcaagagcgggaacaagctctttatgcccctgaccggtccaacgg

SEQ ID NO: 72396 - DNA, 290 bp, Zea mays
  unsure (1)..(290): unsure at all n locations
  Clone ID: MRT4577_166024C.1
ggccangaccacgggcacggccaaggacacagccanggacanccacangaccanggncanggngaaacagacgaaggccanncncaccangaagaaccagaacagggccangnncaacaacangagcanagccanggaagnncnaanaacngncacaacacancaccaccaccacncaggcacnggacaacaccangacgcngaggagccacngancaagcacgaggccgacngngagggcacccaancngcngcnaagaagccncgacgcaaaaaaaacgnacacagcg

SEQ ID NO: 72397 - DNA, 347 bp, Zea mays
  Clone ID: MRT4577_166025C.1
gggttgctttggagacatccttctttatacaagccttgggatgcttggtatacaaccaaacatattcaagtctcgaaaaattcactgttcatgaaaacacactgatgccgaccacttcacattttggttgaggttgccatatggcaccaactttaagtttgtgcttaatttccagctactgaacaggccttcaggatgataatcaattttcgatggacgaccatgcacattgtgactggattctattttttcaattgccctactaaacatgaatggtgcctaccagttcaactgacctactccacagtatttctaccagacgcctagtcgaccttgtaacaggacct

SEQ ID NO: 72398 - DNA, 342 bp, Zea mays
  Clone ID: MRT4577_166026C.1
atgcttcttcgtatttttctgtattttttttttttttttagcccaacacaacaagatatattgcaccctataatgagtgagctatatccgaaagacactcaagattaagttcaagtcccatcctggctcaaaggagttgataagtaacataaaatttctagcgcattatgattgatggccaaaactcgagccataaggattcataagggcgaggaccaccatgtgatccccgggaagtacctagtccatctggtcaaaagaccccccatttaccgccgtccctccatcatccacgttgacctgatcagcacgaaaattgcccttagccttatcgggaacgcg

SEQ ID NO: 72399 - DNA, 393 bp, Zea mays
  Clone ID: MRT4577_166027C.1
cggacgcgtgggcaggccaccgggtcgctggtgcacgacgccgccgtcccgctgcggagctgaccggccgggacaggacgggacagaacggaagcctacgatcgagtgtacatacaagggttgggacttgttgggttttcctttgggtggagagcgagggagcgcagttgagacccagcgagcactctctcgagcactgcagtgtagctccggcgtacatgagattgtattatgaccaagccgggatggaaagcacggaggggaggataaacaagttttgtcacatttcacgctccagccatcacctgagtttgtccggcgaatatatcgatttcctattacaaatccggataaaatgatgtgttcctgcactgcctgattacgtaacgcact

SEQ ID NO: 72400 - DNA, 362 bp, Zea mays
  Clone ID: MRT4577_166028C.1
aaaaaaaatcccacggggaccggggtttaaaataaaaaaaaataaacttggggccggggcccttccccccaaaaggggcccaaaaatccccccgggattttcctgggccccccaaaacaaactttagggttggggaaaataagggggggggtttgcccacccccccccttcgccagccccccagaaaaaggcctgtccggaatcccccccaaaatttttttaaagggaaatattgcgaatttttgaccgaccccgttccggggctaaggccaaaaatagcccccatagaaaggggcaaagaaaacaagggcccccacaagggccaaaagaatttgcccttttttgaacccatacccacgggg

SEQ ID NO: 72401 - DNA, 564 bp, Zea mays
  Clone ID: MRT4577_166029C.1
cccacacctcccgagctaaccttacctctactctagcttcaattacagttgcaatcacagcgagagctagctagagggccgtgtaaaatgcccatcaatatgatcgtccttaggagccacctggaggtgtaccacccgggcgccctcaagggggcgttcgctgagttcatctctacacctcatgttcgtcttcatctgccagtgctccggcctgggcttcagcatgctctccagcagggtgcccacgaccccggcggccatcatcgcgggcgtggtggcgcacgcgttcgcgctctccttggcgctgttcgtgggcgcgaacatgtgcgccagcctcttcaacccggacgtgaacttcggcgccttcttgggcggctacatcaccctgttcctgaggctcctgtactgggtggtgcacttgctggggtacaccgtggcgtgcttcctgctccgcttcttgatgggcttgtaggccaccggcaccttcaggctgaccttcgtgttgacgtgcgaggcgctggtgctggagatcgtgctgaccttcgggctgatcttcacggtgta

SEQ ID NO: 72402 - DNA, 551 bp, Zea mays
  Clone ID: MRT4577_16602C.1
gctacttgaacctttataccaacctggtacacaatggggaatggaatagtgaatggagatggggttggtgatgaaccgtgcaatgaaactaccggtgagggtacatgaaccaggcgcatagaacgagacgctgactgtgggcttacatttcatgattactgacgtggtatacaaacgaggagatgcatgagggcattcaagaccgtgatgaatctgttatggatattatgagggatatcatgtgggctactatcggtgatactctgggttttatgttggattcatactcatgtttcaaacacttctttcatgacttatgcgctcgcacaatggctgaccacattgaccctgaatatgacccagctatggagactgctatcgagactgatactgagtggaatcttgcgcaaaacctactacagaagattcttaaaaaggtcctaagaatggttcacctattactaaaactatcgactgtgccagtgactgtaacagtttctataactctttcgatcctgcagatgatcatgacattgatgatgacactgatg

SEQ ID NO: 72403 - DNA, 1648 bp, Zea mays
  Clone ID: MRT4577_166030C.1
ctctcgatcttatctggacctcccgccccgccccgcccctcaccgccgtccgccgccgcgcgccgccaccgcctgcctcgccgccacggctacccctaccccaagtgccaacacacccgcgaccatccactactggcgacccgcggccttcgggactcctccccgctgcttcgactacgacctgacagccccgcagcggtctagcccatactccgcatgcaaacaacctctcggcctcatcaggcccgctgccctccgcctccgcctccgccgatcccctccgctgaatcgaatagaagaatcgagcgccgctactggcgaggggctagcggtcggcgcacagcgcggtatggcgagcggcagcagcaacggggagccaagcacggcaccgcaggcgaaccggtggtacgacctccggctgggctcttcctgccgtgacccctcccccaccgccaagttctgcaccctccgttatgaatttaagccagcatcaattgacaagacacaagctgggtctctgcaaagcaccaaagataaccgggttactgtggaattccataataatcagcctggcaagccaaaggtgacatttgagggaagccaagaagagtacaaggataatgatggtgtcttattttttgatggtgagacctttcgcttagagaggttgcatagggctgtcaagaggttaaggcatgtccgagttccaggagagtctgcagcacttaatttggctggtacaactactggagtgggtgcagaatcacagtctcctccattacctaaagtcagcaagtcacagaccatgaacaaacctgctgttcactcagttccagttgaggttgagcgtattgacattggtgaaccagaaaatccaggcccaaaatacaacaacaggagtacatatcaatctgttaccgtagacccatttgccctttcacctgatccaaatgagcaagagaaccttgacatacttggtgacgatgatggcaatgcttcaccaaacaacttggctgcaggacaagaggcatctgttcgtggttttgacatcaacttaccaaatcaggacgatatggatgatgaaattgctgatgtagatgtaaatgatgaggcagatgaggggctcaatgcagccgatgcgctgcgagctcaagtgaacgcagaggggcagcaggggcaggacagctcaagctctagtggaaccagcagtagcagcagcagcggaagtgggagcggcagtggaagtgggagcagcagcagtgacagcgatggtagtgatgctgattcagcaagctccggaggtgatgttgatatatgagcttgataatgcaagcttttgttttgacagatgccttgcttcacaatttttggttcacaagggaggtgtagggtatgtatatgttcagctaatattgttccggtcagtgagtgcattaaatttccgcaattcatggcgggcttggtctgttttatgtttgttaaaacctgggctggaagaatagaatctgtaaacatatctgtacaactgtctatgtgttcatgtggcattgctgttaccttggatgatggatgttacaacattgttcagttgaaatgacaaaaggtataaagagtagtgcaagcaggccttaatgcaaaagagaagagg

SEQ ID NO: 72404 - DNA, 613 bp, Zea mays
  Clone ID: MRT4577_166031C.1
ttcgagttttttttttttttttttttttttttttttttttttttttttttttttttttttttttttttttttttttttttttttttttaaaagaaacaaaatgggggaaacaaaggggggggttttgggttttgcatacaagggaaaactttccttttacttttacgttaaaaaaaaggggggggccttgggggatctacatcctgggttccttttgattgccccaaaaaatgggcctttcctaccccttagttgcccccatttttagcataaacgggggaaaagggaccctatttcccccctgttttggggggcttaaaaatttggccacccctcctcaaagtttaagcttaaaacccccttttgttggaaaaaagttttttccctcggggttgcaaaaagctccagttgaagttttttgacaaaatccaggcctaactaaacacatccctggaaagtcatggtttgcccgattttaaggaaagcccagtttttccccccttggcccaaaaacctgcttggaaaaacagagggatcattttttcgactgaaaccaagggaaagcttcttgttgttttttcaaagcacaaaaaaaaaaactgggggttttttt

SEQ ID NO: 72405 - DNA, 164 bp, Zea mays
  Clone ID: MRT4577_166032C.1
ttacccaggccacttatcactccaaaaaccactcacgtacatgattgtagtattctaacacaccatctacattgatcatacatactcatttttaaaaactactgttacaatccactcctctgatgacatgaatattcaccatcattactaaaacattccttacc

SEQ ID NO: 72406 - DNA, 596 bp, Zea mays
  Clone ID: MRT4577_166033C.1
tgaagttgccatgcagcagtctgcaacggaacatgcaaaagggacgattgatatggatctaatcatgacggggatatctgcaagtgaaaggcagagacggaacgaccttgttgctgcaacccgtaaccttatcgtggagaaaatgcagctcggagggccttcaatgcatatgattgagttgctggaagaactcaggaagcagagctcaatggaaatccatctgcacgaactccgcggtgctcttggcactctgatgactgaaggtgcggttgttatccatggagaaaacgtgaagagagtttgatgttaactgccatctgcggtgatgcttctgtaagctcagtctgccgtttccttcaacagtcaaggttgcgaagatctgaacaactgtagggttttagctgccagagtgctaactaatgtggtctgagatttgttccagattgtgtaactccctaacagcggtgttgctagctgtagatttttttaatgaaatatcaaaaaattagttcacgaattgtaaatggtaattatgattggaattaaaaaaattatttaacattatgtgttaaaaaaaaaaaaaaaaaaaccaaacc

SEQ ID NO: 72407 - DNA, 533 bp, Zea mays
  Clone ID: MRT4577_166034C.1
cttcccccaccgccaccgccaccggccgctcggcctggccccggtcgggttgcattgcataccaggtgatcgagcactatcgtcttaggacggacgagagggcgaacaagaatgattattatttagttctaccgcctgaacgattatttaggcagcttgtttgctaagagctttcttgtgataccgtgtccagaagtttatccatatggttattcaaaacactgttttgtacagagtggagtttgaatctgggaataaagatgagtaagatgatagagatcccaaaatcccaacccgtttaatcctatccaaaacaccgtatttaaaaaatctaggctgagcccaataatcaaacagcccagtaccacacttgatggttggcccaccttgcagcccaatctaccctttcacctttgcgtgttgcgtgcctaccccacgtgacgaggcccacgcccgcaccactgagactgcatggtcgtattgttgcttggacggcggctaggaacacaccatatatggtgcggggcatttat

SEQ ID NO: 72408 - DNA, 382 bp, Zea mays
  unsure (1)..(382): unsure at all n locations
  Clone ID: MRT4577_166035C.1
aattcgcactgtaacggtatattcgcgacgaanacccagggacgggaaaaagaacgaaacccaacctggtcgaccctgcgtccaacctaaacaaaccactgtaacacccctaacacaaccaaccaaggagaatcttgaaatttggccaaaataccaaaactcctcttggaccttttaaaaacaaatcccaaacccggtttaaagggggaataaaaagggcaggggggggcccccaaaactcctagcaattaaaacaccacccttgaccgttgtaaagccacaacgacgctaatcctccagctcgacagagctgccccgtttctcgggagcttttaatgacgaagatcccccacctcattgccgctcttgatcttgagccacc

SEQ ID NO: 72409 - DNA, 685 bp, Zea mays
  unsure (1)..(685): unsure at all n locations
  Clone ID: MRT4577_166036C.1
cgggagaagaaccatgtctcctgggcgtgcagttctggtcatttgcatgttcctcttggcctcgtcctctcatctgcaagctgctagggtggctgcgacgacgaccagcagcaatgtccttggtgttatnnnnnnnnnnnnnnnnnnnnnnnnnnnnnnnnnnnnnnnnnnnnnnnnnnnnnnnnnnnnnnnnnnnnnnnnnnnnnnnnnnnnnnnnnnnnnnnnnnnnnnnnnnnnnnnnnnnnnnnnnnnnnnnnnnnnnnnnnnnnngngnnnnngngngngatggcaagaagggccccgtttctatttctgctagcagtagcactactggaagagctagcccgtgcttgcacgaagcacgtctaccggcggcattgtcgtcgccaccggccgccagtgaaccagctgacatcgtcgccagcagcggtggacgcggtcgagccctatggtcgaccccaagcgacggcgttggccattaggcggccatgtgtttactcaaagctggaaatcgatctctctagctagatagtatatactcgtagtaatcttcgtcacatgattccataataatcttcgtcattacgtgttgctcgctactcatttcctagggagctagtgctcaagaaaatcgcgctgttagtttgctttcttatgaaccttaatatgtatagagatttccgcc

SEQ ID NO: 72410 - DNA, 191 bp, Zea mays
  Clone ID: MRT4577_166037C.1
gcgccactcacctgcttaccgattcgctgcagagagcctccttcgcgcgtacaacgggtgatagacagtgatgccggatggacaaggcctggggtgggagcacgcggagctcggcgaggctaagtatgaccagaaggagagcctgatggacaaggcgaaggggttcgctgtggaaaagacgcgcacctccc

SEQ ID NO: 72411 - DNA, 243 bp, Zea mays
  Clone ID: MRT4577_166038C.1
gatatttttctaatccaatctatttgtttttttttaggatacattcgccgttatgagggcaccattatttttgtacatcaacatccgtaagaaaaaagatggggccggcaatgatggtttgcctacctcaacacaacaggtttttttatggggaaccggttagtatggaaacacttgtgtagaggtgaacgaaggcaacaaccagggggttatccactggcccttgaattaaataacctcctt

SEQ ID NO: 72412 - DNA, 228 bp, Zea mays
  unsure (1)..(228): unsure at all n locations
  Clone ID: MRT4577_166039C.1
gacaggcagatggacctctacaagaacacagtgccacgtgttttgagggggccttctgnnnnctaatggaggtgacaaatgaccctgaggcatgatggacatatgtcggagcctgatacaaagccaaaatgtccggctaccgacccgcagacgcgacggcaacggccgtctactccaaggccctaggcataatggcgaacgttgcaaggaacctagtcaacttaagcc

SEQ ID NO: 72413 - DNA, 247 bp, Zea mays
  Clone ID: MRT4577_16603C.1
cctcgaggcggcgggacacgttctaaaacgcgcgcatggcgccgcctttcccgtcgcctgagtgtactcggcccctgatccaaggccgaccgccagcgcgcccgtgaccatacccgcgccgagcccgtgtgaccacgcataccaccaccacctgatacaacgacgatacaccccgcggggccgcgcgcgccaaccggagcggaaccgccgcggagaggcgatggacggtgctgcagaggaaaagctg

SEQ ID NO: 72414 - DNA, 164 bp, Zea mays
  unsure (1)..(164): unsure at all n locations
  Clone ID: MRT4577_166040C.1
cgaccctgtgggatcctgggggcccctctttacaacacccccttcggctagatatctgctcctctgatcgcatgaaacagggctgctatatcacctcatggatgctacctcgcatgaacatataggctcttcatctaatttgagctttttnaaaaaaaatataa

SEQ ID NO: 72415 - DNA, 339 bp, Zea mays
  Clone ID: MRT4577_166041C.1
aaacccaacggggcccctaacgggctttaaaaaaaacaaaaaaatggggaaaaggccctttttgggggccttccagggggttaaggtaagggaaattttacggagggggcgcgatgggtaaaaaaatgggggggcaaaaaaaaaaaggggctcccaggtcctaacaacttggggaaaaaataaccggtgaaaaaggggtttgtaaaatttaggacctggccttaaaacaaaaaaaactgggatggaaaaaaaaaaaaaaaaaactgaaagctttaaaaccaaaaccaaaccgggcctttttttttttccctacaaaaaaacgggaaacgggtttttggg

SEQ ID NO: 72416 - DNA, 217 bp, Zea mays
  Clone ID: MRT4577_166042C.1
acggcgaagaacgagagcaggaacagcaaccccgggatcatacgggcaatccgtacaggagcatggtggagaggcgcatcggtcttggattccgtcgctcaaaagatgattgactgaaagggcggcgggggacagttggccagggtccagcccagtagaccaggagacaaggcccgtactcaagaacgggtcaggcgttcggcaactgaagatagac

SEQ ID NO: 72417 - DNA, 395 bp, Zea mays
  Clone ID: MRT4577_166043C.1
gttgaatccaggtgttgattcgggctgtatgtacattgtctttcaaggagatgccattttgggttatcctggaggggcaccaaatcgtgggaccacgcgtgatctgataacaggtccaaggtggctgagcaagtgatctactgtacaacgtgaaggggcctagtatagccgcgccgttagtacgacctttcttttgtggacagtcgcatactaggacctcgaccagttactttgtgagagtacgtgggcaacgagggacttctcctttgttgagagtcggagaaagaggggctacgccgttaggagcgaacatgtagcgattcgatgggttcggtgatggacagagcacggcatgggagaggaccaagttcttgtgtgccctaaactgggcactg

SEQ ID NO: 72418 - DNA, 1616 bp, Zea mays
  Clone ID: MRT4577_166044C.1
aaggggacctcgaggcgggccggggcaccgagtggttctgcccgtcctcccctcgcgcaatcccaggaatcatcgccctgtgcgtcatgctcaagccgcctcgccatcatcgcccctcgcgcaccttccttcggcaaccttccatttgcgcaatcacaggaatcatccatcgcgccgcgttcgtgctccccctcacgcaatcctggaaacactccatcactgcactcgcctcctgaaatcggccgccacgacgccgcacgccacggctcctgccccggcccacctccctacagcagctgcagctccctctggcctccggtggtctggcacgccgcctcctcgcctagatccgtccgtggtctgcccctccggcctcgtccagctccaaagctccctcctgctcgcgagcacgcagcctcgccctgggggccaggccctaggccgccgtctccggcatccgcatcgatccagagattagggttccccactcgccgccgatgcaccgaccggagccgccgcagacccacctcgtcctaacgagtcgtaccccttctcctcctcgtgcggcgaccagtcgtcctcttctcaccctcctctcctgcccgtcagccatcgtcctcttcttctcccttgcacggcgaccgggattcctgccccttcccctctccctagcttgccccgtaccaatcggatccaatgccatctgccgccatgtcaaagcgaggtaagcagcctcttttaccaactggattcggccatttctcgtcgctcgatctggctataaatctcgcctgctcgtgcatgtgacatagttcggctgcttcaaggtgctcggaaaggggatgctgttgtccaaccccatcattgttagggccaagctcatctccaagatcatcgagaagaggatcaatgttactggaggcactgtcttgctgaccgccacatagtaatctgagatgcagatgctgtcgacggatatgcatagaagagaacatatatgcataaaagggagtaaaactaagatttggatattttcatccggacacagagtaaagaattctccactctcttgacttgacgaggctatataaccagaggccatcagaggagaactgaagactgagagcattctctgcttataatctttattcctctatattctaaattatttttttcaatccccttccacctggattcgattcgaatcccacaccaccacgtggtgttcttcctatatcgaataaacgttgtttcgcttgtctaatgatcgatagggcactgaaagagtcattcctagagactctacggaaggacacaacggagatggagcagcctgcttgagaagaggcggcggaggagaaggaagcgctcaacctagactcgtggtcgtcgaccagcatgcgccttgacgtcctcttttttgattcatttatttgattttttgaacaaaattgcccttgtctttgtccttcctcccttttttcattttcttaatgccctcatgtaaaatataaggcatgtgttgttcaaatctttcttttaaaactacatgtatttcgtgtgttctatgatgatatatacaaaaactggtcttcttgatatgcgaaaaaaaaaaa

SEQ ID NO: 72419 - DNA, 832 bp, Zea mays
  Clone ID: MRT4577_166045C.1
actcctatgggcgaatgggaccctcgaggccggccgggatcctcgtctgtcagccatcgatgcccactccccgctcctcttgagtcaccgccaccgacgcgaggagctgatgcgtcgcctcctctgtcgtcgactgctcctcccctcgccccttcacttcaccagggcattgtccttttcctggtgtatggttggaaacgacaaaatcaattgatttcagtcttcatcactaatccaagatgcagatgctgccgacagatatgcgtagaagagaacagatatgcatagaagggagtaaaactaagatttggatattttcatccgaacacagagtaaagaattctccactctcttgacttgacgaggctatataactagaggccatcagaggagaactgaagactgagagcattctctgcttataatctttattcctctatattctaaactattttttcaatccccttccacctggattcgattcgaatcccacaccgcgtggtgttcttcctctatcgaataaacgttgtttcgcttgtctgatcatcggatcgatagggcactgaaagagtcattcctaaagactctacggaaggacacaacggagatggagcagcctgcttgagaagaggcagcagaggagaaggaagcgctcaacccgaactcgtggccatcgaccaacatgagccttgtcgtcctcttgtttgatttatttatctgatgtttttaaaaaaaattgcccttgtctatgtccttcctcccttttttcattttcataattccctcatgtaaaatataaggcatgtgttaaaaaaaaaaaaaaaaagcggcc

SEQ ID NO: 72420 - DNA, 174 bp, Zea mays
  Clone ID: MRT4577_166046C.1
ttatcgccgaatgtcggattgagaaaagggtgcggtcatctccttacctccatgccccaccagaagaatctgaccaactctatgcgacacataaaaagacagaacctcgtcctaaaatatctcgatctcgagagcggacactcgtttacctgcgccaacaatgtgctcgagtag

SEQ ID NO: 72421 - DNA, 381 bp, Zea mays
  Clone ID: MRT4577_166047C.1
ggcaactatagcctaccagattccaattctcgcatgcatggaaatgcggtcaggggccaaagccaatatgaatcgtactagccactatctaatagattatatatcctgtgagatgggctgctttatatccagtatcaaaaacatactgatacttgcaaagcatcacttcatttaagaagctacgtagttcctaaagaataattcatttcaagatcacccgacgacactagccacatttcttgatgtttgatgagatcggacatatatattacacattgcccgatctatatagtaatttcaaatatccaggcagtgagtctgctttaaaacgcacaagcatctaaaatgatgccatacatgtctgtatgtatacatctataa

SEQ ID NO: 72422 - DNA, 226 bp, Zea mays
  unsure (1)..(226): unsure at all n locations
  Clone ID: MRT4577_166048C.1
gccccactcaggctgcaacagggggggctgtccggggttgtcgccggggccggangcagcgcccagcagcagctcgctgcatgaatgaaagaaacctaagcccatcgatcgacgactcatccggtggcttgggcgcaggagttgtaagccggtgcaaatttttccaaattattagatgttttgtcttttctagattataaagctttcgatatatacacacatctat

SEQ ID NO: 72423 - DNA, 108 bp, Zea mays
  Clone ID: MRT4577_166049C.1
gacaagctcaggcattttctgttcgagcgatgactagtactggatctatcatgtatgaaacgagcggcggagtaaattctaaaataatattgaaaacacccccagaag

SEQ ID NO: 72424 - DNA, 444 bp, Zea mays
  Clone ID: MRT4577_16604C.1
tctcgctctcgcggctctcggcggatcggcgttcagtgaaagctaaaagcctaaaaccctagttcgaacctctactagccggcgacagcggcggtggagcgcgggatacccggagatgccagcgccgtctgcggttgcgtcggccgtagagaggctacaggcagcggcgcaggacgccgccaagtcctcgtcgcgctcggccggcgccttctccgagcaggcgcagcaggccctcgtgtccaggaccgccggggttcacactcaagaaaaggctgcgcagatgggctgctagactgctgaagagaattaaggacgacgactattgactaatgcgatcttttcctcattgtctttggagtttgttcagaaatcagaactatggctactacgtacctcagcatcttgtgtagccaactgtttttgtgccttcacatatttgctatg

SEQ ID NO: 72425 - DNA, 164 bp, Zea mays
  Clone ID: MRT4577_166050C.1
ctcaacccaggccacccaagggccggtcaccctgttacttatgacgaaacaaacaccaccctacaagcgacaaatatacatggaacccacacattccattgacacgaatttgacaaattcttgcatcaccttaaaaacctgagaactgacgacaatctacctaa

SEQ ID NO: 72426 - DNA, 654 bp, Zea mays
  Clone ID: MRT4577_166051C.1
gacggcgaggcctaacctcatcaggtttcagcgagaccaggggagcatccgtagctttgcctttgccagactcagccatgccagaagggcaaacctggtccaccttactctaagtttagtatgtatcttattttcctagtgatgtttcaattatggtatataggaaaacatttttagggacatctggaaggaaaatgaaatctacattatttctgcattaacatacatgagcttgtacaggatacctgttcgctcaagttggcatatccacatatgtgataaataaatgaacttgtgatacacatgcaccatatttttagttctagacatcatagtgttacatgtcatgcgtgtttttgatccttattatgcagttatgcatgatgcacatcctttaattagtatattaacaaatacttcttttccttgtagatgcaaaatcacgtgtggaggacatttggaagaaaatgaacagtggttttcctaataagatgcccaaacctgcaatgacaaagctcagtacaacagaaaaacaaaagaaaaataaaccaacaaatgtgagtaatagttgtttatgaacttagcagcatttaggtcgccttgtgaaatatctgctgattggattttttacagttctctttaccttttgggata

SEQ ID NO: 72427 - DNA, 270 bp, Zea mays
  Clone ID: MRT4577_166052C.1
ccttggtttttgtgcttgtgacaagggtgctgtcatttaccaacaacatggtaaaggggcactgcaacagctgttacataggggcaaagcccatgccgaacgcacatcctgccgacaaaacagggaagtgaagtcatttctatggacaggaacctaggaagggttcaaaggatccaggtcaatggcagtctcagaagggaacctgtccacagagggtatggatcacagcccagagggcctatactgctgctgatctgtggaacctggcct

SEQ ID NO: 72428 - DNA, 298 bp, Zea mays
  unsure (1)..(298): unsure at all n locations
  Clone ID: MRT4577_166053C.1
antctgttgcancaattcttgttgcaggtgtgtaggtgccttggccccagcgagcgggctagatgaaagcagttgttgctgttgtcggtaggcggcagggttctccctggcttgcttggcttgcgctggcngaaactgttgcagttgttggtgctggtttgccnctncgtttgctngagcnngtgggttggctgcctgtngctgctgttgcctgttggcgaccgggttcgccctggctgggtggctctctgctggtggggtctgttgttgctcttgcgttgcgttggtttgtctggtt

SEQ ID NO: 72429 - DNA, 368 bp, Zea mays
  Clone ID: MRT4577_166054C.1
cccacgcgtccgggctcaccccatcatcagcacgcgaaaatctcccgatcccagctagtcttcgccgagaagatgttcgctcaccgtaagggcgtgaagggcctgggcaagggcggaccgaaccgccaccggaaggcgctccgctacaacatcgagcggatcacgaagccggcgatccagctgctggcgcgcaggggctgcgtcaaccgcatctccgggctcatctacgacgagacccgcggcgtactcaagatcttcctggagaacgtgatccgcgacgccggcacctacaccgagcacgcgcgccgcaagaccgtcacagacatggacgtcgactacgcgctcaagcgtccaggccgcaccctcta

SEQ ID NO: 72430 - DNA, 505 bp, Zea mays
  Clone ID: MRT4577_166055C.1
gcttggaacctttgggctgatttatgtgcttggcatggctcgccggaacggaccaggcgcggtcagccccggcccggcgtacttctgcacgcgtccccgtaggaagacccctgcagggggcgcagtccgggagataatcgaagaaatacctataaagtacccctagaagcacggagtcacaatcgacctcgcgactacgaaggataagtacatcaggacgttctgtggacccggacccgccataccccttgacttactcgcgtccgatagggcctcagaggacgaatacgctacagacggaagaatagccgaagctaaaaggatcgccttaaaagaggaaacgctactgaaagatggcttcaagataaaaaagactcccgcgggcggcaccttattactctccattgaagacaaaccaaaggagtatcctctactgcacgggaaggcggccgagtactagaccacgtccgattacagtatcggatgtctatgcggtcccggaccc

SEQ ID NO: 72431 - DNA, 340 bp, Zea mays
  Clone ID: MRT4577_166056C.1
aaaggaggcaggcaagtttacaaaaacaacgttccaactgggttttgttacggggacaaccatagagggaacgggggtttcaaaaaaaactccccaaaaaatcctttacagtttacacgattaaacacatgcggaaacatggatccccttgggtggaaaagaaggaacattttccagcatagcctggccaaaatgggggggaaaacagcctttaccaccattaaccggaggaacatgggcataatttggggatcttgattctgcccacaagggtacaccttttggggagcacgttttaattttaatttgggggaacacaggggaattcatgatgttccaa

SEQ ID NO: 72432 - DNA, 604 bp, Zea mays
  Clone ID: MRT4577_166057C.1
atggcacgattacaaagaccgactagcaccatagaacgcgcggtcgtgcaccaacggtggctgccaagacattcacgctccttatgctcctctgtcctttctgctgcagctgataccgacccatatgccgccatggcgcacaggctacgatcggtgcctttcttaccgcatacgtgtcaccaggcggcggcttcagtatggcgaaaacccaattgcttaaccctacaggatccaacaggccggcgaagaaggcatcatacctttatcaccctcgtgcgtccaacaaccgacagccctattacagcaggaaccgcttgttgcattgagcagacgcataacatcaaggcacagcaactacaacaacttgggctaggaaaccttgctgcctactctgaccacgagccatgccttacattgaaccaactgggtgcgttgaactctgctgctcatatgcaacaacaactaccagtcagtcagctagctgttggctaccgccagaagacacttacattcaaccaactggcaacattgaactctgttgcttattcacagcagcaacgactaccaccattcagccagctagctgatgtgagccctatcggct

SEQ ID NO: 72433 - DNA, 191 bp, Zea mays
  unsure (1)..(191): unsure at all n locations
  Clone ID: MRT4577_166058C.1
gacgacgcctttttccactactaagccgcacgccacatgcccacagntcgtcccaacatgtgctctcccagtagtgttgtatatgcttcgcgcaatgaagaaagactagcgactggctgtacgcctcacatgcaagcgccgagaatagggtactctgtcaaggtataacggcaaagccatcttgtcccatc

SEQ ID NO: 72434 - DNA, 753 bp, Zea mays
  unsure (1)..(753): unsure at all n locations
  Clone ID: MRT4577_166059C.1
aattcggcacgaggcgccgctaggcagctccatgcccctggccgccgcccaccccacccccttccttcccatggagcatgccaccgctggcgcgagagcaagtgccgccctgcaagccgccgccgccttgaccgcagtcgtccacatccccgtcgccgacctgcacgtcgccgcaggctcgagcgtgggtctgcctgctaccgccggcaccgccttgggcgcgggcggccttgtccttgccctcctccctggtgctttctcctccgcgtcccgcgccactgtcactgcccctgctcgcagcgagctcactggggatggggccctcttcatcaccggtcttcggcccctcaccgaagctccccttgccgacaccgtccacactggcaccagcgccctcgctgctgcgctgagtcacctcctttagcacgcccgacgttcccctcctggcttcaccacccaccgacatcccctcaccgaacccgcgtgggtcaacctcgtcgcgtcctcgtcggcttctccgcccgcttccttcgcctgggttgtagccctcgccaccatccnaggctgtcttggccgcctctcaggagcgcgagcgtgttgcgtcctggcctgggagcacgagcgcgctgtgggcgctgccttgacctctcagatggccactgctcagcgtctcctcctcggtcacgacgctacgcccgacccgatgtccactgagcctnctcacgcctctaggctcgacactaacaccatcat

SEQ ID NO: 72435 - DNA, 362 bp, Zea mays
  Clone ID: MRT4577_16605C.1
tcgcggacgcctgggcggactcctgggccctatgcgcagacgagacgacagagatgaaggacgggacgttgttggggggaggggcgttttctttgggcagagaatcaaggcaggcgtcgacagcgagaccataccccccgccttaactgtgggggcgcgacctacccctctactattttgggtttctctccgttgccttctgtgttctccggggttgttccgctacaaagcgtgctcgtggagcgaaaacatcttctttgctcaattgttgtgggtcctcaataaattttttacccacctcccccagcccccctatgtgcccccatgtttactgctattggtctggggacgaactatttttt

SEQ ID NO: 72436 - DNA, 264 bp, Zea mays
  Clone ID: MRT4577_166060C.1
ctcctccttcgctgccatttagtgctcgtgtcgcgtgtggctgcactcatatatagcgtagttagctaagatcccaccagcagagtagtagtagcaagcgcctggtttccggtttccctgcagtgaaggaagaggaagcccaaccccaaggacagcagcgtacaatcaggctgatacttattaggcctcagcggttgatacttatacacctcgctgcctagctgcgtcctatgctgtagatacgagatcccgcaacgttcgttt

SEQ ID NO: 72437 - DNA, 271 bp, Zea mays
  Clone ID: MRT4577_166061C.1
aagggccgcccttttttttttttttatcgataaatctgtagccttaatgcacggagacccctaggagtataaggaggaacaactgcccagcacacaataacccaacataagacttaatgctagacaccatcaatagactacagtctacctgatgcccagccaagaaagaaaaaaaaaaccccaccgtacagcaaggaaacaaaaatacatgtccatctctgcaaggaaaacagaacactttttatgcagcacccaacaggattggaaaaca

SEQ ID NO: 72438 - DNA, 357 bp, Zea mays
  Clone ID: MRT4577_166062C.1
aaaaaattatacactacataacttttatctccatgtctcaatagtcaatacaagtatacaaccagaaaaataatgaggacatacataagtcagctagaaagaatggaaaaatgaccaactatcccaatgaaatatcaacactaaacccttgcagggcaagtaggaagtgcagaactccgaactctcaaccaaaattcgctatagaatcagaagaggatgcgagcggggaccttccagacgacgggtcggacaccagtacttttcctgcacgcaccgcggccttgaagttagagagcaggtgtgcccgtattaccgtcccggcgccttcgtcggattctcctcctttgggcaccaccc

SEQ ID NO: 72439 - DNA, 1584 bp, Zea mays
  Clone ID: MRT4577_166063C.1
actacataaaaggccggtcctgcgcagcaccccgcccctctctccgcgccggacgcccaagctcgcccaccgacccggcgccgcgtgcccgtcagctaggaaacggaagagcgccccagacgcagagcgcctccccccgcgcgttggcgcgattgggtacctcgaggccggccgggactccccgccgccgccgccacttgctcgcctttgccccttctgtctcccttcgtccgtagcagaccaggaacgcccaaggcgctagcgtctccaagatggtgctgcaaaacgacattgacttactcaatccaccggcagagcttgagaagctaaagcacaagaagaagcggctagtccagtcccccaactccttcttcatggatgtcaagtgccagggctgtttcagcataaccactgtgttcagccactcccagactgtggttgtgtgcccaggctgccaaactgttctgtgccaacctaccggtgggaaggccaggctcaccgaggggtgctccttccgtcgcaagggcgattaggtcctgcttctcttaacgtgagaagagataaatttggtgttttgcaactttctcaggatatgtactcggtgaggattttgttaattattatggctgttagcgtggcctgacaatgcttgtgtaaacctgcactttgtttgagcgtagtgacagctaatatggtgctgtttggcttttgctgagggagtggcaatgcaaatgaaatcaactggtggcgttatttgtcagggtttaaaaaaaaaaaaaaaaaaaagaccccgacgggcccgggccccgccgccgccgccacttgctcgcctttgccccttctgtctcccttcgtccgtagcagaccaggaacgcccaaggcgctagcgtctccaagatggtgctgcaaaacgacattgacttactcaatccaccggcagagcttgagaagctaaagcacaagaagaagcggctagtccagtcccccaactccttcttcatggatgtcaagtgccagggctgtttcagcataaccactgtgttcagccactcccagactgtggttgtgtgcccaggctgccaaactgttctgtgccaacctaccggtgggaaggccaggctcaccgaggggtgctccttccgtcgcaagggcgattaggtcctgcttctcttaacgtgagaagagataaatttggtgttttgcaactttctcaggatatgtactcggtgaggattttgttaattattatggctgttagcgtggcctgacaatgcttgtgtaaacctgcactttgtttgagcgtagtgacagctaatatggtgctgtttggcttttgctgagggagtggcaatgcaaatgaaatcaactggtggcgttatttgtcagggtttaactgaaagtgccatttgtttggttagcttggataaaactatagccataaaaaaaaaaaaaaaagcggctgtaaatgggtcgtaaaattcgggtaaatttctggtaccggttaccagatttttccgaccgtttttcagatttttcgggatatacgggaaaacgggacggaaacaggatgtgttattacgaaaa

SEQ ID NO: 72440 - DNA, 437 bp, Zea mays
  unsure (1)..(437): unsure at all n locations
  Clone ID: MRT4577_166064C.1
ccgggccggaccttccggggcgaccgaagccttcgcccacgcgggcgcccacgcggccggccacgcgcccgggcacagctaacaaggaggcggaaagaacgacagcaacaaaggatctgttacagagggatcgagattatattcatagaggacagaccttgatagaagtgacaataccctttacgnaangaagttggnnagaaagngnaaagaaatctttggatgtagaaggaccacaagatgtgggaggaggagaaggaacacttagtgtgtggagatnagtgaaagaattgagagaaggatgantggaaagaaaatagnttagatgatgggnnaagggggttgtggagagggtgagattgtatgtggatgggggagaaaaggagagagagagagnnattggaaagagaaatatggtataatagaaatgaggggag

SEQ ID NO: 72441 - DNA, 649 bp, Zea mays
  Clone ID: MRT4577_166065C.1
ccggccgggacggacctggtcctctaccccggccgcgtgtccggccccatacccgcgggcctaggcgcgggcctccgccgcctccgcctgctgtcgctggcgggcaaccagctgacgggccccgtgccggcctccctcgcggggctgcccgacctccacacgctcgacctcggcgggaaccgcctcgacggcgccgtcccgccggacctgctcctgccggcctcgcccagcctcaaggtgctcatcctcgccaacaacggcggggtctccggtgagatccccgccggcttcgcttcctccgggctgttccacgtcgaccttgcgcggaacgcgctcgccggcgcgctcccgccgctgccgcccacgctacggtacctgtccgtcgctggcaacaccatggagggcacgctggagggggccttctgctctggcgacggcggctctgccagcccgcccctacccgccgacctggcgttcctcgacctgtccatgaacaacttctcgggccaaatcccggcggcgctgttcgcgctgccgggcctctcgtcactgctcctgtcgcggaacaacttcacgggtgcgctggccgtgccgtcccagcagcagcaatgggccgtggtggacgtgagccacaacggcatctcgggcg

SEQ ID NO: 72442 - DNA, 747 bp, Zea mays
  unsure (1)..(747): unsure at all n locations
  Clone ID: MRT4577_166066C.1
ggtaccctncgagggccgtaggccctaaaagaaagccgggacttcccgccgccgccgccacttgctcgcctttgccccttctgtctcccttcgtccgtagcagaccaggaaccaagatggtgctgcaaaacgacattgacttactcaatccaccggcagagcttgagaagctaaagcacaagaagaagcggctagtccagtcccccaactccttcttcatggatgtcaagtgccagggctgtttcagcataaccactgtgttcagccactcccagactgtggttgtgtgcccaggctgccaaactgttctgtgccaacctaccggtgggaaggccaggctcaccgaggggtgctccttccgtcgcaagggcgattaggtcctgcttctcttaacgtgagaagagataaatttggtgttttgcaactttctcaggatatgtactcggtgaggattttgttaattattatggctgttagcgtggcctgacaatgcttgtgtaaacctgcactttgtttgagcgtagtgacagctaatatggtgctgtttggcttttgctgagggagtggcaatgcaaatgaaatcaactggtggcgttatttgtcagggtctaactgaaagtgccatctgtttggttagcttggataatgctctttccgtttaggtgatgtttggtttaaggatgtaaatggtcggtaaaattcggtaaatttctggtaccgtttgccagatttttccgaccgtttttc

SEQ ID NO: 72443 - DNA, 742 bp, Zea mays
  Clone ID: MRT4577_166067C.1
ggagccgccggccgggccgggactcccggccgccgccaccacttgctcgcctttgccccttccccttctgtcacccttcgtccgtagcagaccaggaacgcccaaggcgctagcgtctccaagatggtgctgcaaaacgacattgacttactcaatccaccggcagagcttgagaagctaaagcacaagaagaagcggctagtccagtcccccaactccttcttcatggatgtcaagtgccagggctgtttcagcataaccactgtgttcagccactcccagactgtggttgtgtgcccaggctgccaaactgttctctgccaaccaaccggtgggaaggccaggctcaccgaggggtgctccttccgtcgcaagggcgattaggtcctgcttctcttaacgtgagaagagataaatttggtgttttgcaactttctcaggatatgtgctgtgctcggtgaggattttgttaattattatggctgttagcgtggcctgacaatgcttgtgtaaacctgcactttgtttgagcgtagtgagacagctaatatgggtcaaggcaaatgaaatcaactggtggcgttatttgtcagggtttaactgaaagtgccatttgtttggttggcttggataatgctttccatttaggtggcgttcggttcagcaaacacagtggtaatggtaacgtaaagaaaaaacagcactatttgttacaatgtaatgattaactgattttgtttgg

SEQ ID NO: 72444 - DNA, 1152 bp, Zea mays
  Clone ID: MRT4577_166068C.1
ccgggactccttatcccttctctatccgccaaagggaaatacccattgatctcatctcatgccctgttgccgcgcctgctcctccttccccatccgcacccaccgccgcccacccgcaagcttcccgcacggccaccgctgcccggtatcaatcgaaccagtcgtccgtcctcctttccttcaaatcaagtccatttccactccctgtctaccctctccctcgtctctggtgggcggtggcctcgcctccctttccccgtcgccctgatggctccctccgcagctctcgctccggtggccttccgctccgccttctcgactccgctcgcgtcgaaccctacccgtaatagaataaacatagaaggcgctttctgtttgccgtgttccgcaaggaagagagctagttatagatctttccgagtgtacagtttatttggagggaagaaggataaagatgagaatggcgatgaagcgccatcgaaagcagggatttttggaaacatgcaaaatctctatgaaactgttaagaaggcccaaatggttgtccaagttgaggctgtccgggtgcagaaggagcttgcagcgactgagattgatggttattgtgaaggtgaactaatcaaggttacactttctggaaaccagcaacctattagagttgaaatcacagaagctgcaatggagttgggtgctgaaaaactttcggagctggtcaatgatgcttacaaggatgcgcatcaacggagcgtccaggccatgaaagagaggatgtctgacttggcacagagcttaggaatgcctgcgggccttggtgatggtctcaagtgatgctgcgattcgggaagcctttctaataattttttttgttccctcaattttgtatacgagccgtgtgggcaccttctcgtagtcacgtagtaagaagtgtactcgtgaccagctgtttcgttcagcgttagctgtgattttgttttgtacaagcagatatatttgcactaaatcgtggtaacgtcgtcctatggaactcggatatcacatgtggtatgctaatctgcaagatataggggatatgcaccgaaaccaatttaaatcgtgtgataaatgatgtacattgtgtgtgtaacaaattaatgaattatgtttttttataag

SEQ ID NO: 72445 - DNA, 234 bp, Zea mays
  unsure (1)..(234): unsure at all n locations
  Clone ID: MRT4577_166069C.1
accgacgcgtgcggttcgccaagctctccgttgctactttttcatgttcgccgggaccgcanccaaggggcatcgtctcaaatgcaagctgtgattccacaatactttcaactacaaataggaaccttacctgtaatcggcgctaaataggcacttttctgacggcatctacatttacttcgagaacgttttcggtgagattctatattcttttctaaccaacattaaccccta

SEQ ID NO: 72446 - DNA, 714 bp, Zea mays
  Clone ID: MRT4577_16606C.1
ccggccgggagcctcgcccctctcgctctcgcggctctcggcggatcggcgttcagtgaaagctaaaagcctaaaaccctagttcgaacctctactagccggcgacagcggcggtagagcacgggatacccggagatgccagcgccgtctgcggttgcgtcggccgtagagaggctacaggcagcggcgcaggacgccgcgaagtcctcgtcgcgctcggccggtgccttctccgagcaggcgcagcaggccctcgtgtccaggaccgccggacgggttgtttctctgtcaacatgtgcaaaggtcagtgccattagctttgcgattggtgttgtggcagggttcacactcaagaaaaggctgcgcagatgggctgctagactgctgaagagaattaaggacgacgactattgactaatgcgatcttttcctcattgtctttggagtttgttcagaaatcagaactatggctactacgtacctcagcatcttgtgtagccaactgtttttgtgcctccacatatttgctatgaatgctggtatatgataatatgaaccatcagaagttcatcacattacagcatcgtgaaatgtgcaaatggtgacccaatgtcgccaacgacagtatgatcgtgccctgctctctggtgtccttcgtcatcaaactttgtcgagagtaggatctttcccaaaaaaaaaaaaaaaaaagtggtc

SEQ ID NO: 72447 - DNA, 1226 bp, Zea mays
  Clone ID: MRT4577_166070C.1
cattgggaccctcgaggccggccgggttgtggatcatcttgctgtaacacacctggctgagttatcttagttttgtgtcataataaaattcttagccaatgacttgaaaaaaaaaaaaaaaaaaaaaccattgatctcatctcatgccctgttgccgcgcctgctcctccttccccatccgcgcccaccgccgcccctccggcagccccgccacgagcccacccgcaagcttcccgcacggccaccgctgcctggtatcaatcaaaccagtcgtccgtcctccttttcttcaaatcaagtccatttccactccctgtctaccctctccctcgtctctggtgggcggtggcctcgcctccctttccccgtcgccctgatggctccctccgcagctctcgctccggtggccttccgctccgccttctcgactccgctcgcgtcgaaccctacccgtaatagaataaacatagaaggcgctttctgtttgccgtgttccgcaaggaagagagctagttatagatctttccgagtgtacagtttatttggagggaagaaggataaagatgagaatggcgatgaagcgccatcgaaagcaggggtttttggaaacatgcaaaggctctatgaaactgttaagaaggcccaaatggttgtccaagttgaggctgtccgggtgcaaaaggagcttgcagcgtatgcatttatatcattaatttatctatctcttgtcgatgcaaaatagccagcctgtgcgatttttttctcctattttttaggactgagattgatggttattgtgaaggtgaactaatcaaggttacactttctggaaaccagcaacctattagagttgaaatcacagaagctgcaatggagttgggtgctgaaaaactttcggagctggtcaatgatgcttacaaggatgcgcatcaacggagtgtccaggccatgaaagagaggatgtctgacttggcacagagcttaggaatgcctgcgggccttggtgatggtctcaagtgatgctgcgattcgggaagcctttctaataatttttttttgtccctcaattttgtatacgagccgtgtgggcaccttctcgtagtcacgtagtaagaagtgtactcgtgaccagctgtttcgttcagcgttagctgtgattttgttttgtacaagcagatatatttgcactaaatcgtggtaacgtcgtcctctggagcttggatgtc

SEQ ID NO: 72448 - DNA, 212 bp, Zea mays
  Clone ID: MRT4577_166071C.1
cacaaccgtacggaaacacttaggataatttttgtctattcacaaaggatccaaccaagttcggtgcgtctaaaaagggtgacgcgactactacaactactaacgagtgcactcctgtgaagaacgacatcatagctcttactgatgagactctaaatacaaagattttgaactactaccatcttacaaataacgatgtcaagactgcgctc

SEQ ID NO: 72449 - DNA, 193 bp, Zea mays
  Clone ID: MRT4577_166072C.1
gaagttgcattggaatcacttaccaatgattcctttaccgaaaagaaggggaagtattacttgtaaggaaaacatgtgaatagaaaagaaaaaaagctgctttctagctcctatcgctaatacacctttgacgcaacatcttcagtttatcgtggtcagacagaggaactacctaaaacctactatgatgggg

SEQ ID NO: 72450 - DNA, 316 bp, Zea mays
  Clone ID: MRT4577_166073C.1
gtcatgagactaagcttcaggatgttggctcatagtttactgtaggctctgatcactacgtgcatttggagaatgcatttcggtctggagaatagttatctgctagatacaacacaactgttgagtctgtttacaggatactcaaggctacttatgatactgccgaaacgatttctagtcctatatggcccacatcagatgtgtactacaatgaactgggcatagttagcaacagctttgacgtaaatgcatgaactgaactaaacaacttgctaacatgatacagggagatgcaggatgcattcaatgatgtact

SEQ ID NO: 72451 - DNA, 1436 bp, Zea mays
  Clone ID: MRT4577_166074C.1
ctcgaggccggcctaaagatacaagacgcctggctctgtcaatcttacgctgtgattgcagcgacgacagggcactctaatgagcattcagctattggtacaggacggctagatacagtatcctgtcgcaccaagcaggtattctcttcttctcgcctgaatcataccctgcatatatggagatgacggaacaaactcatatctcaagcaggcggtacgagtactgttactgtccatagagcgaaagatgcacatttttaagaggcaaggcaagtactatgaggcagcatcaaatgcagtgtacctgagagacccgactggtgtctctggaacttgtaggttggaggaaatctgattgggccttcacgcattccctgaaacacatttcccgccttcatttccgctcgaagttgatccctttctctaagccagtcaaagctcctctgggagaccatgtcccttgcttcatcataggtgatgccatcaagtcggtagttcaaatcaccaaggaagataaccatatcagcttctgccagatcaggcctaccttcatctgcttgattttcattagctgctttatgcaattggacagctgtagcagaagctgcagatccctgaggtttggtgaaagtcattgcccgataaatgcggtcaaaatcagcattgcggcggctaacattctcttgatgtgcagcaaaatgattgtttacaaaacatatcctgcgaccaaagactcttattcttaatccgacgccacccttgttgccaatagcacgcccaaagccacatggcactgcagcagtatcaacatcaccaacatgtggcctaaggtcattcgttgcccatgcagcaataagtagtcctgccaactgccttgaaccaactctgtggaaggatattccctcatcaagtgttttgccaatactgtctatccaccactgcccattggcactgccttcaagccctacactttctttggcagctgccatggcaagaactccagcacccatctcgacctcttgcaaaccaaccaccaccagcccaacatcaaaaaatgcaccacccaaccatgactttagcgcttcaggagaagctttctcttgtgcaacattccaagtcccaaccagtattttaaggttctctagccttgtgtatgacagctccctgctagccaattcatagcgtagaatatcatcaagagggctaggggaacttagagaccatcctcgaatgccaccatgatgtgccaaagaaaaaatgtaagaatcgccgactgccatgcttatgactgggcagctatgaccaatccatcctgcctgaaggttaccttcaacatccataacttgaatagtaccacttgcatagcccacccagatcctctctccgagtgcctctatgcattgaacagaagagctatggtaatgcggacgcgtggg

SEQ ID NO: 72452 - DNA, 343 bp, Zea mays
  unsure (1)..(343): unsure at all n locations
  Clone ID: MRT4577_166075C.1
ttccaggctncgacccctccctcctcgccatctctagcgcgggcggcctctatagtagcacctagccccggccgcggcattggaggaaggcagcggcattggctgcgggaaccgtggggggggggcttgaataggtacaagcctctgaaacctgccgcatccggatccgaacccgcgctgccgactgccggagcttgggggcaacgaagcccgctctagcctctagagaaggaggacctaccgggctcggagatcgggaagaacgactacgaccggcgtcctaactcctaccgggaccccaccagcgacctgcactgggagggcgccggagaaaacaccaccc

SEQ ID NO: 72453 - DNA, 269 bp, Zea mays
  Clone ID: MRT4577_166076C.1
gccggccggtccgggatctgtctgaaaggacatcacatagatgaagaaacgttttcttggctagcagctagtaccctgatgaacctcctgtgatggcaaggtggtgatattaattggtgtcgtccatgtacgtaattggtttggttatatatatgtatatacttgatattactatgtgggatggaatatatatatgtgtgtgagagagagagactactttagttataaatgctactattgtgcaaaaaaaaaaaaaaaaaaggccccta

SEQ ID NO: 72454 - DNA, 554 bp, Zea mays
  Clone ID: MRT4577_166077C.1
tacactgtcattatacagaaaacaaggaaggtgcccgctaacgaggaaccgatcatgaagggaagcttcaaggtaggcgagcctggcaagcttgtgctaactgtgaacaaccctgcatccaagaagaagaagctcctttacagatcaaaggtcaagagcatcagcgagtgagtgagtgaggttgctgcctagctgcctgggtcctagagttaaatgatgtaccacagtttatctcagcatgatagaagagaggataagccttttggtttggttcgttaatttattgggttttgctggcttttggttcacattctatgttttgtttggttaaaaccaaagcgagcttggttttgtgacagtagatggggaagtataatgacattctgatggatggttgttgaggagggcagggaagacagaaaggctggggaatgtctgctcctctgtagatgtgtctgtacattgcatctcttggattctcattgatatgtttaggttttaggagtacttcgtcacatcattatgcaatccatgttactctgcatgttcctctt

SEQ ID NO: 72455 - DNA, 298 bp, Zea mays
  Clone ID: MRT4577_166078C.1
cgttatgacaagaagaatgaaatatacattacacctacatgtctcatcatattacaacctgtatatgagcatgcttcagacacatgcttgtgggttcacaccataaccctgtatactatacgcataatgcattagtattcttgtctccccctattcggtatttacagagaggggtatacaacagtgctacttttgagaacaagagcgggcacagcatcgcaaacacatagaggaagaaccagatctggagccaggacctgggtattcacatctgatgacacctaatcctgtggttcac

SEQ ID NO: 72456 - DNA, 482 bp, Zea mays
  Clone ID: MRT4577_166079C.1
actcactatagggataagctggcgcccctgctcgtaccgctctgaagttagggggttgacccacgcggtcggagctcgcttctcctacggctgttatcaagccctgctagggttagggttccttagggtcctgtggaggtgcgatggcggaagctgctgtggagaaccgttgcttctactgcggacttgactgggccaccaggagcgagtcgctggagaatgccttcggctactacggcgagatcctggactcccaggtcatcaccgaccgggagacggggaggtcccgcggctttggtttcgttaccttatactacaagaactccatgctcgacgctatcgagaacatgaacggcaaggagctcgacggccgtaacattaccgcttaccaggcccaggcccagtggcggaagcggtggcggcggcggcggtggctaccgcggccgtcgcggtggcggcggctatggcggcgggcgccgcga

SEQ ID NO: 72457 - DNA, 193 bp, Zea mays
  Clone ID: MRT4577_16607C.1
tttgctttccggcctcccctacccccctcatgcgccgcaagaagcacttggaccggggtgggggcggcgttggaggtttcactgttctcttcatctgctttacctcgcgttgctccgctgtcttagccatttgcgttgtctgcttgtgcgtgctattttttcttttcgtcctacagtttctttaagtttctta

SEQ ID NO: 72458 - DNA, 323 bp, Zea mays
  unsure (1)..(323): unsure at all n locations
  Clone ID: MRT4577_166080C.1
taagaacccacacnaaagagangccgcgttgtttggcatatgtagtggtgctcgctggtgctccaaaacggcaaaagtgtgccccttacagaggtgcaaattggtgacaagcttctagagtttcgtcaaaagcaagatggaattatcgagacaggctgccacactataagtggttatggtgcacatggtgctataatacactacacaccaaccacagagagctgcaactgtgtacgaagcgacaatctgtattggttagatagaggagctcaatacatagatggcactactgacatatccagaacagcgcattatggcgaggc

SEQ ID NO: 72459 - DNA, 354 bp, Zea mays
  Clone ID: MRT4577_166081C.1
atgaaaaacacatacatctttcacctctattgaacaaagaatatctgattttttatcccattgacaaagaacatacataccttagccttagaaaacaccgttttctaaacgctgcttggctgatatacaggaattcccgaacacccatagaattctgatccttcttgataggtacaggacacagccaaagatgaatgacaaggatggccatttgtctaaatttaaaacaaaacatcttgaccctatatcaaccagaatggagataataaataacaccggacaaaaatcttgccataacaaaatggcggatgcttccttgtcgccataccctgtgatactggtgatcgttaaaaa

SEQ ID NO: 72460 - DNA, 370 bp, Zea mays
  unsure (1)..(370): unsure at all n locations
  Clone ID: MRT4577_166082C.1
cgatngggcctacgtntgcgctgtgtggaacttnggnggtgggcgcggggggggaagtacgttcccggtatcagcgttgcgaccgacaacggcccctttaagggggcgatgcaggcgttcgtggagaagatggtgtccatgatgaagttggaggggctgttagagtggcagggcgggcccatcatcctgtctcagggggggagggagtacgggcccatggagttcgttatgggcgccggtgccaagccctacgccaactgggcagtcaatatggtcgttgccaccggccccctttttaccctgtgttatgtgcatgaaggatgacgcccgggaccccgtgatccccatctgccccggcttttattgcgac

SEQ ID NO: 72461 - DNA, 608 bp, Zea mays
  Clone ID: MRT4577_166083C.1
ctcgaggccggccgggactgtcttccccgagccgccgccgtctgatgcgggctgctgtgctcgcctcccaacgctttgccctctgatgtaagataccaccttgacctccaaccatgcctaaagagaagtcccacatcaccgttgcgcctatctggccttgaccactctggacagccaaccaccaccggccacccgatctacatacctcgataggtatagacatacgagcgattggcaggctctagatggaagacgctgtaatgaaccaacgatccttcaagtacactcggaaggttgaccacatcaaggttgatcgagatacacggatcaccattgagatcgctctgtgtcatcttgtgaccactaagaactactgcactgacattgatgcccctgtgcatacaggatttcatcagatactatgatcacggtaaccgtaccacagactgactgggactgatcttatcatatgactccaccactgatgtttctgaggaccaaatctcatatggatgtgctgacccgacgaacatcgcatcttctcctcttactctgtagggtcgagcatgatgacttgatgctgtgaccctaggcattgcactactccc

SEQ ID NO: 72462 - DNA, 391 bp, Zea mays
  Clone ID: MRT4577_166084C.1
tttatatatcccgagcggcccccctttaagggctcctattctggttctagcaagcgaacccgcctgatatgcagaaaggacgtattcctcattgcatcccagttggactcaaaattgtttcattagtgagttcaccttaaccgaaccaaactattatctgagccgacatgttatttcgagatcggactttatagctataaccaagaactgacagccctatcagatcactcatacgtactggtggctgcaatcctgtatgctacagaacaggggtaccaaagttaaccgggtgctcagcagcaactggctatgttcaccattaggagatctggaggaacgatgactccactttcgatctggtgtaaggagacacactgactatggcgtgcca

SEQ ID NO: 72463 - DNA, 915 bp, Zea mays
  Clone ID: MRT4577_166085C.1
ccggccgggaaaccggcgaaaaataccacatccaacggccagcagctcttctacctcgccttctaggcttcgggtctctcggcagtcgccggtgtcgcctccgcctggatcgtccgccactgccagctgccattccgcctcggatctgagtcgccttgctgcctctgcgcccggacacagccgcgcattccccaccggctcgccgagcaggggccctgctcccacgctgctcactctccccaatttcccacgcacgcctagcgaggtcgggggttgaggtctggcggagatgggcggcgtgccctggaaccgggtggaacttacgctgctcgtactctacgcgctgggcttctacctcgtcgtgatctggaggtcgcttcgcctctcgcacgaatattccgggaggctctacggactacgcgtgggatcacttgcgggtcatctgaatgacctgtcggatgcgcaatggagaaacttccgcgggaacttgccaattctgactgttgtaatgggagcatttctgattctggtcaatacgttgagatattgctatggcctgaaaggtcgaggtactgctttgttgtggctcatactgtctttgagctatttatgctatcttcacggtgcttgtgttgtttttgttcttttaattgcactgattaattactcaatagtgaagctatttgctcattataagtattgcacaagtctcatttggagcttcaacttatctgttcttattcttaaccgagtttatgaaggatattcattctcattgttcggtcaaaatatggcttttctagacaactatcggggtacattcaggtggcacatatgcttcatttttttgtattacggatgtttagctttggatgtgattactgctggacaatcattcttctcattttgacttca

SEQ ID NO: 72464 - DNA, 278 bp, Zea mays
  Clone ID: MRT4577_166086C.1
gttgacccacccagggcgggcggcggctaagtagggttcttttgaatgattggccttcctcacaggaacaataatggccccaggaggtcgatattccaggctggtcgcgccgccacactatcatgtgggggagccagcatagaacggtgctgcctgatttatgttggggtgacgcgccgcatggtcggtggtgagcctgcctgttttctgacgaacagctgtggctttgaggtctccctgctcttccgcatcattgcttgagtgatgccggttgacaa

SEQ ID NO: 72465 - DNA, 2015 bp, Zea mays
  Clone ID: MRT4577_166087C.1
tggtccttcattggttagacgccggggggctctgtaatcggcaccccctactccggtccctcccggccgggccggtttttcccagtcaagtcgcctccccctactgtaggccgctgctgctcctctcctcccatctcaccacacaccgcagccccagcaagatcgcgcggaggccatggcgaagcccaagccttcctccgccggcgccaagccgaccgcggcctgcgccgccggttacagtgcactcggcgctggtcacctacacctccatgctcgcgctcctctccctctgcccgcccttcgtcatcctcctgtggtacacgatggtgcacgcggacggatcggtggtgcggacttacgagcacctcagggatcacggcgtgctcgaggggctaaaggccatctggcccatgcccaccctcgtcgcgtggaagatcatcttcggcttcgggctcttcgaggccgtcctacagctgctgctccctgggaagcgcttcgaagggcccatctcgcctgccgggaacgtgccggtctacaaggcaaatggcttacaagcatatgcagtgaccttgataacttaccttggtttgtggtggttcggtatatttaaccctgcaatagtgtatgatcacttgggggagatatactctgctcttgtttttggaagctttgtattctgtatttttctctacataaagggccatgtatttccatcttcatctgactctggatcctctgggaatgtgataattgacttctactggggtatggagctgtaccctcggattggcaagtactttgatatcaaagtcttcaccaactgtcgtttcggtatgatgtcctgggctgttcttgccgtaacctattgcataaagcagtatgaaatgaatggcagagttgctgattctatgcttgtgaatactgcacttatgttgatctatatcactaagttcttttggtgggaatctggatattggtgtactatggacattgctcatgatagagctggtttctatatctgctggggatgcttggtatgggttccatccatatatacttcccctggaatgtaccttgtaaaccaccctttgaatttgggcccccagctagcactctcaattcttctagctggaatgttgtgcatatacataaactatgattgtgaccgtcagcgccaagaatttcgacggacgaatgggaaatgctcggtctggggcaaggctccatctaagattgttgcctcttatcagactacaaagggagaaactaaaaccagtcttctcttgacttctggatggtggggcttgtcacgtcacttccactatgtcccagagatactatctgcatttttctggactgttccagctcttttcaatcacttcctaccatacttctacgtgatctttctgactatattattgtttgaccgagcaaagagggatgatgaccggtgctcatcaaagtacgggaagtactggaagatttactgcaacaaagtaccatacagagtcattcctggcatttactgagcatctcgagttctggacgactcttgatattaagctcaacagatgccacgatatccagtcttcataccgatctgctactgattgtgtaatgtcgttggtaggcttgggctgtacgcagtattaggtgtaggcaacttggcttttggcatctaccttgtatgtgtcgtgtatctagggctggggcttgctccttcagttgttagacagtagggggtaatctcaggggtgcaatgtactccctccgtcctaaaataaaagcatatctagtatttaaattttgttccaaataaaaatgcacaatgaactataatatcgtgtaacgatgtctttgattgtgggacaaaaaaaaaagaaaaaagaaaaaagattaaaaaaaaaaaaaaaaaaaaaaaaaaaaaaaaaaaaaaactagctggagatgatggtggatttgagggatatgaaaggatcatgatgctcccccggaagggttaattgagcccccct

SEQ ID NO: 72466 - DNA, 249 bp, Zea mays
  Clone ID: MRT4577_166088C.1
atcatctagttcttcagaagatgaaagttctatacaggatgatatcccatcaaagtacagttcaatgaaagtggggcatccagtgctaagaattgaaggtagtcacttactagcagctgtcgtagtcagtatagataaaggaggtaacgaattgattgctgccgtaagttttagtcttgaagcttctgaagctgtagctgagctaaggtcatcctttcagttgaagcgttaggaagcctatgctaggct

SEQ ID NO: 72467 - DNA, 390 bp, Zea mays
  Clone ID: MRT4577_166089C.1
ccacccaaagggttttttttatcatttgagagaaatatacctccctttcccacaaaaacaaaatggcaaacccaccaaaaaaaattacagtcttattctttagcgggctcacaagacccttacaacgggagcggaattgcaccaaaattacaaaaggttgagctcaatgggagttatttgggttggcttctcctattgacaaatccttggaaaaaactgttgacggcaagcatatcttaaaaaaccttaaggccatttacatcctttttttcaaatacagctccatcttgaaccttcaactttactccaaacttggcggtaattttcacctttcccttttaacttaattccaaaaccaaaccagtcatttccataaaccctttaaacttt

SEQ ID NO: 72468 - DNA, 389 bp, Zea mays
  Clone ID: MRT4577_16608C.1
ttttttttttttttttttttttttttttttgttttttttattttttattttttttttatttttttttttttttttttttttttttttttttcccggggccaattgactataatcggagggaaagggaaatttacaaaataccccagcaaaatgggtttctactatcacaaaaataaaccgggaaaacaaagggagaagaaacagttaacccgccatgacaccacagtagaaaacggggcaaaccccaaaatagttggagaaagcgccctttttttttccctggtttttttaaaaacccttaacacggaatggccctaatttaaaaacaacggcttttccggagggggcattccctcgagggtttaaattggacccaggcccattagggg

SEQ ID NO: 72469 - DNA, 371 bp, Zea mays
  Clone ID: MRT4577_166090C.1
acgcgtccggaccaagcttagcacgctcacgttaactccgcccaacgatgaacaatcagggaggagcgaccatgtttgtactaggcccatcaagcacactgcccgaacgtacgcatgcccacgttcgtgccgacactcatagtccatcatcggtgatatgctgctaggcacagtgcgggaccgacagactggcattattggatgatggatctctcatggttgaggatcgagccgcacctatggaagattgtacggaacaaatataataacatagtgacgattgatggcattatagtctaaaaacaaaaaaagagacagggctaccgtaataatggatccaagctttcttgcactttcatactacgtttttg

SEQ ID NO: 72470 - DNA, 527 bp, Zea mays
  Clone ID: MRT4577_166091C.1
gtcccacgcgtccaaagccgcctgtgcgggcgcctgggccgtcccgtgggcggacccctgggcggacgcgtgggcacgccctgtggatgtgcgatgaatcactaggcgaacatgcgcatgaacgaggcgcattgggtgcactgatgaacatgtgtctccagcgtttgcatggaacatccgggaaatgggcagcaacattaacgctggcttacaaaagacaaccaccaaaaagaccagaggatgcaaaactatatacacctgcaacagagggtctattaagaatatcaaccgggcactttcacatcgtttgtgacaactccacatacgtcatgctatattaaattgctcttgcggatattcaagtcatgctggatgatacaagctgctgaaaggcatatgcttgtggagacagctactgatgttggtctggaatatatatgtgcgttgattaacactgatctgcattgatctaaactttcatgagagctaattccaaagccattggaggcgcttccacaaaactatgc

SEQ ID NO: 72471 - DNA, 267 bp, Zea mays
  Clone ID: MRT4577_166092C.1
atggacaatcagtccacaattgcacacaacaagatccttgttcttcatgatcgaacagcggaatttagtgaggtggagcttggtagatttgtattcgaccgacgactatttacaactgagcctaagaacaccgggaaccatattgttattgctaatttgtactcaaatgctggcaaatgggaagaagccgagatcataaaggagcgtgatgtggggagttgggctccctcggtgttagttggaattgaggggtggtctccatgctaa

SEQ ID NO: 72472 - DNA, 277 bp, Zea mays
  Clone ID: MRT4577_166093C.1
gggccgaaatcaaaaacaaataggggggggtaaacaaccatccataacaacttttttaataacccattggaaaagcggggcggacataaccaaaaagttttacaacataatgggtttaaaaccacatcgggtacaaaagtagtacataacccttactattacctaattatttttcttttagattttataaccattataatttttttcatcttaataaaatatatcaccaaccttctttttttttttttaagcgcttccatatcttaaaggatttaaa

SEQ ID NO: 72473 - DNA, 424 bp, Zea mays
  Clone ID: MRT4577_166094C.1
gggggggggggaaacagtttttttaaaaaaaaaaaacaggccccgcctttttttaactttcaggcagcccccacccctggggggcaaacagccaaaaataatttccgggcccgtcccccctgtaaaggggggggggggggccgcccgacaggcatttttttataaaaccagggggaaaaaaaccccccccccacccctaaggacaaaaggggggggggggaaaaaaaaaccgccccccccggcccccccccataaaaaggggggctttcttttgggggggccccccggcctgtcccccgggatgctaaggggccccacaagcaggggaagaagctcgcccgggaggccctggaacatttccccgcaaagccgttccagggtttgggggagggggacccccgtttgtttttgtttaacaaacccc

SEQ ID NO: 72474 - DNA, 299 bp, Zea mays
  Clone ID: MRT4577_166095C.1
gtttgcaggtaggcaggtctgagttatccggcggatccgatccgtgcgcgtgcgcagtgtgtgtgtgtgtgtgtgtgtgtgtgtgtgtcggtggagagatggccacagcttacggtcccatggcgaggcaggtgatgaagagcaggctcgtcgtgcactcgaggccgaggggcctgtcaggcgctgctgcggtcacgaggcggcccggccggttcaccgtcaaggccatccagcccgaggaggcaacgtagcaagtggtgcagcgcatcaacggggaccccttcatcggcagcctggag

SEQ ID NO: 72475 - DNA, 241 bp, Zea mays
  Clone ID: MRT4577_166096C.1
gggggaacaaaacccaggggttaaatgggtttataaaaaagagacatataaaggttcaaacacccccgaaaaaaaggaggccagggccctaaaaggggggttggggtggattccgttaaaaggttaacaccaaggggcgaggctttggcccccaaggacaaaagtggaaccctgagataaacggttaaggaaagggggtttcccccctatttttggagggccaaacagaggaaagttgggg

SEQ ID NO: 72476 - DNA, 1189 bp, Zea mays
  Clone ID: MRT4577_166097C.1
cagctagctcgctgtggcaggctggcagcatgttccgatctgccgtgcagcgtctcgtcagggccagcgggaagagtacggccgacccagccgccgccgcgtccgctttcttcctcagtcgcttctccgcggcggccgggccgccatcgccacagaggctggctggaaaggtagcgctgatcatcggcagggcaactggtgggccacgtcgccgcggagctgagcctgccgggggggcccggcccggcggcggccgtccactacacccgctgcgacgtgaccgacgaggcgcaggtcgcggcggcggtggacctggccgtggagctgcacggccgcctcgacgtgatgctcagcaacgccggcatcagcggcagcctggcgccggcccccgtggcggcgctggacctggccgacttcgaccgcgtcatggccgtgaacgcccgcgccgcggtggcgggcgtcaagcacgcggcgcgcgtcatggtgccccgccgcgccggcagcatcgtgtgcacggccagcgtggccggcgtgctgggcggcgtcgcgctgccgccctacagcgtgtccaaggccgccgtgctgggcctggtgcgcgccgtggccgggcagctcgcgcggtcgggcgtccgcgtcaacgccatctcgcccacctacatccccacgccgctcgtcatgggcgccatggccgagtggttccccggcgccaccgccgaggagcgcaggcggatcgtggagaaggacatgaacgagatggacggccccgtgctccaggtggaggacgtggccagcgccgccctgtacctggcgtccgatgagtccaagtgtgtcaatggccacaacctcgtcgtcgacggcggcttcacggtggggaaggcgcccaatatgccgccgcctggaaactactgagcagctaccacttgccaatctaaaggcacggtggatgactttctattgagcatttctttttcttttgcgattggaaaacttaggtaatatagttaaaagaactcgatcacgcgttttctttccatgtgcaagaacatggctagcttaatggtacacagtctgtgttgttggctctatagatctatgaaaagcttccagcatgactgtccacttggtgatgcgtcttgtagcgttaaggttgtgtagaatatcatcgagcagctagtcgcatcttacgtgc

SEQ ID NO: 72477 - DNA, 230 bp, Zea mays
  Clone ID: MRT4577_166098C.1
aaaaccatcctttcggctttttccaattttcccccagggccaagacgttgggcatgattatccccatcccccgcccgaaaatttgacccgtaggggaggggagggaactcctttttcccacccggggggtttgcccccttaaaaaccgtggagggggggtggttgtactcgagcccaattccgagtttacttacccctgcttgcgaaagaatagtttttttattggggcc

SEQ ID NO: 72478 - DNA, 820 bp, Zea mays
  Clone ID: MRT4577_166099C.1
ggccgagaaaaaaaaaaaaaaaaaaaaaaaaagggactatctattatatccgcctgctgctcggccggcaaagctgaccgccgaaacacagctagctcgctgtggcagcatgttccgatctgccgtgcagcgtctcgtcagggccagcgggaagagtacggccgacccagccgccgccgcgtccgctttcttcctcagtcgcttctccgcggcggccgggccgccaccgccaccgccacagaggctggctggaaaggtggcgctgatcaccggcggcgcgagcggcatcggcagggcaacggcggcggaattcgtccggcacggcgccaaggtcatcctcgcggacgtccaggacgacctgggacgccacgtcgccgcggagctgagcctgccgggggggcccggcccggcggccgtccactacacccgctgcgacgtgaccgacgaggcgcaggtcgcggcggcggtggacctggccgtggagctgcacggccgcctcgatgtgatgctcagcaacgccggcatcagcggcagcctggcgccggcccccgtggcggcgctggacctggccgacttcgaccgcgtcatggccgtgaacgcccgcgccgcggtggcgggcgtcaagcacgcggcgcgcgtcatggtgccccgccgcgccggcagcatcgtgtgcacggccagcgtggccggcgtgctgggcggcgtcgcgccgccgccctacagcgtgtccaaggccggcgtgctgggcctggtgcgcgccgtggccgggcagctcgcgcggccgggcgtccgcgtcaacgccatctcgcccactacatcc

SEQ ID NO: 72479 - DNA, 339 bp, Zea mays
  Clone ID: MRT4577_16609C.1
aattaattctcgacccacggatgcgttcgttacacctagtgtatattgttgctcaactttataagttcctcttgtatatcaagcgaggttaaaataaaatggccgaaaggtataacaacttgcatctgtacttttacttctactctataagtcgtgtccagaaacgactattacttaaatttgcaaacccccatttaaatgcatcatggctgcagcgtaatcagagcgtaactctaggtagcacttgatctgcaaacacacatttgattttctcatggactcaccataaatgagagattgatagtactttcattatataattcacacatcgcgtttcta

SEQ ID NO: 72480 - DNA, 244 bp, Zea mays
  Clone ID: MRT4577_1660C.1
acctcccacatttaaacacctgttttttttaacttaaaacacacataaacacctaacataccataacccaaatatccaacacacccaaaaaaaaagtttaatcgtacatactattcacaaaccaaaacagcagatacttcacacttaactaacaaaacataaatcctcacttgaacacatcccccaacctcttaataataaggatatctcaaaaataaccttcattcacttccttttcaaaaac

SEQ ID NO: 72481 - DNA, 1391 bp, Zea mays
  Clone ID: MRT4577_166100C.1
cctcgaggccggccgggactttctttttctttctctctccctattctttcacttggaagtggaccatcccaattcccaagtcttcttctccccagtccccacggcttctctctgtctgcaggaagcgcgtccgctgccgccggccgattcttcgtcttcacgcgcacccagggtagagcagccccaccacgcctggtcgtcctctcctctcctccactaatgcttccccatcacggctcctcttctcccgctagccagcccctccgcagccggtgaagacttcctcgtgaccctggacgcccactcttccacttttctgtgctcggcactgccccggttcacctcgacaccgccagccgtgccaccatccaccctccgcacaagtaacaacaagaagctcattgtgtggtagaggatccgaatttgtttgaggacgatccacatgacatttttgtgcaagagggtgatgaagaagactttgatggagattttgatgaatactgagtctaacgatgcgccggtcatcttcctgtgggagattacccatgttatttccgctatactttgatgatactgtttaagatacttatgtctggatgatgtaataaagttattttactcccttcctcgaggccggccgggccgggatctaggtgaccacactgctcaaattcatgagcattgtggtttcatccgtcatcagtggcaatccattatctttgaagcaatggggtagtgttgtgatggtcttcttaggcctctctatccaaatatatctcaaatggaagagaaagaaaggcagagagcacaaggagtaagcttgattcttcaaccttttctgatttgtaacttcaattggacagatctcttgtgagattgaccaggataacgttaatgcagtctgtttgaaattaggaacttttacatggattattatgagtgataccaagtgtgaggctgagctattggtaacagctctaatttatgttctagatggaggattcatgtgtttcaaaaaaaaaaaaaaaaaaaaaaaaaaaaaaaaaaaaaaaaaaaaaaaaaaaaaaaaaaaaaaaaaaaaaaaaaaaaaaaaaaaaaaaaaaaaaaaaaaaaaaaaaaaaagcgggcccttttttccccccccccttttcccccggccccggtaaaacggggaattcaaccctatttccccccaggtcccaaaaattcaacaaccttttcccggtttccggtgggaacccccccccccggaaatttggggggccccttggctgcacccaaaaaaaagcgggggaatggcccccccccctttggcaaacccccccgtttggtccccaaaatacctcccccccccccccccccagggcccaggcccccctttttcaatttgg

SEQ ID NO: 72482 - DNA, 665 bp, Zea mays
  Clone ID: MRT4577_166101C.1
ctcgaggccggccgggctttcacttcggaagtggaccatcccaattcccaagtcttcttctccccagtccccacggcttctctctgtctgcaggaagcgcgtccgctgccgccggccgattcttcgtcttcacgcgcacccagggtagagcagccccaccacgcctggtcgtcctctcctctcctccactaatgcttccccatcacggctcctcttctcccgctagccccgagccaccgccgtcatcgtccttcgccgccgtgccgtttcagagcccctccgcagccggtgaagacttcctcgtgaccctggacgcccactcttccacttttctgtgctcggcactgccccggttcacctcgacaccgccagccgtgccaccatccaccctccgcacaagtaacaacaagaagctcattgtgtggtagaggatccgaatttgtttgaggacgatccacatgacatttttgtgcaagagggtgatgaagaagactttgatggagattttgatgaatactgagtctaacgatgcgccggtcatcttcctgtgggagattacccatgttatttccgctatactttgatgatactgtttaagatacttatgtctggatgatgtaataaagttattttactccaagaaaaaaaaaaaaaaaaaagcggcc

SEQ ID NO: 72483 - DNA, 1176 bp, Zea mays
  Clone ID: MRT4577_166102C.1
ggacccccgaggccggccgggaaaaaaagcgaccaccctgcgcgcaccacctcggctgccattgccattggcaattcggcacgaggtggccacgccatgacgccccgcccagctgcacgcgctcacacccccaccgctccactccgctccgcctaactctcaccctcacccgccaccgctcgcctccccatgcttccgcgctgccgccgccgccgctcgggtgcctcctgcctcgccgtgctcctcctcctgctgctgcacgcgggcgcggcgtccgcgcagggcgcgcttgcgcggcaggacgtcgcggcgctccacggcctgcgcgcgtcgcttggcgtgcgcgccagcgactggcccgacagggccgacccctgcaccttctggtcgggcgtcgtctgccgcgccggccgcgtcgcggagctccgcctctccgggctccgccgcacccgcgcgggcgcccggagcgcggccttcgccgtcgaccaactcccgcggctcgccgcgctccaggcgttcaacgcctccgggttcccgctccccggccggatcccgtcctggttcggccgcggcctgccgccgtcgctcgccgtcgttgacctccgctccgcacgcgtcaatggcgacctcccggccgatctcggcatgtccgggaacctcaccacccttgttctcgtccggtaacaacctgtccggccctatcccgctgtcgctcctctcaatcgctggtctccgcgttctcgacctctccgccaacaatctcaccggcccgctgccgaacgtgtcgttctctggcagtggtggagctggagtcttgttcaacgcctctggtaatgccttgtacggcgccgtcggcgatgccactggctccctcaggaagaggttctgggttgttgatgtctctgacaattgcttcgatcaggtgcttggaactgggtttcagaatggaaccgatggtgtagtggatctcaggatgaactgtttgtctggtgcagcatgaaggggttgcctagaatctctttttgaaacatagtgcttaccgcataaacctacattaataggtttctctttccatttttcatttggtcaatgaaggggttgccttctaatttagatgtgtatatgtctttccaaaatgaattttttcccaagatctctacgcaattaagggggctc

SEQ ID NO: 72484 - DNA, 228 bp, Zea mays
  Clone ID: MRT4577_166103C.1
gagagattggagggaggcccctgcacaaggcaagagcaaccgcggcgcgcggcagagagacgacgggcagacgcagacgggcgaacaagatgagggagatcatcagcatccacatcggccaggccgggatccaggatcggcaacgcctgctgggagctctactgcctcgagcacggcatcgagcacgatggcaccatgacacgatgattcctcggttggcgtcgcaca

SEQ ID NO: 72485 - DNA, 322 bp, Zea mays
  Clone ID: MRT4577_166104C.1
aacattgggggggcattatcaagcgaggacaacaaatttctatttgactttaattttaacaaaactatcgcttatcccaacaaaaccaaaaaggcatctgtattcaagcatttaacaaaaacacttcctttgcaaacaaaaggcgtaaattaacaaatcgaatgcgtaaaaaaaggcctcctttagaccacaagcacaatagaataatgacccattattggtaccatataagaaatcagcgaatacctcagactcattatgcttcatgggctcaccaacaaaaaatttgaaaatctttaactatctaaggaaaaaatttttt

SEQ ID NO: 72486 - DNA, 254 bp, Zea mays
  Clone ID: MRT4577_166105C.1
gggaaaacacaacgtctcaacaatttgtttaatccacacgacatcagcggcttacaaccgagaccagaaacgaaaacctccccaggccttacattatggccaaaaaaaaacgctttttgacaaatgcccaccagacccctttttttaatatgtaggataggggggggggagctagtgtagcatccccctggaggggagcgccccccccgccttagcaaccacgaccaccaccactttttgggggccccgacccc

SEQ ID NO: 72487 - DNA, 112 bp, Zea mays
  unsure (1)..(112): unsure at all n locations
  Clone ID: MRT4577_166106C.1
attgcatccgtatcaagnctttcttagaaagatgtagnttcctgtaaggcaaaataagttttggctccatctttatgattattcgaggatatcttcgagtcctgagtattat

SEQ ID NO: 72488 - DNA, 285 bp, Zea mays
  Clone ID: MRT4577_166107C.1
ggccccgggttttccttcgttccaaattttggacaaaatttttgggggattgttcaagggcccttcttcttttggggggtggaaaaaaatgaacccccccccgggtggtattcgggcttatgatcagcccttagtaccccttttagcctggggggatttttttttttcctttgaccccctcggggcctttttctaaccccttttgttttcaaaaaaaaggccgcataatttttttaacaaaaatgccccgccccagggttgctttttttttaaataaaacaaaac

SEQ ID NO: 72489 - DNA, 272 bp, Zea mays
  Clone ID: MRT4577_166108C.1
ggcgtccatctaccgcaacggcatcaacgacaacgtgcgcatctacaaaggtggcgagaatatggatagggtcacccgcgccgtcgcagcatcgagactcaccacgctgcagcagtggtagatcggtaggtcatgagcaaggaatgcaagcatcggtcgacgtacaaacacaaatagtggctctcgagtagccattgcataggggatatgatcaattcaggcatccaaccatccgctgctgctgtgttagacatgcgggagggggacgtcgc

SEQ ID NO: 72490 - DNA, 832 bp, Zea mays
  Clone ID: MRT4577_166109C.1
cctcgaggccggccgggagaacagatggatcgtcatccgccccacccacaactgctccagatccaggcacggcacggcagccgggccaacccaagcccgtcttctcttctctctcgtccgtccctcactcgccgcgacgtgacaagacaacgcgacgcgcgcgcagcgcatacgtcgtccaaggcacgcaggggccagccaaccaatcgcgtccgtccgggtctggtggtggccggaatgggcctcctcgatcagctctgggacgagacggtggctggcccgcgaccggactccggcctcggcaagctccgcaagtactcctccttctccccctcctcctcctcgtcgtcgtccatcctggctcccgcgccggcgccggcgccggcggtgacgcgcagcatcaccatcgcccgcccgccgtcgctctccgtcgagtcctacagctcctcctccgtcccgtcctccccggccagcacgcccgactcgccgctcgccgcagggtggtgatcagctcgttggaccgctgagttagaacagatcaatcgccaataagcaacaaccgagctagcagagggcatgtttgcgttcttctgaatgttgtgcgcgtgtgtctgtggcagcataagtagagagtatgtcgatgatgatgatgacgacgacgaggatcagttcgcggcggggaggttaggagtagccgggcgccgatttccatcctagtttgggcgtttggcctatagccggcaggcgcgttctccagttcttggatcaggggaagaactcctgccgggcagctgcctgcttcgttttctacgcaccctccctcccctctgta

SEQ ID NO: 72491 - DNA, 552 bp, Zea mays
  unsure (1)..(552): unsure at all n locations
  Clone ID: MRT4577_16610C.1
ggggagcatacgcggcggcttcgtggggtcgtcatcgccgccgcagaaagagggggttctgtggacaaactcgagagaacgcgggaagagagcgctgtgcccgctattattttgcctcgagacaaagggcccacgatcttgttgatggggaggcccacccctcgcggccccgcagcagcagcagagaagaccaccccctgtcgggatcatcatgaaccctccgtcagtatctgtatgcatcatgaaagcacagctagctgttagcatgatttgatcgagcgcatatatgtgcaatcagcttgcttgctaacacaaccgtctctctctctctctctctctctctctctctctctngngngnggctaaatagagagtgagaggacaaaaacacaccaagctctctatgtaactgggtgtggtggtgtgctattgtacccagcctcgaatccaaagagcaaagggggctagggtggaagaaaaagaaaatatttatgctctttcaccggggcacggggcccggggaaaaaaatgaaaaaaaaccacccccccccc

SEQ ID NO: 72492 - DNA, 390 bp, Zea mays
  Clone ID: MRT4577_166110C.1
attcggctcggggggagctctcctgcccgcttttgaaatgccgacggggtcatgccacccagggcgctgatgaccggcatacggggctaaaggcccggggcacagcgggcccttgctaccacccgacggagggtgtgcacggccgcctgcggcacgaacaagactgggcgggcatgcaacagccccaaaacgctggactccgaggccggcctgtagtgcgagctttgcacccccgtccactgcgccatggaggaggccgaggaaggcccaatgccggtacaacgccgctgagctgtctgggttggaacaggcgactacgctcgtgcgcgagggggactggactttcgcccccctgccgacggacatcccggaccggaccaggaccatcac

SEQ ID NO: 72493 - DNA, 848 bp, Zea mays
  unsure (1)..(848): unsure at all n locations
  Clone ID: MRT4577_166111C.1
gggtacctcgaggccggcccgcgaccgtacttccggcctcggcaagctccgcaagtactcctccttctccccctcctcctcctcgtcgtcgtccatcctggctcccgcgccggcgccggcgccggcggtgacgcgcagcatcaccatcgcccgcccgccgtcgctctccgtcgagtcctacagctcctcctccgtcccgtcctccccggccagcacgcccgactcgccgctcgccgcaggtgggctccctctgtttttggtcgcctcgccgccccgttcttgggctacaaatcgtttctgtttctagttatgtctgcgcactgctgcgcagcagcgcaggactggatctccgacgaaatgggggcagtaaaagggatggaaaaaaagtatataaattttgacgttctattcacgttgtttttttttcttctacgccctcttaagcgcgacgcagtcacagatctgccgctgcacagcacgcaatgccttcgtgatagcagatgatggttcgtggngaacttgggtggggagggtgccgttgccgtgtgattgtcaggaccacccagactagctagacattcatttgctgctaccccgcccaaggcggacgntctggaggaggttccgccggaaaaccagggtctccgacgggccggagccggccgtcgggcccaggagccccaccgtctacggactgggtggtgatcagctcgttggaccgctgagttagaacagatncatcgccaataagcaacaaccgagctagcagagggcatgtttgcgttcttctgaatggtgtgcgcgtgtgtctgtggcagcataagtaaagagtatgtcgatgatgatga

SEQ ID NO: 72494 - DNA, 547 bp, Zea mays
  Clone ID: MRT4577_166112C.1
ggccctaggtgtccctttttttttttttttttgctgagaatactcctgtggattgcttcatgtatttttaacccaagacaaaaaaaaatcagaccgatgcaaacgaaagaagcctcacatacatcaaatcgaaaccttgtgcctgagctactaccggaccggccggcggcgcgcgtgtacacatctgcactgggcgactaaaaactcattactcattagcatgcgcagcaaccaaacgagggactatggttacgctataaccactaacaccgcttctatatatataggatccatgcccggttgatgagcgtcgacgacgatcccactagagatcaagcctccggcacggccgcatactgagatacgtctctgaatctctgcaccactatatatacatatatgccatgtcgcgcacgtatctgactcttcgagcattcatttcctgccctcgccatgaatgcgtgatcgccccaactgatcatgtactcgcggcaaatgccgcctcctgcccaggccccccataggaaacaccagggttccccagacc

SEQ ID NO: 72495 - DNA, 241 bp, Zea mays
  Clone ID: MRT4577_166113C.1
aaaaaagaaaacaagaatagtaccagcagcagatagcttacacaatccaagcacccaacacagagatatcatcgtctccccagtacctggttcaaccgggttttggactttggaggagagatcgactttgacgaagcaaatttgccaggaaaccgcaacagacgcgtcatcccatcaccaagcactaggtgcaggaaggtgccccttcaggagatgggtgtggcttctacgggccgatttt

SEQ ID NO: 72496 - DNA, 1302 bp, Zea mays
  Clone ID: MRT4577_166114C.1
ctcagcggccggccgggtcgtgggcggaacagagggatcgtcatccgccccacccacaactgctccagatccaggcacggcacggcacggcagccgggccaacccaagcccgtcttctcttctctctcgtccgtcccgcactcgccgcgacgtgacaagacaacgcgacgcgcgcgcatacgtcgtccaaggcacgcaggggccagccaaccaatcgcgtccgtccgggtctggtggtggccggaatgggcctcctcgatcagctctgggacgagacggtggccggcccgcgaccggactccggcctcggcaagctccgcaagtactcctccttctccccctcctcctcctcgtcgtcgtccatcctggctcccgcgccggcgccggcgccggcggtgacgcgcagcatcaccatcgcccgcccgccgtcgctctccgtcgagtcctacagctcctcctccgtcccgtcctccccggccagcacgcccgactcgccgctcgccgcagctaccccgcccaaggcggacgtctggaggaggttccgccggaaaaccaaggtctccgacgggccggagccggccgtcgggcccaggagccccaccgtctacgactgggtggtgatcagctcgttggaccgctgagttagaacagatcaatcgccaataagcaacaaccgagctagcagagggcatgtttgcgttcttctgaatgttgtgcgcgtgtgtctgtggcagcataagtagagagtatgtcgatgatgatgatgacgacgacgatcagttcgcggcggggaggttagaagtggccgggcgccgatttccatcctagtttgggcgtttggcctatagccggcaggcgcgttctccagttcttggatcaggggaagaactcctgccgtgggggctgcctgcttcgttttctacgcaccctcctcccctctgtaattatcccaagcaccacctcgtactggtagtagtagtagcagtgtttttgtgtgtgtgtgtgtgatgctacgatgtagctgtgccttttcttctgctcgcctggaaaccttttgcgttccaaactgcagctgttgtgttccctccctgcattgttgttcaactcgagttcgacttttaatataccttactgaataacggattacgatgtgtttgccgccatggcccagcagtctggctgcgctctcgggctgcagctcccgtgtttgtgtcgcctggcctgcttgggagtctaactgtgcgtgtacaaatttagcctctcagcctggctccacaggaacgagatcagggtctgttttcc

SEQ ID NO: 72497 - DNA, 1810 bp, Zea mays
  Clone ID: MRT4577_166115C.1
aaataacaaaaaaaaaaaaaaaaaaaaaaaaaaaaaagaacagagggatcgtcatccgccccacccacaactgctccagatccaggcacggcacggcagccgggccaacccaagcccgtcttctcttctctctcgtccgtccctcgctcgccgcgacgtgacaagacaacgcgacgcgcgcgcagcgcatacgtcgtccaaggcacgcaggggccagccaaccaatcgcgtccgtccgggtctggtggtggccggaatgggcctcctcgatcagctctgggacgagacggtggctggcccgcgaccggactccggcctcggcaagctccgcaagtactcctccttctccccctcctcctcctcgtcgtcgtccatcctggctcccgcgccggcgccggcgccggcggtgacgcgcagcatcaccatcgcccgcccgccgtcgctctccgtcgagtcctacagctcctcctccgtcccgtcctccccggccagcacgcccgactcgccgctcgccgcaggtgggctccctctgtttttggtcgcctcgccgccccgttcttgggctacaaatcgtttctgtttctagttatgtctgcgcactgctgcgcagcagcgcaggactggatctccgacgaaatgggggcagtaaaagggatggaaaaaaagtatataaattttgacgttctattcacgttggttttttttcttctacgccctcttaagcgcgacgcagtcacagatctgccgctgcacagcacgcaatgccttcgtgatagcagatgatggttcgtgggaacttgggtggggagggtgccgttgccgtgtgattgtcaggaccacccagactagctagacattcatttgctggtgcgtttggtgctgtgataacaaagggttcgttcatcagaaagctgtgcatgcaagcacgatgcacaggcacagctggtcgatatgcctcatgcctgagctgagcctcaccctctgtgtgttggcgtgtttggcgcagctaccccgcccaaggcggacgtctggaggaggttccgccggaaaaccaaggtctccgacgggccggagccggccgtcgggcccaggagccccaccgtctacgactggttcgttctcgcctcaaagcttctcttcttgtactctcgtgccacgccacctcgaatcctcgatgcacaccatgtccatagctaagctagcaggtcacgatttatgttcctgatacagcttctgtccctggttggttcgctttgcagggtggtgatcagctcgttggaccgctgagttagaacagatcaatcgccaataagcaacaaccgagctagcagagggcatgtttgcgttcttctgaatgttgtgcgcgtgtgtctgtggcagcataagtagagagtatgtcgatgatgatgacgacgacgacgatcagttcgcggcagggaggttagaagtggcctggcgccgatctccatcctagtttgggcgtttggcctatagccggcaggcgcgttctccagttgttggatcaggggaagaactcctgccgtgggaggctcctagggttgcctgcttcgttttctacgcaccctcctcccctctgtaattatcccaagcaccacctcgtactggtctggtagtagtagcagtgttttgtgtgtgtgtgtgtgtgtgatgctacgatgtagctgtgccttttcttctgctcgcctggaaaccttttgcgttccaaactgcagctgttgtgttccatccctgaattgttgttcaactcgagagttcgacttttaatatacttactgaataacggattacg

SEQ ID NO: 72498 - DNA, 242 bp, Zea mays
  Clone ID: MRT4577_166116C.1
cccacgcgtccgcaaaatggttatgacccttacttttggtgatgtggttgctgttcgccactatgagaaggcataaaaatgttcctggtcggggcttggaagagctcttcagtttttctgtttcctcaagtctcagtgctatcctattacaacatggctgatcattaattagaaggttatccttggtgtggaggtggaaaatggtgatttaaaaacttgttactccaagcaacttgcccaat

SEQ ID NO: 72499 - DNA, 159 bp, Zea mays
  Clone ID: MRT4577_166117C.1
agcccctgcactcttgtctctctctgtctccacagcagcgtcaccggctcccggatcctgccagccgtccagctctacaggcaccatgaggagcgccatgctgttcgcgagctgtcctcgccctcagcttggcatggaccttcggggctgcgtgtgagg

SEQ ID NO: 72500 - DNA, 283 bp, Zea mays
  unsure (1)..(283): unsure at all n locations
  Clone ID: MRT4577_166118C.1
gggttgtgtggtgggcttttttttttttttcngngcncgncggttgggtggggggggggttgcncttgtcngngggtgccntcgtttggcgcggggggtgggtnggnccgccnccncctgtggttgtgtgttgnnggctgcngggctcncncctgcttgctggctgnntggtngtngttgttgctgctgtgctttcgcgggggcgttcgttgctgcttgttggttgngtggntgcgtttgctggtggtcggccgcngctggctggctgnttggtctttgttgt

SEQ ID NO: 72501 - DNA, 420 bp, Zea mays
  Clone ID: MRT4577_166119C.1
aaaaaccacatcaaacacctgcctatatgaaataaaattcaaacccccataaaaccttattgacaaaaacacaacacatcaaaccttgtcttttctcccccccctgccggtgttctgtccacccccgccgtatctatgcccaaaaccccgttgttttgccgcgcccaaagcttttttgcctcgctgtttgaaaacaaccccgtttttccaacacagttggatcaatggatcaggcgacaagatcgcttgttcgctgagaccctacccagttgccgatcaagcggacaaaaacagaccccggcgttgttgtgtgccgtaacctgacggccgatcgcacaagcgcaaatcggagaaggaaaaaacaaaacaggcgtgatcccaaaatggcgggtgggaaaaccggtgaaaagggggggggga

SEQ ID NO: 72502 - DNA, 673 bp, Zea mays
  unsure (1)..(673): unsure at all n locations
  Clone ID: MRT4577_16611C.1
gaggctcgggcgggtaaaacactcgtcggcccagttaattcccgtcggccacgtagagccgacgggaattaattcataactcccgtcggcctgggaaaccgacgggaattaataaatgacgcccgtcggccagcaaaaccgacgggagttagccttaactcccatcgaccactaactagccgacgggatcccggcagccgtcgacgggataaacttatccccgacaagggacgcctggcgactgacaaccgacgggaataagccctaaaccgacgggaattacttattctcgtcggtttagggtttattcccgtcggtttctggccgacgggaattaagtgcattcctgtagtgggatgcattaagatccaccagccaggatggaagattttcttgccctaatctttctcacctcattctagactttctctaaccatatcctacctaataaatggctacatactgaanagacccatggaagaacttgagcaaaaaaagggtattggaaaaaatgaaccanactaagtatatcctctttcttactaatctcgaggacgagattatttttaaggggggtaggatttttaatacccaacttgtaatttgtggaggataacctgggccgcagactaacgatttcggcccaccatcccttcactcccgcgcagcccat

SEQ ID NO: 72503 - DNA, 259 bp, Zea mays
  Clone ID: MRT4577_166120C.1
ccggccggggaaccacccgttctctacaatgaactccctggtcaccccggtcgctctcaccgttgtcctcagcgttaacgctcccgcgcctactacttgcgctgcaacagacaaatgactactggcccgcacaacgaccagaacggcacgtccgagtctccatcctccaatgctctcgtccaaggaaccgaccgcagagaataaataacgggctcctcgtcctcctcctcggctcgaatgacagccaccacccgaaaac

SEQ ID NO: 72504 - DNA, 139 bp, Zea mays
  Clone ID: MRT4577_166121C.1
tcgatttcttacaacatgattttgtgaactttatccatccccatgctgtgcttataataggccataagaaaccagttttcattcacacactattagtacaagagccatactttttatttattattttcgaatacataaa

SEQ ID NO: 72505 - DNA, 611 bp, Zea mays
  Clone ID: MRT4577_166122C.1
gcacgagctggcaaagcccgggctcaacgacaagcttcgccactgcggcatcatggacgtcgagttcagaagggtgcggtgcaagtaccccgctgggcagaagatcgtgttccacatcgagaagggctgcaaccccaactacctggccgtgctggtgaagtttgtggcggacgatggcgacatcgtgctgatggaaatccaggacaagttgtcggctgagtggaagcccatgaagctctcttggggcgccatctggaggatggacactgccaaggcgctcaagggccccttctctatccgcctcaccagcgagtccggcaagaaggtcatcgctaaagacatcatcccggcgaactggagacccgatgccgtctacacttccaacgtccaattctactagaaaccaaacaccccctaagttggccgatatatatataatataaaaatggaagccctgggctctgattattggggaagccccaaccagaatgcggataggccaccacctcgcatgattgcgttagtatttatgctggtataaccaaattatataattttcatatactatgcaatgaatctaaggaggcagttcaaaaaaaaaaaaaaaaaaa

SEQ ID NO: 72506 - DNA, 1131 bp, Zea mays
  Clone ID: MRT4577_166123C.1
ccggccgggacacacagagcggcatttcgaataacacaggtgagcgcgacgatgggatccctcgctaataacatcatggtcgtctggcgggtcgtgcgggcccccgaaggtgccacccggccccaacatcaccaccaactacaacggcaagtggctcaccgctagggccacctggtacggtcagcccaacggtgccggcgctcctgacaacggcggtgcgtgcgggatcaagaacgtgaacctgccaccctacagcggcatgacggcgtgcggcaacgtccccatcttcaaggacggcaagggctgcggctcatgctacgaggtgagatgcaaggaaaaacctgagtgctcgggcaatccagtcacggtgtacatcactgacatgaactacgagcctatcgctccctaccacttcgacttgagcggcaaggccttcggctccctggcaaagcccgggctcaacgacaagattcgccactgcggcatcatggacgtcgagttcagaagggtgcgatgcaagtaccccgccgggcagaagatcgtgttccacatcgagaagggctgcaaccccaactacctggccgtgctggtgaagtatgtggcggacgacggcgacatcgtgctgatggaaatccaggacaagttgtcggctgagtggaagcccatgaagctctcttggggcgccatctggaggatggacactgccaaggcgctcaagggccccttctccatccgcctcaccagcgagtccggcaagaaggtcatcgccaaagacgtcatcccggcgaactggagacccgatgccgtctacacttccaacgtccaattctactagactttgaattcccttcgattcatccggcacagcgggctatggaccttcagcagcaagctaattaagttggcagcatgcaccgctaaccttatatactactgagacttccaaattctagtatatgtaatccttttgttcgggttcatgatcgaattccaaagagtggaaaacaagcaaaaggttaaatatacatgccatttttggaggcatttttttccaaaaaaaaaaaaaaaaaaaaaaaaaaaaaaaaaaaaaaaaaaaaaaaaaagaaaaaaaaaaaaaaaaaacccgcggcc

SEQ ID NO: 72507 - DNA, 404 bp, Zea mays
  Clone ID: MRT4577_166124C.1
attcggctcgaggaatgagatctcaggtgttttacaaatagagagggactagttcatgaaatagatcgattgcatccacaagcaggaggaacaggaactgatgaagatatagatcttcaacaaggtgagctgtctgggtatgactggtgagtgtaaccgtctctgtaaagtaagaactcccgaatatatgctgggggaatgcatctggtgctaatcatagggatatggtgttaacatgtacatttaacagctgtgtcaagttcataaagaactgttcccagctattacaatgggagtggagggttactacgtgaaatgagcaactgccatcgcgcgcacggtagctgtaagagacacaacgtgggtaccattggccacagggaggatgtcactaatttaaagca

SEQ ID NO: 72508 - DNA, 419 bp, Zea mays
  Clone ID: MRT4577_166125C.1
cggacgcgtgggcgacatttcgaataacacaggtgagcgcgacgatgggatccctcgctaataacatcatggtcgtgggtgtcgtccttgcagcgctcgtcgccggatgctcatgcgggcccccgaaggtgccggccggtcccaacatcaccaccaactacaacggcaagtggctcaccgccagggtcacctggtacggtcagcccaacggtgccggcgctactgacaacggcagtgcgtgcgggatcaagaacgtgaacctgacaccctacagcggcatgaccgcgtgtggcaacgtccacatgtataacgaccgcaagggttgcggctcatgctatgaggcgagatgcaaggaaaaacctgagtgctcggtcaatccagtcacggtgtacatcactgacatgaactacgagcctatc

SEQ ID NO: 72509 - DNA, 577 bp, Zea mays
  Clone ID: MRT4577_166126C.1
ccccctctcgagtttttttttttttttttttttttttttttttttttttttttttttttttttttttttttttggaacaaaaacgaccaaaccgtttttttcccagttaaaaaatgggttcaaaaaggggggggaaaaaaataacccggtttaccaaatttttctggaaaaactggtaccgaacctttaaaacaaaaacttaatgttccccaaaactggagaaaaagcacagttccttaattcttggtgggggcaaaaatttccaattggaaccccaatttttccttgggtggcttttgggccttgacacccaatttggccaattgtttttttcttttggaggcaaccttggccttttcctttcttttttcctaaaggtccctggggggggcaggggagttcccccccccccccttaaaaaactccccgaggagggaatacttgggtccaggcttgaccctcaaaaccttaaaagcgggagggatgaccatacccttggttttggccaacgggggggggacccccttgtaccttttgagccttcccaaaaccccctccccccttttggttttggggg

SEQ ID NO: 72510 - DNA, 1346 bp, Zea mays
  Clone ID: MRT4577_166127C.1
ccggccggaacgacacacagagcagcatttcgagtaacacagttgagcacgacgatgggatccctcgctaataacatcatggtcgtgggcgccgtccttgcggcgcttgtcgtcggcgggtcgtgcgggcccccgaaggtgccgcccggccccaacatcaccaccaactacaacggcaagtggctcaccgccagggccacctggtacggtcagcccaacggtgccggcgctcctgacaacggcggtgcgtgcgggatcaagaacgtgaacctgccaccctacagcggcatgacggcgtgcggcaacgtccccatcttcaaggacggcaagggctgcggctcatgctacgaggtgagatgcaaggaaaaacctgagtgctcgggcaatccagtcacggtgtacatcactgacatgaactacgagcctatcgctccctaccacttcgacttgagcggcaaggccttcggctccctggcaaagcccgggctcaacgacaagattcgccactgcggcatcatggacgtcgagttcagaagggtgcgatgcaagtaccccgccgggcagaagatcgtgttccacatcgagaagggctgcaaccccaactacctggccgtgctggtgaagtatgtggcggacgacggcgacatcgtgctgatggaaatccaggacaagttgtcggctgagtggaagcccatgaagctctcttggggcgccatctggaggatggacactgccaaggcgctcaagggccccttctccatccgcctcaccagcgagtccggcaagaaggtcatcgccaaagacgtcatcccggcgaactggagacccgatgccgtctacacttccaacgtccaattctactagactttgaattcccttcgattcatccggcacagcgggctatggaccttcagcagcaagctaattaagttggcagcatgcaccgctaaccttatatactactgagacttccaaattctagtatatgtaatccttttgttcgggttcatgatcgaattccaaagagtggaaaacaagcaaaaggttaaatatacatgccatttttggaggcatttttttcatgagggcatgtttcgatatatggaccactaaatatacatatcatttactttcctaaaaaaaaaaaaaaaaaaaaaaaaaaaaaaaaaaaaaaaaaaaaaaaaaaaggggggaggaaaaaataaaaggaaaaaaaaaaaaaaaaagaaaaagaaaaaaaaaaaagggggggcccgttttaagggatcaaattttcttaccggggcattgcaaagaataaattttttttaaggggccccaaaataaaatcactggccccgggttta

SEQ ID NO: 72511 - DNA, 582 bp, Zea mays
  unsure (1)..(582): unsure at all n locations
  Clone ID: MRT4577_166128C.1
agccataattaccagctattttacttgaataatattatntgaaacttcactatgtcttcagaattcaataaaaagaacaccaatttcccatccctaaattgtttgaaaagataaattatttacattgctcttgagacacttgtccacttgcattgccatgttctcttctccgaatgcatgggttctcaattcctcatgtatacaccgggcagccctcaacaacgatacctttggcagtgggacaagaggcgagagggcacccgtccagatcattgccccaccagttgaggccgacgttctccaagcccaagcacaggtagatgagcacggccatgaacgccaggccagcgtcgagcgcgccagagagcaggtagttgtggcgctcccaccagtgacgccggtacctgtagaccacgtgatgatccctatcgggagggtgaagaagaaggcgatggcgcaggcgagcaggacgccccaccagggcagctggagctgctcgatgtagtactcgcaggcgaatatggtgacggcgacgttggcgacgaggatgcagatgaaccaccactcggggacctgcctgta

SEQ ID NO: 72512 - DNA, 481 bp, Zea mays
  unsure (1)..(481): unsure at all n locations
  Clone ID: MRT4577_166129C.1
ggcatttcgaataacacaggtgagcgcgacgatgggatccctcgctaataacatcatggtcgtgggcgccgtccttgcggcgctcgtcgccggcgggtcgtgcgggatcaagaacgtgaacctgccaccctacagcggcatgacggcgtgcggcaacgtccccatcttcaaggacggcaagggctgcggctcatgctacgaggtgagatgcaaggaaaaacctgagtgctcgggcaatccagtcacggtgtacatcactgacatgaactacgagcctatcgctccctaccacttcgacttgagcggcaaggccttcggctccctggcaaagcccgggctcacgacaagattcgccactgcggcattgtgcgttccagttagaaagggtgcgatgcaagtaccccgcggcggagaaatcgtgttcccatcgagaagggctgncaccccaactactggcccgggctggtgaagtatgtggcgg

SEQ ID NO: 72513 - DNA, 342 bp, Zea mays
  Clone ID: MRT4577_16612C.1
aaaatctattggagagattgtcatgatgataagtcagcaagcattatggggtgtttggctctagagactaatttttaatccccccaattcattccactttagccactaaaccgccaactatatacactaatatacaggtataacctccatatattccaagttctattcttaaagatgctcaacctggatataactcagaccgtgaaacccaatccaaaacacacaccatccccaaattatctgctatatcatgcattcgttgacaagccaccaagaaccgcattgtgttcaaatacacccccactctccaattcatctactcgttacatgaattcatcggtt

SEQ ID NO: 72514 - DNA, 1174 bp, Zea mays
  Clone ID: MRT4577_166130C.1
cctcgaggccggccgagttcgcctgcgagtactactcgagcagctccagctgccctggtggggcgtcctgctcgcctgcgccatcgccttcttcttcaccctcccgatagggatcatcacagcgacgacgaaccagactccaggcctgaacatcatcaccgaatacatcatggggtacctgtacccgggccgtcccgtcgccaacatgtgcttcaaggagtacggctacatcagcatgacgcaggcgctggccttcctgcaagacttcaagctgggccactacatgaagatcccgccgaggaccatgttcatggcgcaggtggtggggacgctgatcgcggcgctcgtgtacatcgggacggcgtggtggctcatggacagcgtccccaacatctgcagcacggagctgctccccgccgacagcccctggacgtgccccatggaccacgtgttctacgacgcgtccgtcatctggggcctcatcggcccgcgcaggatcttcggcgacctcggcacctactcggcggtcaactggttcttcctgggcggcgccgtcgcgcccctcctcgtgtggctcgcgcaccgggtgttcccgagccagagctggatcctgctcgtcaacatgcccgtgctcatcggctccaccggcatgatgccgccggccaccgccgtcaactacaccacgtggatcattgccgggttcctgtcggggtacgtggtctacaggtaccggcgtcactggtgggagcgccacaactacctgctctctggcgcgctcgacgctggcctggcgttcatggccgtgctcatctacctgtgcttgggcttggagaacgtcggcctcaactggtggggcaatgatctggacgggtgccctctcgcctcttgtcccactgccaaaggtatcgttgttgagggctgcccggtgtatacatgaggaattgagaacccatgcattcggagaagagaacatggcaatgcaagtggacaagtgtctcaagagcaatgtaaataatttatcttttcaaacaatttagggatgggaaattggtgttcctttcattgtaaaatggctggtaattacggctattccagctcggaatcaaatttattccgtggtacaacaaaacataatttattcaaaaaagcgatctcgcatgctcaggaacgctgg

SEQ ID NO: 72515 - DNA, 253 bp, Zea mays
  Clone ID: MRT4577_166131C.1
gttctagatcgcgagctgcgccctttttttttttttttttttttttttttttttttttttgcacgcaccgtggattaccacgacctcttattcggatattattattatttttctacatctacataattacatgatgcgagttgctatactccgcagccatagaacaaagaacatccatccatgatccatcccaccacctcgtcgccctcgacgactctgcactctaacgcgtgttcctacagccagctgtcca

SEQ ID NO: 72516 - DNA, 3229 bp, Zea mays
  Clone ID: MRT4577_166132C.1
ctcgaggccggccgggaatcccatccatacagctagatagcggtcctaatcaccgacgaataatctcttcttcacctcactaacagcgagctagcaggtcgctctggcctgcaacatggacgctcgctcctcgctcattcctcctcaccacgctgctcgttcctgaccaagcaatcgctttcctcctctttccattctcccagccacaaatcgatcggaaacgcacgcccctttctcttcgccttttcgcgtcgtccagatctcagtcgttcttcgctccatgagctaggaatccgaggtgtcctctaggctaagcgaagttggccggcggcggctaggatggggttgatatccgggatgatgatgggggtcattgttggcgtctgcatcatggccggcttcggcctcgtcttgcgctgcgtgactccgtcgcccttcccgtaggctgcggatatcaaggtgcttgggtctctcagcagggacgacctcaggaagctgtgcggtgataacttcccggagtggatatccttcccgcagtttgagcaggttaaatggttgaacaagcatctgagcaaactttggccttttgttgtagaagctgcaacagtagtggttaaggaatccgttgaaccactgctagatgattaccggcctccaggaataaaatctttgaagttcagcaaattttctcttggaaatgtgtcaccaaagatagaaggtattcgtattcaaaatcttcaaccaggtcaaatcatcatggatatagatttccgttggggtggtaatccaagcataatcctagctgttgatgctgtagttgcatcactgccaattcagctcaaggatcttcaggtctatactgtcatacgtgttatatttcaactgtctgaagacatcccttgcatttctgctgttgttgtggctctccttgctgatccagagccaaaaattcagtacaccctgaaggccattggaggaagcctaactgcagttcctggactttctgacatgattgatgacactgtcgattcaattgtttctgatatgctcttgtggccacacaggcatgttgttaaacttggtgtcaatgttgatacgagtgacttggagcttaaacctcagggaagactttctgttactgtggtaaaagcaacttctttgagaaataaggagatgatcggtaaatcagacccttatgtgaaactgtatgtgcggccaatgtttaaggtcaaaacaaaagtcatagatgatgacctgaatccggaatggaatgaaacatttgacttgattgtcgaagacaaagaaacccaatctgttatttttgaggtttacgacgaagacaaacttcagcaagacaagagactaggtgtggcaaaactagcagtaaacactcttgaatctgagattacccaagacgccactctgaagctgctacattcactggatccaattaaaaataaggacaccaaggataggggcacattacatcttaaggtaaagtaccacccctttacaaaggaagagcagctggaagccctagagatggaaaaacaagccatagaggagaggaagcgtctgaaggaggctgggataattggtagcacaatggatgctgttggttctggtgttggatttgtgggtactggcattggcgctggcctcggtttcgttggttcaggaattggtgctggcgcaggccttgttacctctggtattggtgctgtcagcagtggccttggtaaagccgggaagttcatgggcaggactgtgacagggcctttcagcatgtcccgcaagaacggcagcagctctactgctccccagcatgatcaaccttcggcgtagtatgatgtacagtgaaagacaattgtcatatttgtgacagggttgccattctactctgtatacgtgctatacctaggactatacgtagcacttcgtttttgtttctgccactgcctggtgcctggttatatgaaatatgttttcgtcgttgtattgaaacgaggatctttcaaagtaaagattgctgtaaattgcatcagctttcccgaactatatgaaatttgtgcagtctgttgaagtaaaaaaaaaaaaaaaaaaacgacacacagagcagcatttcgagtaacacagttgagcacgacgatgggatccctcgctaataacatcatggtcgtgggcgccgtccttgcggcgcttgtcgtcggcgggtcgtgcgggcccccgaaggtgccgcccggccccaacatcaccaccaactacaacggcaagtggctcaccgccagggccacctggtacggtcagcccaacggtgccggcgctcctgacaacggcggtgcgtgcgggatcaagaacgtgaacctgccaccctacagcggcatgacggcgtgcggcaacgtccccatcttcaaggacggcaagggctgtggctcatgctacgaggtgagatgcaaggaaaaacctgagtgctcgggcaatcctgtcacggtgttcatcacagacatgaactacgagcctatcgctccctaccacttcgacttgagcggcaaggccttcggctccctggcaaagcccgggctcaacgacaagcttcgccactgcggcatcatggacgtcgagttcagaagggtgcggtgcaagtaccccgctgggcagaagatcgtgttccacatcgagaagggctgcaaccccaactacctggccgtgctggtgaagtttgtggcggacgatggcgacatcgtgctgatggaaatccaggacaagttgtcggctgagtggaagcccatgaagctctcttggggcgccatctggaggatggacactgccaaggcgctcaagggccccttctctatccgcctcaccagcgagtccggcaagaaggtcatcgctaaagacatcatcccggcgaactggagacccgatgccgtctacacttccaacgtccaattctactagactttgaattgccttcgattcatccggcgcggcgggctatggacctgcagcagcaaacaccccctaagttggccgatatatatataatatataatggaagccctgggctttgattattggggaagccccaaccagaatgcggataggccaccacctcgcatgattgcgttagtatttatgctggtataaccaaattatataattttcatatactatgcaatgaatctaagaaggcagttcaccgaaaaaaaaaaaaaaaaaatttgcggcc

SEQ ID NO: 72517 - DNA, 1620 bp, Zea mays
  Clone ID: MRT4577_166133C.1
cattgggaccctcgaggccggccggatagacatccctgtcccacaaaaaaaatgcagaaacagaaaaaacagtagtgcagcagtattagcagacagcaggggtgtgcgtgtgacccgaagaggccaggacaggtaggcgcacatgccacatcccccgcgagcaactactaccatggcatcctcccctcaacctcctcctcatcctcctcctcgccaggaagaggaccagcaacgggaagaagggcaccaccatggcgacggaggcgacgacgaccagatcaccaccccgctcctggtggaagcggcgacgacgtcgtcgccgtcgccgtcggagggagacgatccagagaactcgccgatcgagcaggtggcgctgacggtgccggtgggcgacgacccgtcgacgccggtgctgacgttccggatgtgggtgctgggcacggcgtcgtgcgcgctgctgtcgttcctgaaccagttcttctggtaccgcaaggagccgctgaccatcacggccatctcggcgcagatcgcggtggtgccgctgggccgcctgatggcggcggcgctccccgcgcgcgccgtgctccgcggcacccgctgggagttctcgctcaacccgggccccttcagcgtcaaggagcacgtgctcgtcaccatcttcgccaactccggcgccggcaccgtctacgccatccacgtcatcaccgccgtccgcgtcttctacggcaagcacatcaccttcttcgtctccctcctcgtcgtgctcaccacccaggtgctggggttcggctgggcgggaatattccggcggtacctggtggagccggcggcgatgtggtggccgtctaacctcgtgcaggtctccctcttcagggcgctccacgagaaggagcggcgcgtgaagggaggcatgacgcggaaccagttcttcctggtggcattcgtctgcagcttcgcctactacgtcttcccgggctacctgttccagatgctcacctccctgtcgtggctctgctgggcgttcccgcgctccgtggtggcgcagcagctggggtcggggctgagcgggctgggcgtgggcgcggtggggctcgactggtccaccatctcctcctacctcggaagcccgctcgccagcccctggttcgccaccgccaacgtggccgccggcttcgtcctcatcatgtacgtcatcacgcccgccgcgtactactggctcggcctgtacggggcgcgcagcttccccatcttctccgacgggctcttcaccgccgccgggcagacgtacaacatctccagcatcgtggactccaacttccggttcgacaccgaggcatacgagcgcaacggcccgctctacctcagcaccttcttcgccgtcacctacggggtcggcttcgcgtccctcaccgccacggttgtgcacgtcttcctcttccacgggagcgagatctggcagctgagcaggtcagcgttccaagagaagaaggtggacgtgcacacgaggctgatgaggaggtacaggcaggtccccgagtggtggttcatctgcatcctcgtcgccaacgtcgccgtcaacatattcgcctgcgagtactacatcgagcagcttcagctgcc

SEQ ID NO: 72518 - DNA, 1174 bp, Zea mays
  Clone ID: MRT4577_166134C.1
ccggccgggaaaaaaaaaaaaaaacaacacacagagcgacatttcgaataacacagttgagcgcgacgatgggatccctcgctaataacatcatggtcgtgggtgtcgtccttgcagcgctcgtcgccggcgggtcatgcgggcccccgaaggtgccgcccggtcccaacatcaccaccaactacaacggcaagtggctcaccgccagggccacctggtacggtcagcccaacggtgccggcgctcctgacaacggcggtgcgtgcgggatcaagaacgtgaacctgccaccctacagcggcatgacggcgtgcggcaacgtccccatcttcaaggacggcaagggctgcggctcatgctacgaggtgagatgcaaggaaaaacctgagtgctcgggcaatccagtcacggtgtacatcactgacatgaactacgagcctatcgctccctaccacttcgacttgagcggcaaggccttcggctccctggcaaagcccgggctcaacgacaagattcgccactgcggcatcatggacgtcgagttcagaagggtgcgatgcaagtaccccgccgggcagaagatcgtgttccacatcgagaagggctgcaaccccaactacctggccgtgctggtgaagtatgtggcggacgacggtgacatcgtgctgatggaaatccaggacaagttgtcggctgagtggaagcccatgaagctctcttggggcgccatctggaggatggacactgccaaggcgctcaagggccccttctccatccgcctcaccagcgagtccggcaagaaggtcatcgccaaagacgtcatcccgccgaactggagacccgatgccgtctacacttccaacgtccaattctactagactttgaattcccttcgattcatccggcgcggtgggctatggacctgcagcagcaagctaattaagtttatatatattgcatgagagagcatgcaccgctaaccatatatactactgagacttctgaattctagtatatgtaatccttttgtttgggtttaggaggcaattctaatcatgtatgccgaattccaaagagtggaaaacaagcaaaatgttaaatatacatgccattttcggaggcaatttttttccaaaaaaaaaaaaaaaaaagggcgccgctcgcgatctagaac

SEQ ID NO: 72519 - DNA, 333 bp, Zea mays
  Clone ID: MRT4577_166135C.1
aaaagatgtttggaacattgcaaaaattttttggttttaatcttactaaaaaaactggaagaaacgagcaaaaagaggaggggataaaaaaaaaatggcgtggccaaggcaaccaaacaggggtaaggagagattataaaaaaaatggtgttggaaaggaaaatacctggcctaatttaaaaccccaagagaaactcctccaaaataaaaagagaaaaagtctcaccttaaaacggctgggaggcgaccgaaaagtatgaacaaaaacgttaacccttaaaaaggaagggccccctgcggaggatgaaccaaaaaagggtaaggttaaaaatg

SEQ ID NO: 72520 - DNA, 1337 bp, Zea mays
  Clone ID: MRT4577_166136C.1
ccggccgggctctaaaaaaagaacatgcgtagttaattaccatggcgacgggttaaacagaagtggctggtagcgaggcccaaacaggcggaaggagaacatcgatcggtcgtggctgtttccacagccggaccgaatagcggcgcggccgggaaatggggagaaaaggcaagtggttcgacaccgaaccacacacagagcggcatttcgaataacacaggtgagcgcgacgatgggatccctcgttaataacatcatggtcgtgggcgccgtccttgcggcgctcgtcgccggcgggtcgtgcgggcccccgaaggtgccacccggccccaacatcaccaccaactacaacggcaagtggctcaccgctagggccacctggtacggtcagcccaacggtgccggcgctcctgacaacggcggtgcgtgcgggatcaagaacgtgaacctgccaccctacagcggcatgacggcgtgcggcaacgtccccatcttcaaggacggcaagggctgcggctcatgctacgaggtgagatgcaaggaaaaacctgagtgctcgggcaatccagtcacggtgtacatcactgacatgaactacgagcctatcgctccctaccacttcgacttgagcggcaaggccttcggctccctggcaaagcccgggctcaacgacaagattcgccactgcggcatcatggacgtcgagttcagaagggtgcgatgcaagtaccccgccgggcagaagatcgtgttccacatcgagaagggctgcaaccccaactacctggccgtgctggtgaagtatgtggcggacgacggcgacatcgtgctgatggaaatccaggacaagttgtcggctgagtggaagcccatgaagctctcttggggcgccatctggaggatggacactgccaaggcgctcaagggccccttctccatccgcctcaccagcgagtccggcaagaaggtcatcgccaaagacgtcatcccggcgaactggagacccgatgccgtctacacttccaacgtccaattctactagactttgaattcccttcgattcatccggcacagcgggctatggaccttcagcagcaagctaattaagttggcagcatgcaccgctaaccttatatactactgagacttccaaattctagtatatgtaatccttttgttcgggttcatgatcgaattccaaagagtggaaaacaagcaaaaggttaaatatacatgccatttttggaggcatttttttcatgagggcatgtttcgatatatggaccactaaatatacatatcatttactttacaaaaaaaaaaaaaaaaaagcgggc

SEQ ID NO: 72521 - DNA, 392 bp, Zea mays
  Clone ID: MRT4577_166137C.1
gagttctttagtcggcggccgccctggccttcgtggttagtgcctccgaaaaacgaaaaatttatggattatgaccagggctaattctgcgcctgactggctcgagaggaacactttcttcttagggtgaaagactcaactgcggactacacgcccagcgaataactgagcaacggctacctacttgctgagacacaccagctgataaagacgcagacgacaacatcatgtcaccgcaactttcttgaaataaacccggttgatggctggtgagccattctcccgacggagctatgttgagtctgcagccgtcatccaggataacacacgtttagatgtgcaactaacagttttacaacaagcagagtatgtccataccatgggctatcaac

SEQ ID NO: 72522 - DNA, 344 bp, Zea mays
  Clone ID: MRT4577_166138C.1
atcaaacatctcaaatactagccaaatacgtcttcatgccgtagctaactacacagctagttaagttcacgggcggcacttactgtgcaatttacatagatcgagcaacgaaaacgaaaaccaccccggccgccccagccaaccgcgtgctacgtccacgcacggtccagggtccacccacggcgctcgctcagacagcgtgctccatcatgtccctgaactcgcggaagctgatgcggccgtcgccgtcggcgtcgtgcgccgcgatcatccgggcgcagtcctcccgcgccgagctcgagtcgcccatcccgaggcggcgcaacacgtcgcaaaagctcggg

SEQ ID NO: 72523 - DNA, 623 bp, Zea mays
  Clone ID: MRT4577_166139C.1
atttccctagtaccctgtatatcggaggcgctcttgctgcgtcagctgctgtgatcccaccctgccccctggagcagaagcctccccgatcgccgcgtcctctggtgacacccggtgacggagatctcgtcgacgacagctgcacgagagagatgcgcgacgaccatgctcaacttcaccacggtcctccagagaaggtgaagtaccaggagcggccccgcttccggtcgcgtctggatccgactactctgccgcgagctacacagtcagcgccggagagcgatgactccgaccggcgaccgcgtctgctccttatacacgaactcgtactgttcgctgactgcatgcgcctgcgaagagagactgctatctttagcagactgacggatgcgctcctagggcatcgagtgggcgtgttcaccatcatgtgattcgacacactgacagtttggtgcacgtgtgtcactcgagcccgattgaacagatgccagaagatgctctgcctctgggtgctgctggtggtgaagcagaagctgctgtgctgatacgagaaggatgcgacgactccgatatactccaaggcacgttatgatgagattgtgatggaagtctcatcctacctc

SEQ ID NO: 72524 - DNA, 512 bp, Zea mays
  Clone ID: MRT4577_16613C.1
ggccgggtgcggaagtcgcgacgtcctcccaagtcgcggactcggccggctcgccggccactgaacaagcacctggcggacacctcgtgccaggcgagcccgcaccacccgggctggttccggcaccaccgcaccgtcgatggtcggaggtagggcgggtggcgacgatggtggcgctcccacaaacttttttagcacgccaatgtggaacacatcatgaagacgagcgccggcgggaagctccaagcgtacagccacgtcgttgatcaactccgagacgcggtacggcccgacgtaacggggcttgagcttccctgctaccgtgcgcggcagtgaggcagctgcgcgctggcgtagccgtagaagagcccagtcgccaacctggtaggttaccagtcggtgcgacttgtcgtagtggtgcttctgtgcggactgcgcctgctggaggcggtagcgtacgtccgcgaggaaggcctcccttgcctccatctcttgagccaccgcctcgaccc

SEQ ID NO: 72525 - DNA, 412 bp, Zea mays
  Clone ID: MRT4577_166140C.1
ttttattttgtcattgtttactctgacatttgatattgtttagttttccctagtaacctcactttcatgacaaaactttttctggctcccaattagggagacatcccggcactagaattaagaaagttctacaaagatgaggagccattacgcatcacaaacttatcaaggtgcacaaccaggcctgcaaaaagaagttctgaagggaggagactgcttttattgtccccaccaaatggaccgccttagcgtagatgctgatcatacgtatgacgctaccactgattacttgaggtacagattcttcaactggtaagccttcctgttcaacacgagacactgtgtttgataatgacatcacactcacttcgaaaaaactcacagactcctacccgaaaaccgggcccggttg

SEQ ID NO: 72526 - DNA, 1173 bp, Zea mays
  unsure (1)..(1173): unsure at all n locations
  Clone ID: MRT4577_166141C.1
cccagcgccaccgccgccgccggcatgcctgccagtgcgcgacagcctggggatggctcgcttagcgtacgcaatgcagagccccctcaatgacctcacggccgacgtcgcgctccttcatggcggcaatgcacactgggtgaacgtggccaacgacaggccagcgaggtcgtcgcaccaggtggcccccgcggcggcggcggcgttcttggcggcgctggcgttcgccggccctgtcatcggcggcgatgggccagccgaagagtgtcgtgggcgttgacgcgacggtcttggcggcgactgcgtccacgcagcgcgacacgaggccgaggtcgtcggcgagggggagcaggccctcgcaggacttgagggcgcggatggcatccctggggttcctcagcacggtctgcgatatgaaccggtcggcgcgggagacgaggttgtcgtccgagtggtcgtcagacatgccgaggcgctcggcggcgcagcgcagcggcgcggccgtggccggcgtgaggtcgagcttcacgccgtagcagaacttggcggccagctcgaacgcctccgcgccgccggggaactccaggaggcggatgcggtgcacgcccgcctcctcgtcctcctccagcacaaggtccgcttcctcctctctgatctcccccacatcctcttcttgctctgctcctctgcctctccggctggcctcgcgcgactccttgttcgtaatgaggtcgtgaagcttcttgctcctcgacattaacgggaacttgtggagatgaaaggtcatgtctcccacctcgatcactacatcgctgggcaatcctgtggtgcagaaccatgcttggcctttggagctggccgccgacgccgccgccgctgccaccggcggcggttgcggatgctcccgagccatctcccgtgtgttcttcctcctcccctgcatcatggaacgatcgtctccctcaggaaccgcaccaggcaggcatttcttgggaggagcaggcgagcagcaggaccgtggcccgtgggagtcagggaaggggaagctcgctgcactcgcaataatggtgtccgacctatcccggtgttttgttttaggtggggaggagtaaaggattcctccaacttccaagtgggggaagacgaagacaagatggcgttttttncccggcc

SEQ ID NO: 72527 - DNA, 1098 bp, Zea mays
  Clone ID: MRT4577_166142C.1
tggtcatgccgagcttctattttacccaccccttattaaattattcccatgacttgcgagtttagaggcaactaagaatgagaggcgcagttttgaactgtggaaatagttttcgtccatcggttttgcaccatgaaaatctaaggccctcactcctatgctccataatagccatgtttatgattgagcaagccatatccacaactatcttgctacctttctcatagatagtttgtgcaacccatcatcccaaattaccaaaaatattgaataacaaaattcaatcaagaaaaaactttacatattcatccaatagagcggccttagtagcatgcatcacacctcactattgatgcatccaatcttcctgatgacatagtacactttaattgtatcaccacttaaacatatttatgcggacttgaataattgtgggttaacgggagagggcgttgagagataacgtgactcccaactttgaccttgtcattgtggctttttatatctttttaaatgtcaagatagtgaatcagaaaccttctactagtctggttcattcttgatcacgtcacatgtattggtatttctcgacctattatgtgaccaatgtagcaaaaaaatgtctactaagagactgatgattgatgtaggtacaataggaaagatcaaatctagagacatcagtgtaattaattatttcttttaatttttatattgatgccaatatatgaatatcttacttacataacttgtgatgttatacgtattgcatatcccctctaactttttgtaagtgcaatcaaccacaattgagagttttggtgatttaatgacaaaacaaataaggttacttacaagtttgctcctagtgtatactcagtgtcagtaaagataaataacaactttagttgagaaatgaaaaggtaagtatcaaggacaaagcaaatacatcagtggtgccttgaaaagtttccatgcgacaatcgtgtaaaattttctatatatcttgagtcgcaggatcttattcttccttagtagttttcgcacatgtactggtgtttgctatttctcaagcctctaaattcaaaagttattgtg

SEQ ID NO: 72528 - DNA, 267 bp, Zea mays
  Clone ID: MRT4577_166143C.1
gttgaatgctgtccagcgtcaagaccaaaggcggtgcacatgccaaatctggcaaacccctgcgtgagtacattttggacaggcggttcttacaaaaccaaacacatcgggcccaggtacaacaggggcttaccaacggaggaagaatcccaaagctgaaattacatcccaagttccaggagatcttggcccgagagccgtagagtcacacggattctgctggtacggtgggctattgtattctaaccatcattgtgactgggtttg

SEQ ID NO: 72529 - DNA, 800 bp, Zea mays
  Clone ID: MRT4577_166144C.1
ccggccgggtggagaaaaactggatggctgtaatttagtaggattgtcttttgaattactactctcatgacaagtcccgttgagtttgttgtccctgtagaactccttcaaatggttttataatcagaacacaatgtttaaactcgcagaatggacatgctatttttgtcaatcgaggaatccaacagttaaatattatgcatttagctcacaaggaattataagacaatgatccgttagatgcattaatctaggtagctatttactttaagtgcattttgactaacgatttgttgctatgttcctgaggatctatggatatttgctttcctgttggtactaaggtttgctcccatccctgcctgcctttggtctattctgcctccaacaaatcggtagcagtgagcatttgctatcggttttcacttggcaactttgttggcttcttttatttgccataggtccaccatagtgcagaaattgcttgtgtgtatttcctgtctcaggtaagcatcacagccgcagagtgggtgctgagcagcagtacagtagaattatttatcgttttgtacctaggtttgctcgctctttctcttcccttcctgcttgataattcctgaattctgttaggccttgtgctattttatttttgttcaaaaatgcatggctttaatttaatagaattgtcttttgaattactactctcaggacaagtccagttgagtttgttgtccatgtagaactccttcaactggttttataagcagaacacaatgttcaaactcgcagaatggacatgc

SEQ ID NO: 72530 - DNA, 1253 bp, Zea mays
  Clone ID: MRT4577_166145C.1
tgcaacaagaaaatcgtcttatttaagagacagatattgtacattttggaaaccgtcctattaagatttaaacaaaatgacttacaaggcagtatattcttaaaaaacaatgaacaacacatcaaaaagacaatatcatggctacgaagagtgtttcccatgctcttcacaaaaataatgaacccatattattctttagtcgaggataatacaaataatatcttgggacgagtctgataccctagcagcctcggcaatcctgagagccatgatagatttgtatgttgcgagctctgtgttcgtcatgagaattggaccttgttgcgcagtcgaatagctctttgtacaacctattttgccgcacattcagcttgggcaactctctgcaatgctacctcctcttcatcattgtcatgcaataaaatttcaagctttccatgaccaacttggctttttgtctcttgaaagatctctttcgcttcatgacagacttttgtgatagatgccctcgccttatgggtgcacccaatatatgtgaatcgaatgaagtagaaggcatttcagtaatattctcttacggcatcaaggagccagtagatcatatgaacaaaggtcatattttagtaaatgtagcaaaaaaacagtgaagaatagaacttgcacactttctttatagacctgaaaagggaacttcctgcttagtgatgcaataacaacatgcccgccaggcagtacacagatatccctaatagctttagtatcaggagggggtagatcttctccattccatgtccatgaaacatgctaatctgttgaaactaagaattgatatgcgaaaggtgaatattcaccaaagtttgctataaacattggtactcacatgaagtcattaagcaaaacttgtattaagagttaagacatgtgcctttgtaagtttgtgttcagcacaaaatccatgtacccttccccaagtgaacacgatttgactggatgcatctattacccacaacccgagctccatcaaccaaaaactcattatacaaaacatgcagcaattatgagtcagtgaatgataaagttccttcataactctactgctatagaccccatccatgctccattccatgtccatgaaacatgctaatctgttgaaactaagaattgatatgcgaaaggtgaatatccacccatgtccgctgtgcacattcgcgtccccatccctgaactaatccattatgcaagaacaaaaagat

SEQ ID NO: 72531 - DNA, 1084 bp, Zea mays
  Clone ID: MRT4577_166146C.1
cattgggtacctcgaggccggccgggcacgcaacgcatcgcatcacagattcacagccagccaggctccttgttttccaaattaaagcctttttcttaatttccctagctccaagtcgagtgtgtgtgatcgagagagctagctagcagatcgagcgcgcgcatgatggcgacgacgacgaggagtaggccgatgctgctcgccttggccgcggtggtggcgacgctgctggtggtggccgcgccggcgccggcgtccgggcagcccggccccggcggcgtcgtcggaggcgccatgtcgtgcacggcgtcgctggtcaccagcttcacgccgtgcctcaacttcatcaccaacggcagcgcctccccgaccgacgactgctgccggtcgctgggggcgctgatgagggccagcaccggctgcgcgtgcctcatcctcaccggcagcgtctccgtcggcgtgcccgtcaaccggacgctcgccgtccggctgcccagggcgtgcaactccacctctctccagctgcagtgccgagacgcgtcctcagctcagagcccagctccaggccccgtcgcagatgcgcctgcgccctctctgtccacggccccgttgccaccaccagcgacggcggcggcagcgccggagcctgacgaagcaccggcgccggccacgcccacggccgcggcgccggtcagccaggggcagacgaggccgacggttgtgcccggcgcctcctcctcctcctcctcgacagcaagctcggacgcgccagcgacggctgggtttgtactgttgcttgcaattggagctgcgctcatgacctgatgcgatggttcgctaaataacgtcggagcactggagtgtcttggtgaatcttattagctgctatttaattattagtatctgtttgttactaaatcgatggtgttctgaactggcagtgcctgctgtattttaccacatttttttgtcacggtgtttgaacctttcatcagtttcgtcgtcaggacttagcagaataatgtactgtgtactgttatggtggaatatatttttttattgtcttcttcatccagagtatgtt

SEQ ID NO: 72532 - DNA, 419 bp, Zea mays
  Clone ID: MRT4577_166147C.1
cgccggatccgggggtccctacttcatgccaaaagtcggggacccagcctcacctttcgcgcttcccccgttgaccggacggttaggactatgctggcgtcttgaaaaaatgacctccgtcttcggcagaaagcttccaagaaacccaaaggcgttgctgtaatgaccacctcctccgaaaagggcccaagggtgtaacaaccggaaatttctgagctggagaattaccctgcggacagagttctggaaccacccccagggacacaatcgcggaccctgccagcgccccgctcagaatggtaaaaacctttatgaaggccatcacaaacctacctcttctgccaggacccatgccaagggctgaaatcgggcaaacagggggtttcacataccgaagcctcgtattcaacccagacggg

SEQ ID NO: 72533 - DNA, 223 bp, Zea mays
  Clone ID: MRT4577_166148C.1
gaatttccgggacggacttggaaaatgtataggggggatctttgccagttgttggggggcgagaaaaggcggcacacaaaaaagggaaataggggaggggggaccatccttgaaggttttatattaaaaggggcatgattgctggtgaaacgccctacatttgtgccattaaggctccacccatttttccagccttttggggggggggcggtgccaaatgcat

SEQ ID NO: 72534 - DNA, 313 bp, Zea mays
  Clone ID: MRT4577_166149C.1
ccgggtcgacccagcgttcgttcacgcgtccgccccgcgtccggcgtgcgggcacgcggcgctgtacgagagcatgcgggtgttcccgccggtgcaggtcgactgcaagttggcggcgggcgacgacgcgctcccggacggggcggcgggggccaagggcacccgggtgacctaccacgcctacgccatgggccggagggagtccgtgtggggccccgactgctccgagttacggcccgagcggtgggtgcgggacgggcgggtcgtgccggtgagcccgtgccgggggccggtgttccaggccggaatgcgc

SEQ ID NO: 72535 - DNA, 303 bp, Zea mays
  Clone ID: MRT4577_16614C.1
tgcaggagccgggccggaatattttgccgggtcgacgattcttctagtcggcggccgccctttcatcttgggttttttattaaagcagattcgctggttttcacctaaaccgcagcgaaatacacatagacgcaatgaacgcgctgaaaacactggacccctggcattcccgcgcccatgggatgctccagcaaccgactgtaaaacccaatgccacaaccaaggatgccaatgcacctcatgagggcctcatgcacaagtaacagtcacatgggccattcaaacacaccacgtcgcaatggc

SEQ ID NO: 72536 - DNA, 171 bp, Zea mays
  Clone ID: MRT4577_166150C.1
atgtattccattagagcatcgcttgattatgtgtaaaaaaactcgactcgactcatcctttcggttcccctcccccctccgcgtgccataaccctacgagaagattccaccctgcccctcccgaagtcgcactccaggagcgctcggcaaagccgctacctcaccccgagc

SEQ ID NO: 72537 - DNA, 493 bp, Zea mays
  Clone ID: MRT4577_166151C.1
gtacgcttgtaaatctacgacaacgccttctgctggggacctgactatatgcgtcccggcggggctacaacaggacctccaaccggttcagaccttcctgagaccagagtgggagtacgactcagaaaaatccatcggtcgctacatggatagacatcccctggatccgctgtgactggcgtcttatggatgcatgccactccttatccgattgtcaacaatggctatctctgccctgatgctctgcacgatatgccactgcataatgatactgccaatggtcctactaggtatagtagggaaaacctgtcttcattgacgaatgtattatccatccttaactactaaagatgatcaccatcatagagcattgcatacgaggtgaggacagtgctcctcagagcaaaggagcataaaatcactgatgtccaatgcttgctgtgaaatcacctgcccctatcgatcacactgcccgtactacacagagagcacc

SEQ ID NO: 72538 - DNA, 827 bp, Zea mays
  unsure (1)..(827): unsure at all n locations
  Clone ID: MRT4577_166152C.1
gccggccgggtctatcagatccgaatacagatagctcaaattatggctcgggcgctcggtttcgcgcagcaggaaggaccgagaaggggtgcgcatacctggctggtgctcatcggcggcgaagaggcggcaaagggaccggcgaagacctgggcacctagagaagggcggcggcgacgacggtcgcccagctgtcgccgagagcgagcgaaagatagagggaaggccggaagggacggagttatttgagattgtaacaatctcgtcgcgcggcttcgccacattattactccacagccgcgcatcgccattttggtattctggagctcacagccgcgccagattgggacagttattcccccgcgctctgttaacgtctgtttttcaattcttcggactaatctacccccagggtgttcttgcgctcgggtgttcttcctgccaccagaaaacagaactcgcgccgccgtgtgccactaggggcctcgctaccaggtggtcgcgcagccggctaccaccatatgcctgcgacgccgcctgcttccagctgcgagcgctgccatctcccagcagccgtccgcgccaccccctgccagcagctccagccagatggccgcgccaccccctgccagcagccagatggccgcgccgccaccccctgttatctctagttagctgttttctctgtccaaatgaagctgattttctgtttagcgaaattctgttatctctggttgaatggactgaannatctgattatagaatgggactgannactgaaatccagctgtccaaatcaagctggtccttttggacacacccgtaat

SEQ ID NO: 72539 - DNA, 547 bp, Zea mays
  Clone ID: MRT4577_166153C.1
gaacgacttgatgctcacgtggagcacatgcttgatggtctggatgatgctgatggagcagaggacgtgccttttgatgaacttgttggtatgcaaggccctgtcttccacttggttgagaacgcaataacagttttggccagcaatgctatattcctcattgttgtgatctttgttccattctcattgggaaggattatcctgtactatctatcctggtttttctcttcggcttctactcctatgctggcaaaagtgatgcccttcacagaaacagctatttctatagctaatgatacattaaagagcgcacttaatgttgtgaagaatttttcttctgacagtaataatgaaggtgttatcgggcatgtgattgaggttgttactcaatccttgaagataaatgccactggacttagtgtaattcaaggcactgggaagaacagtctgatgaaaggaacaacaattgcctcatcttatctttcagatctgacaactcttgctgttggatacatgttcatcttctgtcttgtgtttttgtacattg

SEQ ID NO: 72540 - DNA, 288 bp, Zea mays
  unsure (1)..(288): unsure at all n locations
  Clone ID: MRT4577_166154C.1
gtacgttcatcgatcaagcacacacggngcacacagnaaacanagcaccgccaccgccaagcacagtcaccaagtgtgtattctctagctagttctcggaggcctttttcttttctttttgtctgtaaccatgtattgttcaagccctcgctacatacttgctcctcctccttatgctgatagtgcttagtaggaaggaataatgatgcaaataactgttgcattcatattggtacgtagatatataaaaaaaagatcaaacagaggaggagtgaggacagattgaag

SEQ ID NO: 72541 - DNA, 308 bp, Zea mays
  Clone ID: MRT4577_166155C.1
gcggaagcctccggttttttgttttttacgacgaacgttcaaggtcaccggcgccaaacgcaagaaggtcggtggcgccaagcgcgggctcacccacttcttagcgtttttggatgattttacgcctcattacctgcatatgctttcttccttaagggcggaaaggacgttaggtgcttcttctcaccctaagcatgtacctgaactccagttaagtggctgacatatgcctctgctcgtccgtgactttgcttataggtgagcaaggcggctggggagaatcggcgctctatgtctgatgaagagac

SEQ ID NO: 72542 - DNA, 215 bp, Zea mays
  Clone ID: MRT4577_166156C.1
agaagaggaaccaaaggtgcacttttatcttgaccatagaaagaagaaattgagggtatggttcaaactgacactggcccccgtggtgaagcgcgacggatgcatactcactgattattgctgaaagactcgactaactagctgatcagacgctatactacagcacataggggtcgaaacccggaggacaccgcccggagaggagtaacaacatg

SEQ ID NO: 72543 - DNA, 175 bp, Zea mays
  Clone ID: MRT4577_166157C.1
aaaaacaaacacaggtgggttgcggaacaatcccattttgaccactttttgatgggggttccagggggcccagcatgggaagaaggacgcattggttgctgttaaaggacctacggaagggcttccaaaatttgtttttttgccaaaaaaaaagggggggggggggggggggggg

SEQ ID NO: 72544 - DNA, 932 bp, Zea mays
  unsure (1)..(932): unsure at all n locations
  Clone ID: MRT4577_166158C.1
atctgccgttcgccagcgtgttctccctctagtgcggcaactgggcgaccgccgccgccgcttactccgggtgcccaggcattcgtccgtaccttctaggccttcatcgcgnnnnnnnnnnnnnnnnnnnnnnnnnnnnnnnnnnnnnnnnnnnnnnnnnnnnnnnnnnnnnnnnnnnnnnnnnnnnnnnnnnnnnnnnnnnnnnnnnnnnnnnnnnnnnnnnnnnnnnnnnnnnnnnnnnnnnnnnnnnnnnnnnnnnnnnnngtccttcgccggcgacgatcaccgacaagggtatcgcaccgtttcccttccgtttctgcaggcacccgaaccctaacataagctatttggctacatttattccgatctgatctagctacaataaaccaatatacgccgtttaatgcccccacccctcagggtgtacgcaacgtactcagtaacatctttagttggatatttcaatggtggtgactcggttgatgattttgcaataacttggtgctaagcttactttgcactggagtgcttgattgttaattagtagaatttagaaaacgctggtgattttgctgttttcttctctacacatcccttgcttttgttactttttgtcatttctctagtcatgtcaacaaaggattcggtaaacttgaaattgaagttggtaacaagaactgatgtcaaggattgtcaccctgatgactggcgtgggccttttggtgacatggttctggattttctaatgttgaaaatatacttcctacctaagtaacttgaattcgctacagtgtgggagctttggtttacagaaaattatgctttagctccttgtgaggattnntgatgtcatattattggtcaacctcagccttatccatgaatgatttatgatacaatattgtggcaatgtttccatccgtgttttc

SEQ ID NO: 72545 - DNA, 391 bp, Zea mays
  Clone ID: MRT4577_166159C.1
ggcaaaagactttagccacacaaataagtagagcacagtttgcagccgtgcgatgtagcaaaaggtttaacaacgggcagttgatatatacaaaagagtaggtttttcttctgccactacacattacaagttgctaaggatgaacatccggggaggaaaggtaacaagcacgattttaagtgagatgcattcacgttggccgccagcatatcaaaagcgtgataggcgtaccatcctgatcaaagttaaccttggcaggtttgtgtaggcaaatcgttagcgatgttgcatacaaaagtatgtaccacatttcccccatccaactaacatatacgacaacttgagaaaagtagaaatagatgataaccctgaattacacatagctgcaact

SEQ ID NO: 72546 - DNA, 152 bp, Zea mays
  Clone ID: MRT4577_16615C.1
ttttctgtggttgacactgacagaggtctgcagagactatcggttattgctgcacggctttccctaaccctatccccactccacaccaccttccattggatcctaacctcctttcttccatgcgtccctgtatctccttttctctacttgtc

SEQ ID NO: 72547 - DNA, 216 bp, Zea mays
  Clone ID: MRT4577_166160C.1
gttatgaggggctttcctataaaagaactgctctgttgatgcgggctacgtagtacaactttattattatactataacacggccaagtggataccaggatgatgcaaacatgccggtcctatctgataagatcgaacctatgagatcaagtgggggcacgcatgctgactccgccctaaggtgggcaagcataagtaaccatataaatctctagaa

SEQ ID NO: 72548 - DNA, 394 bp, Zea mays
  Clone ID: MRT4577_166161C.1
tgttcacaacgtggtacatgtggctatcgctctatgaagcgcaacttaagatctctcaatctaggactgacttatctagcggtaccgacagcgtgtacatctaattcacagttgtcgtcaagcaacatagtcggatatgtatgtagctctctaccactactgggcatgatacgattcagtactaaggtgcatattgcacaagcaagatatgaagattcatgtgtcaccaatatctcaattactagggacgtgcattacatataatcaagaccagcttgatgctacacgcacgttactcagatatggatgatgatatgtgtagagaatgaataggtctgattctgattgctgtttacaggttagaggtgcagtgcatttacaaagagatataaga

SEQ ID NO: 72549 - DNA, 353 bp, Zea mays
  Clone ID: MRT4577_166162C.1
ggacgaccaaaatgaatggggccatttttaagattgttcggtaagaataacactgtgatacacagcagagcctaccattttcacgggggggagaatatgctgctctaaacatataaaggtgaagtttacatgccaacccgcacatactggactgccatttgaggtgctgttagcatcgtagggcagtcgttcgcacaaactgaacatacacgtgtccaggttttatttttttcacgtatatccctcctcttatactggacgttctttacttgacgttgatgggcatcctttggccgtcccactccttgaggcactcaaggattttggccacaagcttgccctggttgatgccc

SEQ ID NO: 72550 - DNA, 543 bp, Zea mays
  Clone ID: MRT4577_166163C.1
aacccaagaaagagcagtgtagaccgctgcagctaaccgcgccccaccgctttcccggtctgctctccaaccgactgctacgcgctagcacgtattctgctcggcgccgttttccttgtagtctcaggagcagctaaccacgaccagtcccaaccaacggactcgactctcggacaaaacgactgccacgaacctcactacctcggcggtgtcgtcgtctgctcgcgtagtcagcgactacctcgccgagagcgactaccccgaccgtgggtactcacgtgcggtacggctatccctgtaccgctccgaggcagcgtactgacctctgatgagagatgcacactgcagactatgtgtacgactgccgttgctgtatcgcgagaggactgaggacttggacccgtgcagcgcctaggagtctgatccatgccacaactgacgtggtcgcagacgtcgatctagtcgtatgcatggacggcgactcttatcgtactactgataacccctacatgcatgtccacaatacggcgctatgcttattat

SEQ ID NO: 72551 - DNA, 277 bp, Zea mays
  Clone ID: MRT4577_166164C.1
caacttcctcctgagtcagaactttgatgagcgagtgatgccatgaagccacgccaccgaagcccccaccctacccttattccatgaaagttttataagagagagaatatatatatattcatgtttatttaagaaatggaaaaaaaaatcaaaaatcttattaaaacaagcatacagtcctacttcctgtcctcctaaagtggcccctgttcccatctcccgggccagacagctgtcgccccgtcctcctcgcgagcccagcctgctcagagaagtg

SEQ ID NO: 72552 - DNA, 398 bp, Zea mays
  Clone ID: MRT4577_166165C.1
cttcggggacgcctgggccccttccccatcttgtcgagggggaggccaattccggaacccgccgcctaattcaatggggcccaaaggccgggaggaggccggccgccaggaacctggcgaggaagagcccgccgccgaaaaaggcaaccgcggggaggaggccaagggttggaaggcggttcccggcggcaagtcccaagcaaggggggtggcgaggaggaaggggaggaggaaagaaaagaagtcggggagacgtacaagatcacatctttaagtgctgaagcggtgcacccgacattgcattcgtcagggcatgtcatatgactcttatcacacatttcaaagtgcggcgagcgcagctgccgacacagagcacatactcgggacaactcgtgctg

SEQ ID NO: 72553 - DNA, 320 bp, Zea mays
  Clone ID: MRT4577_166166C.1
caattggttaataatatggtcagcctgctatatccaggcacgggagcctcgggcattgttgggtgctcgaggctaaactcatccatccattctggacacatggaagcacacactggccaaaagcagtgtcgcaagaaaactgctatggtagcgagactaatcggcgctgtgaaggcgaacgacagagaagagtcaccgtcgacagcgctccccaaatactgtacacaaacaagtagaagagcatagccaagcgttgataaaccacaggatcttgcctgggatcgcgcctgtacatactcagacgccagcagatagaggag

SEQ ID NO: 72554 - DNA, 444 bp, Zea mays
  Clone ID: MRT4577_166167C.1
accactggtataactaattttgggctaggcaaaaaacttacaaaatttcctggacaaagaaaaaactgggggggggaacaccaatgaattggcatttagcaacaagggggggtttaaaaagggggccactccaccaaactagggactttttaaacatcaatacaacatcgcagaggggggttaccccaaaaaaaccaggggacagacagatctttaggggagggtgaccacatccattttattgggcaggccccaggctggggatcctgctgccttgggaaaaacaaccaggggacaaacaaatttttaggggagggtgaccacatttattttattgggcaggctggggaacctgctgccttaaaaaaaactggactgatgtatagggctgaaaaaattttggaaaatcgacgtcagcataatttattgacgggattgccattg

SEQ ID NO: 72555 - DNA, 2987 bp, Zea mays
  unsure (1)..(2987): unsure at all n locations
  Clone ID: MRT4577_166168C.1
ttacgnttcccggtcaacaggtaaaggggccctaacatccccttttaagcttctgaagtccaaccatctcggtgtggtgcttacattcactgtatataaatatgatctgcctccaaatgcaacaccacaggagcgtattcatgctacattgggctatcttggtgcctcatttgatgtcccttctctggttgataaactcctagaacaactcgctagcaaacgaaagatagtagttaatttatatgacaccacaaatcatacctctcctattgaaatgtatggttctgattttactccatctggtgatctgcatattagtagcattgattttggagacccaacacgcaaacatgagatgcattgcagatttaaacatgaaccttcactgccatggtctgcaataataatatcaacagctgtagctataattgttttgcttgttggacatattatttatgcaactctgaactcccttgaaaaggctgaacatgattatagagtaatgagagaacttaaaggacaagctgaagctgcagatatagcaaaatctcagtttctagcaactgtttcccatgagattcggactccaatgaatggtgttttaggtatgctgcagatgctaatggacactgaacttgatacaactcagcaggattttgtagtcaccgctcaagaaagtggaaaggtattaataaacttaataaatgaagtccttgatctggctaagatagagtcaggaaggattgagctggaagcagtgccttttgatgtccgtgatattcttgacaatgtgatatctcttttctacgataaatcacaagctaaaggcatagagttggccgtgcttgtatctgaccaagttcctgatgtcctaattggggatccatggcggttccggcagatcattacgaaccttgtggggaattctatgaagtttactgaacagggccacatctttgttcaagtccatttggtcaaggaactaaacaggaaaggaaacaatttttgtgatgtttctgctcataacagagaaattctgtatgattctgacaactcgatgctatggaacacactaagcggacttgaagtagcagatagctggaggtccttggagaattttacgatgttcaagaattcaaatggtgaaacagatacaattaggttagctgtcagagttgaagacaccggcataggaataacaaaagatgctcaaatgcgtatttttacacctttcatgcaagctgacagttccacctcacgaacatatggtggaactggaattggcttgagtattacaaaacgtttagttgaattgatgggtggagaaatagggtttactagtaaatcaggagttggtagtacattttcttttactgccattttcaaggagaacagaggatgtcctggagatatgaaaagatactattctgaacctactccgttggattttcaaggaatgagggctcttattattgatggaaggagtgcacgtgcagaggttactatgtaccatcttcgtagacttggaatacagtgcagtcttgttgccacatctgaatctgaatctgcatcttcagctttgatgaaagcctgcacctcaagcaaaaacaatccggacatggtccttgttgatacagaagcttggggtaaaggttcaggtttggcattctatcatcgttttgtagattgtcaactaaagggcgcacacaagttttctcagcccatgccaaagactattcttttgggaagctcaataagccctgttgaatctgattatttaagattgacaggatttggtgattgcataaggaaacccctccgtcttagtactattgttgcctgtcttcgcaaaaccttaggggttggggttacaaggcagcagagtagagaccaatctttggttcttcaaagtgtactaactggaaaacagattctggttgtggatgataatgcagtcaaccgtaaagttgcagctggttctttgaagaaatatggatctaaagttacatgtgttgatagtgggagtgatgcaattgatatgctcaagccacctcacacatttgatgcttgcttcatggatgttcagatgcccgagatggacgggtttgaagctacaagattaatccggtccatagagaaaaaaataaacgatatgatcatgatgggtgaaatatccgctaataattatggaaataaggcccattggcatgtaccaatattagctatgacggcagatgtaatccaagcgacttttgaaaaatgtatgcagtgtggaatggatggatatgtgtcaaagccatttgaagaacagcagctctactttgctgttgctcatttcttagagactgatgaaacagaataacaaatccaacttcgtaggagattgatttgccgcaacactgtttcaacatctgccaaaagaccatctgttcaacaggttctgaaaaacagcgatcggcagcatatttggaaacaaaatacattggactcccactgaccagaagaaagaagataagatagtagggggtacaaaatgtttggtctggtttccgcagcaattttttttctggccgtgttttctggaaccaatacaacatgaccttgcaacagtggtgtcagttgcttctgtaatgccttatgacaccacgatatttccaaatgctgtgttgtaagtgctttacagacaaaccgaggtccagctttctaaaacattgagttcaatgacatcacttcatccattatttaagaaagcgagggtcttcaaatcaggaggatacaattgtatcaccaagtcaggcacacagtttcaaggtgactttgttctgatctgattgttaatgcaatctgtaaagaggcaactatgagttagggattgtttgatgccttgaatgtcgtatattcatattccatcatttttgtgggcacttgtatatacattgatgattaattgtattgctagataaaaaaaaaaaaaaaaaaaaaaaaaa

SEQ ID NO: 72556 - DNA, 720 bp, Zea mays
  unsure (1)..(720): unsure at all n locations
  Clone ID: MRT4577_166169C.1
ttcatattgtcgatccaaaacaggtttcgtaacttctcatgaactgaagaaaagtaggagaaacagagtgaaaccttcgttggtttgagtttagaaactgaaataggatagttcgattctaaataacttgtgaattcattcagttgttgctgtcatcattataacatatcaatttgttcatggccagcaacctacacttgtcctcagtattacgacccaacaaaatcaatgcataatgtcgccatcatcactttccatgtatgcatttccttttctaagcactgttgatgccttacttgttgatgttatcatttatattttacatgttgagcagcaaaaacaatccggacatggtccttgttgatacagaagcttggggtaaaggttcaggtttggcattctatcatcgttttgtagattgtcaactaaagggcgcacacaagttttctcagcccatgccaaagactattcttttgggaagctcaataagccctgtagaatctgattatttaagattgacaggatttggtgattgcataaggaaacccctccgtcttagtactattgttgcctgtcttcgcaaaaccttaggggttggnggttacaaggcagcagagtagagaccaatctttggttcttcaaagtgtactaactggaaaacagattctggnntgtggatgantatgcagtcaaccgtaaagttgcagcttggttctttga

SEQ ID NO: 72557 - DNA, 499 bp, Zea mays
  Clone ID: MRT4577_16616C.1
gcgacccctaccactatataacatggctcacttgataaggctgcagagaaaagttactgatgatccatgcgcccggaggggaccggtcatgaaactcgggacataatctgaacagcaaacggcgcatgggccggctccctatgaccaaacacaagacccaaataatgtgaacatcgtgtaacccatctatgaactcgcatctactctagcttgtccaggacctcctcgagcgcatctttggttgctagcatatatttcatgccctcgcggcttgctcttgatttttgcgagcaggaaaataccgccctatggtgctcaaagagatcggcgacgagctcctatgagatctggttgtcctccttgagcattgaaaccgatcactgtcttgaggaactcagcgcaggtagaaggccccgatgcggacgtcgttctactacgtacaagacagccttcttgacgatgagtaccttgaggttgatcatgtcctgctgcgacgact

SEQ ID NO: 72558 - DNA, 978 bp, Zea mays
  Clone ID: MRT4577_166170C.1
cgatatgatcatgatgggtgaaatatccgctaataattatggaaataaggcccattggcatgtaccaatattagctatgacggcagatgtaatccaagcgacttttgaaaaatgtatgcagtgtggaatggatggatatgtgtcaaagccatttgaagaacagcagctctactttgctgttgctcatttcttagagactgatgaaacagaataacaaatccaacttcgtaggagattgatttgccgcaacactgtttcaacatctgccaaaagacccatctgttcaacaggttctgaaaaacagcgatcggcagcatatttgcaatggaattgaggtcccagttcttatatatagaacttgctccaggaaacaaaatacatgggactcccactgaccagaagaaagaagataagaagatagtagggggtacaaaatgtttggtctggtttccgcagcaatttttttttctggccgtgttttctggaaccaatacaacatgaccttgcaacagtggtgtcagctgcttctgtaatgccttatgacaccacgatattttcaaatgctgtgttgtaagtgctttacagacaaaccgaggtccagctttctaaaacattgagttcaatgacatcacttcatccattatttaagaaagcgagggtcttcaaatcaggaggatacaattgtatcaccaagtcaggcacacagtttcaaggtgactttgttctgatctgattgttaatgcaatctgtaaagaggcaactatgagttagggattgtttgatgccttgaatgtcgtatattcatattccatcatttttgtgggcacttgtatatacattgatgattacttgtattgttattagggtttgcattttaagattaaacgttcccccccccccctgtaatgggtctggcccagttactactctattaatacccccccccccccctggttaggggcatgggttccgtttccc

SEQ ID NO: 72559 - DNA, 507 bp, Zea mays
  Clone ID: MRT4577_166171C.1
gaagctgctggaagaacgaagagatgagctttctcttgaaggaaaaagagatgatcattgctggtttgttgttgtttcgtgtttttttagcttcttgtcccccatttatatttcgcgcctaatgaacgagctcgtagatcttgtgttcttgtggctggttttgttggatctcgatctcggttacgtttacatgagtcttgctgcctaacatacatctgtgttctttttctaggctgagagaaacttaactgatcgagtctgtctggcaggcatcgatctatccagtcgtcagttcgtcacatccgctttttcgtatatatcatcttcagatttttgtccatctgtcaaatcatggaaaatctgtcgtctttgcttgtattctcttctgttattcctgctgcctccggcggaccaattcttgaatcgacccgtgttcctattcccttttgttagacagcccaaatcgcttgctcgatcgtagcgtactgcactactgcggctagctag

SEQ ID NO: 72560 - DNA, 235 bp, Zea mays
  Clone ID: MRT4577_166172C.1
actttctctcatcttgttgtcatcgctcacgacgttgatccgattgaactggttgggtgggtttcagccctgggcaggaagattgaagtcccttacttcatttttaaaggaaaggctcgccttgtatcgattgtctacaataagaatgctttattcttttgtctgaccactgtcaagaacgaggtttagcttgatttcatcaagatactgtgtgctattaatgcaatacttatcg

SEQ ID NO: 72561 - DNA, 1720 bp, Zea mays
  Clone ID: MRT4577_166173C.1
gaggctcggccgggaaaaaaaaaaaaaaaaaaaaaaaaaaaaaaaaaccgcttctttctcccccagttcccggcaaaaaacaaattgccggacccgctgtcagagtctgacatcgcttgggcgtctggacggtcaacgttaaccccacgcacgcttcttctcccccagttcaagtgccacaccggccgctcgtcgccttcccatctcgccgcgccatggatttctgcagccacctccgtctcgcggctgtgctcgcgctcctcctcgctgtctgcgcttctgcggcgagcaggggcgctggttccttcgacccatcccgagtggtccaactctcgtggtgccccagggcgttcctgcacaagggtttcctgtcggatgcggagtgcgaccacctcatcgcgctggccaaggacaagctggagaagtctatggtggccgataacgagtccggtaagagtgtccagagtgaggtgcgcaccagctccggcatgttcctcgagaggaagcaggatgaagtagtaacgagaatagaggagaggatatctgcttggacatttcttccaccagaaaatggcgaatccattcagatattacactaccagaatggtgagaaatatgaaccccactacgactacttccatgacaaaaaaaatcaagccttgggtggccatcgcatcgccactgtgctgatgtacctctctaatgttgagaagggtggagagaccatcttccccaatgcagaggggaagctattacaaccgaaggacaacacttggtctgattgtgcaagaaatggatatgcagttaaaccggtaaagggtgatgccctgctgttcttcagcctccatcctgatgcaacgacagactctgacagcttgcacggtagctgccccgtaatcgaaggccagaagtggtccgcaactaaatggatccatgtgaggtcatttgacctcacccgtcaagcagccgggtccctctgatggatgtgaggacgacaatgtcctctgcccccagtgggcggccgtgggcgagtgcgccaagaaccctaactacatggtggggaccaaggaagcacctggcttctgccggaagagctgcaaagtatgcgcagagtaaggtatgcactaggcgcattaaattgttcttgaagcgatcgatgtcttttgattgcgatccatgccatgcacatgcatatcgaaatctcagacaagcaactgtagcagcggtacatacatcactgttcactccagtccagctagctagccagtagtaactgtggttagttggattcaaaaaggttgtacgggcatcgccgcgggtttttgcgtgtcccccctctcagaataatcctgagatcttttagcttctatccgagtagtcggtacatatatataagtatcctttcatcttaattagcatctactttagtactagttattagaaagtattatcctgctgtctgatatgtgtcatggcgtgttgcgtagtagtctgctgtttggataccgactggagtatagcatgtatgaagtagaacccggaagaaggaatcgtacgagagccgagttatctgataacttgtctcttgtgggaaatgaaagcgttccttaattgcaagaacaaatccggatcccctttaattattgttccggacgaacgatccgagaaatgcattcatcttcttgcccacgtactctgcgttgttagcactcttcccgcg

SEQ ID NO: 72562 - DNA, 668 bp, Zea mays
  unsure (1)..(668): unsure at all n locations
  Clone ID: MRT4577_166174C.1
aattcggcacgaggacactcacaccacacgtcacgctcgcaccggcgagcgggcggcgccctgacggccgaggatcacgtcacacccaggcagcggctgcgctccagaggaacatctggtcgtacaacactccgacaccgaagaacataccaaaggccaccgcaaagatgaccttatcggcgtactcttccgtggagacatcggtgactggaactgcatctgctgaattacagtggcgcatcagcgtagcgccgcacagctttgggtttccaaaaaagctagagtctggaaatgtgctaaactggcctccagttggaacaggcccttctagatcgttgctggaaatgttgaatttggaaaggaagtgaagcctctccagtgcagaagggatttcaccggtcaaattattgtaggataagtctagcacctgtagaattggtgaggttgccgactgattngcgggatctccccatgtaaagttgttgaagctcaagttgagtgtaaagagtgcctgtagctggccaatctctggaggaattataccgttgaatttggtggtttcctagattcaacattntagggaagccactgggttgttacggtatttgaagaaaacggtngccaggtagacaggaaacttnagtattattggggccagagtgagctgc

SEQ ID NO: 72563 - DNA, 376 bp, Zea mays
  unsure (1)..(376): unsure at all n locations
  Clone ID: MRT4577_166175C.1
ggacggtccctgccggcgtccccgcttttcctttcgggggtcggacttgtcgaagaaaatcgtggtgaagctggacctgcncgagcccccggacaggccgaaggcgctgaaggccatctccgtgctcttttgcntcgacnccgtggtgggggggggggggtttttcctactatttgnncgcnaccgcggccccggggcggggggggagcacgctgcgccccacgccgngggcggcgcgcatcgncnccggcgggccggcccgggagcccggggggaagggggagaagaaggacggcggcggcgccgcgcggccggcggcggnggcgngggcnnccgcggggcnggggacgggccgaagggcggcggcggggggggc

SEQ ID NO: 72564 - DNA, 322 bp, Zea mays
  Clone ID: MRT4577_166176C.1
cttaaccaaacggaatgaaaggttcctttaacaaccgtgggtttattagcccctattacatacttgggggcattaccaagggccaaaaaaggggtttaaaccggggggaaatttacccgggttccaaccctaataaacccccactccccacaaaaagaaaacttggagaaatcccccaatgaatttggaaaaaaaaggcactaaacccttccccttttttacccccttgggaaaaaacccccggggggcaaggggggggtccttttcttgggaggaaaagggaacctttccccaccggcccatggttttcaggggcccgcaa

SEQ ID NO: 72565 - DNA, 447 bp, Zea mays
  Clone ID: MRT4577_166177C.1
gggaagggggaatcttcgtaaaaaattatagcagtccaaaccaaagcccattcggggggggggggaaacagaaccccaggagcaaaacataaaacccatttccggccaggctttgagcaaaccccaaagcctccaacggggccccaacgaaccgaaccccactccggggacccaggcacccaccccacaccctacctggttggaaggggaagtttccggtgtacccccactacggggcggggcaccccccgacaacccgggggggcagtttatgtaggagaaagtaaagggcccccccaaacagggaggcggcgaagggggcccccccgtttagggatcgaacacagtcgaggggaaaccccggccggcccggccagtgggggagcgcaacgggggcctcgggcacaaggggctggggggggtgcccgaacccctgggcctcccggt

SEQ ID NO: 72566 - DNA, 1212 bp, Zea mays
  Clone ID: MRT4577_166178C.1
gtgttcagacagagagagagagaggcagaggcataggcagaggcagaggagaaaaatcaatccaccaccgagcagagaagacctccaccggcgctgccgcggtgttgacccctccccccacgctggatccccccacggcggcgggcgcgtccttcggcggcggcggcgcgttgttatgccgagaggcgcccaggtttcaacaccattcgcctctgggtttctagcattctcagaaaggatatggagcgcaccctctatgcaagttcccctgtatcccacgtctcgctgcttgagcaagttcttggctggagattttgtctttacggagacttccttgtcatctccttcgtcaattgcacctgaagaacacacctggcttagcgactaccgtgcctggtcccatgctactggacattagggccgactagtgattgcggtgcacatctattcgagcatggtgcgtctcttctctggcaacattttcgtaatttttgccgtggcactggtcagccagcaaaagttaccatcagaacttctttggacacttgggatctaacccgtagatcctccttgtcggttacaagctctagcaggttctggttttctttgcttctgtcagctctcttctcctctatcactgcgagttttcagtttgtacggcttgatctttggtgtgtatagtgtgcactgttcttcatcaggcttcacttctgatggcgtaacgtgaggggcaaaggtgttccaagtttatttgtcacaaagtatgggtattgcttacagacgtttgaaaaaagcctgcagtgactttggtgatctactctccaaagacattccggcaatacgcgtatgagtcttgtttgtgtttataggactgttcaaaaataaggacagctttgcattctagctaataaaatggagaggtataacattattacggaagtgggtgatggtacgtttggtagtgtttggcgtgcaatcaataaagaaagtggcgaagtggtcgcaatcaagaaaatgaagaaaaaatatttttcttgggaggagtgcatcaatctccgtgaagtgaagtccctccgaaggatgaaccatccaaacattgtgaagctcaaggaggtcataagagagaatgacatgttgttctttgtttttgaatacatggaatgcaatctctatcagctgatgaagagcaagggcaagcctttttcggagact

SEQ ID NO: 72567 - DNA, 392 bp, Zea mays
  Clone ID: MRT4577_166179C.1
tttcacccgcccggcacgcagtagtgcaggggggttgattgactactggctgcactcactgcgctagcagctcaaaccggagttgcaacagtgcatcaccataaccatcaccaccaatggccctcaagggtgtgctcttccttgccctaagacagctgatagctgccaccggtcatgggtgcgaaccctacagttgcagcataaacgtccaacaccaccagtcgggccgactacgacgttcgatagcgacggccgctgcccgatccacgcgcataacctcaaagtgtgcgccaatgagctgggcctcctctaggaacggctacctgaatacgagcaatgctcaccatagctggaggggctggaggaccttgaccccacattgcgcctttgca

SEQ ID NO: 72568 - DNA, 423 bp, Zea mays
  Clone ID: MRT4577_16617C.1
ttcacgcgttcgggttgctctagatccgttcatactggtggttttgtgaggtcgtaagcggtttagcgaattacaagatgctggacaagctgtgggactacttggtaggccggccctcgtccgtagacgggtcttgagaagtctctgcaaggccaccaccgcccgcccgttcgttatcaacaaagacgcggacggcggtagctacaagcggtcgcagtcgatgccgattgtccccgacgacgccggtgacgccgttgtcgttttcgtctatgactacgccgcgcggtgccggcttacgtgtggtgcagcgtcatttacacccggggagcaacttggccaccaagggcatgggcgctcaccttttctaccggtcgttacccaactcctccacccgtttatgactggctctacagcgacgagacc

SEQ ID NO: 72569 - DNA, 482 bp, Zea mays
  Clone ID: MRT4577_166180C.1
gccggccggttcgggaacaccaccatggactctcaattccctgaacaagaagatttaaataatactgtagactcttactctgttactattaatggcttcatcttttgtacgcgtcatggcctagaagtatgcgataaatgtcccacagataatcgttcggcgaataatatgatggtggaagatatgcttcatgacaagttgtcagaagaagaatactcaaccaaatggaaaggtgatgaacgagaacctttttcagttgcccacaagtggactcgggtcgctaaaggtaaaccgggctgcgtggcgcacaagacggtggcgtgtgatgaatgctttaattggggtgagcaactctaccgtggtattcacggcggtcgtaagccaagagtgtctcgtgttcaacgcaagagtcgtgataacactgacaaattgtcataatctctcttgtattgcgggaaaaaaaaaaaaaaaaaaggccccta

SEQ ID NO: 72570 - DNA, 521 bp, Zea mays
  unsure (1)..(521): unsure at all n locations
  Clone ID: MRT4577_166181C.1
cgatcccccaatcccancacctctgcaaccgccgcacgcgaccatggctcgtcgtgcaaaaacaaccagatctacaaggaaataaggtggataacaaaaaaaccccttacctttttctaacaagatgggtatgacatccaagcacccatagtgtgcaatgagcgcaacatcaactaagactctactatccaaaacacagggtaccaccattgcttttggcggtctacaacacagaggttttgacagttttcctatctgatcttcaaggggacgatgatcaagcttacagagaaaatcatgctacctgactctaatatgtagcacagaagtgaatgttctcacaaactcttggggtatgaattctaccactcataaataaaggtccctagtgaagaactgatagacattatatcgaatcccatgttgctgtcacatacatccctcaactacctgatgggtatgttctgcatcagcttcaccaacaggcgcccataccacatcaacagaacctgctatgctca

SEQ ID NO: 72571 - DNA, 402 bp, Zea mays
  Clone ID: MRT4577_166182C.1
atttccgcgcactctagccgactcgtccgcctccgtctgtctacgtacggctgatgccgcagccggcgtgggggcgcaccagtatgcgtcggaactatggaagagggagctgtacggacgtgatgctcttcctgcaacgcgtgcgctgctgcgtagtacggggagcagacgtccatcgtcggtctcgccaggtccatccgagccgacaatgacctgacgtgtcctctaccaggacaagcagggatatgttgactatcgagtacgtcgtgaatcttcgtggtatataggaggcctgagtcctacggtagtgtctgtggcaagtcctagcagcgctgtatcatgctgctgacgcggctgaggaagcatagatctgtcactgcaaggagagctgtgacgacgctt

SEQ ID NO: 72572 - DNA, 523 bp, Zea mays
  Clone ID: MRT4577_166183C.1
gatggccaacggcaacggctaggtataatgatgctgctcaaacaataacattggtccatgcaccgaacgagtcccagcacctaatagttttatttctttacacagacaactataactaaagaacttcatcgcggagacccatcatatccttgggcatcgccatcacaaaaagggctataaccgcatggcctgaaattgatgcctttgtcgacatagggtactcaaacaccatgtctttcccacacaacccgctgaataccgtaatgaacgtgtccaccttgactgcaagggtgttcccctactttggatccaagaaaatcttgataaccttggaaccaaccagaccggatctgacacgcttgcccacaatctcaggtgggtagacaacatcctgcaagatcccgcttgtgaacagcactcagagaactggtgcgagggcgcaaaacattttaaccctttttggacggcctgacaaagctacttgtagcatcaattaccaaattcttgcagctgaattactttt

SEQ ID NO: 72573 - DNA, 279 bp, Zea mays
  Clone ID: MRT4577_166184C.1
agtcactgcaggccaacgtgcagcgcctgaaggagtaccgctccaagctcatacttttccccaggaagccttctgctccgaagaagggagacagttctgctgaagaacttaaattggccacgcagctaacaggacctgtgatgcccatccggaatgtgtacaaaaaggagaaggccagagccatcacggaagaggagaagaactttaaggctttcgccagccttcgcatggcccgagccaatgcccggctcttcggcatccgagcaaagagggcgaaag

SEQ ID NO: 72574 - DNA, 248 bp, Zea mays
  Clone ID: MRT4577_166185C.1
aaatctcgctcagagctcggtcatgcctatgcttctgccaggctctatctcgatctccatcagatataactatggctactgaagagaccgcggctgatgaaatcacttaccctacgaagatcactactagcaagcgcctatctttgcttggccatggaatcaccgacatggagattcacttcatccatgtgaaattctattcaatcgggggctatttggagccagaagtagtaggccacttggaccag

SEQ ID NO: 72575 - DNA, 429 bp, Zea mays
  Clone ID: MRT4577_166186C.1
ggggggggcgggcaaaacattcaaaacccgcggggaaaacaggctaggggaaaaaaaaggacgggggcacccaaaccaacaaggcccccaccacaaaaaaccggggggggggggccaaaaataaccccccccaaaacaaaggggaaaaaaaaggggggggacccccgcggaacaagaacaacaatccccaaacccagggttttataagggggggaccagctaaaaaagaggagggggggggtttaaaaaaccccaggggcccggaaaaaggggcctttaaagggccaaccaattcgcccgaaaaaaggggggggggcccggggcccggcgctggaaaacccacccaaaacggggggggagttgggccccggcccgccaaaaaggggggcccccaaccccctgggggccaaggtgccccccggggggaaa

SEQ ID NO: 72576 - DNA, 847 bp, Zea mays
  unsure (1)..(847): unsure at all n locations
  Clone ID: MRT4577_166187C.1
ctcgaggccggccggaggttaaggccaccccaagcaggagtctgcttccgttccattgcatcccagtcccagccaaagcaggatgccgcacgccaagacggactcggaggtgacgagcctggcgccgtcgtcgcctccgcggtcgcctccacggacccgcggcgccgtctactacgtgcagagcccgtcccgcgactcgcacgacggcgagacgatcaaggcggccacgtctgtgcactccacccccgcgctgagccccatggcgtcgccgcgccactcgcactcccactcccactcgtccatgggcagggactcctcctccagccgattctcgggccacggccacgacaagcgcaaggccgacaagtgctactgcttcctcgccttcctgctcggcttcgtcgcgctcttctccttcttcgcgctcgtgctctggggcgccagcaggtcccagaagccgcgcatcgtcatgggcaccatccgcttcgacaacttcatcatccaggccggcaccgacgcgtcgctcgtgcccaccgacatggccaccaccaactccaccgtcagattcacctaccgcaacaggggcaccttcttcgggatccacgtcaccgccgacccgttccagctctcctacagccagctcacgctcgcgtcaggagacctccacaacttctaccagcctcgcagcagcagccgcaccgtcagcgtcgccgtggtcggcaacaaggtgccgctgtacggcggcggacccacgctgacggcggcgccggcggccggnggcaaggggcagcagcaggccagcgccaaggtggcatcggtgcccatggtgctgaggacacgctgcact

SEQ ID NO: 72577 - DNA, 479 bp, Zea mays
  Clone ID: MRT4577_166189C.1
aattattaacattatatattttattttttcttattataattttaattttttgtggggataaactgtccatttaaaaatggaagggacacctcttttctcttttttttgcaagactatccgagtcttaataaatatatgattgtcacacccccccaagtccaaaacaggaggaataacgtcaccacggcactgagggcaaagtttaacggcaaacaaaaattgccccggccaccaaggatacagggggacgtgcactcctaaaccgagtcgcaagcaccactgagccttggaatcttctgaagcctggcttaacctgggctaggacccccccgaggcactccccccgggacctgccgggggacacctttaccctataatgcgtcacactcagaatgtcccgaacgcgggccaaaaatagcacctgaccgaaaatgcatgccgctcacaattcctcacacgatacgagcctgtactattaa

SEQ ID NO: 72578 - DNA, 299 bp, Zea mays
  Clone ID: MRT4577_16618C.1
tgccccgaccccgaccgatcgtcgactgctgcatccatgaccacctccgcggtgctctctaccgccgccaatcccacccaggtctgacggtcccgcgcatcgtctgggcaagccggtgaaggggctgggcctgagcatggcccgtaagcgcgcccagcgaacaattgcgtgccacgcggcgagcaccatctccgccgaccgcgtccccgacatggataggcggaagctgatgaatctcctcctcctcaacgacatctcgttgtccagcggcggggtggtagtgcacgacggcgccttct

SEQ ID NO: 72579 - DNA, 1389 bp, Zea mays
  Clone ID: MRT4577_166190C.1
agccggccgggccgtgcatgcttgtcctgcgcaggcaggcaggttccttcctgctcacctcacctcactccaccgacaatttcctttgccttctttcgccgttcatatactccgccgcttctactagtggtatcgtaggttaaggccaccccaagcaggagtctgcttccgttccattgcatcccagtcccagccaaagcaggatgccgcacgccaagacggactcggaggtgacgagcctggcgccgtcgtcgcctccgcggtcgcctccacggacccgcggcgccgtctactacgtgcagagcccgtcccgcgactcgcacgacggcgagacgatcaaggcggccacgtctgtgcactccacccccgcgctgagccccatggcgtcgccgcgccactcgcactcccactcccactcgtccatgggcagggactcctcctccagccgattctcgggccacggccacaacaagcgcaaggccgacaagggcggcagcaacaagggcgcgccgggcggcaaggggtggcaggagatcggcgtcatcgaggaggaagggctcatggacgaggaggaccacacgcggatcgtgccccgcaagtgctactgcttcctcgccttcctgctcggcttcgtcgcgctcttctccttcttcgcgctcgtgctctggggcgccagcaggtcccagaagccgcgcatcgtcatgggcaccatccgcttcgacaacttcatcatccaggccggcaccgacgcgtcgctcgtgcccaccgacatggccaccaccaactccaccgtcagattcacctaccgcaacaggggcaccttcttcgggatccacgtcaccgccgacccgttccagctctcctacagccagctcacgctcgcgtcaggagacctccacaacttctaccagcctcgcagcagcagccgcaccgtcagcgtcgccgtggtcggcaacaaggtgccgctgtacggcggcggacccacgctgacggcggcgccggcggccgggggcaaggggcagcagcaggccagcgccaaggtggcatcggtgcccatggtgctgaggaccacgctgcactcgcgggcctacgtgctgggcgcgctggtcaagcccaagttcacgctcgccgtcgagtgcagggtgctcatgaacccaaacaagcagaacaagcccatctcgctcgggaacgcctgccactactcatgatatatttagcctctcatactagctgctcaacatcaccatgcccatgcatccatctcctacctacctctcaattgtactgtaatggagtatttattgatttatttatgctttgcttcgtcttcaaaaaaaaaaaaaaaaacaggccccaaaaaaaaaaaaaaaaaccccccccccccaccgc

SEQ ID NO: 72580 - DNA, 480 bp, Zea mays
  Clone ID: MRT4577_166191C.1
ataatatcttttcttttttggcttcttcagtcttttacattatttttaacccctttgtgtactccctgtccttttttaagcctttatctttcttatccttggcccggggggggggggaccacactttggatacatctgccttaggtatccctctaaaaccctgttgcaggggtagtaaatagcccccctgtcctaactaactcctccctccagcggcgggtgctgctgacaaccccagggcacagcctaactccagagcggaatggcctcctcgtagcccctgaccatagctccccatggcggcgcaccggcactcgcggatcacgtcctaaagctgctggcagcaacaaatccggagcccaaaaccccaccggaacgggccggcgacgccgccgccggttagctaccaaacgaggacctgacggcacgcgtcgagcgaactataaaaaacctcctggcagcactgcaagtccctgagcc

SEQ ID NO: 72581 - DNA, 497 bp, Zea mays
  Clone ID: MRT4577_166192C.1
attggtacctcgagccggccggccgggtgtctcttcgttggcttcttggctctgtcctatttcctgcctccgctgctgttgtctcggacgttttctctccgcttgaataggaccctctcacctcgctctgccatgtatgcacatccgcggtagggtatctcgatctcgtcgctgccgtgaaggaggacgactactagctggctgcggaccggcgactaccgatgagcaggacatctctctctccgtcttatacaagggacaaatggcgtcgcggataggaggcctgttctgcgagcatctccgcttccccctaggccagagcggcaccggcagcagaatactgcgcattatgaaggtgctgtgtgatgactaccaagagcacgataggagctcgacttcctgcatgaatatctgtcgtggaatataaggaaccgccttgaagaggtctacgaaggacgagtactgctaaagttcggctacattctgtgtgatgagta

SEQ ID NO: 72582 - DNA, 424 bp, Zea mays
  Clone ID: MRT4577_166193C.1
ggctcaattcacctctagaagttgatttgttcacggacggaagtagtataagtagggggggggggaggcagcaaaatttctctcaacccaggtatactcggaccaacgtggtaggagtaggaccagcaggagggcaaaggctgcgaaccatgagtgactgctggttgcaaaaaaaaaaaaaaaaaaaaaaaggtggggtatgagatccgcgatcatgtcaaacggtgatagcgcaggcaaaggccctcttccctacggatttgcagccagagatcgaccagccttgcctctcattgtagacctccacagtcccgagagtttctccagcatcgctgaccccaccaatgaagtacagattgccgtgcatcgagaccgggcatccggatgcttttgcaatgctgcctgaacgggctatcctcgctga

SEQ ID NO: 72583 - DNA, 216 bp, Zea mays
  Clone ID: MRT4577_166194C.1
ttgtttacgcgaccgccgccgtaatggggaggggaggtaagggaggctgggatgggaacaagttccacatgtcactggagctaccggtggtggacacggtgaactgcgcggacaacaaggacgccaagaacctctacataatctacgttaagggcatcaaggagtcgctaaaccgcctcccgtccgactgtgtcagagacatggtcatggccaccg

SEQ ID NO: 72584 - DNA, 478 bp, Zea mays
  Clone ID: MRT4577_166195C.1
acggacgcgtgggcgccgtggggagtcgccgcgaggtactgccgccattattcccgatcggtggtgtgcgcacggtcgtgggaccccgctggtgtcgccagatcgcgttggagtcggtgcgtggagagaagaacggtctcggtggccgtattcgctcgccgccgccgcgacttcgccccacgccgtggatcactccctagccgccatctctacctacgtgaggtcacgagaatctgaagaatcatcctggtacctggaatctcaagtctcaggtcaagaacaggtaccataggatgaggcgcatggaggatgctgcgatgtgttcgtaagaggtctaggccgtcgtctcccagtcaactttgggttgctggatcgtttcctcatatgatgtaattatttaattattttgtatagaactcctgttatatagtaaagatgtgacattcgatcctgggccactatgcataatatgtgtgag

SEQ ID NO: 72585 - DNA, 350 bp, Zea mays
  Clone ID: MRT4577_166196C.1
atcccgtctgctggcacgcgctgtctagcacctcgcttcttctctaccctaggcatggctagatgagactccgccgatgccttacccagctgaactatgaaacacacaacacatgtctgatgatctgaacggatgctcacgcggaccatcgctcggagtgcacataggcatgaacactcatacagatgacagtgacggtctcactagataaggatatccgtacgccggtatatcaccttagagggccaggaaacacacatgcactattacgttctgcctgaccagttacacttcaagactgtggtgctacacctaacccataggggccaccttaatatgccatctgccga

SEQ ID NO: 72586 - DNA, 227 bp, Zea mays
  Clone ID: MRT4577_166197C.1
gcacgagcttcaaacgaaaagaaagagaaaatggtcactccgccgccctgctgaccgctgtccactccactccctcggcaagtccaggctcttctcacggcatgtgcttcagcggccgctcgggatttcctcttcctctgtgattgctcgttttggggtaagtagtgtggagcaatggccaacggaaatccgcggctcgctgctgcttcccgatctggaaacccggc

SEQ ID NO: 72587 - DNA, 1271 bp, Zea mays
  Clone ID: MRT4577_166198C.1
gataatctttcagtttcttcccaatgtgctcatctttgtgagcatgtatatcatcatcccgtcggtgttgtcgtacttctccaagtttgagtgtcatctgacagtgtcaggggagcagagggctgcattgctgaagatggtttgcttcttccttgtcaatctcatcctattgcgtgctcttgtggaatcatcacttgaaagttggatacttagcatggggcggtgctacttggatggtccagactgcaagcagattgaacgctatttaagcccatcctttttatcaagatcatcgctttcttccctggcattcctgatcacatgtacctttctgggaatatcttttgatctgttggcaccaatcccttggataaagcatataatgaagaaatttaggaagaatgatatggtccagttggtccctgaagagaatgaagactacctacccatgcagaatggtgaagaaactaataatttgacagcacctctaatgcctgagagagaagacggtggccttttggataatatcgaggggcatgatctttccctgtacccactaaacaggagcttccatatgccaaagcagaaatttgacttcgcacagtactatgcttttgacattactatatttgccctcacactgatctactccctgtttgctccgctcgtggttcctgtgggtgcgacatactttggctaccgttatctcgtggacaagtacaacttcttgttcgtttacagagttagagggtttcctgccggcaatgatgggaagctgatggacagagtgttgtgcatcatgcaattctgtgtgatcttcttccttgctgcaatgctgctcttctttgctgttcagggtgactcgatgaagctacaggctatatgtactcttgggatgttagtgttctataagttgcttccctctagaagcgatcgcttccagccatctttgttagaagggatgcagacagtgaatagctttgtagatggtcccacggattatgaagttttttcacaacctgacctggattggagtctgtatcaatcctgaagatcaatacacacttttgttcattacaatgacatctttcacgacttcgaacctggtgtatcaaagtcatttattcttcttgtacagctatgtagattaactcttgtcttcttagatatgtatttgttttgtcagatatgacaggcacatgcagttttggtgatgaacatggcctgtcaaaaaattactttaaatgatacatagtcattttcttgttttt

SEQ ID NO: 72588 - DNA, 148 bp, Zea mays
  Clone ID: MRT4577_166199C.1
gccgcccgttgggaagggagcttcgaggcggcccgccgcggtgcgtcggtcggtcgggctgagccaatggcactggcccttggggcgcgaacgccctaacgtgggtcgtggcgagcggtgagcagaggcaccacatgctagcttttat

SEQ ID NO: 72589 - DNA, 1696 bp, Zea mays
  Clone ID: MRT4577_16619C.1
ctctcccactcgacacccacacaagtctaccaccccacccccaccccgcccttccctctacagtcttttatccgacttagtcttcttcgtcgaacaccttccaacttctttacctcagagtaatctacaacatggccggcggcgcagttgtttcaggcggttcgggtggaaaccccctccgacacggattcatcaagagggagtacctctgggctttcatcctcgttacttccctcttcttcctgtggggtttcgcctacggtctgctcgatgttctcaacgcccacttccgtgctgtcctcggtatcaccaagacccagtcgactggtctccaagcggcttacttcggtatcggttacttcgctttctcgcctgtcgccggagaggtcctgaagaggcgcggatacaagttcaccattatcatgggcctgtcgctgtactctttgggagccatcctcttctggccttgcgcaaagttctccggtaaaggcaacaacgccgccgtcttcggtggcttcgttatctgcaccgccgtcatcgcctgtggtctcgccaccctcgaggtctccgccaactcctacgtttccgtcatgcccccccacaacgtcgccaacttccgacttcagttctcgcagtcgttcaacggtgtcgcctcgttcaccggcccgctcattgcctccaagtacttcttctccggcgagcacaatgacaacctcgacacggtccagtgggtctacctcgctgtcgccctccttggtgtcgcggtcgccatcgccttcttcttcaccaagcttcccgaagtctcggaggaggctctccaggctgaggctgagctccttgccgacgccgccggtgccgacccgcagactctcaagcccttctacaagcagtaccgagccatctcgggagccgtcgcccagttcctctacgtcggtgcccaggtcaccatcggagccttcttccttttcctcgctgaggaggctggtatcaaccacgagaagggctcgcagctcctgtcttacggtctgatcaccttcaccgttgctcgattcatcggaaccgctctcttgtcgttcattgctgccccggtcctcctcggtgtctacgccgtcgcctgcaccatcattgccatcatgatcggagccgtccacggcccgaccggtgtctacctcgccatcgtcatcatgttcttcgagtcgatcatgtacccggtcatcttcgtgctgtccacccacaaccttggccgacacactcgacgagccgctgccatggtcgtcatgggtgtctccggtggtgccgtcttcccgcccatccagggagccatctccgacaagttcgacactcgagtctccttcttcatcgtcgtcccctgcttcgtctacattgcgctctgggccgtgtacatctggcacaaggacggtcgaaagtggggtgttgcttccaacgacgccgtcctcaacgctcagtccgcccagcttgaggctaccccggccgcgaacctcatgttcggcggtgcccagcgaaccgagaactacgagggaagcatcaaggaggacctccaccaggtcgagaaggtgtaagaaggcattgttttgggttgatccctttctctccctttatgggtttcgttgctatcatcatctaggtatagggtcttcattcgtttacgcgcatatgtatgcctttcgttgaagcc

SEQ ID NO: 72590 - DNA, 202 bp, Zea mays
  Clone ID: MRT4577_1661C.1
tttaactggacataggctggcacgaaatacctgtgctgatactgttagctgtagttcatacatgcacactagattgtgcagcataaatacctcagctgcaccaccctgatacactggacccaaaccttgcttaacgctgccagaggactgattgctgacatactactacacggcatctgcacagatgcctgtgaccaaactg

SEQ ID NO: 72591 - DNA, 649 bp, Zea mays
  Clone ID: MRT4577_166200C.1
gtgctgcgcgaacgggggagaaaagttcttgactcgacatttttctctatggaaatgagtggtacgtgtagaaatgctcttctaccaacacacacaagccgacaaccaagctagcttgtgctcgtcggtcgtcgcgatcgcgattgtccgagtcaccagagagaaagcgtcccggagaagattgatgcccgcccacaccggagcggcagaatgcgccaacggcagaaaacttgccaccagcacgtggaaatttttttgcagcggaatctggacgaggcggcatggcaggccgcaacccgcaaggcgcaagctgcggcaagcaatcgcggcggcagtggctaccgaccagcattgtcaccaaacaagcacggggagttggggcaagtgaaattacgcggaggccacttcaccccggagggaaatcgaaacccgcgatctagagatgttcggaagcacacgtggaggagtcgtacgattctctacatcgacagcatcaggagctaacctaagaggagcgccaataagacaatgtgatctaacccaacacagacattacaacttgtctgatttgttgtttgggccgtgtgaaaaaaaactgtcatggactgtgagctggaaaagctgttttggcgacagcacggaattcagc

SEQ ID NO: 72592 - DNA, 1357 bp, Zea mays
  Clone ID: MRT4577_166201C.1
attgggtccctcgaggccggccgggagtttctctctagtagaattgagatccctcctaccacatccgttccccttcccttccctcctctcgcgcgccggctccacgcagatccaggagatatgcctcgctatgatgaccgctatggaggcacgcgcttgtatgttggcagattggccactcgtactcgttcccgcgatttagaacatctgtttggcagatatggaagaatacgagaagtggagttgaagcgtgactatgcatttattgagttcagtgatcatcgcgatgctgatgaggctcgataccagctagatggcagggatgttgatgggagtcgtattgttgttgagtttgctaaaggggtcccacgtggttcaggtggctcacgtgaatatatggggagaggccctccaccaggtacaggtcgttgtttcaactgtggagttgatggtcactgggcaagagactgtaaagctggtgactggaaaaacaaatgctaccgttgtggagaaaggggccatatagaaagaaattgccagaacagtcctaggagtctcaggcgagagagaagttactcacggtccccatctccccgccgtggacggggccgcagtcgaagctatagcaggagcaggagccggagtcggagctatagtcgatcaagatccctgtctagatctcctaggggaggtcgtcgtgaccgtgacgataggagatcaaggagtcctagctacagcaggagccccatgcgatctgcctcgccaccagtaaaggaaaaggagcgcagccccgcacctgatggaagcaggagcccaaggagtcggagcccccaggatcaggtgatgagcccaccaccaaaggataatggcgaaggcaatggctcagaccgtggcggcagccccagagggagggagaacagcaggagccgcagccgcagtccatctggtagtaaccgcagccctgcggccaatggacgtagccggagtcctggaggtgagcggagcccgagtcctggaggtgagcggagcccgagtcctggaggtgaccgtagcccaagccccaatggcaatggtaacaatgatgctgctgctgatgtcgatgctgatgctgctgcccgcggtggctcccccactggaagcaagtcaccctgagcgctggcggtcccagattgtggtggtgcttctcaatgcaatgggcaatcgtattgctattttttgctaccatatcaaagacacaatagctacatcattttcttctctgaaacaatgactttattttgcttgctttgagatatgactcttaccctctcatggataatatatatatgatatgatgccactggtgcttgcttgcatc

SEQ ID NO: 72593 - DNA, 1519 bp, Zea mays
  Clone ID: MRT4577_166202C.1
cctctcgcgcgccggctccacgcagatccaggagatatgcctcgctatgatgaccgctatggaggcacgcgcttgtatgttggcagattggccactcgtactcgttcccgcgatttagaacatctgtttggcagatatggaaggtttttcggtttttaccggaggtctttggtggaagggtgcccttggtggacttggtgaccatttggtgaagggtgcccttggtgtaatgttattgactgttttagtggaagttccaagttggtgatgcatttgagtacttgacacatgacgtgacggcttactgtttgtggcaaccctttgcgcagaatacgagaagtggagttgaagcgtgactatgcatttattgagttcagtgatcatcgcgatgctgatgaggctcgataccagctagatggcagggatgttgatgggagtcgtattgttgttgagtttgctaaaggggtcccacgtggttcaggtggctcacgtgaatatatggggagaggccctccaccaggtacaggtcgttgtttcaactgtggagttgatggtcactgggcaagagactgtaaagctggtgactggaaaaacaaatgctaccgttgtggagaaaggggccatatagaaagaaattgccagaacagtcctaggagtctcaggcgagagagaagttactcacggtccccatctccccgccgtggacggggccgcagtcgaagctatagcaggagcaggagccggagtcggagctatagtcgatcaagatccctgtctagatctcctaggggaggtcgtcgtgaccgtgacgataggagatcaaggagtcctagctatagcaggagccccatgcgatctgcctcgccaccagtaaaggaaaaggagcgcagccccgcacctgatggaagcaggagcccaaggagtcgcagcccccaggatcaggtgatgagcccaccaccaaaggataatggcgaaggcaatggctcagaccgtggcggcagccccagagggagggagaacagcaggagctgcagccgcagccgcagtccatctggtagtaaccgcagccctgcggccaatggacgtagccggagtcctggaggtgagcggagcccgagtcctggaggtgagcggagcccgagtcctagaggtgagcggagcccgagtcctagggctgaccgtagcccaagccccaatggcaatggtaacaatgatgctgctgctgatgtcgatgctgatgctgctgcccgcagtggctcccccactggaagcaagtcaccctgagcgctggcggtcccagattgtggtggtgcttctcaatgcaatgggcaatcgtattgctattttttgctaccatatcgaagacacaatagctacatcattttcttctctgaaacaaggactttattttgcttgctttgagatatgactcttaccctctcatggataatatatatatgatatgatgccactggtgcttgcttgcatctgaataagtgaatgctcgcatgttgaggtt

SEQ ID NO: 72594 - DNA, 268 bp, Zea mays
  Clone ID: MRT4577_166203C.1
aatatttttttttttttcacaatcatagggggggtttgatggacaatagggcgcgtaaaaacaaaaagccggaaaaggacacaagcaccaggaactcaaaggggacacagcaagaaagaaccagagcaggcccacccgcaggacacgggacagcaacgcacggccaaacacagggcagaacaacggggaaccgcgcgacgagcaacaacatggaggagacaggaacaggagaaacaggagacatgcccacccagaaacaccccaaagg

SEQ ID NO: 72595 - DNA, 510 bp, Zea mays
  Clone ID: MRT4577_166204C.1
ccgacgcgtgggtgcttctacggcggcaaagactctgcaggttgggtcctaggatgaggccgtaccggaggcttcgaccagagcgccgccaaaggtgtagctactgtcgcccaccgacgattatgatacggagaagcagattctggagaatgcctgcccaatggccgtacactttgtttccgagaccgaacaactttctggttcgtactctaaggctgacgatctctcgtgctcagatgccaattctgaccgaacttcgaccaatgtacactactcgacggatgaggaggaggaagactgtgatcaaagtcatgattacctcctggcgagtggagttcctctcatggtgcaactgtatgcagtgagggtaggtaactctcgaatagctttccagacaagttttgaagtccatgatgtaaaatcactataattggatgatcaaagacttacgatgcaacaacatctttaggagggtctttaacccccctaataacaaaaactgttgactct

SEQ ID NO: 72596 - DNA, 340 bp, Zea mays
  Clone ID: MRT4577_166205C.1
agctcgagcggctcgagcaactacgtaattgctggaattcctgtgttcaggctagtactcacctctccccagtcaccaaacttggtctctcacagaaacttgcacgccatcttcctgcctgaggtgaccacgcccacccgttcttcacctcaccatggccagggatcctcgacgggtttttcggccacgttgtgctggttccataatctccggaggtcagtgatgctcactagagtcctttttttaatgctgtcgttgtttgttggccggaacaaggttgcgccactgtgtagtggtgccggggacagccttcgcattgacccgttcacccacgccattc

SEQ ID NO: 72597 - DNA, 2307 bp, Zea mays
  Clone ID: MRT4577_166206C.1
gagcgtcacgagtgacgtggatgtggggtcccgaacagcctggctcagctgcccgccaccgtcgaagcatcgcacgtccggcgaagcacgaggagacacgatgtgatattcctgaaaaaaaggtaaaagaagcaagatctgccgcggctccattttctggtcgcctcctccgccactgccatctccctcctctgtcctccgtaccactcgtcttcgtctagccgccgaccgccaccaccatggcacccggcctctacaccgacatcggcaagaagaccagagatctgctgtacaaggactacaacacgcaccagaagttctgcctcaccacctcctcccccaatggcgtcgcaatcacagccgcaggaacaaggaaaaatgagtccatctttggtgagcttcacacccagattaagaacaagaaattgacagttgatgtcaaagcaaactcagaatcagatcttttaacaacaatcactgttgatgagttcggtactccagggctaaaatcaattatcaatttggttgttccagaccagaggtcagggaagcttgaattccaatacctacatgaatatgctggtgtgaatgcaagcgtcgggcttaattccaatcctatggttaacctttctggtgcctttggaagcaaagcactctcagtcggcgttgatgtctcatttgatacggcgactagcgatttcaccaagtacaacgctgccctgagcctcaccagtccagatcttattgcttcccttcatctgaataaccacggtgataccctggttgcgtcctactaccacctggtaaagaatcattcaggcactgctgttggagctgagcattcaggcactgctgttggagctgagttgtctcacagcatgtcgagaaatgagagcacgctaatcttcgggtcccagcactcgctggatccccacacgactatcaagacacgtttcaacaactacggcatggccagtgcccttgtccagcatgaatggcgtcccaagtccttcgtcaccatctctggtgacgttgacactaaggcgattgagaagagcacgaaagttggcctatccttggtgctcaagcactgaagtgccgagtgtttttgggctctaggaatttattttcggttcagttggattggaataaacatggtctggagtcatctttgcggcaccattttgatcttgaactatatatttttttcactctctgcatgatcaatttcataggaaaatattaggattaattgactttatgtttcaattctcagcgccctgttaataattctgttgattgagaccaattgttaaacttgtgaaatatataatggtgattactttgggttcttcagatatcaaagagcattatttgatgaaggttgcatctacgttggtgtacctcctctttacaaggttgagcgtggaaaactagcacattactgctatgatgatgccgacctcaaagagatagttaacaccttccctgcaaatgcatcatatcatatccagaggtttaaaggtttgggtgagatgatgcctgcacaattatgggaaacaacgatggatcctgagaggcggctgttgaagcagcttagggttgaagatgctgccgaggccaatgttgtgttctcgtcacttatgggcacccgggttgaatataggaaggaactgatccagaaagctgctagcatgatcaacatagatcaacttgacatttgaaggcattaataagtaaggctgtcctttctgtgtatgatatagaagttccgccacctgctgcttttcttgccactccaacaggattctagcgttgcagacttgatgataccttggcaacatctttttggtgctagagtagcagaaaacgtagggtacaaacattggatccaggatgagagctgggtttcctaacgaaaactctgattcatttgtggcggtgctataaccatttcagcttgacaggttcagagctcacgggtgtagttccctgctgacatcgttcctccgatacggtgtaatatgcttttatatctatcgcctaatatttgcttcaaaaaaaaaaaaaaaaaagcggcaaaaaaaaaaaaattaaaaaaatgatgatgccgacctcaaagagatagttaacaccttccctgcaaatgcatcatatcatatccagaggtttaaaggtttgggtgagatgatgcctgcacaattatgggaaacaacgatggatcctgagaggcggctgttgaagcagcttagggttgaagatgctgccgaggccaatgttgtgttctcgtcacttatgggcacccgg

SEQ ID NO: 72598 - DNA, 126 bp, Zea mays
  Clone ID: MRT4577_166207C.1
ggggacttagatgtcatatggaggcgcccaaacaaaattcactgtgcgcgtgttgacaacactggaaaagagcaatgccttgtttgacctaaaataatcggcttgaagcacattcccctttctgct

SEQ ID NO: 72599 - DNA, 362 bp, Zea mays
  Clone ID: MRT4577_166209C.1
tagggggagtcggagtcggacgaggaggacgacgttccctactgcctgggcttcttccacctggtgttctccatgggcgcaatgtacttcgccatgatcttcgtcggctggaacgcgaacgcgagccacaccatggagaggtggacgatcgacgtcggctgggcgagcacgtgggtgcgcgtcggcaacgagtggctggcggcaatcgtgtacatgtggatgatgatcgcgcccgtcatctggaagacgaggcaggtgggatcggcggcggagacgtgagcagtttttttccactgattctgacagccggaatctatatatacatacaaacacaagagcaaatgaaaggccaaagggacggg

SEQ ID NO: 72600 - DNA, 196 bp, Zea mays
  unsure (1)..(196): unsure at all n locations
  Clone ID: MRT4577_16620C.1
ggacctcgagccgcctggacagcaccagcacgcgacaaccctctcctaccagactagtcagactcgcagctccgccccaagtccaagtccaagcatggaagtcgcggcggcgtcgtcgaggcccgtcctgcgcgtggctgccatctgcggctccctccgcaaggnctccttcaaccgcggcctcctccgcgccgcc

SEQ ID NO: 72601 - DNA, 397 bp, Zea mays
  Clone ID: MRT4577_166210C.1
agccgtcggcgacgccttgggagaaaaaaaacgtcatgtaccaattcggttctgtaacattgggggcatcatcatatgagggttattgacttgcaatccgttgcgcaaaaaatgtagatgatgatgcagcttgagcgtgccgttgtcgacagcagcagcctgtacaagccagctctgctgcataagtacaacagctgttggcagctcagggtctcaaccccatggtcatgatgatggcccaaaacatgccgggcatgggtggactctaccagttccagctgaacaactaccgtaccacctagtgtggggtcttcgctgccattccgccctactactgattcatgatatttggggaaagctcctctatacatccctctctatctatatctgtaataat

SEQ ID NO: 72602 - DNA, 759 bp, Zea mays
  Clone ID: MRT4577_166211C.1
gggtacctcgaggccggccggggaatcccatccatcacagctaattagcgctcctaatcaccgacgaataatctcttcttcacctcactaaaccgaggtagcagctcgctctgccctgaaacaatggggcgctacgctcctcctcccagaaactggtagaggcggagcctctgcgaggggcgctgctgcatgcctgtcgtccctgcgccatcaccctcctcttcttctcgaacagccgacaggagacatattctgcgacgccaagcaacgtcaacgctaagaccaccacaggggaaacattacatatcaactgtgatgttacgcgctcggtcctaccctggtctctacttgctggtgacacgatggaagccacagcagactcacaatatgatataagccatgacataataaagaaaacaagtgaacatcctgcaaaagcaactgaatcaagaaaagacccagctggtggccctaagattgaaagaccattacagaaacatggcgctaagcttgaccacaacgaggtatactgctcatcctgttatggtgctgagaagtcggatgatcaatgatgcaactcctgtgaagaagtacatgatgcatatcgaaagaaagggtgcgctgtcaacaacgtagaattaattgatcagtgcaagagggagggctatgtacaaaggctaaaagatgaacaaggggaaggttgtaccatccatggatctgtacatgtgaataaagtagctggcaactttcactttgccc

SEQ ID NO: 72603 - DNA, 595 bp, Zea mays
  Clone ID: MRT4577_166212C.1
ctccaccagagaacccgcagcgcccgccatggccgtctccgattccctcgcgcatccagggctggcgatcgtggtcatgggagtcagcggctgcggcaaatcaaccgtcgcggcaatgctcgccgaagccctgggctgcagcttcatcgaagcagacgactaccattccgaggcaaacaaaggtcgaggaagctaaatgctaaaaaaatggaatcaagtgtacattacggtatagattttggcaaggagtaatatgtatgatgctgatgcaacagacaaatgcatatgccatgtatcatcaggggagcttagtcagaagcattgcaaaagtgaaacaaaccagctatttatgttcaggctccagacatctcttttttctcgtattcacaattttagtgagaaggattgccaagctgacaagtgggataaaccattcgagaatttagtatataacatgttatctgcttccgtgtgtcttagaatagtaatatctctgttccaagttgttctgtttccatgtacttttgacagtgtgcttgacttgactgcgttgtaaaaacagagaagaaaagaacaatttatgtcatcttgaact

SEQ ID NO: 72604 - DNA, 482 bp, Zea mays
  Clone ID: MRT4577_166213C.1
gaaacccaggaaccgatcacagatagagagagagcgcatagtcgatcatgaagggcgacaagaaggaaatggccggagcgcggtgggccatactgctgggtctgcagctcatggcagctccaccgacgaccatgaccgcccgctcgtcgcacgcagccgcggcgaatggctccctcgccacgaggcccagggcgactatgctgacaaccacgatgagctacacggccaagagatgcaaatacattgaggtgcctcactcctggttgctcctgcaactatagagatcgtcgatgctacatcatattgtactcctgctgcttgaagccattccgcgaagacacaactctgacatgcatgcgccggacgacgacgacgctgcctctcgtgagcttctgttcaagtgatgcatgctacaagggatccatggatgctttatgtatatgatatgcgtattattaattagccgcgtcagggaaccggca

SEQ ID NO: 72605 - DNA, 226 bp, Zea mays
  unsure (1)..(226): unsure at all n locations
  Clone ID: MRT4577_166214C.1
gcggacgacgnggncgacccgnnccncgcccaagacnncgccaggtttccgcacgccgacagcgncgngccgaacgangganccaacngcggcgccgcngnggactncgactnnggnggcggcgncgccgncgcgccaagcagnccgncctacagctcctacacggcggcgncgctgggccacagcggctcgtcgtcggaggtcggcctgggcccagacgtgatgt

SEQ ID NO: 72606 - DNA, 296 bp, Zea mays
  Clone ID: MRT4577_166215C.1
cccacgcgtgcgcccacgcgtgcggccacgcgtgcgcatgctaaagagtcctcactgctgctctcctccgctcagcaggtcatggcttcctcagtatccctccaaggcagccattcttcatcgcccccaccttacgcctctttctgacacccgtcgcgcgcccacgacaaggagccgcgccctgcctggaaaaatttgattcatcggatgggaccccgaaggcattctgggcgccccccagggttgccacattgcgcgccttaagtttcagcgccccctttatagggactcccagg

SEQ ID NO: 72607 - DNA, 624 bp, Zea mays
  Clone ID: MRT4577_166216C.1
ggatagcttttccccacggattcttctcgtcttcctcttgattcgagtcgcctctccccgtcagcacaaacatggactcaagcaggcgcccaagtggaatccagcaattgcttgctgcagagcaagaagctcagcaaattgtaaatgctgctagggctgctaaaacggcgaggcttaggcaagccaaagaagaggctgagagagaaatagctgagtaccgtgcacaaatggaggctgatttccagaggaagctcactgagaccagcggtgactctggcgcaaacgtcaaacgccttgagcaagagacaaccgtaaagattgagcagctcaagcagcaggcaactttgtactatctgttcatttctttgggtggtattataagaaatggcttttgccacttccagctgtaattccttgttgtcttggaaataagctgctacagttcagcagcagccatgtctgatactacttgctaaacctttggtgattagttcgtaaattttgtcgatttccgacctttttgtctctcccttgtatggctatcagtatatgtatttttttatgtgaggtatattattcataagagtaaataagtttttaatccatggtgaactttggcaagcc

SEQ ID NO: 72608 - DNA, 1025 bp, Zea mays
  unsure (1)..(1025): unsure at all n locations
  Clone ID: MRT4577_166217C.1
ngaaaagattcacagacagcaaacagtcaacggataaactgcgagaacgtcgcggcgctcatcgacaacacacgcccccgacgccgataactatcacgattcacgacactcgcagcgataccactccacaatcacacattcgacaccgccaatccatggccttggcgacgccgctgcggctccgccgccacctcctcctccccgccgggccgtccccggcgacccaccgcgccctgtcgctgcggcggggccgcctcctccccgcaagcctgtcgtccgccgcggcgggcgggcggccgacggtgctggtgacggagacgctgggttccgcggggctggacctgctgcgcgccttcgccaacgtggactgctcctacgagctgacggcggaggagctccgcgccaaggtgtcgctcgtggacgcgctggtggtgcgcagcgggacgcaggtgacgcgggaggtgttcgaggccgcgcgcggcaggctccgtgtcgtcgggcgcgccggggtcggcatcgactcgactccatccaggtccatctcgccaacgtggtgtccaagttcgccggagccctgtccgacgcgggccacatctgcgtggagggcaaggtcagggacggcggcgcgtcgcacctcacgctcgtcgggtccttgagcgtcgacgttagccttgagggcaacctgatactgtgcggccagctcgaccacccgggcatcattgggagagtggggtcgatcctgggaaagatgaacgtgaacgtgagctttatgagcgtcagtaggactgctcccgggaagcaggcgataatggccattggagtcgacgaggagcctgggaaggaagctctcaaattgatcggtgacacgccgtctgttgaggagtttgtctttcttaagctatagaggctgaggaagtaggttaggggacccaaaattacatttgtacgtgctatagtagcgtgagattgatgttgttgttgccatgattttagtagctagcacggggtactttatgctttgtgtt

SEQ ID NO: 72609 - DNA, 799 bp, Zea mays
  unsure (1)..(799): unsure at all n locations
  Clone ID: MRT4577_166218C.1
cgggttaaaaataatttgtcaaagctgttacaagttacttaacatctttgacattataacaacttaaaatcttaacatcaaagtcagtagctgactagctggtttattgcccgaggtcctacttcataatcatatgaaatcaacttatattcatgctatgctacttggggcctatttggtttgttgagattcttagaatttagcacaaaaaatcataatatgccaaacatgtctcattttgtatctagattctagacagaaatctgagtatccaactacaccttgataatataagataatgggcacattatccaaagctaaaatcccatgcctaccaaacgacaccttggaaggatattgtgcttaagttttctaatgcagattcaatataacaagccaaaattgtatagtataccaagttaacaactcataaagaccttaaattgtgataaaccggttcaaattgatgtcttgtgcatgtgttcaatatatgtggtcttttctcaatatatatgtttatgtacattattattcacttactaatttgttatcctaactgattctgattgcctgttatcctaaccgattctacatgcctgctcatctcgctggacgaatgcatcttcaatttagcaaagattatgacacttaatgacaacaggtatggtcaaataacataagcgccctacacgcccctccccctttattgttagcctattgatcctcatattaccttntttcttgctatattcttataaatactntcttnctgtatctaaagcaacactttgaaacatgt

SEQ ID NO: 72610 - DNA, 201 bp, Zea mays
  Clone ID: MRT4577_166219C.1
gctctccaactacatcaacgctagcggctaggacatgcagtgcctggccaaattcttctacgaggccttagggctggtcaacgcctacgcgcccatggatatagaggcactactgcgcgcgtgcttgacgcgatgaacgaagccttaggtataccgtcgggacctactgccgagagaatgcactatacgagcgtgtgcgta

SEQ ID NO: 72611 - DNA, 520 bp, Zea mays
  unsure (1)..(520): unsure at all n locations
  Clone ID: MRT4577_16621C.1
gtttggttgttgttgttntgttcgttttttgttgtgccggtgtgtcttgctctgcgtntnttgcttgtgctttygygcttgtgtgtgtggkgtgcttcgncttgtgttcttctttgctgggcgcgctgtgctgttgtgctcctgcgcctgcttttgttcttggcgtggtgctcttctgctcgggcgttggttcttttggtggttttgtgggtgcgsgtttctttcgttttggttgcggtgtktggggncgcctgctgcgctcgcgcttgctctttgcgcgtgggctgggcgcgctccggccttggtgttcmacttggcgcggtgcgtccccgtctcctraggtsttsggsgggggkatscttkccctgcctgatgggktgatcmggccccgkgatttcgggstttccagtgatgtttcgtcgccgtctttgrvtccgccgcgcgctgtgtcttttgmcttgratggcacstacttcggcgggccgatgtgcatcccgccggccatgccccgtagcttggg

SEQ ID NO: 72612 - DNA, 131 bp, Zea mays
  unsure (1)..(131): unsure at all n locations
  Clone ID: MRT4577_166220C.1
gaactattactcataagagtttctaatggagggcactaccaatgatgggttggtggcngaatgctggcgggcttgtcacagcaagctgcttgaatggcagggggtgttgccgcctgtagatggtgcccgcg

SEQ ID NO: 72613 - DNA, 578 bp, Zea mays
  Clone ID: MRT4577_166221C.1
cattgggtacctcgaggccggccggattccaccaatctcccttactatcgtccttatgagctttctcgccgcttcaatcaagcgtagttctttattatcaattgttcgacccattgcgaaacgttcatccgtacccgcccgcgacatgcatattcaatcgattcccatgtgggagggcacgggcaacaactatgcctatctagtgtccgatgataagaccaaggaggctgtgatcatcgatccggcaaacccctcagaggtactacctgttttgaaagagcaaaccactactggaggtctcaaattgacaaagattatcaacacccaccatcaccatgatcatgccggaggcaacactgaaatcctcaaagctttcaaccttccaataattggcggacgtgactgcgaaaaagtctcaactacgcctgcccacaatgacaccttcaacatcggctccatcaatgtgaaggcactccacacgccatgccacacccaagacagtatttgcttcttcttcgaagacggcaacgaccgtgtcgtcttcacaggagacacattgttcatcggcggatgcggcc

SEQ ID NO: 72614 - DNA, 386 bp, Zea mays
  Clone ID: MRT4577_166222C.1
cacgcctgcagtgtaccgggccgctaattacacggtcgacctcagcgttcgtttttgcatgcatggagggttgaaaaaaagactaaagactggaccaaaacgtaacattggtcggcctgaggtatggtcctcgatgtgggttctcctatgtgatctgaaatcgtcgggccctgatgaggacattgataagtggggtgagactgaccagagaaaaaacctacaccttgggagctggagcacttaaccacatctttcaaaaacctgatctatatcgaaaacctgggtaacactaggtcacacagaattgtaattaattgggaggagaaccccagctttggaaaatatccatagcccgcttactactttgttgagataaagcttgcttg

SEQ ID NO: 72615 - DNA, 231 bp, Zea mays
  unsure (1)..(231): unsure at all n locations
  Clone ID: MRT4577_166223C.1
accgnnccagaataggggggacgaccgcaggcgtccggatcagtattggtagcagatggaggttgttctggcacgacgacaacgccaagaccagaggtggggccgcccatgtacagagaacaccctatccttggcgctcgcgggacggtgccatgcttctactgcgtccaggagacgcatcaccacggggggtactacaaacgtatcttaccagtcggcggcagtgtaatc

SEQ ID NO: 72616 - DNA, 1339 bp, Zea mays
  Clone ID: MRT4577_166224C.1
actgaagacctcgccggtggcagggtgcatcccctattgctcgcctgggctccgcggagtctttggttgctccgagttcctcgcctggttttcggcaaggccaaggaaaggtggtcacttcacttctgtttttttttttttactgccgccgcaaacctccgctcctgtgccataccgccattccattcttaatctgggcgccgaagaagagaggacgggagcgaggtccggtcgaagaatcgtagcggattgggggaggggggagcggcggcggcggcggcggaggccggtcggtatgattcaactgctgttcctcgtgctgttcgcggagggcgcggtggcgctgctcctcatggtgaaggtcgggccgctgcgggagcttgcgatgcgcggcgtggaccaggtgaagacgggcaagggcccggccacggtcaagacgctggcgtgcacgctctccgtcatcctcatgtccagcgtcgccagcatcctcaagatccagaacagggggctcaagctcggcaccgtcagccccatggaccaggtgctctggaggacgcacctcctcgaggcatccctcatcggatacacgctattccttgcatttgtaatcgaccggctgcaccactacctgcgaaagctgttgacactgaggaaaacatccagcacatccagagaggaggtagagaaacttcagatggagaaccggtcgctccgcgaaaaggaggagaaatcctccagtgagacgaagaggcttcagcgagagattgcgaggctgaatgagggcatgaagaagctgaaatctgagaccgaagagcacgagaggaaggcgtcggtggcagaggcccatgtcgacgcgctgcagaagcagtcggaggagctgctcctggagtacgaccggttgctggaagacaaccagattctgcagactcagctacttagcagaggctaagctaaggagcttggtttgttagcaagactcctttaccaggtagtgtcgtagagccaaggacttgcccgattctgaatgcttacatgccgcggttctaaatttcggcatgtccattgtggttcttggcgtccatgctgttcctaacttgtgatcttgttgatgtatggatgcagcgtgtatttttagagttcatgtttcttccatttccgatagatggaggtacatgatgtaaggtccaggaacgacgggacgtccttgaggaattcggtagtcaaggctctcagaatgtgcttgaaaaaaatcggagtggcatgttacgcagattctgattcgtcctgtgaattgtgactgcatgattgaacctctgttgcctgaaaaaaaaaaaaaaaa

SEQ ID NO: 72617 - DNA, 522 bp, Zea mays
  Clone ID: MRT4577_166225C.1
ctggccgggttctgccatcgcgcgctccgcctgcatccccgcgcccgcagtccccgccgcagtcctcgcatccgcgcccgcagccgagcagtcctgccgcgcccgcagtcccgcagcgtcgccgcgctcgcgcttccccgcgacagccgccatgcgccctatctccgccgtgcctacgcctcctcccccgcccgcccgagacccgccaagtttcccttccttacacggcgagatccaccatcggcgcccccttccctggcgagccacagccgtccacgttcctggccaccggcgacctcccttctctagcccttagcggcgagccaacacctcctccccatggctgccctccagaccccagtcccgtccgcgcatccgctccctcatcagcgacgcaccgattctccccgacgtcgcccatggcgtggacagcgacctccctcaccctgcactctggctacaaaaggaagaatctcttatcttccgggtcaccaaaacaaatgcagttagcggtatagaaaa

SEQ ID NO: 72618 - DNA, 1439 bp, Zea mays
  Clone ID: MRT4577_166226C.1
ctctcacttccacactcctactcctccccgcccccgtcgccttccgccgccgtcttttgcgctaacgcttcgcctttcgatcccctttctgacttcttatagcatcatcccaagtcctcgcccggactccgcagattctctggttgctacgagttcttcgcctggttttgggcaaggccaaaatttctgatttttttccaccgccgcaaacccctttcctgtgccataccgccattccattcctaagctgggcgtgggcgggtgaagaaaggaagcgaggccggctgtttcgctgaaaccccgccgcctttttttccttttcttttctggacctgattgaagaaccgtagcagattaggggagggaggagcggcggcggccggtcggtcagtatgattcacctgctgttcctcgtgctgttcgcggagggcgcggtagcgctgctcctcatggtgaaggtcgggccgctgcgggagctggcgatgcgcgtcgtggaccaggtgaagacgggcaagggcccggcaaccgtcaagacgctggcatgcacgctctcggtcatcctcatgtccaacgtcgccagcatcctcaagatccagaatcgtgggctcaagctcggcaccgtcagccccatggaccaggtgctctggagaacgcacctcctcgaggcatccctcatcggatacacgctattccttgcatttgtaatcgaccggctgcatcactacctccagaagctgatgacgttgaggaaaacatccagcacgtccagggaggaggtcgagaaacttcagatggagaaccggtcgctccgtgaaaaggaggagaaatcctccggtgaaacgaagaggcttcagcgagaggttgtgaggctgaacgagagcatgaagaagctgaagtccgaggccaaggagcacgagcggaaggcatcgatagcggaggcccatgtcaatgcgctgcagaagcagtcggaggagctgctcctggagtacgaccggttgctggaagacaaccagatcctgcagacgcagcttcttagcagaggctaagctatgagctggtacatgctgcagcttcagttgtttgttagcaaggttcttaccagatggttctgagtgatgacatgcagagcggttcttggcgttcctgacttaattatgatcttgttgatgtctggatgcagcgtgtactttagactttcatgtttcttcctttctggatggatgtaggtaggtacatgatgtaagagccaatggatggattgtaggtacatgatgtaagagccaatgaattgtgatttaattatagaaggtcagactagtgcagtggcgagagctgtgtcgttagatcaggcctagtgcagttgtgagagctgtcattgaccatgctatgtcgtcggtttgaagcagcattttcttatagattgcctcagtttattcttc

SEQ ID NO: 72619 - DNA, 1279 bp, Zea mays
  Clone ID: MRT4577_166227C.1
gcttttgctctaacgcttcgcctttcgaccccccctttcctccgacttctttcagcagcatcccctagtcctcgcctggactccgcggagtctttgattgctccgagttcctcgcctggttttcggcaaggtgagctgctcctttcgccgttcctatgggagtttccccggttgcttgttgcttcccgctttccttctcggtatggcaaggccttctgattgctggcggctcaccttttcgcaggccaaggaaaggtggtcacttcacttctgttttttttttgtttttttactgccgccgcaaacctccgctcctgtgccatgccgccattccattcttaatctgggcgccgaagaagagaggacgggagcgaggtccggtcgaagaatcgtagcggattggggaagagagggcggcggaggccggtcggtatgattcaactgctgttcctcgtgctgttcgcggagggcgcggtggcgctgctcctcatggtgaaggtcgggccgctgcgggagcttgcgatgcgcggcgtggaccaggtgaagacgggcaagggcccggccacggtcaagacgctggcgtgcacgctctccgtcatcctcatgtccagcgtcgccagcatcctcaagatccagaacagggggctcaagctcggcaccgtcagccccatggaccaggtgctctggaggacgcacctcctcgaggcatccctcatcggatacacgctattccttgcatttgtaatcgaccggctgcaccactacctgcgaaagctgatgaccctgaggaaaacatccagcacatccagagaggaggtggagaaacttcagatggagaaccggtcgctccgcgaaaaggaggagaaatcctccagtgagacgaataggcttcagcgagagattgcgaggctgaatgagggcatgaagaagctgaaatctgagaccgaagagcacgagaggaaggcgtcggtggcagaggcccatgtcgacgcgctgcagaagcagtcggaggagctgctcctggagtacgaccggttgctggaagacaaccagattctgcagactcagctacttagcagaggctaagctaaggagcttggtttgttagcaagactcctttaccaggtagtgtcgtagagccaaggacttgcccggttctgaatgcttacatgccgcggttctaaatttcggcatgtccattgtggttcttggcgttcatgttgttcggttgttcctaacttgtgatcttgttgatgtatggatgcccgcgtgtatttta

SEQ ID NO: 72620 - DNA, 606 bp, Zea mays
  Clone ID: MRT4577_166228C.1
tcgagcggccgcccgggcaggtttttttttttttttttttttttttttatttttttttttttttttttttttttttttttttttttttttttttttttttttttttttttttttttttttttttattttttttttcatctctaagttaattctgcccccttgggggggggggcacccttcgtttttgtttacccttggctcctttacctagaaaggggggcatgggggcaggcgctccctggcccaatcggggggggggggccctcccctccctccggcccgatgcaagaaaaaagccgggggggggtagggggccccggggcctccctaatattgaggccggcccggcccgggccccttcctgggggaaactgtaacccggggggggtggcttatgggttccaacccggaaccccaaagagattagaaaggggggcctaaagggcgggctggcaaaaaaaaaatgtgaagcgccaacccccaaaaaacaacccgcgaaacatttaaaaaaaccccccggggggctccgggaagccccctaacaaaggtaaggggcgggtagggcccgcttcctttttcgggaaaaataacttttccccctctttt

SEQ ID NO: 72621 - DNA, 236 bp, Zea mays
  Clone ID: MRT4577_166229C.1
acgtgacgctagttttaccttaggattcttgttctttacaagatgaaaaacctactcattgtggactttatccgagtacctacagacagcactcgcaaaaagatcagaattatgtgaaagaaacatgtattcatctattctgtttgccattttttagatcttgtcaaatacacatctttaatctattactatatgtataaattccttaatttcttttttttaaattactaatttaa

SEQ ID NO: 72622 - DNA, 373 bp, Zea mays
  unsure (1)..(373): unsure at all n locations
  Clone ID: MRT4577_16622C.1
aaacccgcggcgcccacgcgtccgagttgggcanggttgtggggttgcattattgctcacattggcacgctcagaggttgaggaggttcacgagacagctgcaggggcactatggaatcttgcattttattctggtaatgctctccgcatagtcgaagaaggcggcgttcctgttcttgtaaaaatttgctcatcatcacggtccaagatggcacgtttcatgtctgcactagcactagcatatatgtttgacggaaggtaccatttttgctattttttcttggttgcttaacatgtcttccatttgatattagaatatgttttttagttcttagttgagcaaggcctacaccagccagcactttagttttgt

SEQ ID NO: 72623 - DNA, 381 bp, Zea mays
  Clone ID: MRT4577_166230C.1
agactgacgaaatagaagagatgtgattattattattattttcttcttgtttcccccatgcctagtaaaaacgcttgatcctagtagtatattatgtaggagaggtagataggagttgttgttgcgttaaacgatcgacaaatcgatcggtagaatgaattaatgggccagccagcagagtgtgatctcactatctgatgagtgataggatgtactccctctgtccggagatccagtattaaattaaatccacccagtgaaacaataaatacatcaacgagctagcatagacgatccacactacacaagcgaagcgaatctgctgctgatatcgtcggcgacgtgcatcttatctagcagtgttggcctttcccggaactc

SEQ ID NO: 72624 - DNA, 1774 bp, Zea mays
  Clone ID: MRT4577_166231C.1
cggggaaacatccgttgtttcttagctcgtggtgccattgcattggtatcttcgtcttcgttgtagacatggggatgctggcttctgctctgagttctttcaacaagaaaagcacgttgttgcagatgcttacctcactggcgaagacagtaggcaggattccagcttcgtgggggagacatgcgtggagcatcggaagcgaagatccaaggagagcggtccatgctctcaaggctgggacggctctcacgctggtgtccctcctgtacatactcgagcctttcttccaagggatcgggaagaacgcaatgtgggctgtcatgaccgtagtcgtcgtgctcgaattcactgcaggagcaaccatatgcaaagggctgaatagagggctgggaacagtgctggcaggctgtctagcacttctcatcgagctcgtagcagccggaaccgggaaggttctgcgcgctttcatcgtgggggcttcggtgttcatagtaggatttgccgccacatataccagattcttcccagcgatcaagaagagctacgactacggtgtgctgatcttcctcctgaccttcaacctgatcacggtgtcaagctaccggcagcaggacgtggtgtcgttgacgagagaccgcctgagtactatcgccattggctgcgcgatatgcctgttcatgagtctcttggtgttgcccaactggtccggagaagacctccacagtagcaccgttggcaaattccaaggattggcgacgtcaattgaagcttgtgtgaatgagtatttccgagaccaggatgaaggcgacgacgttcttggcaagcaggaagcaagagcttccattcagatcggctatagagcagtcttggactcaaagtccagtgatgagaccctagcacactatgcgagctgggagccaagacactcgatgcattgttacagctacccatggcagaagtacgtgaagctcgggtccgtgctcaggcacttcgcctacacggttgctgcacttcatgggtgtctggaatctgaggttcagactccgccgtccgtgagatcgctgttccgaggcccatgcacaagagttgcacgagaagtagccaaggtcctgcaggagcttgcagcgagcataaagcatcaccggcggtgcgcccccgacgtgctctccgaccatctccacgaagcgctgcaggatctgaactccgccatcaggtcacagccgcggctcttcctcggctccaagcacgcgtgcgccgccaacaagcgggtgctgctgatggaactgaactccgggtccgggaagctttccgcgtcgagagcagctcttcgctcgttcaagaccgacgcgacagcgctgtccgagacgaggaacgcccggtcagaccaaccgccgccgccgtcggatcgcagcgagaggagcggcggcttgctgcggccgacgctcagcaagatcgccatcacgagcctcgagttctccgaggcgctgccgttcgccgcgttcgcgtcgccgctggtggagatggtggtgcggctggagctggtgatagaggaagtgaagaacctggagcgggttgcgaacttcagagagctcgctactgggcataatcacctgatcgtcgatctcggtagcaaggagaagacgaggaacagtaatgctgcggcgttacaccctgtttctgctgcagctgaatgagggctccattctgagattgtaggctggaatatttctgttcatttcctatataaaaagcagccgtctgggaagagagatgt

SEQ ID NO: 72625 - DNA, 799 bp, Zea mays
  Clone ID: MRT4577_166232C.1
cctcgaggccggccgggatacgtatatcagaagcgccttttactatacaggggagaaacatccgttgtttcttagctcgtggcgccattgcattgatgcttacctcactggcgaagacagtaggcaggattccagcttcgtgggggagacatgcgtggagcatcggaagcgaagatccaaggagagcggtccatgctctcaaggctgggacggctctcacgctggtgtccctcctgtacatactcgagcctttcttccaagggatcggaaagaacgcaatgtgggctgtcatgaccgtagtcgtcgtgctcgaattcactgcaggagcaaccatatgcaaagggctgaatagagggctgggaacagtgctggcaggctgtctagcacttctcatcgagctcgtagcagccggaaccgggaaggttctgcgcgctttcatcgtgggggcttcggtgttcatagtaggtgtgtgcttgctgcaaaccaaaccgattcttcatgccacaagcaaagcaactcgatgtggatgatatacgcaatactcagctgctagctgcttttatttgttaatttcctgtggacgataggatttgccgccacatataccagattcttcccagcgatcaagaagagctacgactacggtgtgctgatcttcctcctgaccttcaacctgatcacggtgtcaagctaccggcagcaggacgtggtgtcgttgacgagagaccgcctgagtactatcgccattggctgcgcgatatgcctgttcatgagtctcttggtgttgcccaactggtcc

SEQ ID NO: 72626 - DNA, 362 bp, Zea mays
  Clone ID: MRT4577_166233C.1
gtgggtggtttttttttttaaaagatacatgcccatttaatcttgtgggggaggcccaatgccggaccgaaaatggggggcacacaaaagggggcccgcaggtggggtaccagagatttagacgacaacactggggtcccaatggccggttaggccagggcggacaaacccacttgggaaaaaaaaacctgggtttcaactaaacggagcaggcccgccggggacaaccaggagctttaagcaggggggcgcaagcccctcccgggctggacaaagccgggagcaacacggaaataaatggggtagatgattccggggacctacccaaggattgtgagcaaaaggcaaaggcaaaacttttt

SEQ ID NO: 72627 - DNA, 411 bp, Zea mays
  unsure (1)..(411): unsure at all n locations
  Clone ID: MRT4577_166234C.1
accggggcgaccgagtcttacgcngacgcctnntcccgtctcgcttttctttttcgacacccgtcgccangcgcgccgttgcattataaatgtttcggtacacaccacctcncgggtagaaaggggtggtcctaattaacctacttcctacgcgcaaggatattgaaagaccttttatacaaatattgaattgaatgcatcaccggtgcctgactatgattagcaacatccttatgattaataatttaaagttgagtattgctaaactgaacatgttaaacttttttttcaacattgctccgggagcgtgaagagagactcatgatactaaaaagttatcaccacgaataattttcaagacttcattcctatcaatattatgaattaatattcttcttaacctaaaaaaca

SEQ ID NO: 72628 - DNA, 1795 bp, Zea mays
  Clone ID: MRT4577_166235C.1
ctcttgtttgtccgggcggcgtcagcgcaactcaggcaaacaacggaacggaaaccccggccgtcactgcgccagagctggagacagagatcatggtgcgggcatgggggcggcggacggcgctgcctccgctcctcatccttggcctcctccgcctgcactactcctcgctggtcgtcgcccaagaaggacaagaaaaagaccctgctactttgttcgcacaagcctcagggatgatggacctgaggaagtatgatggggcgcttggcctgctaaatgctgtgttggaaattgacccaaatcattctgaggcttataggcagcgtgcatccgtgcttcggcataaatgcagatacgaggaagctgagagggactataacaaacacctggagctaagtcctgggtctgcttcagtggtgaaggaattatcccagcttctgcaggctcaaaattcattacaatctgcttatggccaattcgattctggagacttctcaaaagtcgtggaatacatcaacaaaattgtgctggttttttctccaggttgcttaaaggcaaagcttctcaaggctaaagcattgctagcactgaaagactactcaagtgttatttcagagaccggattcattctaaaggaagatgaagacaacttggatgcactgctattacgtggtcgtgcctactattaccttgctgatcatgatgtggcctccaggcactaccagaaagggcttcgtcttgatccagagcattccgaattgaagaaagcatatttcgggttaaaaaatcttttgaagaagaccaagagtgcagaagataatgctgccaagggtaagctacgtgtgtctgttgaggactacaaggcagctctagcaatggatccagaccatactgcttataatgtacatctttatcttgggctgtgtaaaactctggttagacttgggagaagtaaggaggcaatcagcacttgtacggaagcactgatcatagacagtgaacttgttgatgcgcttacacagagaggtgaagctaaacttctctcagaagattgggaaggagcagttcaggatttaaaagaggccgcccagaaatctccacaggacatgggtatccgtgaagcacttatgagagctgaaaagcagcttaagttgagcaaaagaaaagactggtataaaatccttggtgtttcaaagacagcatcagctgcggagataaaacgcgcctacaaaaagctggcgttgcagtggcatccagataaaaacgtggataaccgggagaaagcagaaaacatgtttcgagaaattgctgctgcttatgaggtgcttggtgatgaagacaaacgtgtaaggtatgaccgtggagaggatgtggaggagatgaatatgggaggcgggggtggcttcaatccttttgggggaggcggccagcagtacacgtttcaatacgacggtggcttccccggcggcggcttccctggaggtggcggctttcagttcaactttggataaactgtgccatgcaccatgacattttcttggcactggaattgttttaggaattcttaacggcagctggtagctattcttaggcaggctgagactgttctactatgttacataataatgacaagtgttacgattttttccttcatcatttgtttcctgcttacatacacacgcacacattgtctctctgatacatcagttgaatgtaagaatggaaataaagttacttttttttcttcccccacggcaaagttccaaaaaaaaaaaaaaaaaagaaaggccggccg

SEQ ID NO: 72629 - DNA, 340 bp, Zea mays
  unsure (1)..(340): unsure at all n locations
  Clone ID: MRT4577_166236C.1
cagtcaagcagtcagcagcaccaccggnctagtccgggacaaaattctgatgttctgtcgtcagcaatcctgcgttccctgcccgacggaggtgcttccctcgttgctgcgttgcactgcggcggcctcgcgcttgttgtcgattccagctccatgcgcccatgatttactttacttgtgtaagatcaccaatctccagtctctactgctattcccccctttgcgttgctggaaaataattggtttgtccatttagattcactaattttatgcgtctttccaattctaggttttcttgagtctgtagcggtttttatcagctgcttgccttctgcagaag

SEQ ID NO: 72630 - DNA, 658 bp, Zea mays
  unsure (1)..(658): unsure at all n locations
  Clone ID: MRT4577_166237C.1
ngtaatctctaaccctagcgtactgagcttggcatggcggcggcagtgtcccgggctcccagcggcacagtcgtgcggcgcgagcgcagcctctgtgcctaggctgcgcctgcacgtcggccggcggcacgcggtggctaataggctggaggcactgcccgagcggctgcccaccaggtactagcaagggagtacccaaggttaaaatcctggctttggcactgttcgggaattgtggtgattctgcctgttctttatctatctaatagatttgaggtgtgttggtgatttttagtttgtttgctgttcctgaactaaaatttaagttttgtgcgtctttgtaacaatgatctcagcagagatggaccaaatacaaatagagggtgcatttgtcggttcaaaccaagacctgtttccgtaagggccacttcgttttattctcaatccatgtgttttagaggagattgagtgggtttaaattcctaacaagttaaaattcttctgatcctatccaattcatatgggatacaggatgagagaataaccgaacaaggcctaatagagttttccttagatttaaaaatctgcaataaaagaagacaacatgcattgcgttatattcattcacaatgaagaactgtttaggcatgtattacat

SEQ ID NO: 72631 - DNA, 314 bp, Zea mays
  Clone ID: MRT4577_166238C.1
ccccccccttttcccttggtagtttttgggggttaccgcggctttcccttaaccgggtttttaattattttgttttacataattggttcaaacggtttaaaatcgtgcaagaccctggatgccccaaggattcatcgccggaacaccgagtaagccgggggcttgctcaatcttgagataaagagagctatcccgggggaaatccaaacctcactgagacagttttgcacgaagtggacttttggagccgggtggaacacaatgcaggaggaaaacccaaggggcttgctgacatggcctacccttgaacaata

SEQ ID NO: 72632 - DNA, 369 bp, Zea mays
  unsure (1)..(369): unsure at all n locations
  Clone ID: MRT4577_166239C.1
aaagcggccagcaccagccgccgccccccgcagcgccggccacaccacggcgagcaagcacgcagccgcggccacgcggcccgccgccgccgcgacgccgccggcacggcccgggggcgcacgccgaccagcgccccgccacccacaacacggccgacaccccgacggcgggcgacgggaaccagaacgagggcacgccgcagcgccgaggcgagcgacgcgcccccgcaacggagacgagcgcgggcgggaccacggacacggncaccggacaacggcggcgccaacgagaacccgaaccccagcaaccccgacgccaccgagaccgnccagaacgacgaccgcagcccgccgcccgagagccacgcc

SEQ ID NO: 72633 - DNA, 302 bp, Zea mays
  Clone ID: MRT4577_16623C.1
gggcaagggacgtttttaactttagacccttaaacacaaggtttttccccgggaaaatcaagggccggaggacagcctgacttgtgtttgctggcgggttggggcgcgacctcaaagggtgggggacccctccggggggccggaaaaaaacagtaacaaattgtttcccaaagggtcccttaagggctttgggagggtttccaccgggcccttcccggggaaccaagccctgatgaaaaaaagcaaaatgggaaaaatggggaagccggcccctttttaactcccttacccttaggaaaggg

SEQ ID NO: 72634 - DNA, 723 bp, Zea mays
  Clone ID: MRT4577_166240C.1
atccccgctgccctcggcgctgcgtctggacccggcacctacctcccccctccccacctcgccgccggcgggtggagtcgggctggagcagccgctctcctctgttacccccctaaccccctataaagaaaaagaaaaaaaacagagagagagcgagcgaccggcggctcggcagccatggggcacggcgtcagctgcgcccgcaccggcgacgagcacgactacttccgcgcggcgcaggtcggggacctcgaggccctggacgcgctcctcgacgccgacccctctctcgcccgccgcgccacgctctacgaccgcctctccgcgctccacatcgccgccgcaaatggccgccccgaggtgctgtcaatggtcttggatcacggggtgccgccggacgtggtgaatcggcacaagcaggtgcggtgcgggatcccgtccccatcgacgctttttttctttctttcttcctttctttccatcctttgccgctcgcaaggatctctcgtgggctacccgcttcaaaaatctcacctatttttttcttaccctcttcaatcaaatcaacaaggtaaaaaatctcatctttctaccggcttactatgcttgtttttttctgtccagacgccgctgatgctcgcggcgatgcacggcaagaccgactgcgtgctgaagctcctgcaggccggcgccaatgtgagcggaaatctcctcctcctcttc

SEQ ID NO: 72635 - DNA, 250 bp, Zea mays
  Clone ID: MRT4577_166241C.1
tctcctcgaaaccgtctctctgagcgtcctgagtccgtggagagggtggcggcggtggatatggagagcctggcgcagcgcgcggcgctgctgcgggagtcgctgcacaagagccagcatgtcaccgacgccgtctgcttcatactcggctccttagacaagagcctcaccgtgcttgactccgccatgcgccccattcaagtgaggacgcacgccgtttggaaccggcaccataacatttaccgcacgc

SEQ ID NO: 72636 - DNA, 267 bp, Zea mays
  Clone ID: MRT4577_166242C.1
gccaatcttacccacggctgctgcaggtcttcatgaaggttttcactgagaccccagattttctgtgtgtgctaacacacctagcagaacctgaatattcattttctgtagacccggttcctgtgtaatccatactctgctttttctgcccaccgcagagactagcagctggagcccggatggatgtgctatactcagaagcctgtggctgacaaaaatgtttacgtatgttgtctagctttttaataaactttttaaaaacaaaaa

SEQ ID NO: 72637 - DNA, 259 bp, Zea mays
  Clone ID: MRT4577_166243C.1
ttccccttaatctgtgaggaaaagggaattatgggttctctttatttcagttcaatttttccttttagtgttaaaaatattacctttattattattattattattgtgtggagattgattcatgtaatttgttgaacggttgaagatgagaatttgtggagcagcaatcagcagcagctacaccaccacgtgcaattcccttatagtgtttgcttgctcttacctctccagtcctgcaaaaaccaagttcctgccctca

SEQ ID NO: 72638 - DNA, 305 bp, Zea mays
  unsure (1)..(305): unsure at all n locations
  Clone ID: MRT4577_166244C.1
tgaaatgcggataaaccaatccataaccaaatctctgcatctacggatgatgagaaacaacatgcactaccatctgatctactcccgccgccgccacccgtgcctcctcttcctcctcgctctctcgcgcacggggctcgcgtccgaaaccctaacctcccaccatggcggctgaaggcggtggcgtccgggcgctgtcccagcgcgagcaggacatccagatgatgctcgccgccgacgntccnnnacctcgngnncaccaagaannactggcgaccttccagaatcggagcgcctacgtctac

SEQ ID NO: 72639 - DNA, 617 bp, Zea mays
  unsure (1)..(617): unsure at all n locations
  Clone ID: MRT4577_166245C.1
ctcgaggcggcgggagaattccacatacatccctcctcgcttgctctccgttcgtgttgactctctcgctgtgctttcgtttccaaacctcgtgagacccgacgatggccaccaccgcggtgtcggtcgacgagaacatcgataagattcgcgccgaggtcgccatgctcgaccagatcagggagaacgagaagtccgtgttcatcatcctcatgtcacgttacctcagtgtgagagtggttgcacatcgagtggagcaagatccacacccctacggatgatgcgatgttgacctaccataccgttcgcgtcgactcccgagatctcgatgtgactgataagctgatgcataacctcggtgggctctggcttgactgaggtgatctcgacgtatcatgtgatgcgctgtgaccgagtctgtcattgaagttcgaccctgactcggattccttgatacttttgtgatgcactgtggctatagtgtgcaaccatactagngtgtgatgaatcctgactacaggtgattctgttcgccccattgtacaattcctacgaagctacgctgtctatggccggtgccaacttgaaggtcattatcctccgcgcatcagatttct

SEQ ID NO: 72640 - DNA, 392 bp, Zea mays
  Clone ID: MRT4577_166246C.1
accacgcgttcgatgactggaggccgctcctacttgcactgctatctcgataagctgattaccaacgcgcctgactgcccggcttcttacgacatagctacggttcgatccacgccttactgattgcaagcagggtgatagtcatgaagactatagctgaactttcaagctgtcaaagtagagaacttctgctgtaacgatactaaaagacccaatcgatctcgtatttagcacatatgagtactcagatgacgttgccgatcgatcttttgcgcatgcaaacttaacttatggcatgtttatgactacccatatgttcacaaagtgtcgtgcttgcaatgctttgaacatctgatcttggaagtacttggatccatagattaggtaagatc

SEQ ID NO: 72641 - DNA, 761 bp, Zea mays
  unsure (1)..(761): unsure at all n locations
  Clone ID: MRT4577_166247C.1
aaaaaaaaaaaaaaaaaaaaaaaaaaaaaaaaaaaaaaaaaaaaaaaaaaaaaaaaaaaattttggatcaggttcctcgaaggcagtttatgttactaaaacagactttggcggggtatcacgctgcgttcccgaagacattccgaatcagaatcacaggacacatcaccaccatggttacgattacaggtgttgagacgaaggacgtgcggttcccgacgtcccttgacaagactggctccgatgctatgaatgccgctggagattactcttcagcatactgcatcttgcacaccgactcaaaattcaaaggtcatggcatgaccttcacaatcggccgtggaaatgagattgtatgcactgccatcacccacctagcagaccgcatcaaaggccacactctcgactccctcgtcgccaactggggcaagacctggcgtcatctcgtcaacgactcgcaactccgctggatcggccccgaaaaaggcgtcatccacctcgccctcggcgccgtcgtaaacgccatctgggatctctgggccaaatcccttggcaagcccgtctggcgcatagtcgcagacatgaccccccagcaaattgtcgacctcatcgacttccgctacataaccgacgccctaaccccagccgaagccctcgaaatcctcacaaaagccgaagcaggcaagaaggaacgcctccaggaagccctcgacagccgcgctgtacccgnctacactacctctgcgggttggctgggttac

SEQ ID NO: 72642 - DNA, 239 bp, Zea mays
  Clone ID: MRT4577_166248C.1
attcggctcgagcttgtgtctggctttttcatccttcctgtggctgccggccagctcatcatacggtagatcagcgcgattcggcgatggcggcggcgcaggtggtcctctaggggagccttacgccgacctgcaagaatcgagcagcgcccgacctatccggcaggcgagagaatgccagggcagaacatatgacgcgctcggcggtgcctatcggatgctcccggaggcagaacgcg

SEQ ID NO: 72643 - DNA, 1379 bp, Zea mays
  Clone ID: MRT4577_166249C.1
ggggagccacatttttcaattgtcatgtgaatggattgatatattcttattttattatatacataggatttttttcaaactgcaatatagaaattttcactcccaaacacaaacataaactcaccccttgcagggggggatttaaaattttttttttgggggggaagagtgatgggagtttccacatttttcaattgtcatgtgaatgaattgatgtattcttattttattacatacatagtttttttttcaaactgcaatatagaaatatacactcccaaacacaaacataaactcaccccttgcaggggtggatttaaaacctggactggggtccagtatataaaactccatattgttcatgttttatgtagtatcttcagctcatattagtgtcgattggatcagtactagcccagctccatattattgggtcctcacaccatcccatgtcacttgatgaggatgcatcttgcaggagaaccttcagcaccccgcaatcttagtggcaagcaatgcaagatgtatattccagggctaacatgctccagattcaaggcttcgacaagtatgacctcccttttttcaagaaatactagatgagctggaatgcattcatcaaatgcgcccactgacaagtagtcaactccaactagtttgatgtctgtattatcaaccaaccattgtgcaccatccttcatgaagccaacataacttgtatcaaattctttcttccacataagctttctgtctgtatttagggtccgaaagagtacacatcgaacacctttaggaatgtttagggatgccataacatcagctgtgatgttcttatctctaggaacgtcaaccaacagcgctggtccgttgaggacagcgaggtcgagggtgtcgacgtcgaagccggtgtcgtagtagtgctcgaagacgtgtcccggcgcgtcgacgtgggtgccggagtgcgcagtgagccggagctccgagaagttagcgatgtcggagccgttgcgcatggaccgcgccagctgcaggaactcgccggagccctctgatgactcccactccggcatgtcctcgcggtagtagtggctgatgtccacgatccgcccgccgtcgaactcttcgcgccgctctggcgcaggcaccagcaccgttgctttctccgcctctgcctctagcacaccgctgcatgcctcctcagcgtgcgtgtagcccgggtgcgcggcggtctcgccggagacaaccgccaccaccggaagcagcagcagctgggagagaaggagcaggggcgcgagatccatggaatggatatgccttgactggggagtgggtgcctagcagcacagttattgcaacccacgcgtccgcggacgcgtggg

SEQ ID NO: 72644 - DNA, 336 bp, Zea mays
  Clone ID: MRT4577_16624C.1
cgttcagcactatccagcacttggagataaacggaaggcaagctgatatagggcaccatacactgcctcaaattattttacatgacattatcccaagtcacacttactgacctactgcataatctcagatcaaaattactgattggctttctttacacagagtagtatctgcaacacattgggacctgtcatgaaagccatgcgggccgctttatatggtaatgctgggggtagcactcactttatttcaaagaaaccgagacttgccgttcaagcttatcgcttcatggaacaaatggtgcactgccaattattgtcaaacgaaagcatggacca

SEQ ID NO: 72645 - DNA, 421 bp, Zea mays
  Clone ID: MRT4577_166250C.1
cacacgcgtccgcccacgcgtccgcccacgcgtccgaaaaaaaaaaaaaaaaaaaaaaaaaaaaaaaaaaaaaaaaaaaaaaaaaaaaaaaaaaatagggaggccactctaagggttagaaactttattttggcttccatgcaatgtcatttcttttttattctggccgtcaatttcaattccctggccttcgttttatacccttcttttcgggaaaatccctttcttttcccattttagttttgttacatcccgtctctttttcaagttctgggtttttatccatgtgcccctttcggttcccccttttctacatttgggccccctttttgtcgactttaatttcccttggggggtgtcattaattccgggggttttcctggttccgttcaacttgtccgggcccctttgcttctccctt

SEQ ID NO: 72646 - DNA, 1629 bp, Zea mays
  Clone ID: MRT4577_166251C.1
gaaacggaaaaacccccaatttgcaaaacccctttttccccggggtttggcgtttttttttttcaattggccccgccggtttttccacttgaaaaggggccgttagcccctcccaatttttttgggtttgttccctcctttggcccccccgggttttcccttttttttttcgggtttttttttttttggaatttttagcggatttaaattttcccccgggaaccatttttttcctttttttccccaacgggcaatttttcctcttttaaggggaaaaaaatttgggtttggggggccttggggccctttttttttttttttttttttttttttttttttttttttttttttttttttttttttttttttttttttttttttttttttttttttttttttttttttttttttttttttttttttttttttttttggtggaagagtgatgggagccacatttttcaattgtcatgtgaatgaattgatgtattcttattttattacatacatagtttttttttcaaactgcaatatagaaatatacactcccaaacacaaacataaactcaccccttgcaggggtggatttaaaacctggactggggtccagtatataaaactccatattgttcatgttttatgtagtatcttcagctcatattagtgtcgattggatcagtactagcccagctccatattattgggtcctcacaccatccctataaacacacacatgaaaaccatacttctataagcacttcgaaaagactgaataggtaggtttcaagattgattgtacaatgctttttgggatggttataaccatgtcacttgatgaggatgcatcttgcaggagaaccttcagcaccccgcaatcttagtggcaagcaatgcaagatgtatattccagggctaacatgctccagattcaaggcttcgacaagtatgacctcccttttttcaagaaatactagatgagctggaatgcattcatcaaatgcgcccactgacaagtagtcaactccaactagtttgatgtctgtattatcaaccaaccaattgtgcaccatccttcatgaagccaacataacttgtatcaaattctttcttccacataagctttctgtgatgttcttatctctgggaacgtcaaccaacagcgctggtccgttgaggacagcgaggtcggagggtgtcgacgtcgaagccggtgtcgtagtagtgctcgaagacgtgtcccggcgcgtcgacgtgggtgccggagtgcgcagtgagccggagctccgagaagttagcgatgtcggagccgttgcgcatggaccgcgccagctgcaggaactcgccggagccctctgatgactcccactccggcatgtcctcgcggtagtagtggctgatgtccacgatccgcccgccgtcgaactcttcgcgccgcttcggcgcaggcaccagcaccgttgctttctccgcctctgcctctagcataccgctgcatgcctcctcagcgtgcgcgtagcccgggtgcgcggcggtctcgccggagacaaccgttaccaccggaagcagcagcagctgggagaggagcagggacgcgagatccatggaatggatatgccttgactggggaat

SEQ ID NO: 72647 - DNA, 271 bp, Zea mays
  Clone ID: MRT4577_166252C.1
ggaggtcacattcattttttctaatacgcgagccaagaatgcccacgcttgatcagtctcaaagagggcgccgcctatgatgtattggtgaccgaaggctgctgggcctgtggattttagaccaacagcggggaccaattgtgggaacttacaggggctcgctgtactaagccaaatactcttaccggaacggaagcaaatggggtaaaaccaacctgattcacggctggctaaacccagcctaacctccctattggggggtgagcaactc

SEQ ID NO: 72648 - DNA, 182 bp, Zea mays
  Clone ID: MRT4577_166253C.1
ggggcccggtttttgggctcaatttcccaaaaaagcttggcctttgccctgaaaaaacaaaatttcactgtgggtttggcctttttgaaactgcctaacttttaggggtaaccccccccgcggggcaaaacgcttaaacaaactttttttaattcccccccttttgtctttaataaccaaag

SEQ ID NO: 72649 - DNA, 768 bp, Zea mays
  Clone ID: MRT4577_166254C.1
cattgggtacctcgaggccggccggggggtagttcactacttgcgaacacaactgcacaaaatcacaagcctccctcccggatgcccacctaggagggtctggcggcataccacctctgactcctctccctgctgggcatcaggttcttccctcattctccgcaaaccctaatcacaatggatgtctccgacatgactaccatctcgttgccctaccgattcgtcatctcctcccccggggatcaccgccactgcgacatccacgcgatccgctcctcggcgggggaagcgacaataaacctggtgtcgcacgcgcagatgcgaaacaaaaggttcttagcgatgcgtaaaaccaaattggtgtgaacttcgtggcccgcctgcaccgacgcgatgactccgctatcgagcggagggatgggaacgacagcggatcaacctctgacaccgtggcacgtactgagatcgagtcgacagtgtcgctctgtgcggaggctcacccaagatggaggattctgcgtgacacttatggcaacccagacgatcacagctcctcgccgcggacacaccgatgcgcctcctctgtcaagagctaggatgggtcatagtggatatttacacacaaaaaatttgatgaaggccatcaggtcagaatgcatgtgaattttgataagatttctgaaagcatcatggatgccgatgaggttgtactagatgcggaaatggtaacctttgaagatactgagagaatacgacatgatttgcgct

SEQ ID NO: 72650 - DNA, 212 bp, Zea mays
  Clone ID: MRT4577_166255C.1
ccgacgcgtgggtgaattgcttggtcgacactttaaggtcgacccaaataggactaatgtttctgggatgaagcatcgtccaccaagtgtgtatattccataccatggctacccttatagaccatactgggcaccgaattttcccccatatggttatggaagggctccaagattctgtcgtcctattctcttcagaccttacttctgaagta

SEQ ID NO: 72651 - DNA, 939 bp, Zea mays
  unsure (1)..(939): unsure at all n locations
  Clone ID: MRT4577_166256C.1
tggctcccaggaagcagcttgcaaccaaggctgctcgtaagtcggcccccaccactggaggagtgaagaagcctcaccgctaccgccctggaactgttgccctccgtgagatccggaagtaccagaagagcactgagctgctgatcaggaagctgcccttccagaggcttgtcagggaaattgcacaggacttcaagactgatctgcgtttccagagccatgccgtgcttgccctccaggaggctgctgaggcataccttgttgggctgtttgaggacaccaacctgtgcgccatccatgctaagcgtgtgaccatcatgcccaaggacattcagctggcaaggaggatccgtggcgagagggcctaatccccccctcaaatcattgtgacaaaaatgaagtcttgtgtcgtagcaatgaatttaatctggtgccgttgtaaggacatatgagtagggtttgttttgtggatcataagtttctctactgccgcactatgtgttgctgctacctttgctggtgttattactagtgtcgaatgcttaaattgtctagtcatgtaatgcgctgacagtctgtgacgtgtatgcgatgtaggcactgactagtagtgttgtctgcgctgctggatcttgcgcctcattgctgtggctgatttgttcgttaatgtcaagaattgtgttacagtgagtgtatatttgtgcatcgttgcnaaaaaaaaaaaaaaaaaaaaaaaaaaaaaaaaaaaaaaaaaaaaaaaaaaaaaaaaaaaaaaaaagaaaaaaaaaaaaaaaangaaaaaaaaaaaaaaagaaaaaaaagaaaaaaaaaaaaaaaaaaaggggggggcgcttttttgaggtcccaggttttcttaccggggcgtgccaggtaaaattttttttttagggcccctaaaatcaattcaatgggccggct

SEQ ID NO: 72652 - DNA, 612 bp, Zea mays
  Clone ID: MRT4577_166257C.1
cattgggtacctcgaagccggccgggaatcacactttctgccttcctccaacactcggcagagatatacgcttaatgttaagccccgggcaggatcactcacgcaagcgcagagagatgccatctgagtcgaacaccactcgcgtcttaggcccgctcctatccctagctgcggacatggcgacctccgagcaactctggaccgaagtctgcccccaccactgctggagtgaacaagcttcaccgctaccgccctggaactgttgccctccgtgagatccgcaagtatcacaagagcactgagctgctgatcaggaagctgcccttccagaggctcgtcaagggaaattgcacaggtacttcaaaactgatttgctgtttccagagccatgcggtgcttgacctccaggaggctgctgaagcataccttgttggcctgtttgaggacaccaacctgtgcgccatccatgctaagcgtgtgaccatcatgccaaaggacattcagctggcaaggaggatccgcggcgagagggcctaatcgccacctcaaacatcgtgacaaaaacatgaaggcctggggttattgttaatctggtgccattgtaaggacata

SEQ ID NO: 72653 - DNA, 705 bp, Zea mays
  Clone ID: MRT4577_166258C.1
ccggccgggacttttccggcctcccattcctcgcgcggcgaccacccaatttcgaagcgcgcgctagagaccgaacaagcgggagagatggctcgtaccaagcagactgctcgcaagtccacggtagggaaggctcccaggaagcagcttgccaccaaggatgcccgtaagtctgcccccaccactggaggagtgaaaaagcctcaccgctaccgccctggaactgttgccctccgtgagatccgcaagtatcagaatagcactgagctgctgatcaagaagctgcccttccagaggctcgtcaggtaaattgcacaggacttcaaaactgatttgcgtttccagagccatgcggagcttgccctccaggaggctgctgaggcataccttgatggcctgtttgaggacaccaacctgtgcgccatccatgctaagcgcgtgaccatcatgtcaaaggacattcaactgtcaaggcagatccgcggctagagggactaatcgccacctcagacatcgcgacaaaaacatgaagacctggggctattgttaatctggagccattgtaggacatatgaccagggcttgttttgaggatcgcaagattctcttctggtactgctgctgctacctatgatgaagtcattgctaggctcgaatacatcagcctactatgcgctgacagcctggactagcagtgctatgtgc

SEQ ID NO: 72654 - DNA, 660 bp, Zea mays
  unsure (1)..(660): unsure at all n locations
  Clone ID: MRT4577_166259C.1
ccggccgggctctctctccgttgctcgcctctccttgaaccctacgccggtcgtcgatttatccgctgcacccatgagtaagttgcagtctgaccctgtcgaggatgccatctcccagattgctgtggatgcccaggggaagaataccgaagtcactgatactgtgtgaacttcatattgctctgaagaattatgatccacagaaggacaaccgcttcactggctctgataaggtgccccgtatccctcgtcccaagatgaacgtgtgcttgcttggtgatgcccagcctgctgaggaggtcgaccaacatgggacttgacatacttggatgttgaggctctcgaagaaaatgaacaataacaagaatcttgttagagaggcttgcgcacgacataccatgctttcttgttatcaaaggccatcatcaagcagattccccgtctccttggtcctggtctcaacaaggcaggtgatgttcccgaccctggatactcaccacgaatccctcgagtccaaggggaaccagactaatgcaaccgtctagctccagctcgagaaggatctntgcatgggcgtagccgatgccaacgtggcgatggaggagaagcagatccttgcgaacctccagatgagcgtcatcttccttgtatcgcttctga

SEQ ID NO: 72655 - DNA, 380 bp, Zea mays
  Clone ID: MRT4577_16625C.1
aaggggactacagagccacctatagagcaccattggcggccaacatatgcagcatacttatgctgcttgctcatgctgcatgtgttgctaacgcgaccagttatcgtgactactcacacgctccgatagctggcttttatagctcatacctttcatcaatgactgttacagtatgtgaatacccagtgcgttaaccctacaggctacaactagcagttgcaacaggcaactgaccttgatcactcatgttcattcaacaagcgccagccatatctatgatgcagatatcggcacaaaccatcggggcacatcatgtgacacaacatgagctaccagtgattacaacagcttgtgttagcaaactttgttgcttattttaa

SEQ ID NO: 72656 - DNA, 294 bp, Zea mays
  Clone ID: MRT4577_166260C.1
acgcgccacgcgagccagaacatggcaaggatcaaggcgcacgagttaacgggccaaccaaagacagagctggggggtgaactcaaggatctaaaagccgaaccttctctccttggacacgccaaggggactggcggtgcccccaataagctctgccagactaaagcggagaggctatccattggtcaagtattcaccgtgagatacaaaaaacataaggctgctctgagggaagcttatacggggaagacgtttttgacgcttgatctccgcccccagaagaccacaactatt

SEQ ID NO: 72657 - DNA, 1216 bp, Zea mays
  Clone ID: MRT4577_166261C.1
cattgggaccctcgaggccggccgggacacggccacgcaccgaaactgccccgcccccgcagacactcgtcctccccgcgccacctcggggacgtcccggtccgcgacatccctgaccaccgcgatggccgccgccgccctccgctcctccgcacgccggctcctgcgtctcaccccggcaccctcgtcggctctgttcgccgcttcccggcccaccgccagggttgcaccgctctcacgccccatcgccgctctgtcaggtggcaacaatcctatctcatggaaactgagacgcttcttcagttcaaatgaaaagcacttgcctgcaatatctgatccagagatcgaagctgcatttaaggatttgttggctgctagttggaatgaacttccagattctctcgtagcggaagcaaagaaagcagtatctaaagcgaccgatgataatgctggtcaagaggctttttttccggcctcccattcctcgcgcggcgaccacccgattcgaagcgtgcggagagaccgaagaagcgggagagatggctcgtaccaagcagactgctcgcaagtccacgggagggaaggctcccaggaagcagcttgccaccaaggctgcccgtaagtctgcccccaccactggtggagtgaagaagcctcaccgctaccgccctggaactgttgccctccgtgagatccgcaagtatcagaagagcactgagctgctgatcaggaagctgcccttccagaggctgctgaggcataccttgttggcctgtttgaggacaccaacctgtgcgccatccatgctaagcgtgtgaccatcatgccaaaggacattcagctggcaaggaggatccgcggcgagagggcctaatcgccacctcaaacatcgtgacaaaaacatgaagtcctggggttattgttaatctggtgccattgtaaggacatatgagtagggtttgttttgtggatcgcaagtttctcttctgctactgttgctgctacctttgctggtgttattgctagggtcgaatacttaagttaactatgcgctgacagtctggactagcagtgttatgtgcgctgctggaccttgcgcgcaatgctgtggccgattttgttcgttaatgtcaagaattgtgttacagtgcgtgtatatatgtgtgtcgccgcatttttatttttgagaattgttttaagctgatgtttcgtcacc

SEQ ID NO: 72658 - DNA, 426 bp, Zea mays
  Clone ID: MRT4577_166262C.1
atgggcctgatgaggcaggtcatccatatcatggacatggtccacttgaggcaccggtccatcaacctcctgaggcccattgaatggggcagcattgatagcaaacccatccccaagcagcacatgtccattctcaacaaaatgaccattcgaaaggggtgcaagctgaccagcaccaatggagctatcaaacgacaagccagagtgctggatgggttgtggaacctgtgggcggagccccctagcgcccctttagatccgcccctgccgaaaaagacattggaacctattggaagatgttttaagtcttatttttatggaacatataattttacggaacccttgtggacttatagttatgcgaatcttgcaaaggatgttgtatgtgcagcaggtttgatgaagatggcgcccacctactgctga

SEQ ID NO: 72659 - DNA, 177 bp, Zea mays
  Clone ID: MRT4577_166263C.1
gccaaaggagactagatggtgggtccatgacaacacggtgtaatgatctgctgggcatggcctgtcagccttgtgtactgcgaactgtgatgtatctatgtaagcggggagatgagatgatttatgcctatttctaagcagccttatataggattgcgaagtttaccttgctggggt

SEQ ID NO: 72660 - DNA, 805 bp, Zea mays
  Clone ID: MRT4577_166264C.1
gccggccgggccgtgacttttccggcctcccattcctcgcgcggcgaccacccgattcgaagcgtgcggagagaccgaagaagcgggagagatggctcgtaccaagcagactgctcgcaagtccacgggagggaaggctcccaggaagcagcttgccaccaaggctgcccgtaagtctgcccccaccactggtggagtgaagaagcctcaccgctaccgccctggaactgttgcactccgtgagatccgcaagtaccagaagagcactgagctgctgatcaggaagctgcccttccagaggctcgttagggaaattgcacaggacttcaagactgatttgcgtttccagagccatgcggtgcttgctctccaggaggctgctgaggcataccttgttggcctgtttgaggacaccaacctgtgcgccatccatgctaagcgtgtgaccatcatgcccaaggacattcagctggcaaggaggatccgcggcgagagggcctaatcgccacctcaaacatcgtgacaaaaaaatgaagtcctggggttattgttaatctggtgccattgtaaggacatatgagtagggtttgttttgtggatcgcaagtttctcttctgctactgttgctgctacctttgctggtgttattgctagggttgaatacttaagttaactatgcgctgacagtctggactagcagtgttatgtgcgctgctggaccttgcgcgcgatgctgtggccgattttgttcgttaatgtcaagaattgtgttacagtgcgcgaaaaaaaaaaaaaaaaagcggcc

SEQ ID NO: 72661 - DNA, 1354 bp, Zea mays
  Clone ID: MRT4577_166265C.1
tcacaaccgatccagacggcccacccagcgcgaaccggatataccacacggatgccgctctataaataagaccccgcggccagcctactgtacttttccggcctcccattcctcgcgcggcgaccacccgattcgaagcgtgcggagagaccgaagaagcgggagagatggctcgtaccaagcagactgctcgcaagtccacgggagggaaggctcccaggaagcagcttgccaccaaggctgcccgtaagtctgcccccaccactggtggagtgaagaagcctcaccgctaccgccctggaactgttgccctccgtgagatccgcaagtatcagaagagcactgagctgctgatcaggaagctgcccttccagaggctcgtcagggaaattgcacaggacttcaaaactgatttgcgtttccagagccatgcggtgcttgccctccaggaggctgctgaggcataccttgttggcctgtttgaggacaccaacctgtgcgccatccatgctaagcgtgtgaccatcatgccaaaggacattcagctggcaaggaggatccgcggcgagagggcctaatcgccacctcaaacatcgtgacaaaaacatgaagtcctggggttattgttaatctggtgccattgtaaggacatatgagtagggtttgttttgtggatcgcaagtttctcttctgctactgttgctgctgctacctttgctggtgttattgctagggtcgaatacttaagttaactatgcgctgacagtctggactagcagtgttatgtgcgctgctggaccttgcgcgcaatgctgtggccgatttgttcgttaatgtcaagaattgtgttacagtgcgtgtaaaaaaaaaaaaaaaaaaaaaaaagggcggccgccatgtactgggagaccaccatcgcgtcggcggtgtcggactaccgcgccgtggacggcggcgtggccgtcgcgcacgcgggcacgtccacggcgcacctcgcccggttcggcgtgggcgtccgcgccgcgcgcgtcgtcacgcggatggaggagtcgtggaccatcgacgacgtggcgttcaacgtgccggggctcggcccggacgccttcataccgccggaggaggtcaggaggagccggtcctacggcgccgccatcgcaggcggcaagtgagctctctataccaccgtgtcagtcagggctcaagcgtctgtgtaacatagtctgcaactgcatagagagagctttgctgtttggtagcttcgtcgtctttgtctgtcttccctttattttgtaacctgtgagtgagtgagtgagtcagtcagagtggcatcggtgatcgtgcatgtacatatatg

SEQ ID NO: 72662 - DNA, 185 bp, Zea mays
  Clone ID: MRT4577_166266C.1
ggaaaaaccgagcaagtaaccattatgcattgtccaaatttggagctagcaatgtattattaccgaaatctagcttatctgaaaaaaccaaacaactttgtaacaacacactacagacgttataatggaaaaccttaaacatatgcatgcgcggggcaaccctgaaataacatttgtcaaaacat

SEQ ID NO: 72663 - DNA, 261 bp, Zea mays
  Clone ID: MRT4577_166267C.1
gtcgtccacgccaggggcgagcgccgggcgggggggattttataagacaggcgcactgtccatcggcaaagggcatgcgcaggcattctgctagcaagaagcaaatgactcggaacggcatcaagagtcaacacagcgaggtcagggtaatcaacaaagaaaaagcctccgtaaaccttaggcggcaagagcagtaagaagacaagactgacgcaaaccgaccgtaagggagaaccactagctagcaggttgtgtggaccc

SEQ ID NO: 72664 - DNA, 318 bp, Zea mays
  Clone ID: MRT4577_166268C.1
tcggtaccaccataacggccgccagtgagctggcaacacgccctttcgagcgggcgcccgggcaggtacaagctttttttttttatttatctattccttattttttggactgagaaagagcagcgactttactgaacaaaccaaaaggggcaaaaacgaatcgtatgcgaacagataaaaaatccaaaccctaaggaatcttaaaaataccgagagggaaccaaagacacaaacacactaagggcaaaaactgaagatataaatcacaatagccagacccccgaccccccacaacaaagggccccaaaacacccaaaa

SEQ ID NO: 72665 - DNA, 416 bp, Zea mays
  Clone ID: MRT4577_166269C.1
gccggccgggtccgcgacacatacattcacccatcacgatcagcccgtcgatttcattgaccatacactgcgttgtcatctccctcgcacacgattgtcctctcctctccgttggatgcaccgcccttcttcctatctgcatctctctcacacatggccggtgaatccgctgaaagacacccttatttcctctcgggatactaccgggtcctatactcgcctccaattcctagattatactttagacaactgaatctctgacaaccccgaggaaatacttcccaccatgacaatcatgagaaacctgggaatttgatgtactcactcccaccattttacctatatattttgctagccctcctgcttaccttgagaatttccaacgaatgagtgcttctctcgtatgctttcgagga

SEQ ID NO: 72666 - DNA, 499 bp, Zea mays
  Clone ID: MRT4577_16626C.1
gtccgccccatctaatccgattaaaccggccgtcccgtgttcggccagtagccgagccatccgaacaccaggtgataggtttccaccgaggggcacattgaggtaggatgcagcgttgatgaagaagaacgtgtccatgatgaatccgaggggctgttcgagtggcagggtgggcccatcatcctggcgcaggtggagaacgagtacgggcccatggagtcctcatgggcgccggcgccaagccctacgctaactgagcagacagatgtcgacgaaccggcgcagtctgtggtgtaacatggaagcagagttcgaatctatagaccacacgagagacaagcgaaagatgaatacaataaatcagttagacgaggggtcaatgacaatatggaaaggagacctaatgagcgtgcatgacaagattaacactttacataggtcaaagattggagaacagggtaagaaatatggtgctatgaagaggaatttgaaaagatga

SEQ ID NO: 72667 - DNA, 276 bp, Zea mays
  unsure (1)..(276): unsure at all n locations
  Clone ID: MRT4577_166270C.1
gcgtacgttttcttggnacctcttattacggccgccctgggtgttttttttttttttttttttttttttgtttttttttttttttttttttaggggtagcccgataagataatcggggggagcccaatgcaggctcgggattggacgattgtttactttttttacaacatcagaggagcttttttggggggggggacacagatgggcaacaacaaccaccaacacgaaacgaaacatacgggccccagacgaccacagacgaagataaaccccctc

SEQ ID NO: 72668 - DNA, 157 bp, Zea mays
  Clone ID: MRT4577_166271C.1
gggggcgccccactcctccgaggagccccccccctaagatctattttttttagtactgcggagacttcactggaagcctcccctttgagggaggagcacacatcacgtaaagcgcaaccaaatgatttccaccaccggtggtgttcaccccgccacc

SEQ ID NO: 72669 - DNA, 283 bp, Zea mays
  Clone ID: MRT4577_166272C.1
ctatctgcccatccgactgaggaggttgatgttagatggctcctgatggatccgcactttctgacctgcccatgcgcatacgactccgactatgccgatgactgtgataatgatgactttgtgatcccaattttatatgttgaataatatcatctctgagactgttaagactaagtggctaccgatctctaaccacctacagatccgatcatagatacagataacatatttgtttttccacactgagcaccgccatctcgagcgaagattgcagaggatgctt

SEQ ID NO: 72670 - DNA, 1007 bp, Zea mays
  Clone ID: MRT4577_166273C.1
ccggggttcgcgcgaccagaccaactcactaaacatcatgggcctcgaactgtccgtctcggggaaagggctctcagccatgggaagcccaacgagaactcgggcctaatccgctcacgcacctttctccgtcttcacgaacgaatcacgacgggtgccacaactccctgccgatccagtcccccggcaaattcccaaccgccgcacagcaacaccagcggtcggatcgggggagaaacggaagggcaacagcagagcgcgaattcctcagacaaatccaaggtttcgagcacagacacaggcgaaactcgatggcggaggggtccaagccggacgtgccgctgttccagctcctcagcgatcttctccagcaggtggagtcaatgagcaatcaggaagaagtagagctgcgcgctaagattgaagcattaggattagaagtcactaaggtaccagagcagcccgctaatcatctcagcgagctagaaatagctgcagagttggacaagctgtcatcgcggcttgataacgtcgacaagatgatatcatctgccatggcctcagatccagaggtgaagtctcttctgagcagcacatctgatatctggatgccggtcataacagcgtctgccaatgagaggcgggggtttgttgggacgagcagcgaaggcagccaggaagagcaggagaattccaagcaatagctggtatatgggctgttaatagtttcgttttgtgggtctgtaccgaccttatctatgttcattcaaactagtgtttccatgccaaaaagtttgtggcgtaataaacaataaaaacccatgtccttcattcggattagtaatgagtgtgatgatagatctaaattactatcttggtcgcccgttagttcatttttgaactaaaacgcgaataatagaaaagaacggagggagtatgatttatgagaccttaagctgcccccaaagtaaatttttcagttcttttttgaggccgttgttctgttc

SEQ ID NO: 72671 - DNA, 785 bp, Zea mays
  unsure (1)..(785): unsure at all n locations
  Clone ID: MRT4577_166274C.1
cattgggtacctcgaggccggccgggacatcacagtgcngggcgccactcacacacctaccaggaaaccaatcaaaacttaaaaccaatcgaaattagaccggcgacgaggattagcgctcgccggcgatggattctgactacggcgtgcctcgcgagctctcggaggtgcagaagaagcgcacgctctaccagcccgagctgcccccctgcctccaggcggtcagggttggcattgtcttctgtggcagacaatcaccaggaggccacaatgttgtttgggggctctatgaggctatcaaggcccacaaccaaaacagcaaactcattggtttccttggtggatcagatggtctgctagcacagagaaccttggagatcactgataaagttattgcttcatataaaaatcaaggtggatatgacatgcttggtcgaacaaaggatcagattaggacgacagagcaggtcaatggtgctatggctagttgccaagctttgaagttggatgctctggttatcattggaggtgtcacttccaacactgatgctgctcaacttgccgagacatttgctgaggcaaagtgtgcaacaaaggttgtaggtgttcctgtaactttaaatggggaccttaagaaccagtttgttgagacaccgttggctttgacacatatgcaaggtgaacgcancacttatcagcaatgtatgcactgatgctctatctgctgagaagtattactactttattcgcctgatgggacgcaaggcttctcatgtggcattgga

SEQ ID NO: 72672 - DNA, 830 bp, Zea mays
  Clone ID: MRT4577_166275C.1
gccggccgggttccgactcacagtgcgggcggcgggcgccactctcacacctaccaggaaaccaatcaaaacttaaaaccaatcgaaattagaccggcgacgaggattagcgctcgccggcgatggattctgactacggcgtgcctcgcgagctctcggaggtgcagaagaagcgcacgctctaccagcccgagctgcccccctgcctccagcctattgctcattttctcaggaagacagctgttgtccctgatgctaaggtcatatctgaacaccaggcggtcagggttggcattgtcttctgtggcagacaatccccaggaggccacaatgttgtttgggggctctatgaggctatcaaggcccacaaccaaaacagcaaactcattggtttccttggtggatcagatggtctgctagcacagagaaccttggagatcactgataaagttattgcttcatataaaaatcaaggtggatatgacatgcttggtcgaacaaaggatcagattaggacgacagagcaggtcaatggtgctatggctagttgccaagctttgaagttggatgctctggttatcattggaggtgtcacttccaacactgatgctgctcaacttgccgagacatttgctgaggcaaagtgtgcaacaaaggttgtaggtgttcctgtaactttaaatggggaccttaagaaccagtttgttgagacaaccgttggctttgacaccatatgcaaggtgaacgcacaacttatcagcaatgtatgcactgatgctctatctgctgagaagattactactttatttcgctgatgggacgcaaggctt

SEQ ID NO: 72673 - DNA, 1196 bp, Zea mays
  Clone ID: MRT4577_166276C.1
ccagattgaacggatacatggctacagtgacaaatcttaagaatccagtgaacaagtggcgatgtggtgcgactcctatttcgtattactactttattcgcctgatcggacgcaaggcttctcatgtggcattggaatgtgctcttcaatcacatccaaacatggttatcctaggacaggaggtggctgcttccaaacttacaatttttgatattacgaagcagatttgtgatgtagtttaggcaagggctgaaaaagacaagaaccatgtggttattctttcctgagggccttgtggagaatattcctgaactatatgctctgctttaggaaatccatggcctccatgccaaaggtgtttctgttgagaatatctcttctcagctttcaccatgggcatctgcactctgagtttttgcccccttttataaggaagcagctactactacatcccgaatctgatgattcagctcaactttcctagtgtgttgagacagaattcttccagctttttgttggaagatgtctacagaaacccaggcccgctccagtttgaaggaccaggtgtcgattcaaatcctatttcattgtgcgttgaggatcaagactatatgggcagaataaaaaagttgcaagaatacttggagaaggcaaaacttatactggtgaggagtatatcgataatgcatctcaatcctctctgcattgtaaactcctacattgaagttagacaaaagtctcatctattcattttggtttaagctggttgagcactttttacaatctccggtgaacacatataggatgactcttcacatccgtcagtacaaaaacactcatctaattagcagtgcacgagaaaaaaggacatcttatatgagtgccatattggtcatgacagtagcttcatgttgagctgtttgtttacacgagcttgagattgcttttttggaccgatgattacagatattaaccttctcctgtgtgtcatgtttatcgatttcaatatgtatatgtatgattatgatttatctcttctcatcaaataatgtgagatattgaggtggatgataaattatgtactgtttatctccatgtaatcgttatgcactaacatttaataacgagagcatagaatgacaaatagtgattctacaaaaaaaaaaaaaaaaaaaaaaaaaaaaaaaaaaactcga

SEQ ID NO: 72674 - DNA, 2388 bp, Zea mays
  Clone ID: MRT4577_166277C.1
gccggccgggtacaaaattgcgattggcgtgggcgagatgtcgcaggcagaagcactcacctccgcccggcccggctgtataaaaaatcctctcacaccgcacacccgcatctctcccatcacagtgcgccacccgcacccaccaacgaggcaacgaaacccagtcggaagctagaccggcgacaagtgcagcgctcgccgcgatggattctgactacggcgtgccgcgcgagctgtcggaggtgcagaagaagcgcgcgctctaccagcccgaggtgcccccctgcctccaggggactactgtcagggtggagtatggtgacgccgcaattgcagctgaccaggcaggcgctcatgtgatcagccatgcgttccctcacacctatgggcagccccttgcacatttcctcaggaagacggctgttgtccttgatgctaaggtcatatctgaacacccggtggtcagggttggcattgtcttctgtggcaggcaatccccaggaggccacaatgttgtttggggactctatgaggctatcaaggcccacaaccaaaacagcaaactcattggtttcctcggtggatcagatggtttgctagcgcagagaacattggagatcactaatgaagttcttgcttcatataaaaatcaaggtggatatgacatgcttggtcggacaaaggatcagattaggacgacagagcaggtcaatggtgcaatggctagttgccaggctttgaagttggatgctctggttataattggaggtgtcacttccaacactgacgctgctcaacttgctgagacttttgctgaggcaaagtgtgcaacgaaggttgtaggtgttcctgtaactttggatggggacctcaagaaccagtttgttgagactactgttggctttgacaccatatgcaaggtgaatgcacaacttatcagcaatgtctgcactgatgctctatctgctgagaagtattactacttcattcgtttgatgggacgcaaggcttctcatgtggcattggaatgtgctcttcaatcacacccgaacatggtcatcctaggagaggaggtggctgcttccaaacttacaatttttgatattacgaagcagatttgtgatgcagttcaggcaagggctgaaaaagacaagaaccatggggttattcttattcctgagggccttgtggagagtattcctgaactatatgctctgcttcaggaaatccatggcctccatggcaaaggtgtttctgttgagaatatctcttctcagctttcaccctgggcatctgcactctttgagtttttgcccccttttatcaggaagcagctacttctccatcctgaatctgatgattcagctcaactttctcagattgagacagagaagcttctagcccagttagttgagactgagatgaacagacgtttgaaggagggcacttacaaaggaaagaagtttaatgcaatctgtcacttctttggctaccaagctaggggagcactgccttccaagtttgactgcgattatgcctatgtcttggggcatgtgtgctaccacatcatagctgccggtttgaacggttacatggccacagtgacaaatgttaagagtccagtgaacaagtggcgatgtggtgcggctcctatttcgtctatgatgactgtgcagcgatggtcgcgtggcccttcagccacccaaattggaaagcccgctgttcacatggctagcgttgacttgaaaggaaaagcatacgatgtgttgagacagaattcttccagctttttgttggaagatgtctacaggaacccaggcccgctccagtttgaaggaccaggtgccgattcaaagcctatttcattgtgcgttgaggatcaagactatatgggcagaataaaaaagttgcaggaatacttggagaaggtgaagaggattgtgaagcctgggtgctcgcaggatgtccttaaagcggcgctgagtgccatgtcttctgtgacggaaacactgaacatcatgacttcatcttctaccggccagactccactgagtcattaggtaccatttcatggtatggatcataatccccacttttttcagtggtggcgattaacgagtttaggaacagcaaccctggtatcatacgggttattctttttgtagccttttggagagttctatcggttttggattcggtagtttatgaaggcttgttgatgagtttgagctcgaatagcttttgaaacagccggatgatgccatctttaataaaccaaattctgtgactgcattcacatttctgtcagtcacctgagtgagaaaatgtgagtctcagcaatctcttcaaaaaaaaaaaaaaaaaactcgagactagttctcctcgtgc

SEQ ID NO: 72675 - DNA, 1334 bp, Zea mays
  Clone ID: MRT4577_166278C.1
cccgacaaggtcatcctaggagaggaggtggctgcttccaaacttacaatttttgatattacgaagcagatttgtgatgcggttcaggcaagggcagaaaaagacaagaaccatggggttgttcttattcctgagggtcttgtggagagtattcctgaactatatgctctgcttcaggaaatccatggcctccatggcaaaggtgtttctgttgagaatatctcttctcagctttcaccctgggcatctgcactctttgagtttttgcccccttttatcaggaagcagctacttctccatcctgaatctgatgattcagctcaactttctcagattgagacagagaagcttctagcccagttagttgagactgagatgaacagacgtttgaaggagggcacttacaaaggaaagaagtttaatgcaatctgtcacttctttggctaccaagctaggggagcactgccttccaagtttgactgcgattatgcctatgtcttggggcatgtgtgctaccacatcatagctgccggtttgaacggttacatggccacagtgacaaatgttaagagtccagtgaacaagtggcgatgtggtgcggctcctatttcgtctatgatgactgtgcagcgatggtcgcgtggcccttcagccacccaaatcggaaagcctgctgttcacatggctagcgttgacttgaaaggaaaagcatacgatgtattgaggcagaattcttccaggtttttgttggaagatgtctacaggaacccaggtccgctccagtttgaaggaccaggtgccgattcaaagcctatctcactgtgcgtcgaggatcaagactacatgggcaggataaagaaattgcaggaatacctggagaaggtgaagagcattgtgaagcctgggtgctcgcaggatgtccttaaggcggcgctgagcgccatgtcttctgtgacggagacactgaacatcatgacctcatcgtccaccggccagactgcactgtgactcgtttggtgccgttttgtggtgcggatcagaatccccactttttccatggtgtggtgtcgattgacaaagttaggagcagtaatcctggtgccacacgggtcattcttttgtagcttcttgggagagttctgtcagttttgaattcgatagtttattatggagaggcttgttggtgagtttgagctcgaataatttttgaaacagacggattgcggaatcttaataaaccaaaatttgtgactgcattcacatttctgccagtcgtctgaatgagaaaaatgtgagagcgatctcttcaaaaaaaaaaaaaaaaaaaaaaaaaa

SEQ ID NO: 72676 - DNA, 486 bp, Zea mays
  Clone ID: MRT4577_166279C.1
ggaaccacaaggggggctaaaaaaaaaaaaaacagggcgaaacagggaaacaaacatttgtctattttcacccggccgccccccaaaaaattttatcacccccctatacaaacccaggggcccagctttaaaaagctaaggcggaaacaaccaaaaaatcctatttccgaccccatcgaaaaaaaaaaaaaagggggggcttttaaaacaaggggggggggggatttcacccacccccccaaaaaaaagtttccggggacaaaaaaaaaaattggtttcccaaacgggaaaaccatttacagccccaaggggggcccacttatgctgggaagggaacaattcaaattattttttaagccccctgaaaaaccacaactaaaaagccccccattccaaagggggggattggaccagggcccattggggggaaacccaccccccccatccccatgggaggcaggcccattcccccatgggggggggggg

SEQ ID NO: 72677 - DNA, 842 bp, Zea mays
  Clone ID: MRT4577_16627C.1
ggcccgcttcgaggcccggcctggggccgggaaatacaaaaaaaaaaaaaaaaaaaaaaaaaatcggatcgaggtggacgtgtttactcaggtccgggagactcaactgctagcgctaaaggtcctatcaagaaggaaacagagttacttccgccaccaaacacatcaacctctgatgctgtcaaggatagcaatcctatggaaacaatttcagaagctggtaatttagctgatgcgaagtctaccagtttccagcctccgcaagtgcagcatggttggggtggggtgccagggcgcccttctttggctgaaatagtgaagatgggcaggcctcaagctaaatctggggccagaccggttgcaaataatgctgccaagccagttggtggttcagtcgctgccaatgcaaatcttaacacagttttgccgtcagaaggggaccgtgtcacagctgagaaattaccaaatggcactattcagtccccctctgtacctaaggaggactctgttggcatattacctccaggacaggggtctgatgtgccagaaggcatcggtgctgcttccgcaaatgtgagcgcaccaagatcatttaccctggaggtcaagaatgacgacgctggagatgccaacgagcaaactaaggagacaagtggaagcaatgccactggcctaacatctccaggaccattatccccgtctgataaaggcacgatcttgaataatgacttgatagagaaaacagatgtctatctctctgatgaacattcatttgaacaaaccaaaatgcagattcaaatggtgatatgtctactacagcgtatgagttggacacttgacta

SEQ ID NO: 72678 - DNA, 982 bp, Zea mays
  Clone ID: MRT4577_166280C.1
gccggccggttcgggatctctcccatcacagtgcgccacccgcacccaccaacgaggtaacgaaatccagtcggaagctataccggcgacaagtgcagccttcgccgcgatggattctgactacggagtgccgcgcgagctgtcggaggtgcataagaagcgcgcgctctaccagcccgaggggactactgtcagggtggagtatggtgacgccgcaattgcagctgaccaggcatgcgctcatgtgatcagccatgcgttccctcacacctatgggcagccccttgcacatttcctcaggaagacggctgttgtccttgatgctaaggtcatatctgaacacccggtggtcaggggtggcattgtcttctgtggcacggaatccccacgaggtcacgatgttgtttggggactctatgaggctatcaaggccccccaccaaaacagcaaactccttgggttcctcgggggatcagatggtttgctagcacagagaaccttggatatcactaatgaagttcttgcttcatataaaaatcaaggtggatatgacatgcttggtcggacaaaggatcagattttgtttctcacccttgtctctctgttcctgcaggggctctcatggaaaggatggtgaaaataaattcaagttgttgttctgtccttgagaatcccagctgagtcagaaaaggatggtgaatattgttcccctgggaaaactaagtttcctatgcagttggagaggctttattcaaaatgtttgggcactaaaatttgtcgaagcccacagacagactccataccaccttatcagatatactagcttcccttcattatttgcttgattgatgtttggacattaatatgatctcaaacataggtctttctaaattacctacctgttttttttttcgaaagagaggcaagagaattgccacagttcaattaacggagaaaagagaccacatacaatacaacagtt

SEQ ID NO: 72679 - DNA, 705 bp, Zea mays
  Clone ID: MRT4577_166281C.1
aattcggcacgccgcctacctcggcaacagtcaggacttaggacgcaactcatccccgccgcgagcaacgccaatgctccgaccgctacacgctacagccgccgccaccgctagctaggcccagccgcctcctcccttcccctccacgacgatggacccgaccacgcccgtccttgcgctctccaaggccttcgcctcctcccgcaccaagcccttcctcctcctcgccccgctccgccgccgctccctcttcgccgcccgcgcgtctgtcccctcctcgccctctgtgccgggcgacctcctcatctcgctcgcgcggctcgcgctccgcggccccggaccccccgcggcgcctcggcggtggttcgcgagtgtctcttctgcctcgcctctcgcctcgggtggtccgccccgcggcggaggcggtcgggggaacggtgatggtgacggcggtggtggtggcgacggctggaagcgcccgcgcgcttcccagggagcgggtgtggtggaggaagcggcagcgcagggagccgatgtcatcgtccttgacgttgggggaatgtcgtgtggtggatgcgcagcaagcgtgaaacgtattctggagagtgacccccaggtacggtcagcaactgttaaccttgccactgagatggcagtcgtctgggcagtgcccgaggatagtggtgttcaggatcggaaggagca

SEQ ID NO: 72680 - DNA, 2331 bp, Zea mays
  Clone ID: MRT4577_166282C.1
aaaaaaaaatcctctcacaccgcacacccgcatctctcccatcacagtgcgccacccgcacccaccaacgaggcaacgaaacccagtcggaagctagaccggcgacaagtgcagcgctcgccgcgatggattctgactacggcgtgccgcgcgagctgtcggaggtgcagaagaagcgcgcgctctaccagcccgaggtgcccccctgcctccaggggactactgtcagggtggagtatggtgacgccgcaattgcagctgaccaggcaggcgctcatgtgatcagccatgcgttccctcacacctatgggcagccccttgcacattttctcaggaagacggctgttgtccttgatgctaaggtcatatctgaacacccggtggtcagggttggcattgtcttctgtggcaggcaatccccaggaggccacaatgttgtttggggactctatgaggctatcaaggcccacaaccaaaacagcaaactcattggtttcctcggtggatcagatggtttgctagcgcagagaacattggagatcactaatgaagttcttgcttcatataaaaatcaaggtggatatgacatgcttggtcggacaaaggatcagattaggacgacagagcaggtcaatggtgcaatggctagttgccaggctttgaagttggatgctctggttataattggaggtgtcacttccaacactgacgctgctcaacttgctgagacttttgctgaggcaaagtgtgcaacgaaggttgtaggtgttcctgtaactttgaatggggacctcaagaaccagtttgttgagactactgttggctttgacaccatatgcaaggtgaatgcacaacttatcagcaatgtctgcactgatgctctatctgctgagaagtattactacttcattcgtttgatgggacgcaaggcttctcatgtggcattggaatgtgctcttcaatcacacccgaacatggtcatcctaggagaggaggtggctgcttccaaacttacaatttttgatattacgaagcagatttgtgatgcggttcaggcaagggcagaaaaagacaagaaccatggggttgttcttattcctgagggtcttgtggagagtattcctgaactatatgctctgcttcaggaaatccatggcctccatggcaaaggtgtttctgttgagaatatctcttctcagctttcaccctgggcatctgcactctttgagtttttgcccccttttatcaggaagcagctacttctccatcctgaatctgatgattcagctcaactttctcagattgagacagagaagcttctagcccagttagttgagactgagatgaacagacgtttgaaggagggcacttacaaaggaaagaagtttaatgcaatctgtcacttctttggctaccaagctaggggagcactgccttccaagtttgactgtgattatgcctatgtcttggggcatgtgtgctaccacatcatagctgccggtttgaacggttacatggccacagtgacaaatgttaagagtccagtgaacaagtggcgatgcggtgcggctcctatttcgtctatgatgactgtgcagcgatggtcgcgcggcccttcagccacccaaatcggaaagcctgctgttcacatggctagcgttgacttgaaaggaaaagcatacgatgtattgaggcagaattcttccaggtttttgttggaagacgtctacagaaacccaggtccgctccagtttgaaggaccaggtgccgattcaaagcctatctcactgtgcgtcgaggatcaagactacatgggcaggataaagaaattgcaggaatacctggagaaggtgaagagcattgtgaagcctgggtgctctcaggatgtccttaaggcggcgctgagcgccatgtcttctgtgacggagacactgaacatcatgacctcatcgtccaccggccagactgcactgtgactcgtttggtgccgttttgtggtgcggatcagaatccccactttttccatggtgtcgattgacaaagttaggagcagtaatcctgtggtgcggatcagaatccccactttttccatggtgccacacgggtcattcttttgtagcttcttgggagagttctatcagttttgaattcgatagtttattatgaagaggcttgttggtgagtttgagctcgaataatttttgaaacagacggattgcggaatcttaataaaccaaaatttgtgactgcattcacatttctgccagtggtctgaatgagaaaaatgtgagagcgaaaaaaaaaacccccccccacaaaaaccccccaccc

SEQ ID NO: 72681 - DNA, 2360 bp, Zea mays
  Clone ID: MRT4577_166283C.1
gccggccgggtcgggatggcgtgagcgaggggttgcaggcagcgctcgcctccgcccttctggtataaaagcctctcacgccgcacccacatttctcacatcacagtgcgggcggcgggcgccactctcacacctaccaggaaaccaatcaaaacttaaaaccaatcgaaattagaccggcgacgaggattagcgctcgccggcgatggattctgactacggcgtgcctcgcgagctctcggaggtgcagaagaagcgcacgctctaccagcccgagctgccccccctgcctccagggcaccactgtcagggtggagtatggtgatgctgcaattgcagctgacccggcaggtgctcatgtgatcagccatgcattccctcatacctatgcgcagcctattgctcattttctcaggaagacagctgttgtccctgatgctaaggtcatatctgaacaccaggcggtcagggttggcattgtcttctgtggcagacaatcaccaggaggccacaatgttgtttgggggctctatgaggctatcaaggcccacaaccaaaacagcaaactcattggtttccttggtggatcagatggtctgctagcacagagaaccttggagatcactgataaagttattgcttcatataaaaatcaaggtggatatgacatgcttggtcgaacaaaggatcagattaggacgacagagcaggtcaatggtgctatggctagttgccaagctttgaagttggatgctctggttatcattggaggtgtcacttccaacactgatgctgctcaacttgccgagacatttgctgaggcaaagtgtgcaacaaaggttgtaggtgttcctgtaactttaaatggggaccttaagaaccagtttgttgagacaaccgttggctttgacaccatatgcaaggtgaacgcacaacttatcagcaatgtatgcactgatgctctatctgctgagaagtattactactttattcgcctgatgggacgcaaggcttctcatgtggcattggaatgtgctcttcaatcacatccaaacatggttatcctaggagaggaggtggctgcttccaaacttacaatttttgatattacgaagcagatttgtgatgcagttcaggcaagggctgaaaaagacaagaaccatggggttattcttattcctgagggccttgtggagagtattcctgaactatatgctctgcttcaggaaatccatggcctccatggcaaaggtgtttctgttgagaatatctcttctcagctttcaccttgggcatctgcactctttgagtttttgcccccttttatcaggaagcagctactactacatcctgaatctgatgattcagctcaactttcccagattgagactgaaaagctgctagcccagttagttgagactgagatgaacagacgtttgaaggagggcacttacaaaggaaagaagtttaatgcaatctgtcacttctttggctaccaagctaggggagcactgccttcaaagtttgattgcgattatgcctacgttttggggcatgtgtgctaccacatcatagctgccggattgaacggttacatggctacggtgacaaatcttaagaatccagtgaacaagtggcgatgtggcgcgactcctatttcgtctatgatgactgtgaagcgatggtcgcgtggcccttcagccacccaaattggaaagcccgctgttcacatggctagcgttgacttgaaaggaaaagcatacgatgtgttgagacagaattcttccagctttttgttggaagatgtctacagaaacccaggcccgctccagtttgaaggaccaggtgccgattcaaagcctatttcattgtgcgttgaggatcaagactatatgggcagaataaaaaagttgcaggaatacttggagaaggtgaagaggattgtgaagcctgggtgctcgcaggatgttcttaaagcggcgctgagtgccatgtcttctgtgacggaaacactgaacatcatgacttcatcttctaccggccagactccactgagtcattaggtaccatttcatggtatggatcataatccccacttttttcagtggtggcgattaacgagtttaggaacagcaaccctggtatcatacgggttattctttttgtagccttttggagagttctatcggttttggattcggtagtttatgaaggcttgttgatgagtttgagctcgaatagcttttgaaacagccggatgatgccatctttaataaaccaaattctgtgactgcattcacatttctgtcagtcacctgagtgagaaaaaaaaaaaaaaaaaagggcggccgtgtagagca

SEQ ID NO: 72682 - DNA, 431 bp, Zea mays
  Clone ID: MRT4577_166284C.1
ggttatcctttggttgctctgtttggttttctgtctgatatcaactatcagatgacttcaacaactccgtgtggcttatgtcggggacggtgaacctactccaggggaggattcgcggtgaatgtctgcacctccgtaagctaaggagggaatcatgtttacggttccagcgtaaccgttcttcatgaacttggtctacttgtcgagctccttgacagatcgcctgttggtgttgggcatgaggtcagcaaacttgacggcgatgtgggaggagtagcagtgcatctctggggtatagacgatgccaatctggccacggtgggtgatgatgatgacctgtgatgtgaaacttgcatgctccttgacacggaaattcttagagttggatgccatgaacccacgcttgttatacttgatagcaaccatattga

SEQ ID NO: 72683 - DNA, 353 bp, Zea mays
  unsure (1)..(353): unsure at all n locations
  Clone ID: MRT4577_166285C.1
cactgcggcacactgtaattgggttttgccggtccgagctcattttctttgcttcctacgtgtggattagcgctgtctttttttttgattatggctcccacttttttggggggcgggggggctctcntccgtntnttgccctctcagacttctgggttagaatgcattttttgtgctatgggtgggtttttggtgtccttctgcctcctgggattttggttcctaccgttcctttcgtacgggaatatcgcggtttttgtctttgtgtcgtgtgctgtgacgttggccgtttttgcgtttgggttgcgcgttttgtaaagttttcagtggttgacgtcttgtgcttgccttcc

SEQ ID NO: 72684 - DNA, 311 bp, Zea mays
  Clone ID: MRT4577_166286C.1
ggcaggggagcccccaacaccaacttggtgataacaaaactggctaaaaggacagatcaagctaacacttttttcatatttgtaaaggcacagatcgaaaaaccctaaaatgacccttgaaaaaaaacaaaaaagccgctacacttatttccactcgccccgatgactaatttacaaagcaattcccaaagggaaacagcagtgggccaggacaacctggaccaccgtttttgagggggttaattgcccccttcagggccttccagggggagcacaaaaatgggcaggggggtgcccccttcctccgggtt

SEQ ID NO: 72685 - DNA, 227 bp, Zea mays
  Clone ID: MRT4577_166287C.1
tctgttttatggcgacgaccatgctctccggcaccacggggccactccagcaggtccaggggggcgggctgaccgagttctgcggcctcgtcaggagctgcgggtcgctggcgatgcgccggaatgccaccttcgacgacttgatgtcacgacgactgattgaggacccaggcggtctgcaccagctgcggaacacctaggcgggcgccgacggatgccaaggctca

SEQ ID NO: 72686 - DNA, 294 bp, Zea mays
  Clone ID: MRT4577_16628C.1
cgtttcgtcgccgccgcgcgcctcggagaagagatagaggcggccgctgggtcgaccccgcgccacctccgcctgcctcccccggcaccgatcgggtttgatcgatggcgtcgaagaggatcctgaaggagttgaaggacctgcagaaggacccgcccacctcctgcagcgcaggtcctgttggtgaggacattgtccattggcatgcgtccatcatggggccttctgtcagtccatttgctggtggggtttttttgttgaacatttcacttctctcccggattaccctttttc

SEQ ID NO: 72687 - DNA, 297 bp, Zea mays
  unsure (1)..(297): unsure at all n locations
  Clone ID: MRT4577_166290C.1
gtcactgccagcaggtgccaccggcatggctgctctgctctcgcaacgcaagcacacgcccggccgcctggcacagttggcatggtgaacatagccacgatggcgctgctgaagcccgccgccaaggccgcggcgcggtcggcgccgtccaccagcagcggcagcgtctcgctgcgcgtccggacggggcaggccgccaagaangctgctctgaccatgtacgagacgtccacgctggcgggcgccttcctcgcggcgctggcgtagtcgcccgacgctgctctggcggacgtggcg

SEQ ID NO: 72688 - DNA, 187 bp, Zea mays
  Clone ID: MRT4577_166291C.1
cactacccccttaccaatattcttcaccttaaattcaccatttaccttttctaaaaccccattccttaccctatactttcccaccaattttttaaacataacccataccttttctccaaccttaaaaaatcctttacttctcaaaacccaatccttctaccacccttttcccttccaaaacccccaa

SEQ ID NO: 72689 - DNA, 451 bp, Zea mays
  Clone ID: MRT4577_166292C.1
ctctctcgtccgggctagcacagatgaaggactggaaattttaccttaccaacgtgccgcgagagcttaattggatctcggcgcccaactctaggcagactatcgaagaggagctaccgaagtcaggactgggtgacacatctctctgaagactactgatcataggaggagattgatgacgacaacggcgaggctgtaccactcaactgagagagtcaaagagagaacgtggactatgtgtgtaaagcgatgagattagcacatccagtttccaggatctgaaccaacagacacagtccctaacacatgctgatacttctttggacgccatcggagccaacaattggcaagaccaagaagatcctggctgtatacgttaccgaggatggatacgaacaagttgcaccattcggtgggagcatgacgcctccaagagtggcaatgcttttca

SEQ ID NO: 72690 - DNA, 593 bp, Zea mays
  Clone ID: MRT4577_166293C.1
cctgccgggaaggctagtctcgcctcgcgtccgtgtgtccctccctggctggcttgctgaccaggctcgcacacaaccgccgataccatacgggactatgatagtgacgaccactgacctgggactactgaggtctaaacaacttttcaccaacgaccgatactgtgagatactaacacacgcgctggcactggaaatgcgagagctgagtgataacctgtctgctgctgatctccgctacataagcctagaggtggctgacgctagctcagggactgacaccttactcgatttacacaacctcatcgacaatcatatgatggacaccggctgcgatgcggatgtacctgatacttcttcagatagggacaacgaccataacgaatctttgtatcacgagaagctgcgacacgtggtcaccaatctagacgaaaagctaaccagccaggtgaggaacaaggttatccgcaaggcctgcgtagcaggcaactgacacttgaactactgggacatgaactacgtcatgctggccagcagagaatagtcatttctagctctgtagaccacacccttgccatgaggggacctggcgc

SEQ ID NO: 72691 - DNA, 1373 bp, Zea mays
  unsure (1)..(1373): unsure at all n locations
  Clone ID: MRT4577_166294C.1
gccgactgcgagtgatagccaagtcggcacgaggcaggcaggggaggaagacaaacacacagacacaggctccaccccgcacgtcgggcgtgagggaagggaccagccccaccaccggaccacttggttgggtcgggagacgacgcaggacatgatggatcacctgagcctggtgccctacgatggggccggcggcggcggcgacgccgcgggcggcaagtacaaggagtgcatgcgcaaccacgcggcggccatgggcgggcaggcgttcgacggctgcggcgagtacatggcgtcctcgccggacacgctcaagtgcgcggcgtgcgggtgccaccgcagcttccaccgccgcgcgctggcgtcggcgagcccgtgcgcgccgcccgtcttcttccgcccgccgccgccgcccgcgctgcccgcgccgccgcagcagcacttccaccaccaccaccaccaccaggccgcgctgcagggcttcctcccgtcggtgccggtgccggtgccagcgccgccgccgcacctcgcgctggcgtaccacgccgtgcccaatgccgccgctgcgcccccgtggctcgccgcgcgcgccggctccgagacgccgccgcgcctggacgacttcggcgtcggcgtcggcctcgcgcccggcagcggcgcgggcagcggcagcggcagcttcgggcgcaagcggttccggaccaagttcaccccggagcagaaggagcggatgcgcgagttcgcggagaagcagggctggcgcatccagcgcaacgacgacggcgccctcgaccgcttctgcgacgagatcggcgtcaagcggcaggtgctcaaggtgtggatgcacaaccacaagaaccagctcgcctccaactccgtcgccgcggccgcaaccgcggacatcggcctcagccccgccactggcgccggcaccgccacgggcaccggaaccggcgtcggcatcaccggcgacggagacgacgacgacgatgacgacaccgangactccccgccacgggccgccgtttcctccccttccccgtcccccatcagggtttagcagcccagccgacgacccaaggcactttcccactcttgcgtcttgcctcgcgcgcctaatcggctccttttaatcactcttaggttcatgtaacagttaattagctttaggtaaccgtcacccgttccctagctacgtactactacttttgcaagtacaaccccctcgttcccatgttaaccctccttgcctcctttgacgcggccgtgtcacgggtggcaaatctgtcactttcttctcctgctgtctactctttattaatttcattcgtagtcttaaattattaataggctctgctgtggcccccctgttt

SEQ ID NO: 72692 - DNA, 255 bp, Zea mays
  Clone ID: MRT4577_166295C.1
acattacaggcagagtttgatgggggggggggggggggccaagaatgggattggggatactttcactttgtccgaatatgcgttggtacatgggttaaatttagaaacagaaaaaaagcatcgccggtcaaaaaaagtaaggagtgaaaaaagaaaaaaacaaataggcggggaacaaaaagagtaaagtggtgggtgccaaacggggtaacaaaaaaaaaaaaattggtttgcaccctgctcctgcataaaggt

SEQ ID NO: 72693 - DNA, 160 bp, Zea mays
  Clone ID: MRT4577_166296C.1
tattcatggaggttaacctggtaagagtaatccttcatggctctattgaggtgtcttaaaaagtttcctgtttcaaacagctacattacttgattagaacaatgttataaaattaaattgctgcctgcttgaatattaagaaaaaagaaaacaaaaagga

SEQ ID NO: 72694 - DNA, 278 bp, Zea mays
  unsure (1)..(278): unsure at all n locations
  Clone ID: MRT4577_166297C.1
cggcccggaaaacccgggacgacccacgcgaccgcgaacgcgggggcggacgtcatggtactnccacgcgaccggcgcacggccggccaaccgagggcagggggcgaaaaagaataagagtaacccagccacaagcagaagctgaaaccngactggaacaaagcacagggtggacggacggaaccggcgcacccatgggacgacagcaagcaagcaaggcgagcgagccgaccgaggaccagacaagggcagccagaggcagaggcaccgagcggaca

SEQ ID NO: 72695 - DNA, 1768 bp, Zea mays
  unsure (1)..(1768): unsure at all n locations
  Clone ID: MRT4577_166298C.1
cgccaaagcaaacagcttcatacaagcatgttagtttgactttaatccgtacctacttttttcaatctaaaccgaacagatggatttaatccgaagtaaacaggcttatatttgttcccccctatattgaaaattctttagcatctccggggagtagaggttacaatctaaaacaaatggtatcgacaccactttttccgacaaaaacttaagcatcggaaaagatcacaatatggcaatcattgccaatctggttgattccctcactttgtcaacaacacttcaatctgaaagtttcagatggacaatttaagttacactggcttgggcaactgtatgaactccactgcattgttagcggcagaccctctcggactcctgcccatatgaggcccacctatcactccaaaggtctcgaactgccgctgccgagccctagcccgttccttctcctcctcggatttcgttgcgaagcaatgcgggcaagagacgccgtactcccattgaggcgacaccatgtcctcatcgctgactggctgcttacacccgtagcaaagtttgtgggtgccttgggccaatccatgccccaccgagacacgcttgtcaaacacaaagcattcaccctcccacaaactttcggcctttgggatttcctccagatacttcaatatcccgccttccaaatgataaacctctttaaagcccttgccgaggagaaagcttgatgccttctcacatcggataccaccagtgcagtacatagcaactcttggtagctgtttggatttgctggcattaaggtctgccgatggttcaccggttccattatcatctccccctgaccctagggtgcctgattgaaccaattgaaattgatcgtcaacccaagtaggaaactctctgaatgagtttgtacgtggatcgacagctttcttaaactttcctatgcgtatctcatacatgttacgcacatcaatgatgacagtgtctggatcacttatcaagtcattccagtcttttggcttaacatatttcccaacgattttagttggcataacacctgggtctccaaacgtcactatctcctttttcaatttgacacggacatgatcccatcggaatggtgcatcttccccagcaccaacaggggagtgactggtatgtccatgatgtatggcctcatcctctggagtaacaggtgactggatcattctcaatccttttaaacgaccgtcttcttgaataaagtttaagattttgtccacagcaactggggttccacatatactaccattgattccctcaggtgcaaggataatgccacctgaaacacgcagctcctcgcaaagctccttaagcggcagccggaatgcagcatggtcggggaaatcagcgaaccggtagaacgacaccacaaccagctccggggcctctccatacaggatctcatcccccacagccaccgcaaagttccgtccgaccggcggtaggggagcgcgcggggccatgcactcctgcgacatgtggccgaagcggcggcgcggtacgagagtgctcggggcagaggggttggaggatagaaagcaaactggaaggaggagccggtgggcggcgccacatgcggcagctgtggcggcgcggcgggcggcggcggcgagcggtggagctgtcagcatcagctcttcgggtgagggaggtgccctaaagtggatgaacctagttctattttttttttagttttttttttcaccccgnngccggccctcga

SEQ ID NO: 72696 - DNA, 338 bp, Zea mays
  Clone ID: MRT4577_166299C.1
tattatgtgattgatgttgggttatttttatcgagctgatacgagtgagagataactgaagaacaagagtggtgtattcttttatgagagaaatatttcatgcacccttaactaatgcgctaacacactggacaaaaccacaaattactgtctatgcaattaagaaaactatcattgcttattgtaagggagagactatgggtgcctgacacatgcattggcgagatcccaccggtgataggagtaggatctggtttttgtcgcacacataagtatggttatgtgactaacgttggatgaacggggtctaatttagatatgataaaaagggttgttac

SEQ ID NO: 72697 - DNA, 977 bp, Zea mays
  Clone ID: MRT4577_16629C.1
tctcgccgtgctgtcctcctcgttcccgccgtccgccgcggcgttccgccgcgaggtggtcccctacatggcgcctctgctcgggttcctggcccgcacgggcgcgccgttcctggtgaacgcgtacccttacttcgcgtacaaggcggacccggcgcgggtggacctgggctacgcgctgttcgagcccggcgcaggcggcgtggccgacgccgccacggggctgcgctacgacaacatgctccacgcgcaggtggacgccgtgcgcgccgccatctgcgcggccaactacggcagggcgctggagatccgcgtgtcggagaccgggtggccgtcgcagggcgacgacgacgaggccggcgccacgccggagaacgccgccaggtacaacggcaacctcatgcgcctcgtggcgcagggcaagggcacgcccgctgcgcccgacgagccgctgcaggtctacgtgttcgcgctcttcaacgaggaccagaagcccggcccggcgtcggagcggcactacgggctgttcaagcccgacggcacccccgcgtacaacgtcggcgtcaaggcgcccaccatcacggtgcccaaaggcagcgggagtgggaacggcaccggcactggcggcttggttgtggcgcaaggacccggcggcgccgacggcgtcgggccgggcaccgggtactacaccgtgtctgccgcatcagtgtacaatgtgaagagcagacagcggcggcggcggagcctggtggcggcggctgccgtcctggccatggtgtccgggctctggtagtctgggactgggagagaacagatgacgagagacagtccatgaaagtgagcgcacgcatgcagctgaggcatatcgatcgtatcatatcatatgccagcgaattcgattgattcatcgtatggcttgtagctgtgctgaggaagacggtagacatgcatgcctgtatgtaattcatgattcatac

SEQ ID NO: 72698 - DNA, 423 bp, Zea mays
  Clone ID: MRT4577_1662C.1
agctggcccgcctgcaggtgccgggacggaggtatagtgctggaacgacgatcatactaatcggcgggcgccctttctgatcatgagacgttttagaccgaaatgcgggctgcagcctgcggatataatatgagcagacagacaagatttgatgcaaccatagatgaaccgcaccaaacgatttaagattcgacgttagagtgagctcgcatggcatagaaagggagaacaaaaaactaaactttgaacgttgtcttaaagtacactcctgtatagattcacaaaatgacaatattctgactgagtaagaaaaaggaaaattagagagacttaccagacgtgaactctcaagcaacgataacaggagagaataggctcaaccctgactaggctaagcagactaacattgaactgtagaatttt

SEQ ID NO: 72699 - DNA, 600 bp, Zea mays
  Clone ID: MRT4577_166300C.1
atgtacaagattgatgacatagacgaggacgaggttccaacgaccgttatgaggactatggcaatctatgatatgcgactgcaggaacaacaagaacaagatcaaccttttcctcaacaatggcacaacctccaagtcaagatgaggaacaggaagagctcaacaacttcaagagaaatgaactctagagcctggtgccacatccaaagcaaaacgttgtgggaaccaagtgggtgttccgcaacaagcaagctgtatcaaatggacatgaagagcgtcgtcctcaatgggccaatcaaggagtacgtggaacaacccctggcttcaaggatgataggtaccctgaccatgtgtataagctctctaaggcgctctatcgacttaagcaagccccaagagcatgtcaaagtacacataggatctgctcaagaggtttgggatgaaggacacaaagcccatcaagacaccgatgggaacaaacagacacttggacctaaacatgggagatttcaagccgatcccaaggaatcaccttgtggccgtgaaatgaattcttcggtatttagttcatatgcctcactttgggatctggtatcctaa

SEQ ID NO: 72700 - DNA, 217 bp, Zea mays
  Clone ID: MRT4577_166301C.1
gaggatgttattgtttaagatccccacggagggaggccaacggaaacacaaggatctttttgcagacccggagacggaccccgcttaaaacatgaaagaagtaagcccagaaaaggtcgaacccctggaggcaaaataaacaggaagcaaaagccaaagagggggctgggaatcgggctagggatggcccctcccaccccatcaatatgggaaaata

SEQ ID NO: 72701 - DNA, 401 bp, Zea mays
  Clone ID: MRT4577_166302C.1
gggtacacaattaaagtgtgttttgtttgctgatggactttttcaaacatggtgcaacgtggtctgccgccccaaaccgaaaccaaacaatacacctatagagcgaactttcgaggggtcacctaaggggaagttgtggtcgatacctgacaaccacacttaaaaagaggacctctttatgacgcacaaacaccctaaattcttttgccaattacgtgcggtatacaagcgccaggagccaggggtggtctactctttctgccagctactaaagctgcaagtgactatgtgcactgcacagaatgcgtccctgatgctgacagcttcctggagctggggcttttgtgaacactctctatggcaccttttgccgccaggccaggagcagatatataatgacc

SEQ ID NO: 72702 - DNA, 562 bp, Zea mays
  Clone ID: MRT4577_166303C.1
aagaccggaacatgctcccaaatcatcctgctacaaaacttggtacagcaaggtaacaaacaaaggtttcacagtttgatgattttgacaaatgggactttcgctgcaccgcagcaccttacgccttgagcttaccaaagaacctctgcttctcatcggtagtctggaagcgaccgtgcccaaatttggacgatgtgtcaatgaacttgagcttgatctcctccagcgccagccgggaagtctcaagctgcagctgaatttccttcttgccagcatcattttcatatttgagagcatactttgtgaaagccttcttcttgctcttgcaccagttcttgtagaaccttctcctcacttcttcgctaagatgttgggcccaaacagagttgagtgtgcggaggccacgaggagtcttcacatatgccacgagcccaacaatgacaagaggaggggtttcaatgatggtaacagcctcacaagtttccttcttatggagtttggatcctggcttctcaacctcacggacaatgtgagtcatgccagccttgtagccaaggaaggc

SEQ ID NO: 72703 - DNA, 362 bp, Zea mays
  Clone ID: MRT4577_166304C.1
gtccgcccagcgtacgcggagcgtggttggtcgcgctatgtttatgatttactgcggccagatttgtcctagaggttggattagttgtacggtgcggactgtgttggcaggttctgtgataattttttgtgcttgtgacctgcaataggcggctagattgcttggttctgtgatgttatggcgttggcgttctttaccgcgatcttatttgttcgagagctgatagatgggtatcttgctcaagttgctcatgatataaatttggcttctggtaacttctgagctgtggcctctgctattcctggatattggcgtggcttggttgatgatctttatcgtcccattgttgtatacttgagggc

SEQ ID NO: 72704 - DNA, 1589 bp, Zea mays
  Clone ID: MRT4577_166305C.1
tccgagaaaaaaaaaaaaaaaaaaaaaaaaagttgtggctcctcacttccgcgccgccacccccttcaggtaaggaagaggaggagggcaggatgtcgcaccgtaagttcgagcacccgaggcacggctccctcggcttccttcccaggaagcgctcctcccgccaccgcggcaaggtgaagtcattccccagggatgaccccaagaagccttgccatctcactgccttccttggctacaaggctggcatgactcacattgtccgtgaggttgagaagccaggatccaaactccataagaaggaaacttgtgaggctgttaccatcattgaaacccctcctcttgtcattgttgggctcgtggcatatgtgaagactcctcgtggcctccgcacactcaactctgtttgggcccaacatcttagcgaagaagtgaggagaaggttttacaagaactggtgcaagagcaagaagaaggctttcacaaagtatgctctcaaatatgaaaatgatgctggcaagaaggaaattcagctgcagcttgagaagatgaagaaatatgcttctgttatccgtgtcattgctcatacccagattaggaagatgaagggtttgaagcagaagaaggctcacctgatggagattcaggtcaatggtggtaccattgctgacaaggtggactacggctacaaattttttgagaaagaggtccctgttgatgctgtcttccagaaggatgagatgattgacatcattggtgtgaccaaaggtaaaggttatgagggcgtggtcactcgttggggtgtcacccgccttccccgcaaaacccacaggggtctccgcaaggttgcttgtatcggtgcatggcatcctgctagggtctcctatacagttgcccgtgctggtcagaacgggtaccaccaccgcaccgagatgaacaagaaggtttacaagatcggcaaggctggacaagagacccacgatgcctccacagagtttgacaggaccgagaaggacatcactcccatgggtggcttcccccactatggtatcgtgaagggtgactacctgatgatcaagggatgctgtgtgggtccaaagaagagggtggtgaccctccgccagtccctcctgaagcagacttcccggctggcgctggaggagatcaagctcaagttcatcgacacatcgtccaaatttgggcatggtcgcttccagactaccgatgagaagcagaggttctttggtaagctcaaggcgtaaggtgctgcggtgcagcgacaagtcccatttgtcaaaatcatcaaactgtgaaacttttgtttgttaccttgctgtaccaagttttatagcaggatgatttgggagcatgttctggtcttctatggattgttctacgcttcagaactgcatcgactatgttttgttctattttggttgttttaatgccctaatcattgcaagtgttttggtgtttgatcatcaacgtaacttttttttttaaaaaaaaaaaaaaaaaaaaaaaaaaaaaaaaaaaaaaaaaaaaaatgttttttaacaaaaaaaaaaaaaaaaaaggcccctagggcc

SEQ ID NO: 72705 - DNA, 647 bp, Zea mays
  Clone ID: MRT4577_166306C.1
ttgggaccctcgaggccggccgggacatttttttgctctccgacagaccgaattttatatgttaggcctggctgttgttctccccgtgtccaggacctgagagcccgcgcgttcccgtgcggaaaactggacgacgaacgacgaaatacccccggtgcccaaatccccggctagtactccgttggacacaaatacaaaccgttatactggagaggactctacatgtcaaaactggatgccggcaggaattcaagggaaaaggaaagctggacatgactttgttgccttgaactgttaatgccttcagatccggtgaaatcatcatgcccaagaagggcttatggtcgacacatgggtctacttgcactacaaccctccaatggactttatttcccaatgaggaccttgaggacattaggaaggaaatgactgaccatatattctcgcgaatgtatctacccggtacctgaactaatataattcggactttattgcgaacctgactattgacgagatgaatggaaccttgatgtggaactctgctggaatctatcagatagggaagatgagcatcatgcgacccttatgtattctgcaaatgatgcccgacaaattccactagtctagagatacaaagctcagccata

SEQ ID NO: 72706 - DNA, 415 bp, Zea mays
  Clone ID: MRT4577_166307C.1
cacctgaactatgcagctccatagaactgtgtacttgtagttcaataggactggagatagaagacccaaaagaggcgggattgtgtggtaattctgatgctgggtttccatcgtggcttgctcaattagttgggaaaccaactatttcaagcatttttgacagtgggaatgaaattctggatcacaatgacttcagatgcatctccaacttccacagcaacatgttcagttcaaactcaagttgtttgaattccatgtcgactccagagcagtcgtacaaggttggcgcaaagggcctgcttgattcttcatttggtctctcttgtttggctggactggaggagtactccacggacgcagaactgccagatgattctgatagatttcttcaggtgttggaccagttacctgtgaa

SEQ ID NO: 72707 - DNA, 2632 bp, Zea mays
  Clone ID: MRT4577_166308C.1
gattaaggcgctgcaaggttaaataaattcaccatagcataaaggcggttctttaaccatcagacaaaacatggtactacaatgacaaataacacaagcaaaaaaaattaaacaagagcttcctagcttgcagagccctataccctctaggcgtctttagccagcatttcttccaccgctcagaatccgagtttggtgcgacgccagtgcctgcgcttggcgttgtacctgatggtgttgtcggtgcgcatgcggatccagtaggggatggggcggttctggcgcatcttcttggtcagcttcttcttgatccggaaggtcttgtgcgacggcatggccacggcgggcggagacgacggaagcggcggcgacggcgggcggagacgacggaagcggcggcggcggcggccgaggatgaggagcggacgcgtgggcggacgcgtgggcggacgcgtgggcggacgcgtgggttttcgcgccgccgccgccgccgcttcgtcgtctccgccgcttcgtcgtctccgccgcagcgatgccgtcgcacaagaccttccggatcaagaagaagctggcgaagaagatgcgccagaaccgccccatcccctactggatccgcatgcgcacggacaacaccatcaggtacaacgccaagcgcaggcactggcgccgcaccaagctcggcttctgagcgcgcggatcggccggctcctgcgtcggaattctagggtctctacctttcctttggttttatcgatgtctcttgtgtttctgtaagctagcaaacagttccagaaagcttttgttaagattttgatgacgctaagaggattgatgctactatgctgtactcaggattccatgctgcattgcgatgctaaattaaagaacctctgttaccttaaaaaaaaaaaaaaaaaaaaaaaaaaattgtggctcctcacttctgcgccgccacccactacaggtaaggaagaggaggagggcaggatgtcgcaccgtaagttcgagcacccgaggcacggctccctcggcttccttcccaggaagcgctcctcccgccaccgcggcaaggtgaagtcatttcccagggatgaccccaagaagccttgccatctcactgccttccttggctacaaggctggcatgactcacattgtccgtgaggttgagaagccaggatccaaactccataagaaggaaacttgtgaggctgttaccatcattgaaacccctcctcttgtcattgttgggctcgtggcatatgtgaagactcctcgtggcctccgcacactcaactctgtttgggcccaacatcttagcgaagaagtgaggagaaggttctacaagaactggtgcaagagcaagaagaaggctttcacaaagtatgctctcaaatatgaaaatgatgctggcaagaaggaaattcagctgcagcttgagaagatgaagaaatatgcttctgttatccgtgtcattgctcatacccagattaggaagatgaagggtttgaagcagaagaaggctcacctgatggagattcaggtcaatggtggtaccattgctgacaaggtggactacggctataaattttttgagaaagaggtccctgttgatgctgtcttccagaaggatgagatgattgacatcattggtgtgaccaaaggtaaaggttatgagggtgtggtcactcgttggggtgtcacccgccttccccgcaaaacccacaggggtctccgcaaggttgcttgtatcggtgcatggcatccggctagggtctcgtatacggttgcccgtgctggtcagaatgggtaccaccaccgcactgagatgaacaagaaggtctacaagatcggcaaggctggacaagagacccacgatgcctccacagagtttgacaggaccgagaaggacatcactcccatgggtggcttcccccactatggtatcgtgaagggtgactacctgatgatcaagggatgctgtgtgggtccaaagaagagggtggtgaccctccgccagtccctcctgaagcagacttcccggctggcgctggaggagatcaagctcaagttcattgacacatcgtccaaatttgggcacggtcgcttccagactaccgatgagaagcagaggttctttggtaagctcaaggcgtaaggtgctgcggtgcagcgaaagtcccatttgtcaaaatcatcaaactgtgaaacctttgtttgttaccttgctgtaccaagttttgtagcaggatgatttgggagcatgttccggtcttcaatggattgttctacgcttcagaactgcagtgactatgttttgtgctattttggttgttttaatgccctaatcactgcaagtgttttggtgtttgatgatcaacataactatttatattaattgtttgcttgctagtgtttaaaaatatagtttggacggtgcaacgtggatttcgatgaagacatcgtggtgatcaagaaaatcatcttaaagtagtacagtagaagatttattgaagacttatgtagatcatgtaagtgtccacacaagacttctcgttggattttggcaaaaaagaaggaaataatagatctatttgggctcgtcgagaaggactacctttcgatgaagtcgt

SEQ ID NO: 72708 - DNA, 1722 bp, Zea mays
  Clone ID: MRT4577_166309C.1
tgggacctcgagtcgaggggggacgggccctatttccacagggcatttcggttcggggcatttcggtccggcgggatcgaaactctcgcacccgagagccctttatatccgctagggtttacgcgcatttttgctcctcactgccgcgccgccaccctctacagataaggaagaggaggagggcaggatgtcgcaccgtaagttcgagcacccgaggcacggctccctcggcttccttcccaggaagcgctcctcccgtcaccgcggcaaggtgaagtcattccctagggatgacgccaagaagccttgccatctcactgccttccttggctacaaggctggcatgactcacattgtccgtgaggttgagaagccaggatccaaactccataagaaggaaacttgtgaggctgttaccatcattgaaacccctcctcttgtcattgttgggctcgtggcatatgtgaagactcctcgtggcctccgcacactcaactctgtttgggcccaacatcttagcgaagaagtgaggagaaggttctacaagaactggtgcaagagcaagaagaaggctttcacaaagtatgctctcaaatatgaaaatgatgctggcaagaaggaaattcagctgcagcttgagaagatgaagaaatatgcttctgttatccgtgtcattgctcatacccagattaggaagatgaagggtttgaagcagaagaaggctcacctgatggagattcaggtcaatggtggtaccattgctgacaaggtggactatggctacaaattctttgagaaagaggtccctgttgatgctgtcttccagaaggatgagatgattgacatcattggtgtgaccaaggggaaaggttatgagggtgtggtcactcgttggggtgtcacccggcttccccgcaagacccacaggggtctccgcaaagttgcttgtatcggtgcatggcatccggctagggtctcctatacggttgcccgtgctggtcaaaatgggtaccaccaccgcactgagatgaacaagaaggtttacaagatcggcaaggctggacaagagacccacgatgcctccacagagtttgacaggactgagaaggacatcactcccatgggtggcttcccccattatggtatcgtgaagggtgactacctgatgatcaagggctgctgtgtgggtccaaagaagagggtggtgaccctccgccagtccctcctgaagcagacttcccggctggcgctggaggagatcaagctcaagttcatcgacacatcgtccaaatttgggcacggtcgtttccagactaccgatgagaagcagaggttctttggcaagctcaaggcgtaaggtgctgcggtgcagcgacaagtcccatttctcaaaatcatcaaactgtgatacttttgtttgtaaccttgctgtactaagttttgtagccggatggtttgggagcatggtccggtcttctatggattgttccatgcttctgaactgcaatgtctatgttttgtgctactttggttgtttaatgccctaatcattgcatatagattccaattgttttggtgtttgatgatcaacataactatttatactaattgtgtttgctagtgtttataaatatagtttagagggtgcaacgtggactgatgaagtcaccaccatattaaagtaaaaaaaaaaaaaaaaaactcgagagtctctagagcggc

SEQ ID NO: 72709 - DNA, 790 bp, Zea mays
  unsure (1)..(790): unsure at all n locations
  Clone ID: MRT4577_16630C.1
gctcgaggcaggaccacgcgtccggagaatagcacaggctcagagcagcatatgaaaaataaaaagagagagagagaggatcgagtgatggagggtctggggcacctgctgctgttcgccttcctcttctggttctccaccttcatggtcgcaccggtgatgaccgacgtcaccatggcggcgctctgccccggccgcgacgagtgctccctcgccatctacctcaccgggctccagcaggcggtttcagggctgggggcgctggtcctgacgccggtggtcggcaacctgtccgacaggtacggccggaaggcactgctggcgctgcccgccacggcgtccatcgttcctctcggcatcctggcgtacggccggaccaagggttacttctacgcgtactacgtgaccaagacgctgacggcgatggtctgcgaaggcaccatgatgaccctctcgcttgcctacgtggccgacagggtgccggagacgaggcgcgcggcggccttcggcgtcttctccggcgtctgcagcgccggcttcgtcggcggcaccgtggcagcccgcttcctccccgtctcatccacgtttcaggtctcagcggtggcagccgtcgcgacggccgtctacatgaaggccttcctccaggagacggacggcggagcctccgtatcctcctcttcctcctcctcctccggcagcgncagcgaacgaagggaggcggnnctgccgccggccgctctgcctcccctcctcagncagtagcgaaggaggcggcgtcgctgccaaggct

SEQ ID NO: 72710 - DNA, 1899 bp, Zea mays
  Clone ID: MRT4577_166310C.1
gcacgagaaaccgtagggccggggacccctttatataactaacctctcctagggtttacgagcattgtggctcctcacttccgcgccgccacccccttcaggtaaggaagaggaggagggcaggatgtcgcaccgtaagttcgagcacccgaggcacgggctccctcggcttccttcccaggaagcgctcctcccgccaccgcggcaaggtgaagtcattccccagggatgaccccaagaagccttgccatctcactgccttccttggctacaaggctggcatgactcacattgtccgtgaggttgagaagccaggatccaaactccataagaaggaaacttgtgaggctgttaccatcattgaaacccctcctcttgtcattgttgggctcgtggcatatgtgaagactcctcgtggcctccgcacactcaactctgtttgggcccaacatcttagcgaagaagtgaggagaaggttctacaagaactggtgcaagagcaagaagaaggctttcacaaagtatgctctcaaatatgaaaatgatgctggcaagaaggaaattcagctgcagcttgagaagatgaagaaatatgcttctgttatccgtgtcattgctcatacccagattaggaagatgaagggtttgaagcagaagaaggctcacctgatggagattcaggtcaatggtggtaccattgctgacaaggtggactatggctacaaattctttgagaaagaggtccctgttgatgctgtcttccagaaggatgagatgattgacatcattggtgtgacccaaggggaaaggttatgagggtgtggtcactcgttggggtgtcacccggcttccccgcaagacccacaggggtctccgcaaagttgcttgtatcggtgcatggcatccggctagggtctcctatacggttgcccgtgctggtcaaaatgggtaccaccaccgcactgagatgaacaagaaggtttacaagatcggcaaggctggacaagagacccacgatgcctccacagagtttgacaggaccgagaaggacatcactcccatgggtggcttcccccactatggtatcgtgaagggtgactacctgatgatcaagggatgctgtgtgggtccaaagaagagggtggtgaccctccgccagtccctcctgaagcagacttcccggctggcgctggaggagatcaagctcaagttcatcgacacatcgtccaaatttgggcatggtcgcttccagactaccgatgagaagcagaggttctttggtaagctcaaggcgtaaggtgctgcggtgcagcgacaagtcccatttgtcaaaatcatcaaactgtgaaacttttgtttgttaccttgctgtaccaagttttgtagcaggatgatttgggagcaaaaaaaaaaaaaaaaaaaaaaaaaaaaaaaaaaaaaaaaaaaaaaaaaaaaaaaaaaaaaaaaggaaaaaaaaaaaaaaaaaaaaaaaaaaaaaaaaaaaaaaaaaaaaaaaaaaaaaaaaaaaaaaaaaaaaaaaaaaaaaaaaaaaaaaaaaaaaaaaataaaaaaaaaaaaaaaaggggggcgccttttttaaaaaaaaaaaattttacctcccggttgttgaaaaaaaaaatttttttttgggggccccaaaaaaaaaaaaaagggggcggtttttaaaaaagggggaagggaaaaaacccgggggtacaaaaaaaaaaatgttttaaaaaaaaacccttttttaaaaggggggaaaaaaaaaaaaaagcccccacaatggccttttcaaaaaatttcccaacttaaaagggaaagaggacccccccttttagggggctaaaaaacggggggggggggggggtccccccaagggtacccttattttttgaaa

SEQ ID NO: 72711 - DNA, 2824 bp, Zea mays
  Clone ID: MRT4577_166311C.1
cgaggccggccggggaaaaaaaaaaaaaaaaaaaaaaaaatcgaggccggcgggatttcattcccaacttggctgcccaacccttgcgtcggtagacggcggcggcggcgaggatagagggttccctgaggaggcagtgatggagaccatggctaagtacaaccgaagcaacccggcagtgaagcggatcctgcaggaggttaaggagatgcagtccaacccctcacccgacttcatggccctccccctcgaggaagacatcttcgagtggcaatttgctatccttggcccgagagacagcgagtttgagggtggaatctatcatggcaggatccagcttccctcggattatccattcaagccgccgtccttcatgctactcacgccaagtggacgctttgagattcagaagaagatttgtttgagcatatccaattaccaccctgagcactggcagccatcatggagtgtgcgcacagcgttggtggccttgattgcattcatgccaaccaaccctggtggggcattgggctcattggattacaaaaaggaagatagacgggcacttggtataaaatcacgtgaagcaccgccaaaatttgggtccccagaacgacaaaaactaattgatgagatccatgagcaaatgctcagtaaggctcctcctgtcccccaaacgctaccaaatgtgccaaacgaggagtctaacgaattacccgcatctgacccttctggcgagcatgcagacaaggtagatgaaggtgacaacacatctggttctgtatcagactcgtctagtggccttcctgtgcctgaatctgaatcgggggttacagaaaacactggtgaaacctcagcagttgaggttgccaaccatcatgtgcctgaagcaagccacagagagaacattccaagagttagttcgtctcaccagaatcctgctgttgcgatccagaagccaaagcatgacaggctgttgaccttggccgcatttgggctgactcttgctattatggcacttgtgatcaagaaattcttaaaaatcaatggcttgggcggtttcattgagggcaagttctgagtagggattgtgcataagttggatgtaagagatgactcattcctcatactaatatgctataagctatataaccccgtaagatttgtaaatgactgtttagttattatagatgaaatcaaaatggtacggtactattaataccccattgtatctagtacacctgatggaaagtgcagagttttgaggcttctgatgtataaaaaaaaaaaaaaaaaaaaaaaaagcattttggctcctcactgccgcgccgccaccccctacaggtaaggaagaggagggcaggatgtcgcaccgtaagttcgagcacccgaggcacggctccctcggcttccttcccaggaagcgctcctcccgtcaccgcggcaaggtgaagtcattccctagggatgaccccaagaagccttgccatctcactgccttccttggctacaaggctggcatgactcacattgtccgtgaggttgagaagccaggatccaaactccataagaaggaaacttgtgaggctgttaccatcattgaaacccctcctcttgtcattgttgggctcgtggcatatgtgaagactcctcgtggcctccgcacactcaactctgtttgggcccaacatcttagtgaagaagtgaggagaaggttctacaagaactggtgcaagagcaagaagaaggctttcacaaagtatgctctcaaatatgaaaatgatgctggcaagaaggaaattcagctgcagcttgagaagatgaagaaatatgcttctgttatccgtgtcattgctcatacccagattaggaagatgaagggtttgaagcagaagaaggctcacctgatggagattcaggtcaatggtggtaccattgctgacaaggtggactatggctacaaattctttgagaaagaggtccctgttgatgctgtcttccagaaggatgagatgattgacatcattggtgtgaccaaggggaaaggttacgagggtgtggtcactcgttggggtgtcacccggcttccccgcaagacccacaggggtctccgcaaagttgcttgtatcggtgcatggcatccggctagggtctcctatacggttgcccgtgctggtcagaatgggtaccaccaccgcactgagatgaacaagaaggtgtacaagatcggcaaggctggacaagagacccacgatgcctccacagagtttgacaggactgagaaggacatcactcccatgggtggcttcccccattatggtatcgtgaagggtgactacctgatgatcaagggctgctgtgtgggaccaaagaagagggtggtgaccctccgccagtccctcctgaagcagacttcccggctggcgctggaggagatcaagctcaagttcatcgacacatcgtccaaatttgggcacggtcgcttccagactaccgatgagaagcagaggttctttggcaagctcaaggcgtaaggtgctgcggtgcagcgaagtcccatttctcaaaatcatcaaactgtgatacttttgtttgtaaccttgctgtaccaagttttgtagccggatggtttgggagcatggtccggtcttctatggatcgttccatgcttcagaactgtagtgtctatgttttgtctatgttttgtgctattttggttgtttaatgccccaatcattacatatagatttcaattgttttgttgtttgatgatcaatataactatttatacgaaaaaaaaaaaaaaaaaaaggcccctagggcc

SEQ ID NO: 72712 - DNA, 1532 bp, Zea mays
  Clone ID: MRT4577_166312C.1
gccgggatggccttattaagtgacctctcctagggtttacgcgcattgtggctccttacttccgcgccgccacccctacaggtaaggaagaggaggagggcaggatgtcgcaccgtaagttcgagcacccgaggcacggctccctcggcttccttcccaggaagcgctcctcccgtcaccgcggcaaggtgaagtcattccctagggatgaccccaagaagccttgccatctcactgccttccttggctacaaggctggcatgactcacattgtccgtgaggttgagaagccaggatccaaactccataagaaggaaacttgtgaggctgttaccatcattgaaacccctcctcttgtcattgttgggctcgtggcatatgtgaagactcctcgtggcctccgcacactcaactctgtttgggcccaacatcttagcgaagaagtgaggagaaggttctacaagaactggtgcaagagcaagaagaaggctttcacaaagtatgctctcaaatatgaaaatgatgctggcaagaaggaaattcagctgcagcttgagaagatgaagaaatatgcttctgttatccgtgtcattgctcatacccagattaggaagatgaagggtttgaagcagaagaaggctcacctgatggagattcaggtcaatggtggtaccattgctgacaaggtggactatggctacaaattctttgagaaagaggtccctgttgatgctgtcttccagaaggatgagatgattgacatcattggtgtgaccaaggggaaaggttatgagggtgtggtcactcgttggggtgtcacccggcttccccgcaagacccacaggggtctccgcaaagttgcttgtatcggtgcatggcatccggctagggtctcctatacggttgctcgtgctggtcagaatgggtaccaccaccgcactgagatgaacaagaaggtttacaagatcggcaaggctggacaagagacccacgatgcctccacagagtttgacaggactgagaaggacatcactcccatgggtggcttcccccattatggtatcgtgaagggtgactacctgatgatcaagggctgctgtgtgggtccaaagaagagggtggtgaccctccgccagtccctcctgaagcagacttcccggctggcgctggaggagatcaagctcaagttcatcgacacatcgtccaaatttgggcacggtcgcttccagactaccgatgagaagcagaggttctttggcaagctcaaggcgtaaggtgctgcggtgcagcgaagtcccatttctcaaaatcatcaaactgtgatacttttgtttgtaaccttgctgtaccaagttttgtagccatggtccggtcgtctatggattgttccatgccttcagaactgcactgtctatgttttgtgctattttggttgtttaatgccccaatcattgcatatagattccaattgttttggtgtttgatgatcaatataactatttatacggaaaaaaaaaaaaaaaaaagcggcc

SEQ ID NO: 72713 - DNA, 388 bp, Zea mays
  Clone ID: MRT4577_166313C.1
cttgttgcatatccagcacgaacatcctgcaggtcagccgtttgcccgagaagttacgagcacagtcaagagtccaggcctcaccttgactcaccggtgagcacaagcaaccaaataaccgctgactcgcgacaagtctgcaaatcagcagacaacgcccgtcctccgactgtcctccccattgcgcgattattgcaattagccagcacctgattagcgactgagataaaatggcccctccccctcacaggccggagagccatctccaagtctcaccccacaacctctcttccgcctcttcctcaacgcccaatgcgagaccgatttcgcgtctgacacaattatcatcacacatcatgggttcgggagcaacagctggcgttttacg

SEQ ID NO: 72714 - DNA, 210 bp, Zea mays
  Clone ID: MRT4577_166314C.1
gacgaataatctcttctgtcagctcactaacaccgatctatcatctcgctctgtcctgcaacaatggcctctcgctcctcctcccagcagctgggcgcggcggtggcggcgtcgctgctgctgctgctggctgcgggtgccgagacgctactgcggcggtgatctgctgcgaggtgacggcgtcgtgggcgctgtgcctcgggtacgcga

SEQ ID NO: 72715 - DNA, 566 bp, Zea mays
  unsure (1)..(566): unsure at all n locations
  Clone ID: MRT4577_166315C.1
ctatggaactaagngggaggggggggggggggggggggggggggggaaaaaaaaaaaaaaaaaaaaaaaaaaaaaaaaaaaaaaaaaaaaaaaaaaaaaaaaataaaaggaaaaaaaaaaaaaaaaaaaaaaaaaaaaaaaaaaaaaaaaaaggggggggccgttttaaggatacaaactttaagacccggtccatgggccgtattatttcacttttggggccgccaaaaccaagtcgctggcccgtttattaacatggcagaaatgggaaaaaccgggggttgcccaaataaaaaggaggggcaaacaatccccttttcccaagtggggaaaaaccaaaaagggccatggcaaaccccctttccaaaaattttaacccccgaaggggaaaagggaaccccccttgagacggctaaaaaggccgggggggtgggggggtacccccaaggtaaccccttaactttgcaagccccttaccccgctttttttgggtaagtttcaaatctttggcccccttttgggcggtttttcccggcaaaactaaaaaggggggcttaattttgggg

SEQ ID NO: 72716 - DNA, 451 bp, Zea mays
  Clone ID: MRT4577_166316C.1
caaggaattaagcacgccaaaccgttgggcaatggagcttgtgggcatgtctggcgagtggctgtcggacgaacacgtcctgctccaatggcactgtccctatgagtgcaacacccataacgggtggacttgctgagtgaaagaaagaacagacatgttaggttggatcatgtcttgaagatctgatggccttaaatagaatgcaactatttggcaccaaacagtggcaaagcaatagatacgtccgacggccagagttaaccggatgattggtactaggctggaattactatacatccagccaatatgatgcagcacaaaaaaaaggaattacatacaggcctaacctatttattacactataaacgacatgtgacatatgccaagattaatttattatttattacataatgataccttttattaacaaaaaacagatcaaaagagagat

SEQ ID NO: 72717 - DNA, 230 bp, Zea mays
  Clone ID: MRT4577_166317C.1
ttcgttacgcgtccgcccacgcgtacgaatggatggattccaaatacgtttcagaattttcttccaagggggggaaaaacgtcccaagacttaaacacatacccgtcaggagcagagattaaaggatctttgctccggcccctgacgagaaattgatccatgctatccctataaactaaaaaattaattttaccatcataacgctatcaaataattagaccaattgcaca

SEQ ID NO: 72718 - DNA, 570 bp, Zea mays
  Clone ID: MRT4577_166318C.1
gaacaattatggtaataataaatcggttaagaattgaaaaaaaaaaaaaaaaaaaaaaaaaaaaaaaaaaaaaaaaaaaaaaaaaaaaaaaaaaacaaaaaccaaacaccaaaccaaaaagggcaaaaaacaaaaaaaaaaccaaacacactgctggccccttccccccccgcctagggccgatctccaattaaaccccctccccactgcgggccccattggccctgcccttcaagggcccccttcccccctatgaagaccctgttaacaaccccaccgacccgcctttcccaccatcccccttggaaaaccccgcgctttccccacctaaccccccccgaaaccccccccccttttcccccctgcctaaatgcaaaagccccccccctttccccctccccaaaattcggccgccttgatgggtacacgccccccccccgttcccctccctaaccccctagggccggggggtttccccccctggcccccctttctctgcccgtgcccctacccccccctttttgccctttttccccttcctctttggcgggtgcgccgttttcccccggg

SEQ ID NO: 72719 - DNA, 140 bp, Zea mays
  Clone ID: MRT4577_166319C.1
gtagacacagtgctctaactgtcacctgcgccaggcttcgtgctaaagtaagcagatagctaggcgtgaacacgatagggacatccagtggaaggtagccctggaaaccttgccccactagtaattactgctccactagc

SEQ ID NO: 72720 - DNA, 364 bp, Zea mays
  Clone ID: MRT4577_16631C.1
ttccagggccgacacatgcgtccgcgacagaacataggatgatagaacatgtcacaggcagactactattgctctcttaataagtattatatattatagtttaggatttaacggtggtaactagtggttcattatggattttccaaataccaaactgtttttttaatgtcacgctaaagtactagcacacttataatcctaagaaacaatatataaatacaattgaattttattactctgatccacattatgtcgctttagaatcagtgacttagaggtggaacgcatatgattcagtttagcttttatgagatgaggatatacgtgacaactcacttttgagtcgtttgggatgacccgttct

SEQ ID NO: 72721 - DNA, 339 bp, Zea mays
  Clone ID: MRT4577_166320C.1
ctctttttaaacactctatacaggtgcacacaaagggttgttgaaacagaaacacaaacgcacggcgaaataatattatttattcgacttacgaatttttcaaagaaatcgtactggtgtgaagtggaaagtttcaaagatagtttgaaaagcagggaaaaaagaacatagtgaaccttcatcgccacagtgacaggttcaaggaaaaaattcacacacacacacatacgcatacgcacacaaagcactcagctctatatacataacaaagaatattgtaattcgacactatttggtacattcagagggtcctaagacagcacaaatcagttatataga

SEQ ID NO: 72722 - DNA, 2726 bp, Zea mays
  unsure (1)..(2726): unsure at all n locations
  Clone ID: MRT4577_166321C.1
attgggtacctcgaggccggccggngattctctgcctccgccgccaggacgacggcaaatccgcccacgcaaaatatcagcccaagtgcccatcgcccaagcttcctagctcacccgccgccacccactagccaaattccccatccctctcctgccgccacccatcagccacatctctccctcctactccctctccggcagccatcatcagacaagatccctcccccaccatcgagccatgtcgagtcgagtgcatcttctgcaagcacggccatcttacgaaaccctagctggctcgaaggaccactactgtccggcgccctgaacaacttggcatgatgccgacgaagggtggagcaaacaaatcacaatgacatcgggtagtagatccaccattgcatccctatgaagaggagcgccttagacaatgtatgaggaacaattcgaggttgcaacaacttggaattcctgctttagtcagcatgtgtgggaacataaattccatctctaggaacaaaaagccaaataacagggataatgaagattctgaatctgagtatgatccttcacatgacgattctattgaaggggatttgtttgaccatgatgatcataataagggctcaaaggacactaacagaagaactattcacatggctcctggtggaatcaagcctcgaactaagagagtttatgcagagcaacatactactagaaatacaaggtcaaagaaaagcattgctcagcctgacacaagtctaacacgaagtgacatctatgtgccaccaccctcgctatctcatttgacccaagtgggnaagaagttggctcgtagcanttgaaaaccatagaaaganctagtgtntgaagnctaatgggccctacccagttgacaacacccacatggccaatcgaggtgaggccattgctccacctaataaggggcacaaccagattggcaaccctaatgggcacaactagattgacatcggcgatgatgaattcttactaccattatattactttgattgtattgtgagtgcattcttacattcttccttttttagaagatggctttgaccaatttgatgacaacatgaccaaccaaggggaaggcattacccagcctggtggaaaaggtgatggtatatttctatatttaccatattgcatattacatcactagttgcttgctaaacctatcatgtgtcattagtttctactttactggatgttcttttgaccttttcaattagattcatgtgccatgtgtcattagcttgtcaatagtccattggatgatcatctttgatccatgtttgatgcacctcacttattgcaatttctatgtgaatctaaaactaggagtaaatcagcatagagaaaggggacttaatatgggacttggtctccaaaggatgaaccgagctcggcgtggcaaactgccaattgtcattactgaaggaaggataaggcctgtggcaccaattgttgctgcaaagtttgcaactgagtgcaacattgcagttcggaatcatgtgcttgtgcttaagtcatggaaggaatacgagaagcatcctgggctctttaaattgtttacagcaaaacttagtgcaaagtttgatatcaatacagaagatgcgctagttaaaaatgcttgtttccaaatgatgaggaatgcactgcgccaacaacgatataagctgaagaaacaatattttgacccttttccgctacatctagtgaggaaaacatctcctatcaaatcgacaagtgatgaacaatggaatgaccttgtggaacattggaaaggtccaaaaaatatggcgacatgtgaacataacaaaggcaaccgaggcaaagttaagttccatcaaacaactggatctcgtagctatatggttcatgtagaaaatttgggggacaagtacatggatcaagaacctgatgcattggatctgttcaaggagtgccactacagtatgaaaaagcaaggctacacttccactttaaatctggctattactcaaatggaagacaagcgatctacaccaggagaaggtgaacaaccaatgtctacgactcaggttgtagctgatgtgcttgctgagaacacaaagaagaatcggtttcttcaaaatgtgggaatccaaaatgcacgacctagatctagtgtacaaaatattgaagcacaacttgaagtagagaggaaggcaaatgcagagcttcaatcacttgtcagcatccaacgtgagcgcatggatgtattattaaagcaagtgcatgaagcagaactggtaaggattagagagcaagaagagatgaagaagaagcaagatgccatggatgctcaacttgagcttatgctaagtcagattcaaccaagttaaagctaactagtatggggtgttaggctttgttggtacttctcttttgctgatgctattgcattctattgatggataaatacgtttcaatccattttttgtctattgtgctgctagagtagctttagcggcatgtgtggtgtgttggagtggcttacgtgtcagtggttggatacttgctgtaatgacatgctattggatacttgcatgtaatgacatgctggagtgtggtcagtattttttgtgatgagatgctggattaaaatctgagttgtgatgtaatagaattcaacattttgtccttatgttctggattatcattaaaatatattttaatta

SEQ ID NO: 72723 - DNA, 369 bp, Zea mays
  Clone ID: MRT4577_166322C.1
tcttactgtcttccttttttagaagatggctttgaccaatttgatgacaacatgaccaaccaaggggaaggcattacccagcctggtggaaaaggagtaaatcagcatagagaaaggggacttaatatgggacttggtctccaaaggatgaaccgagctcggcgtggcaaactgccaattgtcattactgaaggaaggataaggcctgtggcaccaattgttgctgcaaagtttgcaactgagtgcaacattgcagttcggaatcatgtgcttgtgcttaagtcatggaaggaatacgagaagcatcctgggctctttaaattgtttacagcaaaacttagtgcaaagtttgatatcaatacagaagat

SEQ ID NO: 72724 - DNA, 465 bp, Zea mays
  Clone ID: MRT4577_166323C.1
tatcctgttgcattggatctgttcaaggagtgcgactacattaagaaaaagcaaggctacacttccactgtacaactggttattgcaaggcaatataatgctattagcaatgcttatgttaaagtgtctcatgaaacaattacatgtatgacgattgcattctatactcaaatggaagacaagcgatctacaccaggagaaggtgaacaaccaatgtctacgactcaggttgtatctgatgtgcttgctgagaacacaaagaagaatcggcttcttgaaaatgtgggaatccaaaatgcacgacctagatctagtgtacaaaatattgaagcacaacttgaagtacagaggaaggcaaatgcatagcttcaatcacttgtcagcatccaacgtgagcgcatggatgtattattaaagcaagtgcatgaagcagaactggtaaggattatcgagcaggaagagatg

SEQ ID NO: 72725 - DNA, 1682 bp, Zea mays
  unsure (1)..(1682): unsure at all n locations
  Clone ID: MRT4577_166324C.1
gtctagatcgccagctgccgccctttttttttttttttttttttgcgctttttctctgcaactcagatatttcatagtcgaaagtttcaaaaaatgtcaaaacttccgaaatccacagtaacaatcttttttaacgaatatggtttgaatcctgtcatgtcagacggccactcagtatagcagatgcttgtgtcacggccctggctactctgtagatctcatgctgtacaaacttccaggactccgaagtgttgctgctccgggcgctggctatggcattggctatacctggatagactgcagtatcccagtcattctggtctgaaggtccatacaccagatgcttaaaccattctagcttgaagatgccttccctgctagtgaatgcacgctcggtctgcataagacggtcattgagttgtcggattttcagtgaatccttgttcagctgcttgctcaagagtagcttttgaagttccttttgttcgttattcactttggtagctgccgctccgagagttctgattgagttgtacagaggggaacaagtgacagttgttcccttcacttcattctctaccgtttttgtgtatgcctcaagctcaattgcataggacatgtaattgaagggtaggatgtcttcatttgccaacctcaaagccatcattccccatatgctagcagctgccacatgcctacggaacgcaggatctccgaatttcgccatccatacgtagtcatcatataaggagtggtaaaccggatatcctggtccttctccaaaaattatattcatcgaaggaataccaacatgttggacgaatgctgaatagtctgatcctccatcacctagtctaagaacccggaggggagtgctcgatttaatccatgaatcatacacagtctgagatgaattatcagggtcttgaaccactttagttacttgctgaagtaactcatcaagttggggagttgtagaaggcaggaatcctggaccaacgactgaaacgtcaatattcagataagcaacagctctagaatacaacatctcccggttttcttcaacccattcagttgaccctgtcagtccgtattcttccgcgtcccaactacagaagataatagttcttcgaggcctccatccttgtttttgcagcattgaaaaccttttagctaactcaatcatagctgctgttccactgttgggatcagatgcaccgaacgtccaagcatcacgatggttaccaagaatgacatatctatcgggctcttcggcgccctcgataatggcgaagacattctcaatcgttgccatcgaatcattcccaagatatgtcaggttcaaaactgccggccctggcccgaggcggtaaacgggtccgtcttcacggccctgccagtcctccggcgccacggccccgcccatggctctgtgtatctccatcgcgtcctgagccgataccggcagggctgggatgagcggcatgccatcggtattcatgcgcctccgccagctgacgcgctcgcagccctcggacgatgcccacatcggcgtcgtcgggtcccccacgccccggaagaggctccccacctgcacaccgctgggcggcagccaccgcgagcnggggaaccacccctcaccgggtgcgccgccgtactgcagcgggtcagtgtacaccacc

SEQ ID NO: 72726 - DNA, 441 bp, Zea mays
  Clone ID: MRT4577_166325C.1
caatcataacgcaaaagacagtaagaattcttgcgttgctatggcatctttgtttaatttttcttgttctcgttgccattctcgacgatgggtgcaaaaaaaaacagtgcttgcatgtggtcacggtcacagcgtgtgcttgtttctgaacggctgtggtcgaggccgtaccgggctggccgcagggatgcacgcctgcaccgtcgaggccgtgctgcttgcccgcgctgccaactgcgcggtgatgcgcgggggctacgcccaccggaacgcacacccaccccgctgggggacgcgcctgtgcgccggggccgcttgcccgggcgccgtcgaggccacctgacccgagccaccctcagcgtatctggctgtgcccaccgaccatggggcttggccgtgctatcatcccagttcgtgtgtcgccggttggtagccagtgcg

SEQ ID NO: 72727 - DNA, 565 bp, Zea mays
  Clone ID: MRT4577_166326C.1
caaaccaaaaccccttttttttttttttattggggggcccccaattttacgcccttaaaaattttccttgaaaaaccggggtttgggaaaaaaaaaccacccttccagggttgcaagggaagggttttaaaaagccccctccaagggcccccaacccccttaacccccggccttccaaaaaaacccgaaaaaaaaaggcccccttacttgcccggcccccccctgggaaaacaccccccccccccaacacttaaaatttttaaacttgacacccaaccccccggaaaaggtccaaaacccttccacccccagaagttttgggaatttgattaaaacttggaataccccaaacttgtaaggggacccccaccccctgcaccaaaaaaacaaaaagggccctgccctttttggcaccctaaaaaaactttttacttgtagggccagggcccattttttggaatttagggccagaatcccagtgtgggcacccggggttaaaaaaaaaaaaaacccccttgaggaggtaatttgaaaaaaccaacccctcctttaaaaggccccccta

SEQ ID NO: 72728 - DNA, 487 bp, Zea mays
  Clone ID: MRT4577_166327C.1
tcgctccttcacattttttttatttcttaccgaccagacccctaccgggggggttttttaaacatttaggggcggttcttcaattctaaattaaagactctatcttcgtcagaaaggatcttccctccaaaacaaattccgccttaaatataggggtaagccccggggggtacccccaaaaatctgggcccggccctcgggggccccccctcttccccataagggggccgtaaaaaggcgggggaaaaaatgggaaaaacgggttccccgggggaaaatggttttccctctcaattttcccaacaaaacccgccggaaggcaaaaagggaaaaactcggggggccccaaaggggggccacccccaattaaatggggtgcccctacctcgcccccttccacgggggaaaacccactaccccccgtttttaaaaaatcgcccccccccgggggggggcgttctgtctttggcccccccgggggtttttt

SEQ ID NO: 72729 - DNA, 383 bp, Zea mays
  unsure (1)..(383): unsure at all n locations
  Clone ID: MRT4577_166328C.1
anctgnttggctcaccagaaacagccatccgtgacgacagtatgaagagcccagcggctagagcgggccgttcaagacccacccaatttactacattcagagatggacaccctaccgggaaagcccgcattatgccagcactgactagtaaaagaatatgcatgcttgaggggtctgcgcaccgttactggatcaaatgcccgtagctatcgcatgaataacgctctttgagctctttaagcctgctgacggactctcacagagatgatggtacgctgacttctgcataccatcatagacttaccaaagaatgaatgcccgttgtggtgatcatgacgtgaaactggacgacgactatgtagaacacattcagaaaactgata

SEQ ID NO: 72730 - DNA, 455 bp, Zea mays
  Clone ID: MRT4577_166329C.1
agaacagcgacgacgcatgctccccaccgacagcatgcgagcctccagaacagccgccctccttttttttttttgtttttttttttttttttttttttgttttttattaaagcattattcttacctcttcttttttatttttacaaacccatctataatgcacaactattgaaaaccggggcccaatcccagagggacacaccccctttcccaagaggcgaaaaaaaaaaaatttttgcaaaaacatttgggggccaaaacccctaaaaaaaacccccccaggctttttttttaaaccgtaaaaaaaaaaattcttccccatgaccaaaacccgctttttaacaaaaaaaaacccaaaaaccggccactttttaaacccccaaaagggggttcccccttttaagaaaaacccccccctggggcccggcaataaaaaaaaaagcctttgggttttg

SEQ ID NO: 72731 - DNA, 795 bp, Zea mays
  unsure (1)..(795): unsure at all n locations
  Clone ID: MRT4577_16632C.1
cggacgcgtgggtagctgtacgtaaccccctcactctgaaatccgaaccctgatccttcttagcatttgcatggcccggccgggctgccggaggtgaccggatcaaccacgggcattcgggcaagagagccgcggccgtcctcggccgtgccgcccacttccgccgttaaaaacgtggcagcaacaacgcccaatcgcccatgtcaacccacgcaagcatccaaaacaactccactcctcccaccccaagtccgaagcttcctcctcctccaactcctcctcctccccgtcccgcagtcgcactcgcaccgcacggcagcaggtagctagctagctagctgcgggcttctgtagccaagcagggccggagcacgcacgcacgcgcgagcgcgagcgcatggcggcgtccgcgagccgggcccgcgccggcgccggcggcgctggcgaggagtacgaggacctgctgccggtgatgggcgagcggctgggcgtggcggggctgctggcggagctgcgcgcggggttcaggctgctggcggaccgggagcggggcgccatcacgcccgacagcctgcggcgcggcgcggcggcggcgctgggcgtggccgggatggcgcacgccgaccgtcgtcaagggcaagctcatcgccaagacgcggcgccgctagaagaagatccaagagcttacgnacccgcgtgcatgggcgacgtccatagcttctttctataggtgtcaccctaaaattcaaattcactgggccggnngnntttacaaacgtcgttgactggggaaaa

SEQ ID NO: 72732 - DNA, 400 bp, Zea mays
  Clone ID: MRT4577_166330C.1
acaaggaatgaacgaactttaagagcaaacaacattcacaaacgactcaattactgtattataaccaatcattagccataacatggctgcagcaaaggcgagatacaacaagttgagcaactgtgagacgcagttgatgattgtgtatgaatgattgtctgttaagctcgcatgatttacttggtgtggaatgtatgtgtcgcaattagactaatgaagcaccaagagggtatgaagaatcataccaaataccacatgaaccacaacaagtgacttgtggtggtccaccatcacaaccagtaccatcttgtggggagggatcaataccacaccatttcatatcaccatcgctgtgacggaagattcgaatgtaacctgattcaccccagaaagcacccca

SEQ ID NO: 72733 - DNA, 682 bp, Zea mays
  unsure (1)..(682): unsure at all n locations
  Clone ID: MRT4577_166331C.1
nnnnnnnnnnaaaannnnnnacatcgccacaaagcctgcgcctccatccacctccctcccacccgctccccaccccccgcgccgccgctcgtcggagccccgcctcgccgtgtcaagtccgctcccaatcgagccctgaatggctgccggcaggggcattaaccagcttctgaggaaaactcttcagagccagtcttctggctcatctctgctttcttcatttcggggaaagcatgaagagtcctctgctggactgagagcattggctcttcttggagttggtgcttctggtcttttaagttttggtacgatagcatctgcagatgaagctgagcatggtttggcagctgcagagtacccctggccgcatgctggcatccttagctcgtatgatcacgcatcaatccgccgtggacatcaagtttaccagcaagtgtgtgcatcttgtcactccatgtcattgatttcataccgtgatttggttggggtggcctatactgaggaggaaactaaggcaatggctgctgaaattgaagtggttgatggtcctaatgatgagggtgaaatgctcacacgtcctggcaagctgagtgatcgcttcccgcagcagctttatccaaaggaacacgagcgattgataatagatgggggggcccctcccccagatctcagccctatcacg

SEQ ID NO: 72734 - DNA, 390 bp, Zea mays
  Clone ID: MRT4577_166332C.1
ggagaaaaaagcccgggatttttttttttttgaaggttgaagctgcaagcagtacatgccaagacattattctaaataaagatgggtgggggccataaaccgacaaagtccacgcttggtttacccccggaaaaaaaaggtggaagaagggggttaatttcccaaagaagggggaaaaaaaattgggggggcgaaatttaaccgcccctcccccaaaaaaaagccgggtacttttgttttggttcaaacaaaagttgcccatttgctttgttcaggggacactggtgggggctggattttttgcaaaagacaacctccctttgggtctgggttatgcacccaattccctggctttttccacctttttataattcttttttcccctttttc

SEQ ID NO: 72735 - DNA, 232 bp, Zea mays
  Clone ID: MRT4577_166333C.1
ctcgcacggaagccaccacaccagcccacaagccgcaaccgccatcgacatgtcggcagcggaggagcaccggtggcgctcgctggtcttcggcgaggccgtggccgcgcagcacggcgctgggtgctcgcgtcgtacccgctgctgctgctcctcgtgcgcctggccgcgttcgtcaggtacctgtggatcgcgctctccatgtactgctcgctcctgttcgtgctctcgt

SEQ ID NO: 72736 - DNA, 402 bp, Zea mays
  Clone ID: MRT4577_166334C.1
cggacgcgtgggcggacgcgtgggcggacgcgtgggtgcgtgctcagcagtcagcacttccacctccatggggatggggctcccacttccaccccgtcgctgctgaactgaaccatcctagtaggtgtcggctccggctccgggctccctctccccctttcccttcccttccaccagccggactgccggactccgaaccgaaggagagtgacgacgcgccccgcgcacgcatcgcagtcgcatcagtaacaaacaaaggcggaagctgtaacaacgaccggaaaccaaacacctcgcgtatagaatccgctcgcctggtggggccagtaggggctgccggtgccggagggacggcaatgccggaggcggcgcggggcctgctggatccggcggccgaggggg

SEQ ID NO: 72737 - DNA, 1046 bp, Zea mays
  Clone ID: MRT4577_166335C.1
ttctcttcttcttcttctttaggtcgtccgtcgaaaggctcctcttctttttattgcgccgttttggcaaagggggtggggaggaactcttcgtcgtcgcgcaccagcagcagcgttacgcaattcacgaaagaacatgctttaagcagggagaccaatttttttccgcttgggctacatcctgtgctgtacgtaacctaataaaccttgtgttcagcgatttgacggcctctgttatccgaacaacttcaaccagacatgtggcgagcgaggtgattagctagtgacaagtgttgatctaagggagatcgttttgagcatgctatgatggagctctactccggataccttgacgaccatttcaacctcaccacaagctaagctccgcctcgccgccgcagtacatgacgccggcggcgtcgcccgcgcagttcgcgccggcgcccctcaggatggggtacgggcggccggcgcccgtgatgggcatgtggagcagcgagccgttcaaggtcgacagcggcgggcacgccacctgcagcgcgtccaccgtcatggaggcggacaccaagctcgagacaagcaggctacaagatgttccacaggtagcactcgagccagagaggagtacggatcaggaaacgagcaggccgccagagagggtacgtacggtcatgagaaggctcgcgcagaacagggaggctgctcggaagagtcgcctgcggaaaaaggcctacatccagcagctagagacaagccggatgaagctggcccagctagagctggagcttcaacgggctcgacggcagcagggcgcgtacgcaaatgggagcatgggagacccagctctcggatacacagggtcgatcgatccaggcgtcgccgcgttcgagatcgaatacaggcactgggtggacgagcagaagcggcacacggcggagctgatgtcggcgctccaggggcagcagacgtcgtcgacgtcggagctggagctccgcttgctggtggagacggggctcagcaactacgagcacctcttcaggatcaag

SEQ ID NO: 72738 - DNA, 299 bp, Zea mays
  Clone ID: MRT4577_166336C.1
aacaagtgatgccgtttcttatgtatttgttcaacgattttgatcaaatctgttttctagtatttttgcttgtctccactcaactattaaacttaattaattacatttcaccacgtacaaattaaattgttttaaattatttttcttttcttttacttaattagcattgctttccacttttggattacacattaaaaacaaattagagcgcagattaaactatttgtacatcacaatcatcttgttttgtttgatttacacacaatgacgtcaagtgctgtggaaacttttacttggct

SEQ ID NO: 72739 - DNA, 472 bp, Zea mays
  Clone ID: MRT4577_166337C.1
ctaaattcgatcccctaaagctacagtgttaacagattccctttttccatttctttttctgttttctttgttttgttcccatttcacgcagcacgcgcggaggccttgcgcgccgcgtcgtccacgaacgtcgtctcgccaagtccggtccatggacgaccggatctcggggccgaacaccgtctcgccgcccatggcctccctaccagtgaagtacgggggcactaaggcgagcccgcggatggccacgccggcggcggaggctcgcacgggccgtgtcgtgcacgatgttggcgccggcgctgcagcccaccaggaacacgccggacaggtcggcgtgctccagcagccacaggtcctcgccgagcgtcaccgcccaccgcagcgctgcccacgcgtcgtcgtacgcagcgggcagcttgtgctccgacgcgaggcggtagtaaacggacacgtcgatggcgccggtcat

SEQ ID NO: 72740 - DNA, 562 bp, Zea mays
  unsure (1)..(562): unsure at all n locations
  Clone ID: MRT4577_166338C.1
acgcgcaacggnaacctaggggcctacgtttaacatggcgggcggcaacaacaaggatgggaagaagaagagagtgctcgttgtgggagcgggagctgctggaatgtcgtgtgctcaccatctctctgagcaccccgacaaattcgacgttacactcatcgacgcagtagattactgtggaggccaggccttttcaattgacattgacaaggagcgtcatggcgccgcatggctcaaccaaggtgttcaaggtggaagttacattttccaccacaccatgaccatgtttgcacgacaaggccaccacgccgaccccgtcaatctccacgtttcgttcggcaaagacgacatcttctggaccaatgtcttccccactgagctcctcgcacggcaccagaaggaaattcgacgcttcaacacgatgctcaaaatcgtccgctggttcgaactcttcttcgccctcatccccatcaaggtcctcttcaaaatgttcatgttctcccgagaattcacaaacaccgtcgccatgcccatgatcgccctcttcctctgtaccggcaac

SEQ ID NO: 72741 - DNA, 237 bp, Zea mays
  Clone ID: MRT4577_166339C.1
gtggacaagacagcctcaaggtgacggcgcccgacggcctcaagggcaactacgagtgcgccattggcaaattcgggatggcccagtacggcggcaacatggtcggcttcatcgcctaccccaaggccaacaggaaggcctgcaagagcttcgacgacttagacatctcctacaaggccaagtcgggggagttcaccaccttcctgctcgacgacatgggagattgctacttcgcaa

SEQ ID NO: 72742 - DNA, 459 bp, Zea mays
  Clone ID: MRT4577_16633C.1
gggacattaagataacacccagaccccttagtggctaatacagacaggacaacaatacacttggattgaaccataactcctaaccagcactacacacgggctacggaccacgtgcaacgcatagcacttgatcaactgcgctccctgacagagaaactggaaggccgaagtagaccaaccactgtcggtatgggatgttagcacaaccacataatcctgggtggtctcaccaactaggaacaggcggcccttgaactcgctaaggcaaaacttgatggcaccctcgacacccttgattaactgattccatttgtctggctccaacacaggagcgagattattgatgtattgctcgatgtaagacacatacgagctcttgtctaaaggaggtcgctgatgtcgacagggggagtgaacattatcaacgatcttgacagaggtggtagtcaggttgttgag

SEQ ID NO: 72743 - DNA, 288 bp, Zea mays
  Clone ID: MRT4577_166340C.1
attaatctctctcgtagcaactttattattatctggattattgcaaggcacaatggcacatacatactgggcatgcagttgccctagacaggaacaccctttgtctcgctcctgctttatctatccacctggtggcgtgcatggaaaagacgcctgggcagataagacccctgttcttctgctagtacggatgcatgcctgggcacgatcgatgggcgcgatggtcatatcatacgttggttcatgagtcgggctggatcttgcaacggtggttgtgggccttgcacc

SEQ ID NO: 72744 - DNA, 318 bp, Zea mays
  unsure (1)..(318): unsure at all n locations
  Clone ID: MRT4577_166341C.1
aaagcccggtgcgacccacgcgtacgatcgcnatcggcctcccttttttttttttttttttatagcagtantaaataacttcggatgggagcactaaatctttcgggaaattgctaataaccaacaagttacatgcaatccccatatgcttatgaacctctacattaacttaaaacaaaacatgcaattttactactaccccatctttcngatccctcagaactagctaccttaccttcccatgcatgcatgcactcgaaatgctattcccttattcacgggcatgaggccgtgatctgctggtttattattgacttc

SEQ ID NO: 72745 - DNA, 311 bp, Zea mays
  Clone ID: MRT4577_166342C.1
ttttattttcctttttttttgccatgaaatttatgcttccgtagaagccattcttcagcatttcatctcagtttttccagccatatggttatcattaaacgtttgggagctgccctttctttcctgagcagggttatcattacttgcatataagctataaaggggggaaacgacagcaagaacatcatgagttatagcataaccatcatctatttggtttctatgttcgaagctacatatacatattaagatttatagattataaaaagttatcttaaggaccagcttcttgcatttacatctggtccttg

SEQ ID NO: 72746 - DNA, 469 bp, Zea mays
  unsure (1)..(469): unsure at all n locations
  Clone ID: MRT4577_166343C.1
aacgctcggatcctctagagcggccgacctgacgtctttttttttttttttttaanaaaaaaattggtttttggttttttttttttgttccagcaaaaacatctgaaataatgggatcggtcctaaagtaatcaagacaggaagtttctcatccgagtaacagcaatagacaacaagccttttaactggaatgatttcaaggaaatgttttctagatcggggaaacattgttttccttaaacatttaggaaaacgataaattttctttttctagttggttggagactcaaagacttaatggcagatctgggatcggaatcctttcataaattttcagctgtaggggaagcatctgggatgtatttttcattttagtctgcccaattaagatccctctactggctggaattttcctcttctaaattaaaaattttcctctttttctgttaagctttgcttgaactaaaaa

SEQ ID NO: 72747 - DNA, 338 bp, Zea mays
  Clone ID: MRT4577_166344C.1
tttacatgttgtattccacccaccccacactacactaaagtactaaaccctgatcacttaaaccgctagtgaaacctcatgactagattaatagctactagctagcagccagaagagctggccatcagttacaagtttggttgcttgtaactttgcctataatccatcgatctaacatgactcaacaactgcagctacacccttttcagtttccattcttgcttcgtccctgatcacacggttcattcccctgtggcctttagtttgttttcagacgtcttctagctcgtctccggcgccgcctgtaaggctcttccggacgctgtcggcgtcggaag

SEQ ID NO: 72748 - DNA, 395 bp, Zea mays
  Clone ID: MRT4577_166345C.1
tccagcgtgttgagagctggataatgatgattgtataagcgacagctgtgggactgcattatgtaaaagagctcaatatctaggagctgagggaggtgaaagggaaactggtgaatcaaagcgcttatattctactgattatgcctaatacttctgctaagggtgaggaggacaaactcgtagatcacagagctgttaatgtgaccgttattattgatagattccgtatacaggatgaacctctttttgctaaaaaatgattcgtgcgttatcatatgataacacattatgattatctctgctgtgtaagatcaataaaatctaatcatgtcaataagggagttgacaggtctaacaaattgttgcttacttggctgaaggacctacaatttttt

SEQ ID NO: 72749 - DNA, 878 bp, Zea mays
  Clone ID: MRT4577_166346C.1
tggcttcccggccgccagctccactcctgcgtctcgagcgcgactcgcctcagcgctcagctcagatcgccccactgatcctcggcgaaggagtcttgggatacctacaatggcagcaacttaccctatgcctgatccaccggtgctgaacaactatgctattgctcaaagactcgacagctctgctaccgagacaaccggcagagacaagtccataggctacctggacatcttcgtccaccaggcgcgcgacatccacaatgtttgcatctaccagaagcaggacgtgtatgcaaaactgagcctcacaagcgacccacaggtgtcgtgctcgaccaaggtgatcaatgggggtggccagaacccggtgttcgacgagggtctacggctagacgtgcgcagcgtggaggcgtcgctgaggtgcgaggtgtggatgttgagcagggtgaagaactacctggaggaccagcttctcggcttcaccctcgttcctctgtcagacatccttctggccgatggaaatctggcccaggagttctccatgtcgtcctccgacctgctccactcgccggcagggtttgtgcacctgtccctgtcttacgtcggtagctctccggatgtcatcgagatctcatcgctcaataagtcggcgtcggcggtcaccgactgtggaaatggcagcttggatccttgtgagatcgaaaagatggagttcccagacttgaacatggtgaacgagaatgaaatgatggtctccaagtatttcgagatggactgtgagagtgcagtgaaggctgagaactgcaagttaccacagcatgatgcagatgagcctggtcctgaaggtctcaagatcactccccaggagtatcctgacg

SEQ ID NO: 72750 - DNA, 376 bp, Zea mays
  Clone ID: MRT4577_166347C.1
aagaaaggtttttttcaattttttctaccaaattaaacttctttctttaatggcaaaattcaatactcgaccggcccctaaatcaaacaataataccaaataggacaccctcgcttggaccaaacctagggggaccaaaatttcctgccccccttccccaaaaaaaatcaggggagaacacaaaaacccaagcccaatcaccgcccccttttgcttccccaacccaaactgacacttatggcatggaccatgccccaaacaagggccgtaacaaaaccccgattaatgacccaaccccaacactccaatttcccacacttaccttcaaaataagtgccccgccaactcaacaacccccaaagataatcctcctgtt

SEQ ID NO: 72751 - DNA, 912 bp, Zea mays
  unsure (1)..(912): unsure at all n locations
  Clone ID: MRT4577_166348C.1
ggtaccctcgtgtgtccggccggggccgccgcatcccattcccatccggtaacggcatcccgcgtccctcggctcggatcgccgccgcccaacggagcaggagcaggagcagcgatccatcctatcctaggagccaaaccctagccagctatggagccgcccgccgcctcctcctcgtctgatccccactccccgtctccgtctccttctccctccgcctccccggccaagcgctccgcctggaagcaccccgcccccaacgacaccgccgtcatggacgccaacaactggcccgcgctctccgacgccgccaagggcaacaagctcccggactcctcggctccatcacctgcgcccgtagccgcaccgtcggccgttgccaactcctccagttcgcaaaagcacggcgcccatcacggccgccacaagtccgccaggcgcattggcggtggtggcgaccactctccacgagaccatcctgaccggaacgttgccgctggctgggaccatgctgccggcggtggcgggggcaggggtgcccagaggaaccataataacggaggtggcaggaggggcaatggcgcacctgcctctgccactgggccttctcatcacggttctggtgccggtggcggcagcggcggaggctttggtgctaggcgaagaggggcatacgagccaccattctatcgtggccctccaccaccgatgggcatgggccactacatgagaggtgcgccgccgccaccgcccatgactgtcgcaccaccgttcatgggccctccaccgncaccagtttcgtccatgcgcccgtatgctggaccaatgatgttccatgacatgccatctcccatgtctcctgtatcccccatatacttttatgggccaccaccaccagaggctcttagggga

SEQ ID NO: 72752 - DNA, 2196 bp, Zea mays
  Clone ID: MRT4577_166349C.1
gcggaaaaagctgaagctcatctttataccataattaaggtagctcgagatgaggatttgaaggaacaaattggaaagggtatatattttgatttggtggaccatgaaaaggtccataatttccgtatacagaaacaaatgccttttagttgtttcaaggaggaagtagccaaggaatatggcatccctgttcagtttcagcgcttctggttgtgggcaaagaggcaaaaccatacataccgccctaatcgtccattgaccgttcatgaggaaacacaatctgtggggcaactgagagaaatatcaaataaggcacacaatgttgagttgaagctgtttttggaagtagaacttgggctggatttgcggcctctccctcctcctgagaagggcaaggaagatattcttcttttcttcaaattctacaacccagaaaaggaagaactctgtttcatggggaggctctttgtgaaggccttgggaaaaccttcagaaatcctggcaaaactaaacgaaatggctggatttccccctgatcaagaaattgagctttttgaggaaattaagtttgagccaaacgtgatgtgtgaaactatagacaagaaactcacttttcattatagtcagcttgaagatggggacattatttgtttccaaaaatcaccaggagcagaatatgatgcacccgtgcgatatccggatgttccttcatttttggagtatgtccataataggcaggttgtacatttccggtctttggagcccacgcgtccggatgatttttctttggaattgtcaaagcttcatacctatgatgatgttgttgagagagttgctcgccaacttgaattggacgatccagcgaaaattcggcttacaccccacaattgctactctcagcaacctaaaccacagcccgtcaaatatcgaggagtggtgcatctgtcggacatgctcatccactacaatcagacgtctgacatcttgtattatgaagtgttggatataccactgccagaattgcagttcctaaaaaccctgaaagttgcatttcaccatcctacgaaggatgaggttgttattcatagcatcaggcttccaaaaaatagcaccattgctgatgtaatatatgacttgaaaactaaggttgaactgtccagtcctaatgctgaactacgtgtactagaagtcttctaccacaagatctataagatctttccactacatgagaagatagagaatataaacgaccaatattggacactacgtgctgaggagattccagaagaggaaaaaaatataggcccaaatgatcggctaattcatgtttatcacttcaagaaagatattaatcagactcagcagattcagaactttggagaccctttcgttttggtcgttcatgaaggtgagactttagcagaagtcaagaagcgcatacagagtaaactgcaagtctctgctgatgaattttccaagtggaaatttgcatttatatcaatgaatcggccagactacctccaggattcagatgttgtacctactggctttcagaggagagaggtctacggagcttgggagcaatatcttgggatagagcacgctgatactgcaccaaaaagggtctatacagtgaatcagaaccgtcacgcatacgaaaagccggtcaaaatttacaattgagatttctaactaacatggccgcacggtgaaggcctccatacgagaggagcggccagaaaagggaggacagggaatttatactgtcagggggaaaacctcatagttagcgagccattcggtgtggcacggccatgtattccagcgctagaggccagccactgttatttcatctgtagcagccagcagctcctatagcaatgattttctttttgtacaagattttccttctttgccttagggtgatggcgcgagcgcattggtgtccgtttcggttgggcaattgcttcattcttagagcaaagctgggtacataagattttggtaggaagcgtgtatacaggcaggctgtatagttgtggctctctcggcttgatccctcgtatcttgtcttgtgctattgttaatgcagtgacaggggctgactgtaaatcgtggttccaattttcaggtcccatctcatgcacgacgctttgggggagctttcagaaacttgcagtatttgttgttgttggg

SEQ ID NO: 72753 - DNA, 676 bp, Zea mays
  Clone ID: MRT4577_16634C.1
ccggccgggccgggcgatgcctcatttgatagatgcgtcgcaagtggcgtgactgatgtatggagatggctcagaagaagcacacgatccgtgggtacctggaaggacaaggtgaggtacctcgctcagatacaccgatcaggcctaccaccaaggcgaccctccatctgcatgcgactcgttctgatagatagaagctccccgaatcgttatcgatggaaatactagaatgttgcgctcagacgccctcgcgcactcactgacatcttgattgatgtgaaactctgcaaggacgtctgttagcagagctatccttacggtgtctaggtgcgtacgtgttctggtctgacacatcacgaccaatgatgaaaaggacgaggaagagttgtactctcttgttaccgatgctgacatccccccagaaggtgtgacaggatggggtaccaatgttgtggaagagcagtagtagatcatggctgtgcactgaacagaggcaactggcaaagtcatgatctatgaagaaaatgagaaaggtcacctataagccgatagccccgtgataagaacccagtattctgatggaactgttgttctcgggtgatcatgaacttatgtagataccgggaccaagtattgtacgctgtcgattccaatcttttctggaggcatcagccat

SEQ ID NO: 72754 - DNA, 587 bp, Zea mays
  Clone ID: MRT4577_166350C.1
agagaaaaaatatacaatcttttcctctcatcttttgaaatatattacacaagtacaaatcccacaggcccatcgttgaacaccaaccagttcatgagctatggtctcacgatcagttcatggaaacatgccaagacctcacatcggcaccctcaatcccgaatgccatgcatgatcctgtggacatctgtgctatttacaaagtccctgtggtggcatgatccaatccaagatccatctagcctcacccacacccatatagctataggagctagtgtctagctatcgggcttctcgtcccacccaaattctcaaggtacgagaacctcttggtcgcaaccgacgagatcttcgtcacccttggaccgaggtcctggtcccgtgggccgacgaagtcgtacagcatcggcgccggcgggaccggctccatcctcctcatcctctccacctcggccttggcgtccgagacgaccttgtcggtgtcgtccgaacaaggtaaactggcgatcctcatcgaccctgctgcgttcttggggtcgtctcgagtggccaggtccgcgccgagaacatcttcgatccgagacatg

SEQ ID NO: 72755 - DNA, 531 bp, Zea mays
  unsure (1)..(531): unsure at all n locations
  Clone ID: MRT4577_166351C.1
aggcgcgcgggagagcaacnnaaaccggagagannngaggataangagnnccaagggggnccgccngcgcggcccnctcangaccatngcccnncnctcngcatcccgggcagaagctcgagctttggctgagacgatatccaccgatgttaacgatgatgcggaatccgcagcaaatggagcggatgatacaaagatggcggtgggaggattcgggtcatatgacaacacaccatatggaaacaatccgcattttgggcgtggcttcgggcaatacggcggcgttccatatggatacaagccgtattttaggcatggctttgggcaatacggcggcggtccgtttgaaggcngagacaacggtgatggttacgacaataggccttattactacaaaagaggcagcgatggtgattataattttcccgatggaggcaaagtctataacagtggcttcgggcaaaactacgacggcgacgaagcatattatcgcggcgatggatacactggctataattgccccgggcgctg

SEQ ID NO: 72756 - DNA, 2752 bp, Zea mays
  Clone ID: MRT4577_166352C.1
acctctccgagccgagaatctctaaaaggcgccgctcccgtccacggcgcggcgggcagtagcgaagcgtcggcttcagaggccggggggccggtggagggagggtgggtagatagatagctagctagcgggtagcggagagggtccagtcagtgggcgggaggagcgagctaggggaccgggacgatggcgtcgcggaagtcgccggtggcggcggaggagcgggcggggacgggggaggggaagggggagcggtgcgcggtggaggaggtggcgctggtggtgccggagacggacgacccgtcgctgcccgtgatgacattccgggcgtgggcgctggggctcggctcctgcgtcgtcctcatcttcctcaacaccttcttcacgtaccgcacccagccgctcaccatctcggggatcctggcgcagatcctcgtgctccccgcagggcgcttcctggccgccgtgctgcccgaccgcgaggtcaggatcctcggcggcaggctcggcagcttcaacctcaacccggggcccttcaacgtcaaggagcacgtcatcatcaccatcttcgccaactgcggcgtctcctacggcggcggcgacgcttactccatcggcgccatcaccgtcatgaaggcctactacaagcagacgctcagcttcgcatgcgccctcctcatcgtcctcaccacacagatactggggtacggctgggctgggttgctgaggaggtacctggtcgaccctgccgagatgtggtggccttctaaccttgcccaggtctcactcttcagggcgctgcacgagaaagaagaggagggcggcaagtcccgtggcccgtcgcggatgcgcttcttcctcatcgtcttcttcgcgagcttcgcgtactacgcgctgccggggtacctgctgccgatcctgaccttcttctcgtgggcgtgctgggcgtggccgcacagcatcacggcgcagcaggtcgggtccgggtaccacggcctcggcgtcggcgcattcacgctcgactgggcgggcatctcggcgtaccacggcagcccgctggtggcgccgtgggcgtccatcgccaacacggccgtgggattcgtcatgttcatctacgtcatcgtgccgctctgctactggcagttcaacacgttcgacgcccgcaggttccccatcttctccaaccagctcttcacggcgtcgggccagaagtacgacaccaccaaggtgctcaccaaggacttcgacctcaacgtcgccgcctacgacagctacgggaagctctacctcagcccgctcttcgccatctccatcggctccggcttcctgcggttcacggccaccatcgtccacgtcctgctcttccatggcagcgacatgtggaagcagagcaagtcggccatgaacgcggtgaagctggacgtgcacgccaagctgatgcagaggtacaggcaggtgccgcagtggtggttcctcatgctgctgctgggcagcgtggtggtgtccctgctcatgtccttcgtctggaaggaggagatgcagctgccgtggtgggggatgctcttcgccttcgcgctcgccttcgtcgtcaccctccccatcggcgtcatccaggccaccactaaccagcaaccggggtacgacatcatcgcgcagttcatgatcggctacgcgctgcccggcaagcccatcgccaacctgctcttcaagatctacggccggatcagcaccgtgcacgcgctgtcgttcctcgcagacctcaagctcggccactacatgaagatccccccaaggtgcatgtacacggcccagctggtcgggacggtggtcgccggcgtggtgaacctggcggtggcgtggtggatgctagacaacatcgagaacatctgcgacgtggaggcgctgcacccggacagcccgtggacgtgccccaagtaccgcgtcacgttcgacgcgtcggtgatctggggcctgatcgggccggggcggctcttcggccggcacgggctgtaccgcaacctggtgtggctgttcctggtcggcgcggtgctccccgtgccggtgtggctgctgagcagggcgttcccggagaagaagtggatcgcgctcatcaacgtgcccgtcatctcgtacgggttcgccgggatgccgccggccacgcccaccaacatcgccacctggctggtgacgggcaccatcttcaactacttcgtcttcaggtaccgcaaggggtggtggcagaagtacaactacgtgctctcggcggcgctcgacgccggcaccgccttcatgggggtgctcatcttcttcgccctccagaacgcgcaccacgagctcaagtggtggggcacggaggtggatcactgcccactcgcctcctgccccaccgcgccgggcatcgccgtcaagggctgcccggtgttctgaatcttccgacctgagcgtagtaagcagtgtgtgtaacagtgtaaggaaatgtttgctacgggagccatggattcaaccaagcatcgattaaccgatgcagtgctttgtcactcgtgaatgtaacaccatagcgccagtggtggattcagatttcagagggagaaaaaaaacacaggcccagtgtctttggaacgccaaaaaaaaaaaaaaaaaagggcggccgccaccgtggaggcggcggggcccgacggctcaggtttactgcaaccaacaccttagcaattgcgatctagcgtgtgtaataatactctgcacaattcgaagc

SEQ ID NO: 72757 - DNA, 1077 bp, Zea mays
  Clone ID: MRT4577_166353C.1
aagacaacttaatagagatgtgcgagacaatcatacattctatcaccacatgccctgcatgttctctgcataaatgatgttccaatcatcaactagagatgaaacaggtctacaaggtactgaaaaagagtacatatttgtcacatcgcacatttctgtttttaataggaatcggatcaagatctacgcagttcatcgatggcaatacccctctcctcctttaagatacgaagatagaaactcccactccgacggacataaatcttctcgagcggcaagccattagacctaaacaactgcgccaacatatggactcttgaatcgtccttggtgcatctgatcttcaccatactaagatgtttgcaagcaaatgatcccccctttggttctatacctcttaccaatgccttcttgatgtcacggttcatttcaagctgaagataaagcttctccagactaggtgaatgctgaagcaagacaagtaatatgtcgaagtcagcaaccgtactgatacaccattctcccagggccaaagtcttcaggttgctaaaagttggacaatttaacgattctctcctcataatgacctctccagaatgacctaacagctctagatgtcgagcatttgaaaggcaatgaagaacattttggccaccaaaatttttataatcattaatgatatgttttgcactgcaaccatgatctttactgcccctagtgtgatcaagttcattatcacgggttccaaactggttatctccatagtcatttgcaatctcactgtactcataggtttcactatcactattgatatcacttccataatcataattgtccttgatatcatcaaaatgctcatcataaaaatcatctaagaattcagaatcatcactgaggatttcatcactgtcatcagaatcaggaacatatttagcaggggcaaatgtactgttgttgtcatcatcatcatcacttgtttgaggatattcatcatcatcatattggtactttttaaagtcacggctcagtaaagagtcatcaagcatcacactacctgttaccagcactccaaagttc

SEQ ID NO: 72758 - DNA, 587 bp, Zea mays
  unsure (1)..(587): unsure at all n locations
  Clone ID: MRT4577_166354C.1
tggttgagcagaagacatgttcttttgcaccaaatcgtcatgttcatctacgtcatcgtgccgctctgctactggcagtttaacacgttcgacgcccgcaggttccccatcttctccaaccagctcttcacggcgtcgggccagaagtacgacaccaccaaggtgctcaccaaggacttcgacctcaacgtcgccgcctacgacagctacgggaagctctacctcagcccgctcttcgccatctccatcggctccggcttcctgcggttcacggccaccatcgtccacgtcctgctcttccatggcaggtactttagcccttccctcccactttgatggaccgtcgcatccatgagcggtgtgctgaccagtcgtcgctgtacgtgctccttgacacagcgacatgtggaagcagggcaagtcggccatgaacgcggtgaagctggacgtgcacgccaagctgatgcagaggtacaggcaggtgccgcagtggtggttcctcatgctgctgctgggcagcgtggtggtgtccctgctcatgtccttcgtctggaaggagagatgcagctgccgtggtngggggatgc

SEQ ID NO: 72759 - DNA, 667 bp, Zea mays
  unsure (1)..(667): unsure at all n locations
  Clone ID: MRT4577_166355C.1
tgggtacctcgaggccggccgnnnaaaaaatcattcaaaaaaaaaaaaaaaaaaaaacaaaaataaaaaaaaaaaaaaaaaaaaaaaaaaaaaaaaaaaaaaaaaaaaaaaaaaacccaacccctctaatccttttcggaatttccaacgccttcgccctaccagccacgtcgtttcaaggccgatcgaccgagcagttgggggaaatggcggcggcggcgaaggccgggctgctgaacttctgggggagccccttcgggaagcgttgccgaatcgcgctggggaaaaagggcgggccctacaagaaccgggagcaggacctcctgaacaagggggagttgctcctccgttccaaccccatccaaaaaaaaatccccgtcctgctccacgccggaaggcccgtctgcaagtcgctcgtcatcctccagaacatcaacaaggccgtggccgaacgtcgcgccgttcctccccaaggacgacccctacgcccgcgggaaggggcgtttctgggccgattacttcgacaaaaaaatctatgacagccaaactcggttgtgaaatttcaagggcgaggcgcggaaccaggcaaaaaaggaccgtgggggaggtcctgaagaccctgaagggggagctcggggacaagcctttcttcgggggggggccctcg

SEQ ID NO: 72760 - DNA, 670 bp, Zea mays
  Clone ID: MRT4577_166356C.1
tgccggtgtggctgctaagcagggcgttcccggagaagaagtggatcgcgctcatcaacgtgcccgtcatctcgtacgggttcgccgggatgccgccggccacgccaaccaacatcgccacctggctggtgacgggcaccatcttcaactacttcgtcttcaggtaccgcaaggggtggtggcaaaagtacaactacgtgctctcggccgcgctcgacgccggcaccgccttcatgggggtgctcatcttcttcgccctccagaacgcgcaccacgagctcaagtggtggggcacggaggtggatcattgcccgctcgcctcctgcccccccgcgccgggcatcgccgtcagggctgcccggtgttctgaatcttccgagacctgagcgtagtaagcagtgtgtgtaacagtgtaaggaaatgtttgctacgggagccatggattcaaccaagcatcgattaaccgatgcagtgctttgtcactcgtgaatgtaacaccatagcgccagtggtggattcagatttcagagggagaaaaaaccacaggccaagtgtctttggaacgcccgaatttggagtcatctggaaccgacggctcaggtttactgcaaccaacaacttagcaattgcgatctagcgtgtgaataaaagtctgcacagttcgaagaag

SEQ ID NO: 72761 - DNA, 184 bp, Zea mays
  Clone ID: MRT4577_166357C.1
ggaaaaggaaaccggcttgctaatttgcattcatgtcccgcaaggggtccccatcatttagagcaggggaaggttgcatatctggcgggacaatgagggacgtccgggatgaaagtttactctctggcaattttaagaattccctttgggaaacacataaattcttttcgggcggacccgtggg

SEQ ID NO: 72762 - DNA, 497 bp, Zea mays
  unsure (1)..(497): unsure at all n locations
  Clone ID: MRT4577_166358C.1
agtactctactctagactacgtctccatcgagtcttccatttccgggtagtggtcgngaggaagatacgactccctcgccatagccgagcagaaccatcggagttcccgctttcccgaactgatccggcaggctcgtcgacagggtagccctccagagcgacgatgtcaagctcggcggcgtctactgcccctgcatcaccaccgagaacatgtgctacatggtctggcacgacagcggtcacgagcgctgctctaacagagatatctggatcatcggcgatgagactctgctctgtggcgagagcgcaggttaccgacattgaggaactgaaacctgaggagagctaccgaaatgatgatgaagccgatgactgtgtggagtacaacgatgcctacgctgaccaggtcagagccgatgctcactgtgaacgtgactgcaagaatgtagcgcatctgctgatcctgacaagagtgcactatgtatgctcgtgatgac

SEQ ID NO: 72763 - DNA, 213 bp, Zea mays
  Clone ID: MRT4577_166359C.1
gttgcatctgctacctcgtctgagcgctattcctccactaactccatccttccttcgccggggagctacatcctactggatgggctccatcttggacgtgatgagctgcacccataacggcctcaggagctgctcgggggcaagtacaggctagagcggttcactttgtaccggctcctcacaagaaaaaacatcttgttgaagcggaaccaa

SEQ ID NO: 72764 - DNA, 660 bp, Zea mays
  Clone ID: MRT4577_16635C.1
tttatctctatttcttagactagaaaccgactccccactctcctcatcacacgctctcttgtctgctcccatcttcaaatctttggtagaaaatctttgagtgagattgaaagctgtggttttttgtgcttcatctccaaatccttcttgctcttcttgattcgagctttggtactacatcgagttttttgtggattcattactcttggagcttctagctcctagaagactaggtgtcgcttgtgaatctccaaatcttgtagaaaaccataagaaagtgtgtattacccgcacgtgtgagcaaagattagtatgtgggcttgacctttgtggtcgatggagggaggattagggttgaaagagactcgactctttgtgggtgcctcaacaaggaagtagggcaccattgtggggtgaccgaacctggggatagatcatgtgtctcttatgttcttactcattgtatttgtttatgttctctgttctctcaccagtccgtgaaagaattgtttgtatctttttggtgtgtggattttgagaagtgttcttctcagatctactactttgaacaatatggatcatctaacacatcccatttgtaaagttaactgggtgaatttgagatcaattcagttttatatctcattatttaattggact

SEQ ID NO: 72765 - DNA, 228 bp, Zea mays
  Clone ID: MRT4577_166360C.1
ttacattacatgagtatgtgttggtggttacattacatgacttcaaaaaaatatatggatgtggaaatacacttgggctgaggggtagaagtaaccaactgatagaaaaaggaatctgatagttttttttttcttacaagctaaggcttaagtgaacaacaaaaacattatttttagtggaccttcaccagttcggagtattcagatgactatttttgcatagaataa

SEQ ID NO: 72766 - DNA, 222 bp, Zea mays
  Clone ID: MRT4577_166361C.1
atagaaacactacactcagaatacaggaaaccttctggggactgggcagcatcatctacatcacttgtacaggggacaaaaaaacctgttcgggtgccaccccagcattatgtgagcatttaaaagccgactggcccatatggcttgagggaagatacagcagatcagcgtgctccaaacaacaaggatgctctaaagtcacatgttgaaaggcggacacat

SEQ ID NO: 72767 - DNA, 212 bp, Zea mays
  Clone ID: MRT4577_166362C.1
gtaagctcggaattcggctcgagcgggactcggccttcggactacgacggcgcccagcaaccatccccggggggcccggttgtgtctatgtaggtgtatctctacgagcgcggaccctcagactcagtatgagagggtgagcggagctccagggggaagcagcgggatgcgtcatggctgaagccgactgttccgcggcaaggaccaagacg

SEQ ID NO: 72768 - DNA, 301 bp, Zea mays
  unsure (1)..(301): unsure at all n locations
  Clone ID: MRT4577_166363C.1
ttcattcgttcgcccacgcgnccggctncgtttttttacccccctatagttcttcccctcccttcccggccgccgcggggcgcgcgagcctgcttgacgaccgggggcaacgacctcgctcgtctctactctcggggaagcctgagctgattactacgcgagctcgtgtccgcgaagcatggcggatggggggactggacggaagcattccccaataaggtggagaaggaactctgggccccaagggcaattcgacatacaaaggaggcgaagcgcatgctgaaggatgtactcgtgacat

SEQ ID NO: 72769 - DNA, 585 bp, Zea mays
  Clone ID: MRT4577_166364C.1
ggtaccgggcccccttctcgagttttttttttttttttttttttttttttttttttttttttttttttttttttttttttttttttttttggggggggccacgacctttttattaaacttttttaactggaaacaatcgagttttacagcagggggggattaacaacagttactaatggttaaaaaaggccccactacccaaaaccaaatcggactttatgctaaataacaattcccgattttttggaggggacaactccataaaaacagggactgggttttatcaaaacccctaaaggaatttggaaaaaaataaacaggggctttcctttaaggggttaatagcaaaataggcacagccttaataaaaacaggggcagaaaaacttacacaaactgattagttggggggaccccatgctttggaaaccatttgggcataagaaacttttcatgcaataagggtttaacatttttttgagaagaaagatgcttcagggggggaaataaacccattatgagcgggccataaaaaggttgcccacctgaaaagggaccaagaggttttcctttcaaggggtgaaaa

SEQ ID NO: 72770 - DNA, 921 bp, Zea mays
  Clone ID: MRT4577_166365C.1
acgtcccctcccctcgcgtatctctcgagactgaaggcttcggcggcgcgagcgtcgaccccgaccccgaccccggccaagatcccggcggccctttcctccagacgtagcttctcccacgggcctcggtccataccgccgccccagccttctcaacccgtcggcgccgccgcagtccttatcgccgccgcagctttctcacgccgtcggcgctgcctcagcccaccgccgccgacgttgcttctcccacgggccccccttctccggcgcaaccggtattccggcattctatccgcctgccgagtggaagacttgggacaagataatggcaagccttgctgattctttcttggctgatcttgatgaactttcagacaatgaagcctaccctgaagaagacaatgctgaggcagtgggtatggatgaggatggtgacgatgatatgcctgatcttgagtctcttaattatgatgatcttgacagcgtctcgaaactgcagaagacacaacgttattctgacataatgcaaaaagttgaaggagcacttgagaaagacacatatttgtctaatcaaggtttcatcctggaggaggatccagagtaccagcttattgtagattgcaatgccttatcagtagatattgagaatgagctcattataatacataatttcatccgtgacaagtataggctggagtttcctgaactgggatcccttgttcatcatccgattgattatgcccgtgttgttaagaagattgcaaatgaggtggatataacactagtagatctggaagggctcttaccttctgcagttataatggttgtctctgtgacagcatcgacaactagtgggaagcctctttctcaggagaatttggtaaaaacattgaagcatgtgacagagcccttaatcttgat

SEQ ID NO: 72771 - DNA, 899 bp, Zea mays
  Clone ID: MRT4577_166366C.1
cgaggccggccgggaagctagctaattaactgtgcaattagttgagtcagtagataagctgttccgtcttagcttatctaccgatcgagcccggcaatggcgatgatggcatccaataacactcgaccccgcaagctgtcgctgccatgccgcacccgtactttccaagccttaatactaagcacagcagtcttcctggctgcttccacggccgtcgtcgtcggcaaggagccacagccaccgtcctcctccggcggcggctgtcactaccgcttcgagctcacccacgtagatgccaacctcaactttagcagcgacgagttgatgcgtcgtgcctatgacaggagccgcctccgcgcggcgagcttggccgcctactcggacggccgacacgaagggcgcgttagcattcctgacgcctcgtacatcatcacgttttacttgggcaaccagcggcccgaggacaacatctccgccgtcgtggacaccggcagcgacatattttggacgaccgagaaggagtgtagccggtccaagacaaggtccatgctgccttgctgcagccccaagtgcgagcagcgcgccagctgcgggtgcggacgaagcgagctcaaggccgaagccgagaaggagaccaagtgcacgtacgctatcatatacggcggcaacgcgaacgacagtactgcaggcgtcatgtacgaggacaagctcaccattgtcgccgtggcaagcaaggcggtgcctagctcccaaagctttaaggaagtcgccatcggctgctccacctccgccacgctcaagttcaaagaccccagcatcaagggggtcttcgggcttggccgtagcgccacgtcgttgccgaggcagctcaacttcagcaagttctcctactgcctcag

SEQ ID NO: 72772 - DNA, 935 bp, Zea mays
  unsure (1)..(935): unsure at all n locations
  Clone ID: MRT4577_166367C.1
anatntnanggnaagnnaaancaacnncnnaagnnaatttnnnnannatngnaaancnactnnccncaaaaagggntttagcngacannaaacgggccgggtggaaggcgaggccggccggggcgcgaagccaagtctgggcaccagccggcagccgccaggatacttgatggacgactgtggcaaacctttcgtgaagagagagctcagactctccctaaatcctgctccttgcggcgacgacaaccccactactcccaccggagccgcctccgatggcggctcgtcagcctgcacctcggccgtcgcgctgttcgttctcgggctcaacagcgcaatagccatctacggctcgagacacgacccccagtccatactgtttgtggccgtcagcttcttctgcgtcgtgcttctcttccacctgctccgtgcgttcgagagaacgcccccgggatcgccccggaggttgcaggtgaaggcggccatatgggtcgtcaccaccgccctgacggtcatgttctccggcagagttgctccgttgatgcctgcgcccgtggccgccgtcgtctggtccatggccgcggtgacgatccttgcgggcttctacatgttcttcgtatgcccggacgccgccgaagagaggccgaccagcaaagttgttgccgaaggcccgtagatagtttgtgtgtgcgcgcgattccgccatcgaagtatcgtgatgtaaacaactctaaatttaaggtgagcgtccgtgcgtaacaacgggaacatataataatataataacttatatataaaatatatcttttataacaaaatatgtcttatattgttataagaaaatgttttataatctatttgtaatcctagccatacataaattttattatttaaaaaaaaaaaaaaaaaactaaaaaaaaaaaaaaaaagcggcc

SEQ ID NO: 72773 - DNA, 433 bp, Zea mays
  Clone ID: MRT4577_166368C.1
gcgcccacgcgtccgaagccggagaattcgcccttaggagcacaagccgacgccgaccgcgtacgcccatagccccaaacccacgccgacgacgtacactcccaccccgacgccccccaagccgacgccacccacatacactcccgaccctacgccccacaaacccacaccaaaacccactcccactaatacgacgtacaccccgacccacaaggctccgacacctaagccgaccccaccaacgtacactccaaaccccaaacgctagacgcccaaaccgaccccagctacttacaccccttgccgcaagccttcgacacctaatccgaccaactctacgtacactccaaaccctaagccacctgataccaagcccttcacgcccaatccgaccacgtcaacgtacacccattcgccaaagcctacgacaccc

SEQ ID NO: 72774 - DNA, 303 bp, Zea mays
  Clone ID: MRT4577_166369C.1
ggggggaacggtttttttcttttattgcactggaaaacacaaatacaaacatgggcccgggggatagaaaaataattcggtgtgcttaaatggggccagcatgatatggggaacgcccaccagattacatcccttcagtttagcatggtcctcaatggtaaaacctatatccaagcaccattttgaggtttaatgttctctttagggggccactggttgataaaaaacccttttgggccatttgctgaaactccgcgcacgagatcttaggggcgacttgctttaacgttgtttcctaggggg

SEQ ID NO: 72775 - DNA, 290 bp, Zea mays
  Clone ID: MRT4577_16636C.1
cttttcttttcgtgctaacaagacaacatggatcatggggcgcgggcgcggtcaccttctgctacaatagtaaagcagtgtctgagatcattagcagagacactaatgtggctcgacaaataattacagggaaaaatggcctgctgaggaatgcactaccaggcgcggaggcgggctcgaccagcgcgcgctggcagcggccaaggccgcgaggcagcaggaggcaagccgtctcggggcctctggcggcggggacgtccctctcgtggactacctcaacacccagtact

SEQ ID NO: 72776 - DNA, 517 bp, Zea mays
  Clone ID: MRT4577_166370C.1
gatacctacactgttgcataagttctttggatacacaattcatgtgcacgacagctgccaatggactgaaaacataatcccaccttacccttcgcaagaataatatagggctcaaccctattgttagctttatccgcgcttgtgctgcagtccatatggagccgctctgtgattcacagctgacttactaaaaacatgcgaccttagtcggacacaaacagcaccaaaggagatgatcacactgaggaacctcatgccttgctggccacatgtaaacgcataggtctgacataactcctgaagtagtatgtcccagcttgaggtcactcataatgatcttaagccatttagggctcttccgcacactgtacccgctctgctttaccgatccagttgactgaggggttagcttgatcagaaacaaacttggtataccttaacagcttacttctatcacgtgaatcaatggacaactgtctcaatgaagaatgctcatagtgagctcgattgacatgtg

SEQ ID NO: 72777 - DNA, 577 bp, Zea mays
  Clone ID: MRT4577_166371C.1
tttttttttttttttttttttttttttttatgaatccaaatcccagagataaagaactctataactgggctgggcaaatggagcaccaaaaccaaaactatgcacaaatttcgaacaaaggattggggcttttactggcaacggttgaacaccaagcaatttggctcaccagaggtccccatcttcttcaaaatgagaagcgaaaccacggcgacgccgatcgctgtcatcgtctgcctcgcccttggacaggaagaggaaggcgtggccggtcagcatctgctccctgaggttcttgatcgcctcgtacctctcggcgtcctcgtcctcgtccctgccggtggtcccgccgtcgctgcatccgtcagccgcccagtcctgctccggcgcatctctcgtcgcttcagatctacgatcgaaggcgccggcgtcggcgccacattccgttgctctgtccgaaagtgagccgtgcgccgacgttgcgttcttggccgtcgtgtccctggacctggaggggggggtgtagctccagctggtgccgtccatgttcagctcgatgtcgctgccttccgagcgt

SEQ ID NO: 72778 - DNA, 573 bp, Zea mays
  unsure (1)..(573): unsure at all n locations
  Clone ID: MRT4577_166372C.1
ccccgcgtccggtngatggctgttcctgactcattatatcgactcctttttgtttccatttctcttttttgtatatcagggggaaacaccagttggataaaactattcagatgcgtgaggaccttngaaaatgaggcacgccatttccttaaaggccttgttctgtgttagtttgatgtggaaaccatagaatcagtggacactatcttggcgtcggtgtaaaatcatgatggatttatttccttgccagagtccccacttaagttaacttgcctacattggtttgaagatgaaaacatgctaaatgtaaatgtgaaagtaatcaaagttctccaggcttaatggatgtagatttatggatagtgatgacctgcagaattagaacatgaactcaattgcatttgcgaggtccaaaaaggataaatggctgttaaatctgtagtcacatttagggatttatcttttgcttgacttatacagaatttttcacatttagcccagttttttttgtacactggcatgcttgggtacctcagatgacagccctgcattgggcactgaatgggcatgcct

SEQ ID NO: 72779 - DNA, 458 bp, Zea mays
  Clone ID: MRT4577_166373C.1
ggtgtgaacaatattgcaaccaaagaaaaagcaaagcccgaactaatcaaaaagcaactcgaagcggacgcgggggcgggcgcggggggggacccgggaaggccggaccggggccggccggcgccccacccgcccccaaaccgaggcggagtaaagcggggcggaagcaggggcagaggagggcccggcgggaaagtgtgaggcggtgacaagtccacacaacatacataccccaaagcataaaaaggaaaaccagggggggccaaggagggagcaaaaaaaaaaaaaatgaagtgagctgactggcggctacccaaccgggaaaccagcggggccaaaagcagtaatgaaaaagacaaaaaacaacgagaagcggggcggggaaggggggccaggggggtcctcctttgggccacttaaaaggacaacaactgaaaggccctcaccgcctggccccg

SEQ ID NO: 72780 - DNA, 329 bp, Zea mays
  Clone ID: MRT4577_166374C.1
taatacacactcgtataaagctgataccaacataaaaaaaaaaacaacaacctatcaacaacaagcttacctagcgtggaagcttccaagctaacaacgcaccacctgccaggataaccaacaacctgatcatcgcttctatactgcccagccaatagatgactctcacatccacgttcctacggagctccttttcctcctgacacgaagaaactaccatgccctcaatgctgctaagatacgcttaccagataccatcgaccttacctaaagctagaaacagctggcattgcacaaactagctcagcccccccctttaatccgtaacc

SEQ ID NO: 72781 - DNA, 500 bp, Zea mays
  Clone ID: MRT4577_166375C.1
aaaatgcgaaatagaaattgtattgattcgattgatgattacaaatcggccgtagacctctctttttatagaggagaggggctggaccctttacacgactggattccgagctaattttgcaaatctagcaaacaaacatagcacaaaactcggaaccctaaactactctgcgcatgcgcggaccggccggccgacacgcgcggactgtccgtaccgcgtaccgtccggcctcaggcctcagggccggactgtccgccaggctcaaaacggtgctcaacaggacccggtcaggaacgagctagaggaacaaagagcaggggcagtccgagctgagcgccatgcgagatgggcgtagggaggagcagagccgaatcaggagctggggcgcggcacaggaggagcgagctgagggagaagaagcgcgcgcacggagccaagctcgacaggacgcggctcgacagggcgccatgggcgagcagcagcagggcaagctccaggac

SEQ ID NO: 72782 - DNA, 234 bp, Zea mays
  Clone ID: MRT4577_166376C.1
agagacctgataccttctcaacatccgggctgtcagggatctatctcatctggtggatcaacaaaagaatgaatgccaatccgatgctgttcggatgaatctgatacagacagggtccgtgtacgtaggccgaatccggacccaaccaaacagtactagactggataacactgcacctaacttaaatgggtctttcttctcaaacgccaaattaaatggcccaaaaaaactgaa

SEQ ID NO: 72783 - DNA, 271 bp, Zea mays
  Clone ID: MRT4577_166377C.1
cggaaacagcactcccccggggtcgccaccacgcgctcctggttctatttactctatctttactctgagtcgctctgcataccttgtagagggagcttttgctgtcttgcacatgcatctctaatcagcaaaggcggatcatcaacgttatgcaatatagtcgtctgcaatgagcagctatgtagtgataacacgctcaagcaggaggtgagagcacataggaggatggaggcgagtaatacatgtgtattagtgtccccaacaaattaca

SEQ ID NO: 72784 - DNA, 170 bp, Zea mays
  Clone ID: MRT4577_166378C.1
ccgccctccacgcgaccgtttacagctattttttgcccaacgaaggcgcacaaaggggacactaagggcagacattcagagcgcaccaagaacgcccatgagccaggcagccgacgaggcgctgcgccgcgaatccatggacttcaaggagatctggcacgccagattcg

SEQ ID NO: 72785 - DNA, 255 bp, Zea mays
  Clone ID: MRT4577_166379C.1
gcaaaccagaacagcgtagagaggatccgcaaacaggagggccggacaaagcaccttgaacacggccagcgccctcctctggcacctggcaccgcctgctgccagcacatgccctacgcatacgccctgccccagcgctgggacggcgctctcgcacggctcacgaccatgactgacgacgacgatcggcacccgcacgctgtacccctacgccaagcacatgacacacccgtagcgcaggccgcctactacggc

SEQ ID NO: 72786 - DNA, 145 bp, Zea mays
  Clone ID: MRT4577_16637C.1
ggcgaccaatcctattccaacccgactagaccaactcgcagctcctccccaaagttcaggtcgatgaatgcaagtcgcggctgattcgcacatgcccccactgcccgtggatgtcatctgctgttccctccgaaaggactttctt

SEQ ID NO: 72787 - DNA, 339 bp, Zea mays
  Clone ID: MRT4577_166380C.1
gttggctactcctacccctccggttcggattctgattcatgaggatctccgttactgggttaggtgggtcttcaaatcgagatagcaccgtccgatgttgagtaccgatgcttcgtcatctgcctcgcctgttccacggactaccactccatccacaactccttcagcacctactgcgaggtcctcgaatccaagatcatcctcgatcgggagactcataagtcccacggcttcggcttcgacaccttctccacggacgatgcgattctcaacgccatcgaaggcatgaaccgcaaggatcttgactgcctcaacatcaccgtcaacgaagcccaatcc

SEQ ID NO: 72788 - DNA, 169 bp, Zea mays
  Clone ID: MRT4577_166381C.1
ggctggggcggcgggcttaacgtgcttctggagcaaggcttgcaccggccggccgtgacagcgctgtacgccacggacacccccggggaagtgccggttgtgtggtgccacaaacccgcgccccgggttcacagggcccacgtggagggcccggtgcgcggggcgcggg

SEQ ID NO: 72789 - DNA, 384 bp, Zea mays
  Clone ID: MRT4577_166382C.1
cgggccgacccacgcgtacgcacacgcgttcgaccacgcgtccgtccactcttccggcaaccggtccaacactttgacgcgcagcttcagcaatggctgcctccaccatggcgatctcctccactgcgatggccggcacccccatcaaggtgggttccttcggcgagggccgcatcaccatgcgcatgaccgtgtgcaagcccaaggtcgctgcgtccggcagcccctggtactgtccctaccgcgtcaagtacctgtgccccttctacggctagccccctagctacctgaccggcgagttccccggcgactactgctgggacaccgtcaggctgtccgcctaccccgagacattcgtcaagaacctgcagctgtaggtgatcc

SEQ ID NO: 72790 - DNA, 308 bp, Zea mays
  Clone ID: MRT4577_166383C.1
gaagagtttttttttttttttttttttttttttttttttaaaaaagagacaaacaacgaatttaacaacccatcaacccagggtaaacaaaaaagagaaaaggggcagcatctgcagggaggaacggttgcacaagtacatggagctggggagcgacaccaggcacgcgttctgattttttcagccgagcaatctaatcaaaaaattaaagggactggatacaccagttctaccccagcgggagcagccgcctctaaacaaagaaggagggaatcacattttaagacacgcgcacaccatgtcccccc

SEQ ID NO: 72791 - DNA, 280 bp, Zea mays
  unsure (1)..(280): unsure at all n locations
  Clone ID: MRT4577_166384C.1
cttggtttgtttttttttttttttaatttttttnttttanaanggnagggtgggggcaaatggaacattgattaacttgggacccaaaatattgtttttttttaatcgggagaaaaacaccgcgatgccgggaacaccccatcaaactccaaattttttttcccatggggttacacttcacattcccttaacaacattgttacctttttggccaaaaactttgctatttcaacctttttctgggcattctttccgccggcggatttggtctccccctccg

SEQ ID NO: 72792 - DNA, 1325 bp, Zea mays
  Clone ID: MRT4577_166385C.1
cattgggtacctcgaggccggccgggaaggagcagctgggaaacggagcgccacaagcccacaactctcgcgcaggcttctctcccatctccgcccttcccgaagcagcacggtgcaggccgcggacccgcggtttctccacagaatcccgctccacgcacgtcgcccccgtcgccggcgaggcggctgtgctgctgcgtactcccctggttccaactctgaaccggccaccctctcctgctccgcgacctcgagtaactttttgagtaccagtgatgcaaagggacacaagctctagcgatgtttctgcttctcatgtaggacgtgtaagacgtcgcaaacatccaactgaggctaccacagatgggaatagagctaatggacagccattgcttgtcaatgatcagaacaaatataaatcaatgcttacccgtacgtattctacagtatggatgattggaggctttgcctttattatttatatgggtcatctatatatctgggctatggtggttgtgattcaaatatacatggcaagagaacttttcaatttactcagaaaatccagtgaagagaaacaactgccagggttcagggtcctgaattggcacttctttttcacggcaatgctgtacacttatgggcgctttcttagtcgtcagctggtgaatacagtgacttcagatcacttgctttataaggtcgtcagtggcctaattaagtatcagatgtttatctgctatttcctttatattgcagggtttgtatggtttattttgactctcaagaaaaagacatacaagtatcagttcaaacagtatgcctggacacacatgatacttttaacagtttttgcacagtctgctttcactgtggcaaacatatttgaagggatattctggtttcttttgcctgcttcacttattgtgatcaacgatatttttgcttatttatttgggttctttcttgggagaacaccattaatcaagttgtctccaaagaaaacttgggaaggttttattggtgcatcagtgacaactatcatctctgcgtttctgttagcaaatgtaatgggccattcgcaatggttgacatgcccaagaaaggatctgttgactgggtggctttattgtgatcctggtccaatgtttaagccagagcattactcattgggagagtgggtgccgcattggaatgacaagagaattaaggccatcccttgcgattccaaagacctgggtgctcaactctctccaccactccaggaaacaccatcatcatattggggggctaatgctgaaggttcacttgaaaaagcagcttga

SEQ ID NO: 72793 - DNA, 417 bp, Zea mays
  Clone ID: MRT4577_166386C.1
gtaagctcggaattcggctcgagatcggcaccggtgtatttattgcaacctgtgcaaatcgagtgcgggggggatgcatgaatcagcaggggtggaactggaacggtgaacattcaccacgccccgtacagtgcaaaagatatccaaagcacggcccagggtgctttaacacggagctggacaacggctcataagcatggagtcctacttggcatgggagaggacctttgtaaatctaccgactacggtgaacttcaatcagagctggacaagatgcttgacttctagggtgaattggtatctcgctatcaaaactgggagatggtctataccgaccaccagggcgatatgatgctcgagggagacgacccgcgggaagatgactgcaacataactcgcaagagctacatctacacg

SEQ ID NO: 72794 - DNA, 2046 bp, Zea mays
  Clone ID: MRT4577_166387C.1
tgggaccctcgaggccggccgggccgagaccttttcttaactaaggtcagtagagtcgacaaagcacttcccctgccccaggaaggaagcaatacgcaatttcctgggttgcgggagactacacttgaggaaaaactactcacctgcgtgggcagccctaaactgcaaagtctctctcacaccattccccttccgtacactggccgggccgcacttagcctgcctttgcacgtctgtgtttaaaaacatagcaccttgctggtgggtaactttggagtaccagtgatgcaaagggacactagctctagcgatgtttctgcttctcatgtagggcgtgtaagacgtcgcaaacatccatctgaggcttccacagatgggaatagagctaatggacaaccgttgcttgtcaatgatcagaacaagtataaatcaatgcttatccgtacatattctacagtatggatgattggaggctttgcctttattatttatgtgggtcatctatatatctgggctatggtggttgtgattcaaatatacatggcaagagaacttttcaacctactcagaaaatccagtgaagagaaacaacttcctgggttcaggctactgaattggcacttctttttcacggcaatgctgtacacttatgggcgctttcttagtcggcagcttgtgaatacagtaacttcagatcacttgctttataaggtcgttagtggcctaataaagtatcagatgtttatctgttattttctttatattgcaggttttgtatggtttattttgactctcaagaaaaagacatacaagtaccagttcaaacagtatgcctggacgcacatgatacttctaacggtttttgcacagtctgctttcactgtggcaaacatatttgaagggatattctggtttcttttgcctgcttcacttattgtgatcaacgatatatttgcttatttatttgggttctttcttgggagaacaccattaatcaagttgtccccaaagaaaacatgggaaggttttattggtgcatccgtgacaactatcatctctgcatttctgttagcaaatgtaatgggccgtttccaatggttgacatgcccaagaaaggatctgtcaactgggtggctttattgtgatcctggtccaatgtttaagccagagcattactcattgggagagtcggtgccacattggttcccatggaaagatctagccattatgcctgtgcagtggcatgctttagccctaggtttatttgcgtcaataatagcaccattcggaggattttttgcgagtggcttcaagagggctttcaaaataaaggattttggtgacagcatacctgggcatggtggaattactgatagaatggattgccaaatggttatggcagtgtttgcatacatataccaccagtcattcattgcacctcagaacttctctgttgagataatcttggatcagattctaagaaacctgacctatgaggagcaaaaatacctatatgaacaacttggggaaatgtttcatgagaggcaattagggcaaagctgagagttagcgtgcttatgaaatgcatgataatttcttgtgtatttaagcattctgctcattatgtagctatagtccttgtccaaacctttgtatagaatggtagaatggagagaatgattgggttttaggtgctttattcactcttcactgacgctgcttaattcactccccttgtcatgatttctgcactctttgtagaaggggacctgggaagttttattgtttcttatcacttcctggtgctgtcctcagatcatatattcgaggattcacaaaatataagatgaagcagcagtgctagttcttatttggttatactctatccgttccaaaatataagtcattacaagatttttagagagtcaaagtgtttccaagtttgatcaaatttatacaatgaagtaataacatttacaatatcaaatgtatactattagatcctccattaaatatattttcatattatagcacaaaaaacaaaaa

SEQ ID NO: 72795 - DNA, 803 bp, Zea mays
  unsure (1)..(803): unsure at all n locations
  Clone ID: MRT4577_166388C.1
tggatttgattcggtaagggaggaactcagcctccgccatttcttcatctccaatctccatccttctatcttccgctccctcccctgcttgcgctcgtcgcgcaggcgacctcggcggcgctcgggctcggcctctcagcgacggcgtcagcggcttcccctcctgcctctcgccagtcccctcggctctgttcctctgcgcaccggccggtgaccctgccacaggtacccaagtatggcggcaagacgcaatgttcggtactcgcctcttccttcagaggacggggatgacagcaattttattaaagaagatgttgacctccgatacacttacactccgaaatcgtacagaaggatcccatggaagtcaattgccctggcattgttcctcctcctcctaggaacttcacttctctttctttcttacttcatattcacaggtcacatggagggtgatagttctcaggcatatggtctcttgttcctgggtttcctttcctttcttcctggtttctacgagactcgagttgcttactattcatggcggggagcgccagggtacacttttgcatccataccagattattagcctttcagtttgcgctgctgatgcagtaaggataatgaacaagcaaacaacttcaaactttccttgggaaccaattttagtagtaaaagagttaagcatgcatatgtagtggctcaaatgattgttgtgttaataggatgttattgctttgtcggtcagtaaaagaataattccttgtgatattgtgtaagtgcaaaggttgattttgcganac

SEQ ID NO: 72796 - DNA, 101 bp, Zea mays
  Clone ID: MRT4577_166389C.1
cacaattcacaaacagcaaaccgaccgactccacacatggcaatgcatacccgaatcttcttcgtcgtcgttgttgtgaagagacatactagtggaggagt

SEQ ID NO: 72797 - DNA, 1606 bp, Zea mays
  Clone ID: MRT4577_16638C.1
ccggccgggatccgggcatccggcccaggcatgaacggtcggttaaaccggccaatcctcctctcaagcctcgacgcagcacggcgcgccggcgcgggacgacggcatgacgccgccgtccatcttccaccaccatcgctgcctcgtctccctcccctccgcttccccgacctggacctcgtcccgtcgtctcatccatcaactcgcaaaacccacagtcctgtccctacatctgcgtccagtcttatcctcttccttcgcggttgccgccgtcggcgacgacgaggatgtcgtagtcggggattgcctcgtgttcgacgacgacgctttcgaggaaccggacctggacctcccctcgtccccgtggccgtcggctagcgcctcacgccacggccggaggtcggaggcaggcgagagcgacagcctggtgccggagaggtggaggcatgccgaggaggagatcaacctgacgaagaaggataagcgccgcatcgcgcacgggctgcggttcgggagccgcctcgagcggcgggcgcccccagctgttgctgctcctgatgaattccgcgcgtaccgcaaggggatgctgagcgctgagcgtgagcatgtttctcatgtataccgggggccgctggagaggactcctccgccggaagtgaaggaacatccaccgccggagccggagcctgggacgcgtgtggccccgaggaatccgaggatgggggatgggcgttggcacccttgacgacattgatgagtttttcagaagtagggaatatgttcaggatgagatggaggacagcaagagtcctaagggccgtcagaagttgttctcaaatgaggagaagattcttctgaacaagcgagtgcctgatctggaaacagctacttctagtaaatggcttccacttcacacccttgctgcatctggtgatttctatctattgaatagccttttaaaacataacgtggacataaatgcgcttgataaggatggcttaccagcgatccacaaagcaattctttcaaagaaggctgctattatcaattatcttttaaggaactcagcaaatccattcatccaagataaagatggtgcgactctaatgcattatgcggtccaaacagcatgtagtcagaccataaagacacttttactgtacaatgttgacatcaaccgtccagatgattatggatggacacctttgcatcttgcggtacaaacacagaggactgacattgtgaagctgcttttaataaagggcgctgatagaactattagaacccaagatggattgaccccgttggagttgtgcctccggttgggtcatgatgtgcggacgtatgagcttatcaaactacttaaaagtttccgaggacaaaagcagcatgatttagtttagcaactggagggtgtgtgaccctctttgaaccagtgaggttaaccagtgtggtggccttctgggaggccagttttcaatgtaccattaatgattcatggaatcgctcctggtttgagataggtacatgccaacttcattgtatttgtatcatttatatatttcattggcctaaaccattggttgcaggaaatagtttaccccta

SEQ ID NO: 72798 - DNA, 956 bp, Zea mays
  Clone ID: MRT4577_166390C.1
gcacgaggcgtttctttaccctaacctttccactgctccagcgaaggcactcagcctccgccatttcttcatctccaatctccatccttccatcttccgctccctcccctgcttgcgctcggcacgcaggcgacctcggcggcgctcgggctcggcctctcagcgacggcgtcagcagattcccctcctgcctctcgccagtcccctcgcctctggtcctctgcgaaccggccggtgactctgcgaaactattccagcacaggtacccaagtatggcggcaagacgcaatgttcggtactcgcctcttccttcagaggacggggatgacagcaattttattaaagaagatgttgacctccgatacacttacactccgaaatcgtacagaaggatcccatggaagtcaattgccctggcattgttcctcctcctcctaggaacttcacttctctttctttcttacttcatattcacaggtcacatggagggtgatagttctcaggcatatggtctcttgttcctgggtttcctttcctttcttcctggtttctacgagactcgagttgcttactattcatggcggggagcaccagggtacacttttgcatccataccagattattagcctttcagtttgcgctgctgatgcagtaaggataatgaacaagcaaacaacttcaaactttccttgggaaccaattttagtgataaaagagttaagcatgcatatgtagtggctcaaatgattgttgtgtttataggatgttattgcttcgtcggtcagtaaaagaataattccttgtgatattgtgtaagagcaaaggttgattttgcaatttcttggtatttccttgtcaaatataacagaaattagtgccaccagtatgtgtttgtgtgatgatatctgttgatgaagatagactatgtactccatttggggctttggagtatgtat

SEQ ID NO: 72799 - DNA, 438 bp, Zea mays
  unsure (1)..(438): unsure at all n locations
  Clone ID: MRT4577_166391C.1
ggggnnntttnntcgaatgtatacctcgaagccggacgggtcaaattttcccactccacccgatttataaccgctagcgcggaaaacctctcagctcttgagtcgtacagtggacctgagtcccgtgcccgatgacaattccgccgaagacctggtcgattgggcacgctgtctctagcgagcgctggcttcgtcttctcgccgggccgcgcacacttcgcccgtcgccagcccggtattgagctgccacgatctgccgagagacgatgtcgcgacgaaacccatgtgtgtccaggaactcgcgccttgtcgtcgatgggagtgacagtcgacggctgcatgtgaggaccaggtcatgtgccacatcaccaaagctgaactaagaacggatgatattctgacgtgcaaaatgaactaggacgaaggactccaagcact

SEQ ID NO: 72800 - DNA, 309 bp, Zea mays
  Clone ID: MRT4577_166392C.1
gtttcacgtttgacctccggcgcgcggggcgcgccctagtcacaaacttaacgctgaaccccctacttcaaaggtgcctcagccccctgcagagacccatgggaagggtccattatagggaagggaagacaaagcctgccagcgatgggcatcttcaacgtcgccgtaaaatgctagatcgagcccaagactggccggtgtctcaagaagaggaagcagttccagacggtgcgaaataatagatcgctgaacagcaaagggagcaagcgcaaggtgaattcggaagtgttgggaatcttgggcgggagc

SEQ ID NO: 72801 - DNA, 547 bp, Zea mays
  Clone ID: MRT4577_166393C.1
tggccggccagggaataaagcatcgatcacgacaagatggcgtgcacaaacaatgcgatgagagccttgttcctcctgggcctcttctgcctcgtcctcgtcgcggccgcttttcacgcccccccccccgggcccgccctgtcctccccgacgtccattactggagtacaaaggagtacccgttgaaggcgagcggggtgcagatcgtgcccgatccggtcgagcccggcaagcccgccactttcaagatctccgcttctactgataaaaccatcgagaaggggaagctgctgatcgacgtcaagtacttcttcttctacgtgcactcgcagatccgtgacatctgcggagagatctcctgtccggcccccgccgcccttcgcgctgtcccccgcgcagaccgttgccacgcgtcactcccctcgcgcctccccccccccctcacccgaagatggtccggcgcctccccccgcggccgctcccccctgccctcttccgccccgccttccctctttgcgctcctcccccccctcccgcctgtcacccc

SEQ ID NO: 72802 - DNA, 230 bp, Zea mays
  Clone ID: MRT4577_166394C.1
attcggctcgaggtgcgacgacgatgacgcgttcgcgcacttcgacgccctcgccaccgacgagccccgtgaggttgccaagatcggcacgctcgtgccgccgctgccggagcgcggcgggctgttcgccgaccaggccacgctccttcccgcgcgccgcggcctcttcatcggcgtcaccgcgcaccacgccgtctgcgacggctcgggctccacgcatttactgcaca

SEQ ID NO: 72803 - DNA, 350 bp, Zea mays
  Clone ID: MRT4577_166395C.1
tgcaatgatatataagggggtgaagcgtgtacacgtacggccctatcatatatatcgatagcaagacagatcattaccttgcaccaccacaacacagtgctcacataatcatattcattcactcactctcttacatcactgtactgaagataccatggccaaatacaccgcaatgattgtagccgccctgtccctggaggtggcgatggcaacaactagcacagagcgtggcagggcaggcagcagcatgcgatcccaagccgttggtggtgagcgatccggcgttcatatgactgagcgaaacacggggccacacgctgatgcacacatcagtgcgcaggacgcatgct

SEQ ID NO: 72804 - DNA, 409 bp, Zea mays
  unsure (1)..(409): unsure at all n locations
  Clone ID: MRT4577_166396C.1
aattcggcacgaggcaccaccgctccacgcacctccaccacctgaatataatacctggcggtgggcggcgaggtgagcaaggggggagaagggatttataaatataagaggagatgcgaagctaggcgatgaggaggagggagcacccagaggcaggggagggggaataattttgtaggggctcgagggatctccctccgtctggccgtagcagcacggtgaggcggcgatccgagggcgagcggtggcgggcgagcgtccacgccggcgagatttgtgtctgtgacatgccatgaacaactccgccaccagttgttaactaaccctcttttatgcttcntgtctccattgccaagagcagaaatggttttccaaatgaggtcgtcgtcgtctgatatggagtcgtgcg

SEQ ID NO: 72805 - DNA, 403 bp, Zea mays
  Clone ID: MRT4577_166397C.1
acccacgcgtccgctggctcgtggccggcgctatttacggttctccgccacaagttcaatgtgcgggccatgcggatttgcaaggacgaccaggcgcaggtcgtgcgcggcacctacaagggccgtgagggcaaagtggtgcaagtgtaccgccgtcgctgagtcatccacgttgagcggatcacccgcgagaaggtgaacggctccaccgtgaacgtgggcattcacccttccaaggtcatggctacaaagctgaagcttgacaaggaccgcaaggcgctccttgaccgcaaggcccggtgccgtgccgtcgacaaggctaaggtcaagtttactgccgactacgtacgcgacgctgctggtggcgccgccgtcactggcgcgtattttcatgagatcgact

SEQ ID NO: 72806 - DNA, 902 bp, Zea mays
  Clone ID: MRT4577_166398C.1
ggcctccatcgttctcgtctagtacaggccgggcgcacgcagaggcagagcagaggagtagcgaaacatcctgacggatcagcaggagagaaaagtcggcaacgtgtatcgttgtacgtacgcgtacgtacgtacatacccgatcgaagaggaagaggaagaggcttgctctgcatccagcatatattccatggcgccggcagacatggcggagccggccatggcgacgatgagcagggtggaggacgcggggcggatgtcgtccatagagtgggagcccaagacgctgacactcgcccagatcaagttcgcaagggaggcggcgctgtacgtggtgagcacccagacggagcaggaggcgatcaggatcttcaccgagggtctcaagcccgtgcggatcatggccgtcagcaagtccaccagctccatcgactcctcgtcgtcggacgacgacgtcgagctcggcggctgctgctgctcctccaccaccaaaggctgtcgcggtggcgggagcaaaggcggccggcgccgtggccgacggcgtggctccatggacgacagggacgtcgctacaacgccattctagctagctagctactttgttcctttatttacacgtaaggtcgtcgtagctgtgtgcgtactactagtttacatatatagctagtagagtctactgcacgtctgtctttcctttttttttcttttccccgatcccgcctgttttaattacttccctttggctggcctggttttgtttaaaatagccggcgagtttggaatagcgcggcgattttttgaggcataactaggctctcttgattagtacttagcttcgctccttgcttggacacaagagatgtaaataccagaaagctgctagcactgtacattactgcctt

SEQ ID NO: 72807 - DNA, 220 bp, Zea mays
  Clone ID: MRT4577_166399C.1
tttttatggccgaacccaagcggactataacagggggaaggagaaaacgctccaccgcgtgctaaggccccgcggcggaaacattgagccctcgctgcaagcgctcggtcgcaagaacaaccaggacaagatgatccgccgcaaaagctatgcacgcctgcaccctagggctgccaacagccgcaagaagaagagcgggcacagcaacccagctgaaggg

SEQ ID NO: 72808 - DNA, 185 bp, Zea mays
  Clone ID: MRT4577_16639C.1
cggacgcgtgcaaagcgatggttgtatatggtggctcgacctacccagaacggagccggatcttaacctggcgctagcatcatccaatgacgcacacgtcgaatctgtcgacagacataaagcgcgctaaccggacctgcacataccatccgcgtggtctaccagccatgaatgccaataacggc

SEQ ID NO: 72809 - DNA, 267 bp, Zea mays
  Clone ID: MRT4577_1663C.1
tagatggaatctgctcatcattacatgtgattgttcttccatgtgttctatttgggcaggaaatatttctaatttgatgctcactcttgtggcacattgtttttgtggggtcttgtgaaacatgaaccgtgctttgaagctccatcctgtgttgtgcaagtatgctgctactgccgattgtgctctactgctctacgatccttgatgacattggtttcacttgttttgtttcatataagctggatggttgtttgcacatgcttttac

SEQ ID NO: 72810 - DNA, 508 bp, Zea mays
  Clone ID: MRT4577_166400C.1
ggcaaaaggggggccccaaaaaccagcccaagggccccccaggaaacaagggggtgggccccggccctaaactacaaaacgaagggcccaagctaacgggggcccccaattttgcatggggccccaaaatgggatgaccgggccaaaacaggaggcccccccccagtcttgcaaaaaccaagcgggaggcccgcagctcaccggaaaaaaaccctgggcagcttaaaaacttcggcccctgaaggggcaaacaaacaggggcttcacgggttcacgttaaaaaaacatggcagggaaccccgccaggccaaaaaaaggggaccggcaccccccttgaaaaaaaacaaggcccgctatctcttccccattcttggaacagagtcttatttcggccggaacaaaaggggggaaaagtatccccccccaaagcgggggaaaaggaccgcaatcaactttccagcattttcagggcttttgccaacattgaaagcaacaatcgctgcacccc

SEQ ID NO: 72811 - DNA, 384 bp, Zea mays
  unsure (1)..(384): unsure at all n locations
  Clone ID: MRT4577_166401C.1
taacgtccctcttgccacccaaaaaaaggaaaaaggagggggggcagaataaagngaccacgccgtggaatggcccagcacagcaaaagccaaggccaaagctaaacaggcacaagaatctctgaaggttggccaatcaatcatacagaaatttagggcaagagtcctgagcgagggccccgctcttcgagccgcagccccaatgagcagggccgattgggcagcaaaactcaagcactggaaggacgaatccgcctgcacaccgcagcaacaccggctagggacaaaaccaccccgggcagatgacaagaacccatcaaaactgccggagaaaccagctggggggaagaagcctccaagaagagagaggcaacagccgacacg

SEQ ID NO: 72812 - DNA, 328 bp, Zea mays
  Clone ID: MRT4577_166402C.1
cccacgcgtccgcccacgcgtccgttctagatcggagcggcgcccttttttttttttttgtgaaaaaaagagattatgtgactaacagtttgctgtacaattatacaacatgaactctcttgagtcacgagtttggtggtggtttggatatgccctctgatccaagaaaagaactcctgagccctcacctggaccttgaaaggggggctaggggggcaaggagaaaccgaaaaaagccgaaaaaggttgcaataagttgctcagcagctgcatgttaccttcggttcagcattcacagtggaaggcagagctagggtctagatcgcga

SEQ ID NO: 72813 - DNA, 270 bp, Zea mays
  Clone ID: MRT4577_166403C.1
gcgatcttaacaaggggttatgcatttagagcgttttttctttttttcataccagatccacctaccccccacaccacatatatacgtagattttgcgcataccagaagtggtgcactagatttaaaaatactgaaaaataacgcaagcaaacagaggaagaaaaaaaccgtaaaaaagaaggcacctggctgataggcgctaaaagaaaaaacgtatgccttcagtctggaatagctactgacttatatagaataagcccataaccaaat

SEQ ID NO: 72814 - DNA, 323 bp, Zea mays
  unsure (1)..(323): unsure at all n locations
  Clone ID: MRT4577_166404C.1
cggccggagcacgctggggtngatcgctgcgcccaaacgcgctgcgtgtcatcaacgagccaccagctgcagctctcgcctatggacttgcacaagaaggctacagacgccggcgagaagaacgacctcatttttgatcttggaggggggacctttgatgtctgcctcctcaccattgcagaaggaatatttgaggccacggccacagttggggacacccatccttggnggagaggacttggacaccaggacgggcaaccacctcgcccaggaggccaagaggaagaacaggaccgatatcaatgccccccccagggctctcc

SEQ ID NO: 72815 - DNA, 203 bp, Zea mays
  Clone ID: MRT4577_166405C.1
ttacccaccctagacaactggatgcttgtcatactagctcgattcagctcaggagatgacgcaattggcactgtaagtatgttcagtttaaaaacaatgcctaataaggtgacagtcatcgacttcttatccggttgtcgtgaaggcaggctccatcgatatgtacaacatggcaatgtcagttcggtacaagtccgatatgt

SEQ ID NO: 72816 - DNA, 853 bp, Zea mays
  Clone ID: MRT4577_166406C.1
cattgggtacctcgaggccggcctgtgcaggtcctggcgcagcggcagcctggcctggtcctccaccggcggcgccgcaccctgctgcttgtcgtagtccaggctctcgtcgtcaaagatgtcccaccacttggccacgagcgccctgacgtcctcccgctccatgttgggctccttccccgtgtaccgccacggcttggccccggccgcgcagtagtgcaccaccttgacctcgtggagcgccggcgccaccctgtccgggtgcctccacagcatggcgagcaccaggttgtaggtcggcgggagcggcgcgtacgcgtcgcggaagaagaggttgaggaagtcctgctccgcgaacggcgtcggcggcgtcgccgccagcgcgtccaggaggtccctcgcggtgcgcaggctgggctcgtgcacgaattgaacatgccggcgttgaagtagagcggcggcggctgcggcggcaggtccagctcctgctctggccacgccgccacccggtccgggctctgctggcagtagccgatcttgtactgcggcgtgtggctccacgtcttctcgcagaagcagtccatcacggcgtggaacttgcccttgtcgaggtcgaacaggtggtcgatgttctcgtagacctgcatgtccgcgtccaggtacaccatgcgctcgtactccacgaactgcatgcagacatatacatgcacgtgatcaattgcgacgagacgacgtaccacgacacaaatgaaataatggatcggaacaacggaaggaacgccgacgtgcctcccacatccggagcttggagtagttgatgacgtagtagggcatggcgaactgcgtctggctc

SEQ ID NO: 72817 - DNA, 233 bp, Zea mays
  Clone ID: MRT4577_166407C.1
gtgaagcgcggggaggaatagactcacaagggggtgtttttgagaaagacgccatggccaccacggggctaggcttggtgggtacagtggagctgaacgcttactgtgtcagtaactcatctgtcctgaggctgaatattggtaaccttacaaggctgtctgcgataacatgggttcccctatacgtgcacaccgacgataccctcaatggtggggacactggacggattggc

SEQ ID NO: 72818 - DNA, 395 bp, Zea mays
  Clone ID: MRT4577_166408C.1
aatattccggccgacgcgctcactagtccatgaccgccctattttttatcatttgtatgcaaaagataacctacacattggggggcaaagagtattttcgggaccaattgactgaaccgtcagtaacaatgacacaaagtgctagcgcgagcgctgtacggcctggaggcgcgaagaagaagaagaagaatcgtctgacgagcaagaggaggtctgtcagggataccacaccatctcgacgcggttgacaccggacacagtgttacgtggagcctcgggaccacccgttcgtcgcggtggcgttcctgcacagcaacctccagatcgcgtgcttggaggtacaccccgacaggaacgagaaggtgtttctgtccagcgcctacaacgatctgcat

SEQ ID NO: 72819 - DNA, 195 bp, Zea mays
  Clone ID: MRT4577_166409C.1
gggttctactccgctcacgctccagctttctctggcccgatcgatgctccatgccctcgggaagcttgttatctttcttcgtgctccttgggctacccaacccatcgacgagccctatctcgcagtacctcctccatattcgtccagctctctcgactctgaggactgacagagaaagagaggatgagatgggac

SEQ ID NO: 72820 - DNA, 159 bp, Zea mays
  Clone ID: MRT4577_16640C.1
ttgattttcgtccggtgccatttgaggtattggatggtatctatatcaatcacgccgtgctacctgtgccaaacatgcaataaaatgacaggcacctagagaatcagcgattacggggagaatcacctgatgtatgtaacgacgactaatttcagggtc

SEQ ID NO: 72821 - DNA, 554 bp, Zea mays
  Clone ID: MRT4577_166410C.1
taccctccgggttggccgggacaagccgagcgcgaacgtctcatccggttggatcgagcggccagcccagccgtcggtgtgccgtgtccgtctctccgcctcgggcgttggccgacaggggatggcccgcctgcgcatccatgttggtgggctggctggctggctgggcgcgtggtgggtcgaatcctgcttggccgcctccggttcgatccgccggtcgggctccggtgctccgcccgccaccgtggtcgtcgtcatctgcaaccaccgtcactgcgcgcgacgtctccccccgcggaggcgacggcgacgcgacgcgaggagagcaacgcgttgaattcgaaggccttgtataaacaaatctttcaggctttgcgcgcgttcactggtatgtatatttgtgcatcggttggaagagcgatcggttctctgctgggcttggagacgtgggcgcgtgaacctggtgcgcgttccctccgagacgccctgtgatttcggcgttccgtacgtacagacccggcgcgtcgggaatgtctgtgtgtgttcgacgtgtc

SEQ ID NO: 72822 - DNA, 232 bp, Zea mays
  Clone ID: MRT4577_166411C.1
aaaaaaaataataaaaaaaaaaaaaaaaaaattaataaaaaaaaaaaaaaaaaaaataagggggggccgatttggtgggggcgctcttttttacaacctaaatttcccttcctttccattctatagtgtcactttaatttaattcaatctcaattcatttccctggctcttaacttcaaaatcccttgaatgaccaaacttaatcccattccaactaattcgcctttcatca

SEQ ID NO: 72823 - DNA, 283 bp, Zea mays
  Clone ID: MRT4577_166412C.1
ccgggtcgaccagcgtcgttgtccactcctatacatagccctcgccgggtggctctgtccccgctctcgtgctgtggttcttctggctccgcgtcccccgagaccagatctgctggcctggggccccctccgtccggcgtgtccgtgcttgcgcttccggacaaggccggcgcgcggctgctctcgtgctcgttgctgctcagcgtctggacttctgtgctgctctcctgttcgtcgtgcctgcccttgcgcggccccgggctttctttggcccggggccttc

SEQ ID NO: 72824 - DNA, 256 bp, Zea mays
  unsure (1)..(256): unsure at all n locations
  Clone ID: MRT4577_166413C.1
attccggttggaccaacccttccgccacacccttccggccttgccggcttttccttctaaaaccgcggcccgttcccccccgccggggtaaggccccgatttgagggggccattnccggnaaaaacggcctaaagttaagggagcaggtgaagaacttaagggccccactcaaggttgccggggcttccgttgttttgttcgggaccaacttcaacaggttctctaagaacctaaacccccgttccgtaggccttt

SEQ ID NO: 72825 - DNA, 264 bp, Zea mays
  unsure (1)..(264): unsure at all n locations
  Clone ID: MRT4577_166414C.1
tttgttttttttttttttttttttttttttatgttttttttaaatatgggttttttaaaaaaaccatncatttttattgnttaaanacaattccatcttctctaatatantctgacagcaacaagaaaccctattagtggccccccacaaaacaaaacacaccgcattgattaaacttggcatggtcctacactaacaccacactaacgagacagattaaacctaacccatcgaaggaaggtaattaattttcccaacaacaac

SEQ ID NO: 72826 - DNA, 257 bp, Zea mays
  Clone ID: MRT4577_166415C.1
atcacatgagacccagagaatttgccatttggggtgcttggaaacacgatcggtgtttatggaggcaacagccgacctgtgtctgttaataaggctatagcatggtgtgcttcaaagggaaacattccctactttgatacctcggatatagagggcttcaatgccgtggatccgtttaagggtctagcgaggaatgctgtacaaaatgaggcagacgaagatatgtctcttcctgatacgaatgaagttggtggcgc

SEQ ID NO: 72827 - DNA, 494 bp, Zea mays
  Clone ID: MRT4577_166416C.1
tggactgggggtagggagctcggaattcggctcgagccttggtcgcattgagtatctgctttctgataagactggcacattaacacagaatgagatggaactgaagaagattcatgttggaaccgtttcgtatgccaatgaagccatggaggaagttgcgtcatatatcaaacaaggcttcgctatagctgacagcactcgtcagtctatgattacgccatcaacagttttcggtgctcaagttggtagcggtgctgccaccagaacgaggagagaaattggtactcgcgtaaaggatttgttgttagcattggctttgtgtcacaatgtcactccaaccacagacgaggaagacggccgcagagttatcaactatcaggcttcatctcctgatgagattgctattgtcaggtatactgaggaggtcggacttcgcgtggcttaccgtgaccgaaaaaccatcttgctttggtcaacaactacaaatcaagttg

SEQ ID NO: 72828 - DNA, 539 bp, Zea mays
  unsure (1)..(539): unsure at all n locations
  Clone ID: MRT4577_166417C.1
ggggttggttgtttttttttttttttttttttttttttttttttttttttttttttttttttttatctttggnaaacagcaaccttttttatttgacggccaaaaacaaagcttaaaaacgaaccccaataaaaagaaaacagcgcgatattgggggggggggccgccgcccccaccttggggggggggaggggtccaccattaacgcggaaccaaaccggcggcaaaaaccccaccagggcgagggcaaggagggggggcgcggacaccccggccgggggcacgggggggttgggggacctggacgggccccgggacgaggacccccccccccccgtgtcgccccccggggacgggccccccgccttgggcccgagggcgggcgaaggggcctctgccccccggggggccctgccgggaaggaccaacttgtttttggccactatgggggccccctggaacgcgtccttgtcgggggcgccccccggggaggacccccccccctgcccacctggttcacgggcttcatccccttgggc

SEQ ID NO: 72829 - DNA, 256 bp, Zea mays
  Clone ID: MRT4577_166418C.1
cgtcaccatgacttttaagcgcaggaatggaggtcgcaacaaacacggtcggggccacgtcaagttcattcgatgctccaactgcggcaaatgctgtcctaaggacaaggctatcaagaggtttctggtgaggaacattgttgaacaggctgcagtcagagatgttcaggaggcttgtgtctatgaacaatacacgcttccgaagctttatgtgaagatgcagtattgctgttcctgtgctatccactctcaatgt

SEQ ID NO: 72830 - DNA, 670 bp, Zea mays
  Clone ID: MRT4577_166419C.1
gagagatctacgcgtgggacgacctcaacgacctcctccaccagttcctctccctcaactcgccgcgccaccacccgctcatcctccacgccttcgccgacctctggacccgcaacggcctcttctgcccgccgtctccctgccagttctaggcatgctcgccgtccaataacacggccggcggcgccacgccatgcacgtacccttggatactgtattaaccactagctttagatttagctactaccacaccaccaccagtccacaaaaaaaagtcatttctaccattaacgagaaggcaaaagcagctcacgcgagaccgagatcgacgctattatcggaggtccccggccggcgagctgcatcttgcatagttgcatgaatttagtgccaaaggtcttgagcttaattaaggtgagcgcaaagaaggctatgcaagatcatttgctgctgctgctgtaaccgccatgccgttgtaatgtaacgtactaacgtgccaatgatgtgtgcgtgtgtggcgccccaacacccgggagtgcaatgatacgctgttgtgccctcccgcgagcgtgatcctactgttgtactggcgtgcatcgtgtgtactgaacactggtgcttttgttagtatacgctcgtaacgctgctgctgctgctgctgcttttgttg

SEQ ID NO: 72831 - DNA, 356 bp, Zea mays
  Clone ID: MRT4577_16641C.1
ttcactcgtaggtgatatcacatcctatgtggacagatagcctgttgtggctcatcaggtcatgctttgtgcccgatctcctttctgtcaattgaagcacaggacagactgttaagacaggaaggaagtgagagtttgtaaccaaaagttggattgtggcaggtcacacagactcatccatttattgtattctaataaacttcatggagactgtcgacgacagcggaaaattatgggggaagcatgcaaagtttgaaagtgcgaggacctgcaaaaagttggggataaagaagttgtgcatcagtaggcctcggagtacaagtcacgaacgacaactgcatatggacaggtaacac

SEQ ID NO: 72832 - DNA, 706 bp, Zea mays
  unsure (1)..(706): unsure at all n locations
  Clone ID: MRT4577_166420C.1
aaacacaccacttcctgaataaatctgtaacgttaataagagaaagaaggggcaggtcataatactactacaagggcacggaaaccgctggtgccacaacaaaccagcgaggccaggccgcctggaagcattttttttacacaaggagcacaggcacgggactacgggagcttccggacgcggagaatcattggggagatgacgagctaccaccatactgccatgggtcgaactcgaccgaagtgacgtctgtctcgtcgtcgtcatcggtggtgttggagctgtctatggcagcccggtgctccgtgtatctgccgctgtactcgcaaatttcgaggtcaccccacggcgtggaggcgaccgcatccgtcacgttgaaccatcgcggagtgaactgctcgcccttggcctctcgagtccttttctcggctctctgctgctcctccagcctgctcttttctgagccagacttggacatgtcgcccttctcgagggcatatctatcgggcctcagccgggaatcagatgccaacagcttcttaggtgccgtgttgaagctgtttattttgtgcgcaaagtgtgtgtactgatacccgtcgttctgtggggcaggggcaactctccagatctccttcagctccgtgcctggaagagggtcgcctcttggtcacatggttggcagctcagtgacttgttccatttnccc

SEQ ID NO: 72833 - DNA, 226 bp, Zea mays
  Clone ID: MRT4577_166421C.1
gcgaattgccaggcaggcacgcttgagcggagggtttgacgaccgaataccgacccgcgcggtggcttggtacgggatcggcacaggaccccaaaatgtaagatccttgctggccgcgcaccagagaacgtatacacttatttgttgacagtagcgcgccaactgggccctgtgattctagagtggatcaggataccgaaagactggacgatggtgcgtgggagct

SEQ ID NO: 72834 - DNA, 339 bp, Zea mays
  Clone ID: MRT4577_166422C.1
ggaaacaaccattcccaccctttaatttttgtacataggggggatcctttcaattcatgggaagatgggggaacaaccggttcttttcgacagccaccacctttggcaaccggggcttttgttcggggcagaacgacccccacggactacaaaccaatcactggggtttttaaatgtttggacaagcctggggaaccaaaaacacaaggggggggggggttttttttcaccctttttttttgggccccttttgggcacgacggggatccttatgcactagtggggtggaccagttttgttccacaatctaacggactttgggggtgtactcccgcttgt

SEQ ID NO: 72835 - DNA, 2937 bp, Zea mays
  Clone ID: MRT4577_166423C.1
gattccatccgtatctgtgtcgttcgttaccttcggtgatcagttatctcgcataaatacaacagcacaacggttcaacaaaactctgcaatctctgctagacttgcgacagtacacggactacaccacttcctgaataactgtagcatttaagggaaaaaagggggaaggccacaatactacaagggcaaggaaaccgctgatggcacaacaaaccagcaaggccaggcctggaagtgttttacacagcgagggtaggcatggcggcttctggccacggagaatcattgggaagatgagctaccatattgccatgggctgaactttactgaagtgacatctgtctcgtcggtgacatcggagccgtctatggcagcccggtgctctgtgtatttgccgttgtattcataaatttccaggtcaccccacggtgtaggggagaccacatctgtcaggttgaaccatctaggagtaaattgctcgcccttggcctctcgagttcgtttctcagctctctgttgttcctcgagcctgaaagtttgcagaaactcgggggtggtgtcaaaactgctcttctctgccccggacttagacatgtcacccttctcgagggcatatctatcaggcctcagccgtgaatcagatgccaacagcttcttaggtgccgtgtcgaagctgtttattttgtgtgcgaagtgtgtgtactgatacttgtcgccctgtggggcaggagcaactctccagatctccttcagctccgtgcctggaagaggatcgccttcttggtcacatggttggcaactcagggacttgttccacttccctgtaatcatgattttgggttcttccgctgcactgtacacatacccatccacctcgtaacggccagccccaaaccagccgcatggctggaaatatagcacaactttgtctccagttgtcaggttcgtcatgaccatctctccaggagaatcaacccaagtgcgcccaaatatcaggttgttaacctttgttagtggtggcaccaaatccaacacgacaccagatttttttagtgtcactcgagtccttccaactgggtaaatttccactgaatttcccaaaaacttggtcttcaacttagacgtgatatcgtaagtaaaatgttcattctcgcagtgagcaacacccattggggggatgatggcttacctgctcagcaagaaatgtaatgccctggtggttaaccatctcataagtctctccaaggatcggattaaaaggcttccatgtgcgttgatatgcaaagtacacagaaacagcccatgtagaagcataaaccatacacatgtatggatcctcacattcatctgctttgtctaacaattcacagtattccatcaactcagccattttctgaagcattgtcattggctcaaaaattatgactggaagtgtcacaagtgatgtaacatctgatcctatgtacttgtgcatcatcttgcaatagctatcacgatcctggagtcgtgatgtccttccacatctttagaacctggagtatgaatgcaggcaatcattgattcaaatatatcacgatttcttttctggggtaaatcacttgaagtgttaagctacatagtataaacatgattggagatatttgacagaacaatgaatcaagctttctccattgagcctcaggcaactacttcgaactttgacgccattcagatatatctacttcattggattttgcagccccctaaatctggccctcgccagacatttccatagacagaaagttcaacaagatccatgtcccgtccagggctatggatgaaagtaagggcctccttgttctggtagattgcaaaaagttgttttgagtagtgtgaagccaccttgcgacagaactcaaaagcatagcgatcatactcgtctagatccgagacggtcttcttcagcggaccaaccagattaccatccagaagaaattctgcaatgcgagatccccttggggcatctttgtgcatatcgggattgtgaatctcaagagtaggctgtggtttgcaggcactataaatttcgactgaggaatactggaacattgcaactttggagcccaacctgtacgacaacgccttctcagtcgtcgccgttgccgcccaccgaacggtgtcttgggtcatataattacgacgattgagaattgagatgaggcttgaattcaaactcccgagagcctccatcttcttggccactatcagctgaattatccctaggcgaaggcagtatgtccagatgagtgctcttgttcatgattgcagccatgctcagagtaccggttgtgggagacagtacaacatgccaattggtgcagactatcaacatgttgcttgtaaagcctgagctctttttgctgacttggtaatgagggtgcttcatcagctagatgttggcatgcagagaatggtgtctttaaatattttttagggttgatgttcagtgccagtggtatgttatttgcagagtcaaacataccacacaacctagggatcagacgatgcaaggcatcaactgtacggtgggatcattggagaggacaggctgcaccatcgccaacaagccatcgagctgcacaggacaacaacaagaaaatcatatccgaatccgatagatcgagtgtcacccagtcaaacatatcctaacacagagggcagattagatcggggccaagaagagtgagggagggggacaccgctccttctgctagagccgggaggagagccacacagcggcggtcgccacggccgtcccgctgggtgaggcgtccgtccccaggttcgcgcacggcaccagcaacgtaatcgtcatccgggccaccgtctcggcgtcctcgctcgcggtcgaccccatcgcggctggctccaacgtcaacgtcgccccacgcgtccg

SEQ ID NO: 72836 - DNA, 2283 bp, Zea mays
  Clone ID: MRT4577_166424C.1
ggccgcctttttttttttttttttaattttttttttttttttttttttttttttttttttttttttttttttttttttatcaaaacacaccacttcctgaataaatctgtagcgttaataagagaaagaaggggcaggtcataatactactacaagggcacggaaaccgctggtgccacaacaaaccagcgaaggccaggccgcctggaagcaattttttttttttacacaaggagcacaggcacggcagcttccggacgcggagaatcattggggagatgacgagctaccaccatactgccatgggtcgaactcgaccgaagtgacgtctgtctcgtctcgtcgtcgtcggtggtgttggagctgtctatggcagcccggtgctccgtgtatctgccgctgtactcacaaatttccaggtcaccccacggcgtggaggcgaccgcatccgtcacgttgaaccatcgcggagtgaactgctcgcccttggcctctcgagtccttttctcggctctctgctgctcctccagcctgctcttttctgagccagacttggacatgtcgcccttctcgagggcatatctatcgggcctcagccgggaatcagatgccaacagcttcttaggtgccgtgttgaagctgtttattttgtgcgcaaagtgtgtgtactgatacccgtcgttctgtggggcaggggcgactctccagatctccttcagctccgtgcctggaagagggtcgccttcttggtcacatggttggcagctcagtgacttgttccatttccctgtaatcattattttgggttcttccgctgcactgtacacatacccatctacctcataccggccagccccgaaccagccacatggctggaaatataacacagctttgtctccggttgtcaggtttgtcataaccatctctccaggagaatcaacccaagtacgcccaaatatcaggttgttaacctttgttagtggtggcaccaaatccaacacgacaccagattttttaagtgtcactctagtccttccaactggatagatttccaatgaatttcccaagaactttgtcttcaccttagacgtgatatcataagtaaaatgctcattctcacagtgagcagcacccattgggggatgatggcttacctgctcggcaagaaatgtaatgccctggtggttaaccatctcataagtctctccaaggatcggattaaaaggcttccatgtgcgctgatacgcgaagtataccgaaacagcccatgtagaagcataaaccatacgcatgtatggatcctcacattcatctgctttgtctaacaactcacagtattccatcaactcagccattttctgaagcattgtcattggctcaaaaattatgactggaagtgtcacaagttatgtaacatctgatcctatgtacttgtgcatcatcttccaatagctatcacgatccattctcttgttcatgtggaagcttcagccttgtggcatgtggatgtatacttggcctgtgtgtgagagggcaccaatgcccttctattcgtctcttttcccctttgccggtttcccttctctcggaagcattgtagctctatataactggaatcagctctcattgaagactcaacaatcagagcacgaaacacgagggcagcaaccttggggcatctttgtgcatatcggggttgtgaatctcaagagtaggctgtggtttgcaggcattgtaaatttcgactgaggaatactggaacattgcaactttggagcccaacccaaaaaaagcgcagacaatccgtattgagtgaatgcccgcatattggcagccttctagcggttgagtggcttgaaaaactaagttcaaggaacttcccaaatgaaaggtagtgtgcttcagctgacattatcacccttcgtgatgatctggggaccccactttcacgttcacaccttaagcatctagtccacatccaaatctttccttctgattcaccaggtaaacaatatttaggcagcaagtgcctcacaagaacaatcagattctcgttgcggtgagtgtaggaatacatgtgagcctctggaggttctccacatgaggaacagctgagattctgaagaaagacacaatcatgagacgtgagcatattcttaaaatgggtggatgaggagcacaagggctatgaacattcagacatcacacaaaaggcatgtgccctgagcagcatcacaatctcattgggttccacttcccggccgaacccggagggtaccccaa

SEQ ID NO: 72837 - DNA, 805 bp, Zea mays
  unsure (1)..(805): unsure at all n locations
  Clone ID: MRT4577_166425C.1
cattgggtacctcgaggccggccgggcccgtgccgccctctctccgccaccttcccgccccgcaccaccgcaatcatgtctaccttctgcaccgtggagaggcggtgtgccaccaccacacacgtccgcccctgcagcatcctgtcgatagcgtcctgcactagcctctccgacacggtgtccagcgcgctcgtcgcctcgtccagcagcaggacccgcgcgttcttcaatatcgcacgcgccagcgcgatccgctgcctctgcccgccggacagctgcgcccctcgctccccgacgcgcgcgtcgtagccgccctccatcgcgctgtagcacggcgggattgaagaagtttttcaggtacaacaaaggcgtgcgcacaccaaccagctgcagaatctgtacctgatgaactcgtgggcgttggcaagcttggcggcactagtcacctcgtcctcggtggcgtgctcgtcgccgtacactatgttgtcgcggatcgtgccggagaacagcgtcggctcctggctgacgagcgcgacgtgcgaccggaggtgcgccaggctgcagctcctgatgtccctgccatcgatcagcaccgagcctttctgcacgtcgtagaagcgctcgatcagcccgatcaccgtggacttgccggatccgctcggtccgacgagcgccacagtcttccccgcgcctatctcgaggctgaacccatcgagcacggtcgtccccgggcgcgtcgggtagctgaagtgcacgtccctgaactcgnatgctccnttcatttccttctgctgctgctgctgct

SEQ ID NO: 72838 - DNA, 1049 bp, Zea mays
  Clone ID: MRT4577_166426C.1
gcgcagcgtccgtccatccatggctctccctacacgcagcgtcgtgccgctttccacaatccgtgcctcaatccccttccttcgcgcagcacccttccatccatggctcgcttccagaaatccccctacctacggcgcagcgtcgcagtccggaatccacccccaaaatcactacccgctctgcggcgatggaagggaatcaaaacgcgtgcttcccccttccatcctcgacgttgcgcggattgcatggccatcgtttcgcgcccccaatccgtcgatgcaaggaacgcgtgcttcccccttccatcctcgacgctgcgcgaattgcagattgcggattgcatggtcatcgtttcgtcccggttcattgcccgcatcagatggaagggcgccccgatctgcctcacctccatcaatgaggtgtctgcctttcttgcatggagacgccaaagagaaggaaccagtcactaagtcggcctctgtacggtccatgaacatacatcaacggagcgtgatgtccgctccggttcagacttcacctccttgaatgtttccgacatgagcgccgagtcgataaggaggacacagtaccccagcttcattgaccgcccgtctaacctgagggtgttctcctttgctgaattgaagagtgccacccgcaacttccgccggtctctcatggttggctagggtggctttggctgtgtgtacaggggtgtcatcaagacctccgacgatctgaacgaacgaatcgagatcgctgttaagcagttgaatcgtaaaggacttcaggaagtagctcttccactacatgagcaattgctggtggagtggagccttgctatttgctgttcctgctatcagttttgcctattggcggcacaggaaaccacaagagcattttttcaatgtatatggcttcaaagttagtctttgattattatctttcttgcaacataagggcaaacaacgtttatatgtagcaaacaaatacaatttgcaaacgttttaggaacatgtttttacaataaagatatacttatagtttc

SEQ ID NO: 72839 - DNA, 1956 bp, Zea mays
  Clone ID: MRT4577_166428C.1
gaaaaaaaaaaaaaaaaaaaaaaaaaaaaaaaaaaaaaaaaaaaaaaaaaaaaaaaaaaggcctacgctcccaccgcgtgtccgcagctctgccccacctcacatctgcgcccgcaatccacgcctccgtcgccgcagcccttcctccacgcagcgtccgtccatccatggctctccctacacgcagcgtcgtgccgctttccgcaatccgtgcctcaatccccttccttcgcgcagcacccttccatccatggctcgcttccagaaatccccctacctacggcgcagcgtcgcagtcctgaatccacccccaaaatcactacccgctctgcggcgatggaagggaatcaatccgtcaatggaaggaacgcgtgcttcccccttccatcctcggcgttgcgcggattgcatggccatcgtttcgcgcccccaatccgtcgatgcaaggaacgcgtgcttcccccttccatcctcgacgctgcgtgaattgcagattgcggattgcatggtcatcatttcgccccagttcattgcccgcatcagatggaagggcgccccgatctgcctcacctccatgcaacaatgaggtgtctgcctttcttgcatggagacgccaaagagaaggaaccagtcactaagtcggcctctgtacggtccatgaacacacatcaacggagcgtgatgtccgctctggttcagacttcacctccttgaatgttcccgacatgagcgccgagtcgataaggaggacgcagtaccccagcttcactgaccgcccgtctaacctggagggtgttctcctttgctgaattgaagagtgccacccgcaacttccgccggtctctcatggttggctagggtggctttggttgtgtgcccacgcgtctcatcaagacctccgacgatccgaacgaacgaatcgagatcgctgttaagcagttgaatcgtaaaggacttcagggaagagacgacgacatggatgtagatgattatgtccaagacaccacacctagggatgacgcatggaatatatgaggccttggagttgagggatggaggatctgattatcttggcaagggtgtttatcttagacctcaaagctcaatctagcatgctcttcgctctgttttactttccatgattcattgagtatctatgcagtttctgcacaattactatgaattacgaactgaacttaaatcaaatacttcagtattggtctctagagaggaagctctgccaaccattactaataactgagaagggagacggtgttggaggaggcacattggggcatggagctgcgtgagcactaccgccatatagttgataacgatgaccgacactgtagattccattctaaatgtgtacaccaaggtgctcaaaccattagttgggatgaggaacacggagcagcaacaacaatatcataaggagagtgcagacgttggacaaatggtatgccatatcttcagttctcttatgatgcttcagcgctgcatcttcagttttctcggctaaaaagagatcatagtcaatagtatacctatgtgtgaaagcaccatgacttatcagttttgtgaacaaccctaacttatgtggtcctggcaccacaaaaccttgtcctaatgctcctcccttttctccacctcctccatacaaccctacaaccccgatgcaatcaccaggaagtagctcttccactactggagcaattgctggtggagtggctgctggcgcagccttgatatttgttgttcctgctaccagttttgcctattggcggcacaggaaaccacaagagcattttttcaatgtatcttgcttcaaagttagtctttgattattatctttctcgcaacataagggcaaacaacgtttatatgtagcaaacaaatacagtttgcaaacgttttaggaacatgtttttacaataaagatatacttatagtttc

SEQ ID NO: 72840 - DNA, 589 bp, Zea mays
  Clone ID: MRT4577_166429C.1
ccggccgggccgggaatctacaaaggtgtttcctttttttttttttggctgtaacactttctgctacatctgtgctgctgcagcatatgccgttgctcattgtttactacgttaagaatcacagtgagaaaaaaaaaaaaaaaaaaaaaaaaaaaaaaaaaaaaaaaaaaaaaaaaaaaaaacaaaaaggccctaacgaaaccttgagagccaatgcaatgcccccatgagcgacgagtactaggacgcctcccagaacaatggcacacattggtgcccctcgacgaaaaagaaatccggcgtcgtcttccacacggagtaggaacacgccatacagaaatggaaaaactgggctgccctaatgatagatctagaacccgttaagtgcgtcacgctcacttcccgattcgcaaaccggaagactctcatgccgagttgttaacgattcacgctcatgcgcagcgaaaaggctatctcttgatgaggcctctacatcttgcgcttgctatgactcactgcattcggccgatctgctaatatatggctgatctcatcagtcaaggggaggaataaggtgaaccacagaagc

SEQ ID NO: 72841 - DNA, 433 bp, Zea mays
  Clone ID: MRT4577_16642C.1
attaaaaaaccccaaaatgggtttgaaaaaaaaaaggttcattcaatatatcaaaaagggggggggggaaaaaacccaaaccttttgggcccccaaacccaaaccaaaatcccaatggaaaaccggggcaaaaacgggtggcgccaaggggggggggaagtttttatgaattcaagttcccacacttggggggcccccaaaaaagggggcccattccattttttcctaaaaagcccggggggatttagttatacaaaaccccttcacccatgttctggggggggcacaagttgaacattggggggcacccccaccacattgggggggcgttgctcacagcacaccaccataaacgtcaccctggaggcaaaaaaaacaggtttactttttaaaggtcttggggggccctggcacccccacatgttactgtaat

SEQ ID NO: 72842 - DNA, 312 bp, Zea mays
  Clone ID: MRT4577_166430C.1
gaacaaccaactaattcttgatgtgttcagggcttttgggccttgcgcgcacacaaaacagcaacgcccctgaggacaccctcccggggcggaggaataaaaaggtcaaccccctcccttccctgagggcaccaccagggggggggacgggtgcgggaccaaaaaggttttgcttaactcaacccttccggcccccaccagataaggaggggcgcccccccctacaccggaaaaagcccccacggtgggggccccgcccaaaaggttggcggggaaggggaaaagaacgcgcccctgggggggcccccctcc

SEQ ID NO: 72843 - DNA, 394 bp, Zea mays
  Clone ID: MRT4577_166431C.1
ttctaagctccgctcacacctcacagtcacaggagcatgactgtgtaatccatctacgtttgcagacgtcggcgacgccgtcttgagtggcttccagatccgagccgacaccggagcagggacaagccgctgccagcggcaatggcggacgccgtgggggcgctacctcctcctgctctgccgccggcgccggagtgtgagtacggaaggtcctcgccgtaccacgccgagttgccggagtttgagttctggatggagggcaggaacccgtgcccggcgctggtcaccggcgacgaggtattctaccgcggagtcatgcttccgctccacaccctacaggcgccaggcgcttctgacggtgaccgctcgcctcagcctcaagccgacgcggacg

SEQ ID NO: 72844 - DNA, 231 bp, Zea mays
  Clone ID: MRT4577_166432C.1
ccacgcgtccgatttcttctcttcttctggatatctagatggctgcggacaaatttgaggctgttccatgcatgaggtactgcagccagttgctcacaagcttgcatatgaccacagaatacgcacttctctacctagatctcacttgcgtagatccaatggcagatgcagttcaacctctgacacacgcagcttaggatcatctcgctggtaagtacaaggatttgatta

SEQ ID NO: 72845 - DNA, 549 bp, Zea mays
  Clone ID: MRT4577_166433C.1
acgcagcgcaggcccttaaaagtgaaggagatatgattgacgattacacacaacagtttagctgctaaaaaatataagaaacagcacttgaaaatgataaaaaaaaagaccaaaacttgcggcagcttgaccaaaacagcagatctagccggggaagaggctgaagcccattttcttggccgactcctctacaggctccgcagccttctcttctttcttgggagcatctgcaacgccagaggccccagcatgaactcggggcgggaacagcaaacttgcttgggagcttgaggtactacatgatcttgacaacaaggggctacgaggaaactgtcttgaccgtaccggcatgcacattcttgaacacattgatgaacatgtggggcacattgccaaagggcgtatacaacatggccatgaactgggaagcacccatggaaacaccagaggcgaactagtcaatcaagtgctgctaggacagggcaaacacctcaagggtgaacaaggaccaatactcgtaaagactggcgacctgcatgcctgacaaga

SEQ ID NO: 72846 - DNA, 677 bp, Zea mays
  Clone ID: MRT4577_166434C.1
gccggccgggctctcgaaatataataaaaaaaaaaaaaaaaactctccccaattgggttgcagacgacccctccctctcttgctctcctccctgtagcgagccgccccctacccctgccttggttccctgcctacctcctatgtcccgcccatccacctgcccctgatcgagaatacaaggattgtgctgaattgaaggcgaactgacgaccatgatgatgtccttccccatgtatccctacacaatatatcggagaaaccctaagtgcatacccttgacatcatggccctactatttccttcgtcttcaaacaaggcgcttgtacctcaccctccgaaaacagagctgccagcacatccaccttatctcgtataataacgctgcttagcagcagctgtaaatgatgatgaagcttcttggcgacggatgccgccattataactatgtacgagccatgtctaatgtagctcaagcagcaattgttggcttatcaagaactcaaccccatgagcatcataatgccccagaacatgccagaacatgggtgtactctaccagtaccagaatgcccaattaccgtatctacctactgtggagtctccggtggcattccggcctactactgatccatgatatatgcggaatctcctctatccatccctctctatctatatct

SEQ ID NO: 72847 - DNA, 657 bp, Zea mays
  Clone ID: MRT4577_166435C.1
tatgcgttcccttcttttttcgccgccgtcgtctgctctctgctgacgtccactggagataatgcctcgcgagatgctatcgccagatcaagaacgagccataccccaagtccagttactgccgcgctgtccctgaccccaagattaagatctaccatgctggcatgaaaagaaatggtgttgatgaggtcccctactgtgcgcaccttgtctcttgagagaaagataatggctacagtgaggctcttgaagctgcccgtattgcctgccaccatcacatgaccaagtctgcacgaaaggatgccttccaccttcggcaccgggttcacccctttcatgtacttcctatcaactagatgctttcgcgagctgaaactgatacgctccagactggaatgaggtacgactttggaaaacctcagggcacctgtgctagggtggacattgggcacgacctcctttctgttcgatgcaaggacaacaatgctgcacatgccaaataaagctctgcgccgcgacaagttcaagattgctgtgcgcctaaagattattgagatgcgatggcgtagctatccccaggtcaggcgtggcgactacctgaagaacgagagggagggtataattgttcctgatggtgacaacacaaatctgctcaat

SEQ ID NO: 72848 - DNA, 295 bp, Zea mays
  Clone ID: MRT4577_166436C.1
atccttttccccacaatcatggttgaagctggaaggcgttcctcggttttgaatttctttggtaggagtaatgaatcctatctggccagaggttcgaacctgggtgggtgactgggtgttccattacggtgctaccaactgagctatgcttgttctcatgtaataagaacaattcctgttcaaggaggaaaacaaatctgcaatactgctttaagataaaattttcccttttttcacaacaagcaaagataagtgctactgcgtgctaggatacctaatccattatcgatgagga

SEQ ID NO: 72849 - DNA, 329 bp, Zea mays
  unsure (1)..(329): unsure at all n locations
  Clone ID: MRT4577_166437C.1
aggaaatccctttttaaaaaaaaaaggatgttcttaacctaacgggttttccacccacttaaaaacctccaattaattccccaanaaaaccaccaataatttggtggggggcgggcgaattaaaaaaaaactctttgctctccccttttggctctccacccactctttagtttcccacagggaaaccccctctatctctttgaagactctctcgagctcaccccccaaaatttagttccaacctcaggtttcctcactcatccacatcatgatcaactcactctacagcaacaaggatatcttcctcacggagctcatatctaatccct

SEQ ID NO: 72850 - DNA, 338 bp, Zea mays
  Clone ID: MRT4577_166438C.1
tattatggagatcatagggacagccatgggtacctcctctggttcttgccttactattagcctgatcaagacgaccaagaccgtggcactggcgccctcaacggcgttggcacagcctgcgaatgacgctctactacacgtcgctaccccagcgcgatgtccaccatcagcagcggcatgaacttctacgtgaagcagcaggctcgcgtgggagcgtcgctgttcatggtccacttgcactactgcttcgaccaagggtgcaacccgtccattgtgctaaacaatacgtccgggaagcagaccaatgctcccaacctaactatagaacccagagggcc

SEQ ID NO: 72851 - DNA, 327 bp, Zea mays
  Clone ID: MRT4577_166439C.1
gggggaatgggaatttttgttttttttcatattgtttttctggaccagggaccctccttttttattattgggataacagaaatccaaccgtacggcccagtggtaaaagaaaccgagctccgccgtacagggaaagaaaaaatggccgcccggtttcagggtatggacattcagaaccagggtccgggttcacattattttttagcgaccccttagcatgggcccaggagaaattttttgacgggtgtttcctacgggaccactcatagctaattgccttgtatgtaaaaaaaccccggccgtttggtgtgctcaacatagggaaac

SEQ ID NO: 72852 - DNA, 545 bp, Zea mays
  Clone ID: MRT4577_16643C.1
aaaattcctcgtccccttccccttcccctccgcctccgcctccggccggccaccgccaacacaccccgaccagtccatatccaccctgctactcataccactagtggggagtagcggcgacggagggagcaaccaaccgaaccagcccaaagatttgttttttttttcttttttttgcgagagagcaagagggatggggatcccgagcccgagcgacgaggtggtccaaatcgtgcacggggacggcgcgggggacccgacggtggtcacggtgagctgcccggacaagaccggcctgggctgcgacctctgccgcctcgtcctcctcttcggcctcaacgtccacaagggcgacatgagcaccgacggccgctggtgctacatcgtgctctgggtcgccgcctcgcgccggggccggccccccgtcgcatgggacctcctcaaggagcgcctcgtcgagctctgccccgtcccagcgcccttcggcgtcgacactgcctacctcgccgccgtcggcctccggcgagatggcctcgcgcttgccg

SEQ ID NO: 72853 - DNA, 446 bp, Zea mays
  unsure (1)..(446): unsure at all n locations
  Clone ID: MRT4577_166440C.1
gtttttaaaaaaaaaaaagtgatttgtttattntgggaaggaaaaaatgagacaaaaaatttattattgagatataagtgataagaaatgtaaaagagggcaccaccaatgatgggttgttggtaaaacgctgttgggtgggggggggaagttggttgaatgggagaaattgttgcagttgtaagagggtgaaagagttaggggcagagtgctggtagaacgggaacaactggggttgtattaagaaggtagnaggggtaagacgagctagctgggtgaatgggagtagttgttggtgatggaaataagcaggagagttaaatgctgncagttggttgaatggaagaaattgatgggggtagggagaaggtagatggctgaatgggagttgttattggtggaaataagaagcagagttgaatgcagntagttggttgaatgggaag

SEQ ID NO: 72854 - DNA, 151 bp, Zea mays
  Clone ID: MRT4577_166441C.1
taacagatcagaatgttcacactggttaatctccatttaaccatgagcatgaaggcagcagaagctggtgagtttccagatggttcttctagccagactcctttttcactgttgacaagcgcggccagggttgcactggacaacggctgag

SEQ ID NO: 72855 - DNA, 1923 bp, Zea mays
  Clone ID: MRT4577_166442C.1
atgtcgactccaggtactagtagttctcatgctcctacaaccggagcaactattggatctcaagtggaaatagaagcagcggcaggccctcgaacccgtgcacgtgcagcagcaacagctcctccatctgatttagcaactgcagcaggtgatgtgttagaaatagaggatgatgttgctgttggtagtaagaggaaaccaggaccaaaattaaaatctaaagtttggttagagtttgatagaattgagttaaatggggtttggaaagcaaaatgcaaatggtgtaagaagcatctaggaggggacacaagaaatggtacaagtcacttgagtggccatcttgagatttgtccagatagggctgttagaaaagcattgcaaccattattcaaggtagtgtctaggaatacacttaggaaggatatccttgatatgtatgaagtgcaaaaacaatccatgttgaagtattttcgaaagttgagttctcgagttgctattacttctgatttatggacagcaaaccaccaaaagaaaggctacatggccgtgacagcacactttatagatgatgattggaagctaaagagttttcttattaggttcctatatgttccagctccacatacagctgaggttattgctgatcttcttcatgatgttctccttgactggcatattgagaggaatttgtctactataactctggataattgtagcacaaatgatagtgttatgagaaatatggttgggacctccaatgagaacctcagacaaagaatggacactgtgaaaggcaagttgcccctctcatcttgtatgttacaagatggaatgagtgtaatggaacatggaattgatagtattagagagcttgttggattttggtctgccacacctaaaagacatgagaaatttgagaaaatggcaatgcaaatgaagggtaaatatgacaaaaagatagctcttgactgcaaaactagatggaactctacttatctaatgcttaacactgctttgctgtacaaagatgtttttgaacgccttgctgctcgtgctccttgtattccaactggagatgattggcagtttgctaaggacctttgtgatagattgaagatattctatgatgtcacagagttgttatctggcactaactatgtcacagccaacattttctttcccaaaatcaccaatatttatttggcaattaggaagtggcaagtaagtgctaacccaaaggttgaagaaatgtctagtaaaatgaaagagaagttcaacaaatattggtttgatgtgcatggtttgatggctgttggtgctgtcctagatcctaggtataaacttcatcttttgaacgtactttttctaaaaatccatggatctgaaattacaagtatggaggctgctaacaaagtcaaggatatcctttataacttggttttagagtatcaagatactatagaagttgttgccacaacagatggtgctcaacctaggacaagtagtgctcctaatgacatgtttgaggaggattggatggacacttttgatgattacatgtccaagcaaccagacgtgacctccacttatgtgcgcacagagatggatttgtacttagaggaaccactgcttcctaggacacatgatttggatatcattcagtggtggcagcatgctgggcttaaatatcctactttgagaaagattgcacgtgatgttcttgcaattccggtttcaacagtggcatctgagtccgtgtttagcacaggaggaagaataattagtccacaccgtagtaagcttgcaccatcaatggtggaagcactcatgtgtatgcaggcttggtcccgtgctgacatgttagggtctccaactatgatgggtgttttgatgacttgtcttgatgaacaagatgaagagatg

SEQ ID NO: 72856 - DNA, 1418 bp, Zea mays
  Clone ID: MRT4577_166443C.1
ttgggaccctcgaggccggccagagtagattatgtgggggaactgggcgtaaccgtaatattcaccctgcgcccctcggcccctccctcttgttctccggttccccgcggcatactctttcctgcgctctctctctcggttctgccgtgtccctcgcgtgcgctctgtctccggtggcgccgcctccgccgcctccgtcgccctgcgccagatcagattcgtggatatggctgataatgagaaagaagtgggggagggaaccaccccccgaggggcggactgggaagttgtgactctcacagcatctgcctatgaagcggcgccaggacctgtcggaacagaagtaaagcctgttaatgaaaatcaagagcatagttcatccaatgcactgctcatgtctgaccactttgtgtttccgccgagtgagcacgagaacctgccaatacaaaccagtttcgatgagatacagcctgagaaggatgtgcagaaacctagtaccactgtggaggattatagtattaagaatgttgttgggtctgagagagttcagtttgatgatgaagggaaagacctcttagatgatgatgtggagatgagagatgacacacctgggtacggttcatcccacgctgaagatgatgcacatggttttgttgttcacgatgatggtgttgagtccggtgaagattttgatgaaaaatcaggccacccttcagatcctgcagacagcaggagctgtgatactggcgcctcatgcaaatgttggttgaagaagcatatgacatgcttgtataaccaagcaaaggaaacaaatgctatctggtctgtggtggttgcagctgcactagttggtattgtgattttgggacgttggcacaaagataaattgcaccttaaccagcttaagtggcgctctggctcagcagtgagaggatgatcaacaagtcgtttgtgctgctctgatgaatcaattcaattcaagccataaccaagacggtttccgcaatgttattgtgatgatgacgaaaaggggtatgttcaatgcaataatatgatgttcgactggaatttcacttaccgccctacaatgagtgcctcgtgggcttctaagatgtcaaatccacttctgccatacacattatcttacagctttacttgcgacctggcacatgatttttggttcctgctacttttgctgtggtatatcatatatgttgactaaatggctgtagaacgtagcaggattgcatactgcgaagtctgttaaaaaacttggtggttctgcgagagcaactcacatgcaattgtgaaaatggagaacaaggaaaatttgtttggcttatattttgtcattactcctgtgtgctgaaatatcgtttagtatcgaaaaaaaaaaaaaaaaaaactcgagggggggc

SEQ ID NO: 72857 - DNA, 341 bp, Zea mays
  Clone ID: MRT4577_166444C.1
ggcagcagccatggcggaggagcccgccgatgtcgagacctcctccagctacgatgacgaagtcaccggcctaacggcactcgatccgtcacatcatcttaccaccggatccacccaggaacgcatacacttgtacccacactaaggttccagagcctctcttactacacgagaaataaccaaaatttccttaaaagtaacgatttttaactctcaccattgaactaccactcattctacacatgtaaagtcatttcagagattcgatctatagtcaatctaaacatgctcttgtttctcctcttagatctgcaagctctttcctttgtctctggcttcgc

SEQ ID NO: 72858 - DNA, 353 bp, Zea mays
  Clone ID: MRT4577_166445C.1
aaaaaaagggaaaagcgggattatataatccggggaaggaaacaaatagagcctaaaacaagttttcaaatgctttgcgaacacttaaaatgaatggggtcaacccctccccttgatttgatagccaacccccccggaaaaaatgtttgcatcccctgaactttttagggacccagttgcagtccaaacaggcgttcgtttaatccccttcccttgaacccttggattttggattccaccgtttaccagtttaaggaatagccccagcttttttttttttttcttgacagccccataaaattgaagttgattgagttggggatattgcacatgatggccttaataacaggaac

SEQ ID NO: 72859 - DNA, 396 bp, Zea mays
  Clone ID: MRT4577_166446C.1
ggggaaaaagggggtagaattcgaccatgaaacccccaggaaagacaaggctgacaatctcaaacccaagggagaaagggcaaaaaacaagagagggggaaaagaaaaaaaaaggccaaacagcccccgggaaagaagaaagaacaacccaaaaaggacattgggctgggggacagaaagcactaaacaaggacacaaccaggggaacaaaaaggcgcacgaaaggaaaacaccaggggggcaatctgggcttccaacccaaaaagggcccaggccggcaaaggccaccaaggcttcaggccccccgggggcccggcgggccagttaacaacacctgccccggggttaaagaaaaccttgagaccatgggggaacctggccgccagcccacttagg

SEQ ID NO: 72860 - DNA, 1598 bp, Zea mays
  Clone ID: MRT4577_166447C.1
cattgggtacctcgaggccggccgggtcctctcccagtccgcccctcggcccctcccgcctcgttctctccgccatcgtcgccgccgcctccattcctccaccagtccaccatcgccacctacgcccaaccaaacccaactccatctcttccgactataaacgcaacccaccaccgctgccgcgaacctctgcgctccgaataccccagacccccgatcctcccaatggccaccgcattttcgctgcgcgctgcggccccggccaccgctccccgcgccgtctcccgatccacctccgcggcgagggtcgtgcccgtggcatcggcactggcgggacgcggaaggctggtggcgcgtgcagcagttacagcaaaggcggatgtaccatcgagcacgtccgacggccatgaggtcttgctgtttgaagctcttcgtgaggccttgatggaagagatggaattagatccaacagtgtgtgtgtttggtgaagatgttggccattacggtggttcttacaaggtgacaaaaggtttggctgatacgtttggagaccttcgagttctggacacccctattgcggagaactcgtttactggcatgggagttggagcgggaatgaaagggttgagacccgtcgttgaaggcatgaacatgggattcctgctccttgcttacaaccagatctcaaataactgtggcatgcttcattacacttccggcggccagttcaaaatcccacttgtgatccgtggccccggtggtgtgggtcgtcagcttggagcagagcactcgcagcgcctggaatcgtacttccagtccatcccaggcctgcagatggtcgcctgctcgactccttacaacgctaagggcctgatgaaagctgccatcaggagcgagaaccctgtggtgctgtttgagcacgtccttctgtacaacctgaaggagaaaatcccggacgaggagtacgtgctctgcttggaggaggccgagatggtgcggcctggggagcacgtgactatactcacatactcgcgcatgaggtaccacgtgatgcaggcagcgaagacgctggtgaacaaagggtacgatcccgaggtcatcgacatcaggtcgttgaagccgtttgatctgcacactattggcaactccatcaagaagacccaccgcgtgctgatcgtggaggagtgcatgcgcacgggtgggatcggcgccagccttaggtcggccatcgtcgacaatttctgggactaccttgacgcccccatcatgtgcctgtcatctcaggatgtgcctacgccatatgctgcgactctggaggatgcaaccgttgtgcagcctgcccagattgtggctgccgtggaacaactatgtgcatagattgtggcctaggacgtttgagagactgttgttgccatgaaaaagccttccgtttgttagttttgtgctgtaacaagcattctttggagacttaaggtgtaggcttatagtcgttttgttcttgttttaagatgtataatccagcttcgtagctgcacggactcgatcttcttgttcctaaatctgcgctatgcaatgccgaatttgatggttcgaacaac

SEQ ID NO: 72861 - DNA, 225 bp, Zea mays
  Clone ID: MRT4577_166448C.1
ttcttctcctgattgtctgagagtaaggcctgaggatccaggaagaggacagcaatgggggaaggtgcagttgaccgtgtcctgagtcgcatccacagcgccagggagtgtgggtgaggggctactctgtgtccaccccaatgagcctgtcgtcgtgttcacaaggtcaccaaaaccttgtaaagtgtatgtttgcaggcccccctgatctctgccgagtacaac

SEQ ID NO: 72862 - DNA, 486 bp, Zea mays
  unsure (1)..(486): unsure at all n locations
  Clone ID: MRT4577_166449C.1
acgtcgcatggcacgccgtnnacgtaagtcttaggatcctctagtagctggcacccacctctgtttcgttttgttagtggcgtcgtatcacggtgcacttttcgggattccgaattttagcacctttgcgagcgcttggcctgatctctccacttccgctggccctagctctcaagatgtatgatgttgacagaagacgctcaccggacctactatgagcctggatggggagtcttgtagacccatcgacagtgccgaggctaacatccaacgacaaggagggtgtggctcctgaccaggactggcttgtcttgaccagaaagcgagatgatgacgggcgctcgctgacttgctacaacattgagagtgagtgaaccctttcttaggtgctgaccgttaggggacgcatgcacatctctcgcaagagctgggctggctagacgatctcccttgatgcggactcttgagacacaagggattaggcca

SEQ ID NO: 72863 - DNA, 649 bp, Zea mays
  Clone ID: MRT4577_16644C.1
aaaaaaaaaaaaaaaaaaaaaaaaaaaaaaaaaaaaaaaaaaaaaaaaaaaaaaaaaaaaaaaaaaaaaaaaaaaaaaaaaaaaaaaaaaaaaaaaaaaaaaaaaaaaaaaaaaaaaaaaaaaaaaaaaaaaaaaaaaaaaaggggcgcccctcccaatttaaaattattcctatttttaaaccccaaccgccctttttaaagattccaattttacttccccttccttccaacgttttatttttttttttgggccccctaatttaatttcattgcccgtctttttacaacttcggaattggaaaacccttggctttccccaatttattccctttgaaaaaaatccccttttccccagttgggttattaacaaaaagccccccccctttcccctttccaaacatttgcccaccctaattggcaattggacccccccttttaccggccctttaaccccgggggttttggggtttacccccagggtaacctttacttttgccagccccttagcccccgttcttttcctttttttcctttcttttttcgccagtttccccgtttttccccttaaacttttaaatggggggctccttttagggttccaatttagtgttttacggcccttgacccccaaaaaacttatttagggg

SEQ ID NO: 72864 - DNA, 787 bp, Zea mays
  Clone ID: MRT4577_166450C.1
actatactgctagagctagttgttgccgatcttcaggccgcgagcgcgcagcaagtgtggtcatgcacggggcaaagcaccggatcaccaccacctcgcactcgcagcagcaacagctcggcgcggcgatgggcggcggcgtggacagccacgggcaccgatcggcgcggccggcgcttcggcacgccaagctgaagatgctcttcgtcgtcatcgccacgaacctcgtctcggtgtacctcttctccggcgcgtcgctgtcgctcaacatgcccgcctccgcgccgagcatccacctctgggactccacggcgctcctccgggacctcaacgccacccgcgacgcgctctcgctggcacgcgcggagctggccttcctccgggggcagtgcgggacgtcttcgctcctcctcgagtccgtgctcgccaagctcggcgccgtccacggcgatacgccggcggtccaggacttcaatggctggcccgaggagcccacgggcgagctcaagatggccatcgagccccaccggctccccctcggctactctgtcaacttcggcaccgacgagctcttcccgggcctgggcttcgcgtgccgcaacttccaggaggagctcacgcagtacatgacgtacaacgcgagcggcgaatgccccgacgacgaggccctcgcactgcagctcatgctcaaggggtgcgagccgctgccgcgccggcgctgcaggccggattcccgggcgaggtacgtcgagccgaagccgctcccggcgagcctctggtcatcccg

SEQ ID NO: 72865 - DNA, 313 bp, Zea mays
  Clone ID: MRT4577_166451C.1
ggctctaactctaaggcaaagcatcatctagctaatgtacgtctaagtttagactatcttcagccgcttactcatacttatacccatattcaaactctactctacgaacagtacagtctatagtgtagaacagtgcaggacaatgcttatgggtaaattttggatgaacagctgaagtcggccttagaaggctattggagaaaataattaagcatgcataatacaacatacatacacttgcattctctttcttggttgggtgataaggtgcattcgttctgatcctttcggatgagagtatatttttcaaccc

SEQ ID NO: 72866 - DNA, 690 bp, Zea mays
  unsure (1)..(690): unsure at all n locations
  Clone ID: MRT4577_166452C.1
aattcggcacgaggaatagcatcttgagaagagttagcaactatcccctccgtttttttatttgtcgcgttttagttcaaaactgaactagcgggtgacaaatattcaagaacggaggtagtataatgtcatcaacatggaccaagagaaatattgaaacacttctcttgttgaaaagaacatagaagtgtctttctttgaagcctaaaaacctagatgcaacaatttgtcattgagtcgagaataccggacccttggagcttgcttcagaccataaatagctttggcgtgcttacacacatgatttgtcattgcctgtaacatgctctcatatcttggtggctgcttcatgtagacacgctcttccaaaatgccatgaagaaacacattctgcacatcaagttgcttgaatgtccatcttctagaaactgccgaggatagaacgatcctgataatagctgctttcaccacagtactgaatgtctcataatctatgccatatcgttgcttacaaccctttgccaccgacttggctttatatatgtccaacattccatctgccttctgtttaattctatatacccatttgcaggcaacaacatcctctttcggaactaggaaacatgaaacacagaatgctgcaccgttccacatttcttggntaagcttgngagcnagaccccatacatc

SEQ ID NO: 72867 - DNA, 320 bp, Zea mays
  unsure (1)..(320): unsure at all n locations
  Clone ID: MRT4577_166453C.1
atacctttnatcaaccaantatctcttacaaacctttctccctactcttctcaacaacaatttcttccattttaccaactntctacactaaaccctactccttattttcattaacaactattaccatttatccatctacctacttcctactttcaacatctacaactttttttatttaaccaattaacctcacttaacccctcttcttattctccttcatatatactactaccatttatccatctatctacatctaactattctttcttttttcacaacaactattctttttcttctttcctaaattttatttttacttt

SEQ ID NO: 72868 - DNA, 377 bp, Zea mays
  Clone ID: MRT4577_166454C.1
ccccgtgactaactcgctggcccctcccaatggccaagcgaagaaaacaagccggcgagatgtgggtttcaaattccgcctttggggagccctcaacctcctccccaaccggctttggctccccggcggcgaacccggcaacaacaagcctttttcggcaaaggaaccggcggcgagaccggacaaagcgggaaacagggaatgtgaagcgcctctcaacgggttcgcagaccccggggcggaagatgtgtggtgtggggcacagtgagaggcggtgtggccggagaggcgagactcgaaacctgtcgtgctcgcgggcggacacaacgcggtggggcggtacaagaccctcacgggcgaagatctcgaggagctca

SEQ ID NO: 72869 - DNA, 334 bp, Zea mays
  Clone ID: MRT4577_166455C.1
gcggatcctcctccttcttcatttcttgcaccataccctatccctcttcagcgtctgcttccaacggatccaggggttactttgaagcggagtaatttctctctcaacaatcatctgcgcggtcacgtcaagtacatcctttgctccaactgctccaagtgctgtcccaatgataaatctatcaaccggttctttgtgaggaacattttttagctatctcccttcatagatgttcaagatgcctttgtacatcattgatatttttctacccaaattttattcaaaggttcatcactgcgtcttatgtgcaatccattctcacattgtcctggtc

SEQ ID NO: 72870 - DNA, 285 bp, Zea mays
  unsure (1)..(285): unsure at all n locations
  Clone ID: MRT4577_166456C.1
gaaatatagaatcatcattctacattatgagtaaattaaattataacttttaatatattcatcatcaaagactaaaaaatgagctattatccataaaattatctaatattcattattattccataaattaatcatttttgtgaggctcgcgagctggaacgagccggctcggctcggctcgctgcaaaaacgagctcgaagaagaggctcggctcgactcgttcgaggctcgcgagccgccccgagccgagccgagccggtccgnagctcggccagctcgcgagc

SEQ ID NO: 72871 - DNA, 1705 bp, Zea mays
  Clone ID: MRT4577_166457C.1
gccggccgttccgggacgtccgacagcctcgcggtggtggccggcctcattgtcgctgcagcgttcgccgccgggttcaacttgcccggtgggtacggagacgacggcaaggcgaacctcaagcacgagattgtcttcaagaccttcctgttcttgaacaccggggccgtggcgacgtccatgctggcggtggcgctgctcgtctatgggaaggcgtcttctcctcctcctgctgctctggcctctggagtcgccgcccctcccaagaacaccaggctctaatttaatttaagcggagggaagtttgatcgatcagtctgacactgccctcgttaagttatagcaaatgcctcccgcttcgacggatgcaaacaacgcgatccagaagctgtacgaggtctgcagagcctcactgtccgagaaggggcctctatctcctcctgactctctcgacaacgtccgtgctgcgttagacatggttaccccgtccgacgtcggccccgggtttcgtagtcaatgtatatctgtttacagctctaagtttgctagtgcctattggttttgaagtcatgtttctattaggtgggagatccatcgatacttcctcttaggatgtaatcggatcgaaaacaaaacagacggatatttcttgaaaaaaaaaaaaatgacggatgcaaacaatgcgatccggaagctgtacgacgtctgcagagcctcactgtccgagaaggggcctctatctcctcgtgactctctcgacaacgtccgtgctgcgttagacatggttaccccgtccgacgtcggccttgaacgcgaggctggagctgtgcgtgcttggagcccacgggcggccctgggtcggaagaggattttccattccagcccagccatcagatatcgccatatatacgagtgcgcaagcttctcgattgggatgttttgcatgccggcatcatccatcatcccgctccacaaccatcctggaatgaccgtgctcggcaaggttttgtacggcgcggcgcgcgtcagatcgtaccgctggattgaatcagccggatcgtccattaacctgtcgaaagcgaggccagccaaggttgtaagggacggcgagatgtccgcgccgtgcggagcgatggttcttcgcccggaggaaggcggcgacgtccacgccttgagagccatcactccctgcgccgtcctccacatcctgacgcccccgtactcctcgcaggacgggaggcactgctcctacttccggagacgcccaagatcacacccatcgggcgttttattgaaccgaacaggggggtctgagttcgtgtggctggaagaataccagccacgtcacaacttcatcattagaagggacctgtacacaggacccgctttaaagttatgatgacatcatgacaaacaggggggataattatatatatacgcttcccctttggcttcttattaagttatatcgatggacaagcacttagctatatgtgcttggcacttttttatttatatggtagtattaaaaagacagttgattatcctacgtacagggccgcctgctgtatgtattattctaagataatgttattgtacatctgatgatgtcacccactgacagaatgttatttatataataattatatgaaaagcaaaaaaaaaaaaaaaaaaggcccctaggtgtttttgagccttcctttgg

SEQ ID NO: 72872 - DNA, 705 bp, Zea mays
  Clone ID: MRT4577_166458C.1
ccggccaggcaacacgttatactctggcatgctcagcacccaccagaacccagatgtaatagagagaaaggctgctcctggtccatggcctatagatggacggagcgtaggctaggaataaaggagtcctgcgtcgctggcactggcgctggcacacatgacccctgaaccccctgccattcgaagagaacagcccgtcgagagaaaagaggaccgacccaccggaggcaagtggcgcgacatggcatggtgatggcatcctgaagacaaaagtgacaaacgccgcctgcccgccagccggaaagatcacgcacctcatcatcatccacctgctgcccgccccgcgaccaaaaacagcatgcttctggtgtaaactaaagctaggatctctatctcggctttgacagcctgctcaaacttgccctgtagcttgcacacgctcccggagatccagcatatggtgcggacgctagtccgaggagaacgacgccctccgcaaggcgatgcgagcgttgcagagggattgcgcggcgctgccccaagagaacggcaagctagagacaaggctccatcatgccgctacgctgagccaggcgatctccgtggagaacaaggggaaagcatcgccactacagactgagcaggaagctccgagcggattcttgctccctgaactcaacctccccgacgacgtctgatgatggc

SEQ ID NO: 72873 - DNA, 387 bp, Zea mays
  Clone ID: MRT4577_166459C.1
cggcgcctccctttctccccttcctacggcttctcctccccctcttcagtcttcacccctgcccaccctcgcagatctcgccattccctgccacgccgccggccgcccgcgcgccccgttccggcggaaggtccccacctctcccacagcctctccggagagccggaggggcctgcgcctatccgacggacggcacggctcctccctcccctgctgccccggccggccgcgatacggggtgacgatcctcgggttcgttcgaagacgcaggcgcctgtgcgacagagtgcgcgcgcggagggacagggccggcggcgagatgaagggcgtgtcggcgatccccgccgtggcgatcatcccttcgccgctcttcctctggcgggtcaa

SEQ ID NO: 72874 - DNA, 437 bp, Zea mays
  Clone ID: MRT4577_16645C.1
gccggcgccagttgcaggtttttgaggaatggacacccggggaaataacccccggagggccacaagagcagcccggaaacttagaagaggggcgacggcgggcaccatgcccaacctgcactacggggcagggcttaaaaggctagaagagcccctcctgacctccggctgcttaacagactaccaagcttccagagatgacacgacatgacaacagctcgtactgggagtgcgggcagcgcacaggtaaagcaagggaagcatgccggcactaacccacagtgaagcgcccatagaggctgagacggacccactgcagaggcccaaggggagaaggaagaaccgtcagaacatgctggcagaccccacaacagatggtgttgacgcaccaccaccagggcctgaaaaggacaacgacgatgacgttgaccggaacg

SEQ ID NO: 72875 - DNA, 344 bp, Zea mays
  Clone ID: MRT4577_166460C.1
ttttttttttttttttttttgaaacaagaataaataacaaattatcataacttataaatagtcttacttatgaattgtttccacaacaagatagcagataatagagttgtctctgccccttgccacaattataaaaagctcctaaatacaaaaagatataaaatacaataaaatgtaactgtaattaaaataagtacctataaagtcctcataatataacgaaaattgttgtcggctatgaaccatgattaaggcattacaccacattcacaacgctatcatagaatgacaatttagtttcatcttcgtatttcttgaatcttactcgcatacatggagtaatt

SEQ ID NO: 72876 - DNA, 235 bp, Zea mays
  Clone ID: MRT4577_166461C.1
ggaaggaagcttgtttcttagggggcaaaattcaccacaaatccttaaataggctaacaccgttttttaaatttacaaccctttttttatttgggtatcaccgttaaaaaacataatcagctttttaccaaaatcgttttgtattccggtaccccacttttaaactttaaaccggggggtaaaaacactccggggggtcacccaatggcaaaaagccccacctagggcgaacccc

SEQ ID NO: 72877 - DNA, 626 bp, Zea mays
  Clone ID: MRT4577_166462C.1
ggagaccagcagaagacaaggcagtaggagcaaatgacttgctcattaagcacatacaggaaaaaatcaaagcaaaacgtgggaaatcagagtccacgttttatgttgttgctgatgcaaccattttaaggttcatgatggagtcctgttgggcacctatgatggctgcattcagtgtgcttcttgatcagtgtgatgataaggctgctacatcacagtgtttaaagggattaagattttctgtgcacatcacttctgttatgtgcatgcagacacagagggatgctttcttaacgtccatagccaaattcacatctctccattctgctgcagaaatgaagcaaaaaagtattgattctatgaaggctataatatctatcgcaatcgaagatggcaattacttgcaggaagcttgggagcatgtattaacatgtttatcacggtttgagcatttacatctgcttggagaaggggttcccactgatgcatcctttctgacagtacctctgaatgagtcagaagaaaaaactaagaagtctacttctgttctatcttctaagaagactagggctcttcagaatcctgctgtgatggctgctgttagggggggtacttacgatagcaca

SEQ ID NO: 72878 - DNA, 948 bp, Zea mays
  Clone ID: MRT4577_166463C.1
ccggccgggaggagagccttaccctcgaagccgaaggcctcgtgccttctcttcctccctggcatggaggaagtagctgtttcgcctatgatcgttgccgccgtagtgctggacaacaatggcgccgacgcggtctcctgcactgccatccctagcgtaacaataagcctagaggagaaagaaaatatcaatggggatgttcccacgatcacctcggccgcaagcaacgaggaggaggcgttgttcagtgtcggagaatccaccaaggacgatggccatcgcttgacgatggaatgcaccactcccgtctcctccagtagcccttccactcgcaagaagcgcggggcgttcagcctcttcagggcgatgttcctgtccttcggccggagcgacgacagcatgaagaagacagacgacgacaccacgagccccaagaagagagccatcgcggctgctgatgacgattgcaagcctgccgatgacgagtcaacgtcgtggaagcgcctcgtggacggccggccgggcgccgccgtcgcaggcacggttcggcttcgagatcaaggaggtgggcatgaccagccgctacgcgtccgctgaggatctgcaccagatggacagcgaccaggaagagggtgctgagggtggcgatgacggtgacagcagttgcccacacgccatcgacatgcaggcggaggagttcatcaccaagttctatgagcagttcaagtcagaatcgttcaacggccgtgcctccgagtgatccattgatccatccgcttgcggcatgtatgtaatcgttctgatcttaaccgaaattgcattcgtgtcagagacgactctacccaatatggatcaggaagaaatgtatcagtgatcgcatcgataaacacagtttgtctgaactctaaacttctctgtgggaaaaaaaaaaaaaaaaaatttgcggcc

SEQ ID NO: 72879 - DNA, 1242 bp, Zea mays
  Clone ID: MRT4577_166464C.1
ccctattcgcggcgactcctcttgccggccggggccgcccgggaggagagccttaccctcgaagccgaaggcctcgtgccttctcttcctccctggcatggaggaagtagctgtttcgcctatgatcgttgccgccgtagtgctggacaacaatggcgccgacgcggtctcctgcactgccatccctagcgtaacaataagcctagaggagaaagaaaatatcaatggggatgttcccacgatcacctcggccgcaagcaacgaggaggaggcgttgttcagtgtcggagaatccaccaaggacgatggccatcgcttgacgatggaatgcaccactcccgtctcctccagtagcccttccactcgcaagaagcgcggggcgttcagcctcttcagggcgatgttcctgtccttcggccggagcgacgacagcatgaagaagacagacgacgacaccacgagccccaagaagagagccatcgcggctgctgatgacgattgcaagcctgccgatgacgagtcaacgtcgtggaagcgcctcgtggacggtatgcgcccgctccgcctccgcgggcagctggagtactacccgccgccaccgccgccaccgccgctgggccacgccgatgtgtaccatgacgtgatcctcccgccgccgtcgcaggcacggttcggcttcgagatcaaggaggtgggcatgaccagccgctacgcgtccgctgaggatctgcaccagatggacagcgaccaggaagagggtgctgagggtggcgatgacggtgacagcagttgcccacacgccatcgacatgcaggcggaggagttcatcaccaagttctatgagcagttcaagtcagaatcgttcaacggccgtgcctccgagtgatccattgatccatccgcttgcggcatgtatgtaatcgttctgatcttaaccgaaattgcattcgtgtcagagacgactctacccaatatggatcaggaagaaatgtatcagtgatcgcatcgataaacacagtttgtctgaactctaaacttctctgtgacaccattctattcttcaacaaactaaactcccttcactaattttaggatgtactcgcatcaatctgttatattttctcagaaatattaggctgtgtacacctcacgatagagatgcacagggtggagtgtatattatattaaaaagttctttgtctacgatctacctcgaaaaaaaaaaaaaaaaaaggggcggcc

SEQ ID NO: 72880 - DNA, 1090 bp, Zea mays
  unsure (1)..(1090): unsure at all n locations
  Clone ID: MRT4577_166465C.1
ccggttcccacgatcacctcggccgcaagcaacgaggaggaggcttcgtttagcgtcggagaatccaccaaggacggggggcatcgcttgacgatggaatgcaccactcccgtctcctccagtagccctttcactcgcaaagaagcgccgtgcgttcagcctcttcagggcgacgttcctgtccttcggccggagcgacgacagcatgaagaagacagacgacgacacctcgagccccaagaagagagccatcgcggctgctgatgacgattgcaagcctgccgatgacgaggacacgtctagggcgattggcgtggacgaggccggccaaaaaaaaaaactcccgtctcctccagtagcccttccactcgcaagaagcgcggggcgttcagcctcttcagggcgatgttcctgtccttcggccggagcgacgacagcatgaagaagacagacgacgacaccacgagccccaagaagagagccatcgcggctgctgatgacgattgcaagcctgccggtgacgagtcaacgtcgtggaagcgcctcgtggacggtatgcgcccgctccgcctccgcgggcagctggagtactacccgccgccaccgccgccaccgccgctgggccacgccgatgtgtaccatgacgtgatcctcccgccgccgtcgcaggcacggttcggcttcgagatcaaggaggtgggcatgaccagccgctacgcgtccgctgaggatctgcaccagatggacagcgaccaggaagagggtgctgagggtggcgatgacggtgacagcagttgcccacacgccatcgacatgcaggcggaggagttcatcaccaagttctatgagcagttcaagtcagaatcgttcaacggccgtgcctccgagtgatccattgatccatccgcttgcggcatgtatgtaatcgttctgatcttacaccgaaattgcattcgtgtcagagacgactctacccaatatggatcagggagaaatgtatcagtgatcgcatcgataaacacagtttgtctgaactctaaacttctctgtgacaccattctattcnttcacaaactaaactcccttcacg

SEQ ID NO: 72881 - DNA, 316 bp, Zea mays
  Clone ID: MRT4577_166467C.1
attcggctcgagcgatgacaaccacacgttccaaccaaagacggagagggctggtcctgtccgctcgaccagtccacactatgacacgtatgttccatactgtcctgcgtgcaatgtcaccgccagtgacgcactgtgccagcacggctacacagtggcaggccccaaatctgttgaagctttttggaaaacctgatgcctcctgtacagtgggctatacctatagcagtgatgcagatgaggaacgtcttataaactaggatagacagatctgataggatcatgctgctgcacattctccatggcacaatggtca

SEQ ID NO: 72882 - DNA, 524 bp, Zea mays
  unsure (1)..(524): unsure at all n locations
  Clone ID: MRT4577_166468C.1
attgatcttggatgttttaaaccactcttngaaactgtgatactgccatcaataatacaactagcacgctgattcagcccatgatcaagtactgttttattggcaatcggggcaaacaaatgcttatttcttacccaaattaaaaaaaagtaccgaaaacaggagaacaaaatcttctggtgctataaaaacactataagaataacaaccatactgattccctatcttacttaaagatggagggaggagcattttggcgccgaagtggtggtacataaaaaatccctacatgtcgttaccaactccatgccaactgatctcagtcttcaagaactccccaggagcacccttgctacaacatggctcctaaccttgccaaggtactccttttatactttgaaattacccatctaaaattaggctctcaatggtacataggaacaggatatgcatctngaaccaggtccttgaaactgaatgcctaccggagttctgaccaaatccattaagatgaaccttaaagc

SEQ ID NO: 72883 - DNA, 452 bp, Zea mays
  Clone ID: MRT4577_166469C.1
aggtaaaatttgcaaaattggcttcgaaaaggccccggccacccggggggaccgggacccccgacttaccgggccgctggtcccaccgggccctggttaaaggggtttcccgggggtaagaaaaccctgggcccgggggggcaaaaaacggggcccgggtacctgccaaggccccccggcgatgcaagacaaacaggttttggcgttccgggggatgcctggggaacgccccagggggtgcccgttttcccttttaaaaagctcgcgccctgacaaaggccaaggccaattccctgggggccggggcccggaagtcccggtggatgccccccaaattccttttgaaccgggccctggggctcgggtaccggattttggccctgacccctcaggggtcccgggaccccgagaataaccaaaatttggcctcttgggaatttccggcggggggg

SEQ ID NO: 72884 - DNA, 761 bp, Zea mays
  Clone ID: MRT4577_16646C.1
cgcgcctcctctcgccctcgcgccgccgccgccgccgcagctgctgcagcagcaagctcccgcccgccgtcgtcgcctgaggtagacaccaatccgccgccatggggcgtatgcacagccgcgggaagggtatctcgtcgtcggccctgccgtacaagaggactcctccgacctggctcaagacggccgccaccgaggtggaggagatgattaccaaggctgcgaagaagggtcagatgccgtcgcagattggcgtcctgctccgtgaccagcacggcatccctctcgtcaagagcgttactggtagcaagatcctccgcatccttaaggcccatgggctggcgccggagatcccggaggacctgtacttcctgattaagaaggctgtggcaattaggaagcatttggagaggaacaggaaggataaggactccaaattcaggctcattcttgttgagagcaggatccaccgccttgcccgctactacaagcgcaccaagaagctcccgcccacctggaagtatgaatcaaccacggccagcactctggtggcctaagtgatatcctccgatggcgtggtcttgagcacctttgaacttgttctagatatgaatttatgtaatgcttaatatgtctggagcgggttagatggacaaggaacctcaacttttttatgttattacttggagaatctataaaccatttttggttttgcaattctgtctgttaaacgtaacatggatccatgttttgtcgccttc

SEQ ID NO: 72885 - DNA, 739 bp, Zea mays
  Clone ID: MRT4577_166470C.1
gcgtgcttatcacttatcatcatcatcagcgcccctccgtccctcctcgcgcgtcgtgatccatccagcccaggtgattaaggtcgccatgtcggactccgaggaccaccacttcgagtccaaggcggacgcgggggcgtccaagacctaccctatgcaggccggcgccatccggaagggcggcttcctcgtcatcaagaaccgcccctgcaaggtggtggaggtttctacctcgaagactggaaagcatggtcatgctaaatgccactttgttgccttagatatattcaatggtaaaaagcttgaggacattgttccttcatcccacaactgtgatgtgccacatgtggaccgtactgagtatcagctgattgacatatcagaggatggatttgtgagccttcttactgataatggtagcactaaggatgatcttaaactcccaactgatgacgctatcctgacccagctcaaggatggatttgctgaggggaaagatctcgcactgacagtcatgtcggccatgggggaggagcagatctgcgcagtcaaggacgtcggccccaggtaacttccttggagcgagggccaagataaacagagggatccattatctgtcaaattaagctaaagaaagacgaagtaaaggaggaatgctatcgagtgagacattcacctaagccggagtcaagtgcagtgattgctgggtgtagcatatctgcttaccactacctaccat

SEQ ID NO: 72886 - DNA, 267 bp, Zea mays
  Clone ID: MRT4577_166471C.1
catttatattaaagttttttcagcaaaaagccacagttcacgagggcaaatagacaaaaacaactaccaagccaagaaatactccccaacgtttataaccaaatacaaggaaatcccaacagctgggcaaaagaatagaccaagagtgccaaaacaaggccctgggcctaaagctgaccgaaaaaaacaatgttcgtacacccaaaccatagccagaaaacacatcacccgcgagccaaaacataaccccgcacaagtccgatacaa

SEQ ID NO: 72887 - DNA, 632 bp, Zea mays
  unsure (1)..(632): unsure at all n locations
  Clone ID: MRT4577_166472C.1
ggccggnnggtagtgaactgcatggnaacgagacgatgttattgaatgcttgttccccgtctaaaaaaaaaaaaaaaaaaaaaaaaaaaaaaaaaaaaaaaaaaaaaaagaaaaagtcaactcgtgtaatcagttaggggtattaataaaaaaaaaaaaaaaaaaaaaaaaaaaaaaaaaaaaaaaaaaaaaaaaaaaaaaaaaaaaaaaaaaaaccagggggcttggctttggtccgttgctcaaaccgtggaaggaaagggaaaacccctcctccaattttggaaggcccccccttcgccgcccttgtttaaggaaatttaaaaaaattccctttccgaaccttgtccttccaagggagggtcccaaacagaaggaaaatggtaactgggggggaaaaaaaagcttttagggacaaaacgggcaacttggggcccggggggacttcccccgtttacaagggccgggtttccacccccgccctggggtttcggggccagggggtcaaaccccctttgggaacctcaaaccattttttaaccgtccctttgaaggttggaagcttaaaggcctccaccctctttcccaaagaagggggaccgaatgatcccattaaagggcaattttacggg

SEQ ID NO: 72888 - DNA, 334 bp, Zea mays
  Clone ID: MRT4577_166473C.1
ctcctgcctttcgagcatctccacttatatagaaggttcgtttctgtggcttgccggaacggtcccattgtccgggtcgtcctcctgggattcgtggtgccgttgctggtcgccgtgatgtgctaggccctgctagaggtggcggcgacgtgcagggtggtcctgcattcacggcggatgccgctgcccatggccaattgcaggccactgtcagtccctcgcctggcccgccgactctgcatcgacggctttctccggcgcggccaagcggttgacatcgccgcggcggaccacgacgcggggtagcgggcggcgtggtcgattctgtccagct

SEQ ID NO: 72889 - DNA, 220 bp, Zea mays
  Clone ID: MRT4577_166474C.1
ggttccttcaaaaagaggggctaaaacgtttggaattggtaaaaaaggaattctagccctcttttgcttgtatctgtagtcctgctcaaaaaaaagtataagaatagctgcaaagagaacaaaccttatatgtacaggtacagcctacgtggcttgcaaatttacatttcacatgtttatggcattagggaaaaactactgtctaagccaagaaataaat

SEQ ID NO: 72890 - DNA, 433 bp, Zea mays
  Clone ID: MRT4577_166475C.1
ccagaagacaaggaaagagaaagagctgttaataaggttagtaagaagcctaacagggggggcaataatataccaggtttcacgagtgcaggtgtgagattggcagcctttcctgggcctggtgtgaagaaagtgaaaaagattgtcatcaagaagattgttaggaagattggtgccaaagataaacaaactagtagttcaaccgtcccagaaaaggacatcattgatgctaatgtaaatgcctctgaaaaagaagaagctaatgcaaatgtttctgagaaagaagaaagtgagatcacaacatcatcttttgagaaggatgctatttctgcacacaatttggtcagtactagtgatacagctggagttgttaacagtgtggaggtccaaaaggaacaaaatagtgatttggtaaatctgaagaaaacaatgc

SEQ ID NO: 72891 - DNA, 841 bp, Zea mays
  unsure (1)..(841): unsure at all n locations
  Clone ID: MRT4577_166476C.1
ggtacctcgaggccggccgggacctcctagcctcctcgtccccgatctcctcccacccgcatccaagggtttccttctcgaccgtgcggaacgagccagagaacaggtatggcggcggcgcggcacctcagatccggcctccccctcctccgcgcccacctcgcatcctccgaatccgcggccgtcgctcaggtttcgaggggcttcgcgtcgcaggccgccaagcccaccgggaaggagatcaaggttccaaaggctctgtttggcggcacaggcaactatgccagtgcactgttcctcacagcagctaaatctaatgcattggacaaagttgaatctgagattaaagctattgtagaggcttccaagaagagcccgttgttttctcaattcataaaggacttgtcagttccaaaagcgaccagggtgaaggctatagccgaaatatttgctgacgctgggttttcagatgttacaaagaatttcttggctgtcctggcggacaatggcaggctgaaatatattgaacgcattgcggagagatttgttgatttgactatggaacataagggggagatgaaggttgtggtcaggacagttatttcactcaccaaggaggaggagaaagaactcaaggaaaccttgcaggatatccttggggaaaacaaaagtttcctctaacaagtgaagggcactgtttttattgtctcgtgngccacagatgcctgctgaacaatttatgttcatttcttcttttcttaaagagcatgcactaagaacatgaaggatgcatgccatggaaagtctttgaaagtcattgaaacgtatgagctcctcatgc

SEQ ID NO: 72892 - DNA, 659 bp, Zea mays
  Clone ID: MRT4577_166477C.1
gggtcctagatccaccgagtgcctccaaaaaatcaacatacacgggtcaccgctgagtttgtcgcctccctgtactgctgccggcccgctgcgctcaccggtgacctctcctgctcgcgccgccggagcccatcccaccgcacgctgcaccgtcgtccgcctctccaatttgcgccgccggtccccgtcaatgtcgattgccgtctgcctcgctatccatgcggcctgactccatcccgtcggttgctgctcccattcccccacaccgtgcgccctcctcctccgcacgtttgacaactccgaactccatctgctcattcatcgtctcgtccattcctacaggtatgaacactcttcgaaatgtgcctactcggtattagggatttcttggttctagcgaggaagaggacgaaaggttcctctcgccaatacctagggtttcggccgcagatcgagccagtggccccaacttgtgcgcgagcgaacgtttttgatacataattatttttctattcccccaatcccctggtgctgatttcgttttcctactcatcgatgagcaattaccgccacaaagcaggcgtcaacgcacacgttctcatcgcttcctcctccccagagcatagattgctttcagcccatctttggaataaaagcag

SEQ ID NO: 72893 - DNA, 1741 bp, Zea mays
  Clone ID: MRT4577_166478C.1
gaccctcgaggctggccgggaaaaaaaaaaaaaaaaaaaaaaagcccgccctcctccccctcgctccccgcacgacgcaagaccacctcaccagcctcctcgtccccgatctcctcccacccgcatccaagggtttccttctcgaccgtgcggaacgagccacagaacaggggtagcccccggcggctctcggacatagagtggcctccctctttttcctcgcactccgcaagacgcaagaccacctcaccagcctcctcgtccccgatctcctcccacccgcatccaagggtttccttctcgaccgtgcggaacgagccagagaacaggtatggcggcggcgcggcacctcagatccggcctccccctcctccgcgcccacctcgcatcctccgaatccgcggccgtcgctcaggtttcgaggggcttcgcgtcgcaggccgccaagcccaccgggaaggagatcaaggttccaaaggctctgtttggcggcacaggcaactatgccagtgcactgttcctcacagcagctaaatctaatgcattggacaaagttgaatctgagattaaagctatgagaatcacttctaggaagccaaatgtagaggcttccaagaagagcccgttgttttctcaattcataaaggacttgtcagttccaaaagcgaccagggtgaaggctatagccgaaatatttgctgacgctgggttttcagatgttacaaagaatttcttggctgtcctggcggacaatggcaggctgaaatatattgaacgcattgcggagagatttgttgatttgactatggaacataagggggagatgaaggttgtggtcaggacagttatttcactcaccaaggaggaggagaaagaactcaaggaaaccttgcaggatatccttggggaaaacaaaactattttggttgaacagaagattgactacagcatcatgggaggattagtgattgaattcgggcagaaggtgcttgatatctcaatcaggaacagggcgaagcaaatggaggcgttcttgaggcaaccacttgacttctaacagccttttggataaaagaagcatcatcggaatgcagaggctgtcctgttgaaggttttcctgtgtctgcaattttaatctggccttttgaataaaatgtttcctctaacaagtgaagggcactgtttttattgtctcgtgggccacagatgcctgctgaacaatttatgttcatttcttcttttcttaaagaagcatgcactaagaacatgaaggatgcatgccatggaaagtttttggcagtctgggagaattagtagctcctcatgcaatgcattattctccttatactcatttaggttcatcgattgcaaacgaaaaaagaaaaaaaaaaagcggccaatcaggaacagggcgaagcaaatggaggcgttcttgaggcaaccacttgacttctaacagccttttggataaaagaagcatcatcggaatgcagaggctgtcctgttgaaggttttcctgtgtctgcaattttaatctgtccttttgaataaaatgtttcctctaacaagtgaagggcactgtttttattgtctcgtgggccacagatgcctgctgaacaatttatgttcatttcttcttttcttaaagaagcatgcactaagaacatgaaggatgcatgtcatgaaagtttttgaaagtcattgaaacttatgagctcctcatgcaatgcattattctcct

SEQ ID NO: 72894 - DNA, 1075 bp, Zea mays
  Clone ID: MRT4577_166479C.1
cctcgaggccggccgggccgggattcacgctagaaggggaagataccgccccggcacgctgttcttgaccgtcgcatccaatccaacggcattctggttctagggagcccgcaggaaggcacctctgcggcgaccagcgtcaagaaaggggatcggaacgcctccatctcaaaccgacaaaccccacgaaggcacgaaccctctcttcctaggttcatcgttcctcctccgcgtccttccttccctccgcatcgcggcgcggcgcgatgatacagctgctcttcacgctgctagcggcggagggcgccgtggcggcggtgctactcttcaagacgccgctgcggaggctggccgtgctcgcgctcgaccacctcaagcggggccgcgggcctgtcatggtgcgcaccatcgcggccaccgtgcttgtcgtgctcgcatccagtctccacagcatggccaagatccgcggccacgccgaaggggagctcgacggctccggggtcgtggggttcacccccaccgaccaggtccttcttgcgcgacacctcctcgaggcgtcactcatgggatactccttattccttgctttagtcattgaccggctgcacaactatgtcaaagaaaatcgaaggctcaggaagaaattggaagatgtgttgaaacagaataaggcactagaagaagcaacaaatggaaagctagaagagaacaggcctgaccagaaaaacctttcccatgccaaggataattaacaatgacatgcgctcaagagactccctgccatcactgcctatgcctgaataggatgccggtcactgatgttctcccagttgagaattagcattggtaaatgaatgctcggttacaacgtgctaaatcctttgcatctggccaaatttgtaaataagcactgggtgatgcccatcagtaaatacatgatgctactgctgttaaactaaatgtggcaaatttcataatgctaggtattgttctcggtatctaaggtgttgtttggttcctaagtatggtggaaagaaaaaaaaaaaaaagaaaaaaaaaaaaaaaaaaagcggcc

SEQ ID NO: 72895 - DNA, 185 bp, Zea mays
  unsure (1)..(185): unsure at all n locations
  Clone ID: MRT4577_16647C.1
cacttccgtttttattgtccattctccgccgccggcgcgtggggggagggggggcggacccaaaaaaagcccaacgggggggncnnnccataatccactcacgcaccattctccgtnttaacgaacgaatcacggggtgccacaactacctgacgatcccatccgcgggaaaattaccaaccgcc

SEQ ID NO: 72896 - DNA, 1662 bp, Zea mays
  Clone ID: MRT4577_166480C.1
cattgggtatgtcgacctcgagcccggccgggaaaaaaaaaaaaaaaaaaatccccaatcccatcggtcagcctcatccatccgcagggcgccggcggcgggagtcttgccggccacatcgtcgccgatttcaccgatccgagctccggcctcttagccatggaatctccacgaactctggaagccctcaccaacgacctcgtggtggagatattcctccggatcggctcccctgccgacctcgttcgcgcctccgccgcctgcgtcgccttctgccgtctcatcgccaacccctccttcttgcgccggtaccgctccgtccacccgccgctacttctcggcctcctcgacccttatggcgatatcgaacccaccgagacaccccatccctccgctgctctcgctggcgccgtcgctcgcgccgctgacctccgcttcggcgagtattttcctagcagcaagttatccggctattgtgtctctgacgtccgagacggtcatgtcctcctcaccatcacgccctaccttgaggacgacgaggatgagaagttggtgccagacctcgcggtgtgcgaccccctggcccgtgtatgcctgcgactgccccccataccagacgaccttctcgcctccgtccaggttcagcagcaagatctcgtacattatagttgcgatacattccttgtcccttcaggagatgaagaagatgtcacttcttttagagtgatcgtcatgatgagatctacacagatgctagtcgcttttatcttctcttcaaccactggtgattggagtgctggttcacctttcagcctgggttctctgagaataccatacgacaacattccgagttatgcttatggctgcttctactggaaagtcgagtctgagaacaggttgctcacgctcaacatgagcagtatggagttctcagtcgttgacctcccacctgggcccgataggagtttcgtcatcatggtggaggcaggcgaaagcaggcttgggatgtttagtctaattaaccatggcaccactctctgttatgccattaggcaaattgggagcgagaagtccaatcagttggagatggacagtgtgatccctttacctgagggttatatttactttcgcattcacggttcatatgaaggacacattctcatatttggatacgcgtttagtgaagacgcatgcttcgcacttgagatcaagactatgaagattgagagagtctgtcggaagtggcgtggtttctgtccttattttgtgttcctgccatccatgtcacaaaggaggatataatgtggactgaattcacatccaggtttggggcttcttccaatccattctgctggtgtggagttgagctaggtgatggcacaggccctcatgtagatgtagcacatctgcaacactgtcccatgttatcctcctagtctgtcgtattgtctagcttacattagtagctactgaaactttagttatatctatatttttaagttctcccgactgtaatttaagatgtgacaaaggcgtctttagtgtatcaagagccaacttttataagccggctctgtgtgctgcgaaatcacgtgtttgctagtcttgtgtagaattatcatgccagcatcatcagacatggtacggtcagcatgtttctcg

SEQ ID NO: 72897 - DNA, 146 bp, Zea mays
  Clone ID: MRT4577_166481C.1
aatcagaataagatagaacttaccaaaccgacccttacatacactggttctggcacatacaaacagacacgggggggggggggggggaacaagcatggggacacacacatacgaccataatatatgggggggagacacaccaaaac

SEQ ID NO: 72898 - DNA, 1245 bp, Zea mays
  Clone ID: MRT4577_166482C.1
gacgagacagatatcgcgcaccaggaggttctgaagggttctaaagataaaagaaaggaaacctttgcagaaggcaacactcaggaggaatgcaagtattattcaacacctggaggatgcaaattcggtaaaacttgcaaatacctccaccgtgagggaaatggagggaaaacagaggttgaaaaagctgagctaaactttctaggtcttccactgcgaccaggtgaaaaggagtgcccatactatatgcgcactgggagctgcaaatttgcgactaactgcaagtttcaccacccagatcctactaatgcatcttcaaaagaaccagggttggaacatgagaatggcgatgtaccactgcaaaatgtccaaggatcctctcagcctagccttcagatgtggcctgaccagagagcattgaatgaacagcatgttccttttcttgctccagcaccgtcatacagtggagggatggttccacctcaaggaatgtatccatcttctgattggagtgggtatcatcaggtacctttgaatccatattaccctcccggtgttcctttcccgcattttccagctgcccatatgaatcacccgatgtacaaggctgcagatataccaggacatcaaccaccaccatctgatgagtatcccgagagacctggccaacctgaatgccagcatttcgttaagagcggtttctgtaaatacaggatgaaatgcagatatcaccatccaaggtcgcgccagtctgcaccaccaccagcaggtcttagccccatcggcttgcctatcaaacctgatcaacctgtgtgcacttactatggacgctatggcttctgcaagtatgggccagcctgcatgttcaaccaccccttcaacttcgggcctcccgtgccggcagcaggaccacccctccctgggcagtaccctacgcatggaaacttcgcctagcaggcacgtgacgagcgattttctgagtcgccacgattgcttgtaataacctcctccacctgtaaagtagcgtagacaaaagctgtacgtggttggcagtagacatccagcatgtaggcgcaacgaagttgcatggagatgggtacgttacagttggtattgcaaactttacgctgtacaagttacagtccatacataagctgccatcgcatttaaaaaaaaaaaaaaaaaagcggccaaaaaaaaaaaaaaaagagagtacttaaaaaaacggccgcgggcccggggttt

SEQ ID NO: 72899 - DNA, 1205 bp, Zea mays
  Clone ID: MRT4577_166483C.1
ccgggcatccaatccaacggcattctggttctagggagcccgcaggaaggcacctctgcggcgaccagcgtgaagaaaggggatcggaacgcctccatctcaaaccccacgaaggcacgaaccctctcttcctaggttcatcgttcctcctccgcgtccttccttccctccgcagcgcggcgcggcgcggcgcgatgatacagctgctcttcacgctgctagcggcggagggcgccgtggcggcggtgctactcttcaagacgccgctgcggaggctggccgtgctcgcgctcgaccacctcaagcggggccgcgggcccgtcatggtgcgcaccatcgcggccaccgtgcttgtcgtgctcgcatccagtctccacagcatggccaagatccgcggccacgccgagggggagctcgacggctccggggtcgtggggctcacccccaccgaccaggtccttcttgcgcgacacctcctcgaggcgtcactcatgggatactccttattccttgctttagtcattgaccggctgcacaactatgtcaaagaaaatcgaaggctcaggaagaaattggaagaggtgttgaaacagaataaggcactagaagaagcaacaaatggaaagctagaagagaacaggcctgaccagaaagacctttcccatgccaaggataattaacaatgacatgcgctcaagaaactccctgccatcactgcctatgcctgaataggatgccggtcactgatgttctccctgttgagaattagcattggtaaatgaatgctcggttacaacgtgctaaatcctttgcatctggccaaatttgtaaataagcactgggtgatgcccatcagtaaacacatgatgctactgctgttaaactaaatgtggcaaatttcataatgctaggtattgttctcggtatctaaggtgttgtttggttgctaagtatggtggaacgaagtcgctctgctctcattctattgttgtttggagctctcaaaaaaaaaaaaaaaaaaactcgtgcgagagtggcttgaacgtaaaggaaaacaacctgctaaagaagaacttcaatgacactggttgctaatgattggttatgcaagaacacatttaactttgcatcaactcacaagatctcatgtcttatcctttaaaaattataattaagcctgcttggatatgtgaacagagtgtttt

SEQ ID NO: 72900 - DNA, 383 bp, Zea mays
  Clone ID: MRT4577_166484C.1
atgaaggatttcctccggttttttccctataggggggttgttttttttttttggaaacaacgggcttttttaatggggctttgtttcacaccccccaaaagcctgggggtcaaaaagtttaccccctgttatccccccctttttatacagttcaaacttttaaaagggaaatttttttttctacccggggggcccccccggtatttccggcccggtccctggggggttccccatttaccctaatggggggctattaaaagccgggctaaacaaggggaatagtttttcccgggggaaaatggttttcccttaaaatttcccaccaatattaagggcggaggcataaattgtaaacccgggggggccaaatgggggggccaccc

SEQ ID NO: 72901 - DNA, 281 bp, Zea mays
  Clone ID: MRT4577_166485C.1
gacatatagcggctccaacaagcgctaggccctgctcggtctattctcctctcttaagcgatggcagtcgcagcgcatgcactcggctggtagccggtctcgacagcatagaacccaacttcaatcatgcctgcgctagttccgaactcactcagcacccagtacacgctcgactgtcagtcgattgatatcactgttacgctcattgctgccatcgcacaactgagccgcaactggtgacatccatgctgctggtcaagaactagtcataggaagaatat

SEQ ID NO: 72902 - DNA, 224 bp, Zea mays
  Clone ID: MRT4577_166486C.1
aatctcgtttcaaatacgggcatccttttatgctgcgtgaggcaccccctcaaccccatggtcaacatcaagatcgggatcaatgggttcagcaggatcggaagactgcgcgccaaagcggcccttcacattgacgatgtttagctcgtcttcctgaaccaccccttcatcaacaccgactacatgacctacatgttcaaatccaacactgtacacggacagtg

SEQ ID NO: 72903 - DNA, 540 bp, Zea mays
  Clone ID: MRT4577_166487C.1
gtttggtgatgggcaacagagctaatgcaatcaaccttgacttctcagatgtaattgttgacatctatgtatgatctccttgactactatgggaactgtttagtgagaaactatattgttttcagatattgtctgatgaagagctagaaacatatctaaaggtgattgcagtaatatccatgggaacataagttattgaacatgacttgttaaatatcagagagctatatgatcatgtgttggccctactatatgactatttaagaagcaagatgaacactatcaccccaattctaacagcattggtgggtgaatcagttggtgccatattgtgcatggtggaagtttggtaaacttggccaagcaacctggtagcataatttaaatacttggtgtagagaaggtttgttattgcttatggataattctggaatcttgtaatatgtaaggtattttttggtgtgtttctgaaccttatgtgcatcaatgcttagtatgacataagtgaacactacttattagcttatgcatgttgctaaa

SEQ ID NO: 72904 - DNA, 596 bp, Zea mays
  Clone ID: MRT4577_166488C.1
aagcagtggtaacaacgcagagtacgcggggaacgcgagttggaaggaggtctggaggtggacgggctttgggcagcgggggagctgggcgccagcagtgtcgaactcgaaccctaccaaatcacaggtacgttgaaccctaccagatccgggctcgtcttgtctcatgtggatcacgccgtaagcgtcatagacagtggcggagctagccaacgatgaaagcatgtgcacctcctcgttgaagctgatattaattttgagagctgtgaagtagaaaactctaatctttggaggagactttctgaatctgcatcaaaagttgagtgtggtgagaatcttacgtacaagtcaacaactgatgttagtttatttttatttttgtggataagaaaatgctttgcttaatgcaagcaagtctgattgtaaggtactcctctttagatctgatttttgtcaccatcattagcatgtaagcaagcaagaactcattttgtgagcaagcagtatatgttccactgttggagctagctagctttgtggtttgttggagctttgtgtaatgatacttcctccttttccagctatgttacttgcag

SEQ ID NO: 72905 - DNA, 296 bp, Zea mays
  Clone ID: MRT4577_166489C.1
cggacgcgtgaatcgacccacgcttccttaacaaacacaataagacacaccagggaggcttacaaaactggggggaaagatctacctgatctaaatggcaagctcactgatatgtacttccaagttcctactgtaaatatataaaaataataacctcaccatcataatcaaaaacggagcctactatgaggatatcaaaaaaactattaaagctgcttcctaagatccactcaagggtatcatgggttatgttgaagaagatctggtttataccgacttccttggtaacaacatgt

SEQ ID NO: 72906 - DNA, 905 bp, Zea mays
  Clone ID: MRT4577_16648C.1
atgggtaccctcggagctcgccgggatgcgatccacccagcaactatagcccggatcccctcagaactccgaagttaagcgtgcttgggcgagagtagtacttggatgggtgacctcctgggaagtcctcgtgttgcacttccctgctaacgccgctcgcgcatcctattgccctcgcgccaccgtcgccgccgccgccgctgcagcgagccaccgccccgccgtcgcttgaggtagacaccaatccaccgccatggggcgtatgcacagccgcgggaagggtatctcttcatcggcgctgccgtacaagaggactcctccgatctggctcaagacagctaccaccgaggtggaggagatgattaccaaggctgcgaagaagggccagatgccgtcgcagattggtgttctgctccgtgaccagcacggcatcccgcttgtcaagagcgtgactggtagcaagatcctccgcatcctcaaggcccatgggttggcgccggagatcccggaggatctctacttcctcattaagaaggcggtggcgattaggaagcatttggagaggaacaggaaggacaaggactccaaattcagactcattcttgttgagagcaggatccaccgccttgctcgctactacaagcgcaccaagaagctcccacccacctggaagtacgagtcaaccacggcgagcactctggtggcctaagtgatatcctctgatggcttggtctttagcacctatgagcttgttctagatatgaatttatgtaattcttgttatgtctggagctggttagatggactaggaacctcaactttttctatgtttacttggagaatcccataaaccatttttggtttcgcaattctgtctgttaaacgtaacatgcattcatatttct

SEQ ID NO: 72907 - DNA, 697 bp, Zea mays
  Clone ID: MRT4577_166490C.1
ccggccgggaccgagacgcaggccgcgagccacgctgggacgcgttggcgtgccacgggccgaactaaccgcgctggctgccgcgcaccacgccagggttgttggccgcgtcgggcagcggagcagaagacgagccgccgggctgaacagccgcgtcggcgagccgcgggtaggtcgcgccgtgcacagccgagggcggagagcggctcgaccacgagcgcccggggtgcggctgtcgcgcaccaggcgccagcgccacagcgagctcagtgctcagcgcctcctgctccgctgctcggctgctcctgcccagctgcccttctctcctctccagcgcagcgcctgctctccagcgcccgtgccgcgcctcctctccaacggccagcgccgcgccgctgcgcgctcgcggccagccgccggccaggcccaggccgcaccgcggcaggcggcactgcgaggcacagcacagccgcacaggcgccaggcgcgcaacgcagcgcgctcgagtccgtatgtccgtatcttgaccgccgttgggcttgcaggagagccacgatcttgagctccttccttatctctacagtttctataccgacaattaggggtgttttttggattggcttttgtgggtcgggaaccctacaccaagatttgccctctctgccaggggggggcgggcaaggcaatttgaatgtac

SEQ ID NO: 72908 - DNA, 625 bp, Zea mays
  Clone ID: MRT4577_166491C.1
cctcgaggccggccgggatagatacatactcacacatctgctctctcgacacctcatgggcctctgcgcacaaagccaccacgagacacgaccaaagtctttttatgaccacgggcgattctgctacccaagaggagaaggaaagggacggaaaacacttcatttccttcttccttccttctctaccatatagtcaagaaccaaaagtatgttgagacttacataagctacacgtggggcgactcaccacaacaagctgcaggctccccacggtgatccacgtcattcgtgctgggcatgctggtcgccatgaggatgtccaaacctgcacttgagaactccatcaccgcgggctacaggtgctacacgaggctaacttgggccacgtgaggtcggtatgaacgagcggagtggttgggcaacggtcttatgattgtagtcggttccggatgtgcgcgacgtcgtagttgatgacctgtcgcagctgcactcagttcgtgaaccaaaggccactccaagcgcgtgtcaccgatcaacattcttcgtcgtcgtcgtcggtcgggtaaactgatggaatatgttcgcaaacttctccgcggattgcataattcgcgcgttaatatat

SEQ ID NO: 72909 - DNA, 206 bp, Zea mays
  unsure (1)..(206): unsure at all n locations
  Clone ID: MRT4577_166492C.1
agaacaacaanggcaccgggancctgcagcactccgacagcgnaggcgaccacgacaccgccacgcgggacgncgccnaccgcgncgcccgcaaaggcgacaaagaccnagngccggacacaggccgagggaacccgnggaagcngaacggcccgnncgacggcgacagcnncaagcggnggcgggcggggcaagccccgggccgg

SEQ ID NO: 72910 - DNA, 461 bp, Zea mays
  unsure (1)..(461): unsure at all n locations
  Clone ID: MRT4577_166493C.1
gctcaaccgggacctccaagccaaagtggccaagatgctgaaggaaaccttcggggagatgctgtacgtgtcggagtcggagcacatggcggagttcccttccccggacgagctcaagggcaagatcgtcatctccaccaaggcgcccaaggagtgcttccagactaagagcagcaaggacgcggcggcgacggaggaggaggagggcgtctggggggaggagatctccgacgacaaggccaccgcccgtcaagcacgtcctcgctctccacccactgcaactttatgtctgcatctgcatgcatgctgctccaccaaggcgcccaaggagtacttccagaccaagagcagcaaggacgcggcggcgaaggangangaaganggcgtcttgggggaagagatcaccgacgacaaggccaacgcgcgtnagatgtcggagcagtccaacggcaagtaacggc

SEQ ID NO: 72911 - DNA, 237 bp, Zea mays
  unsure (1)..(237): unsure at all n locations
  Clone ID: MRT4577_166494C.1
ccagttgcttcataagctacgcatcgccaattcgccatatacgcacatacccaacgacgacgcacgcgcgtgcgcaaaccaccaaccggagcgagtaccaaccggccggcccgcccaacaagcaggcggctaggtatcgacgaccgagcacatcgagctagccccggccggtcatatatatatgccaggcggcggcggtgatccagcaggaaggagcctgngcatgggcatgggcgt

SEQ ID NO: 72912 - DNA, 288 bp, Zea mays
  Clone ID: MRT4577_166495C.1
cacaacctattcccccaccacctccccaagcctctgcacctgtaggcttaatgcggcgacccgtccgcatgcgagtctatatgctcctgcacagaccatgcaacggatgcggcaagtaccacgacgacgagaccaccgccacggggcggatcaaaagcgaccgacctcaccgcgcccgccacgaggcactgggcgcacgccttcgactagaccaacaaggccgccaccccccactgccacacccgccaccgctgcacctgctgcaacggctcctgccgcacctgcaac

SEQ ID NO: 72913 - DNA, 110 bp, Zea mays
  Clone ID: MRT4577_166496C.1
cccacgcgttcgctaacgcgctggcttcaacgtgatttatatttacaacttcaattcctagcatggctggtagagcaaacttactcattacatgtccaataaccacttta

SEQ ID NO: 72914 - DNA, 218 bp, Zea mays
  unsure (1)..(218): unsure at all n locations
  Clone ID: MRT4577_166497C.1
aagaaaacaccggcagaaannncaacaagcccccangccaccanaagnnnngcnagacgngaangaagncncacggcagaacncacgcaacagaagggagnnnaaccaagcncacangcccnganacaacnngcngcagcccacgnccaccaacagangagaaaagccccccgggagaagaaagcnanaagcgangggaaccaaacgcgccacagaag

SEQ ID NO: 72915 - DNA, 1500 bp, Zea mays
  Clone ID: MRT4577_166498C.1
ataggcttttctccagatccccaaggaagaagaagatccggtcagatatatgtcgatgttcatcccaacgtacataagctatcaatggtattatatgtttgggcgcttttttttttttttttttctagtagaaattgatgacccaagcgataacataaactgatcagtacaaggatccgatctcagctgttcttcctcttttttcattgttttgaggactgagctcagttatttcgattgagcaatgagctgcatcttcgtttgttccattcatctcagggtctcaccggatgtggtcgtgtgatgtgtggtcacatccacacatgacgaattcaagttcccagcaaagaacgcgaccagtcgatccatgagctccacggcctcgccgcagccggagtcgtagaggaagaaggcgtgctgcttgcccttagactcgagccactccaccgtgccaccccacccgcttgccgcgagggcgtcgtagtacgccctgttcctcgcccgcagcgagtccagctctgccgcgcagacgagcaccctctcgcacggcaggtttcgcaggctgggcgccgcggcggccaaggggttcatccgcgggtcgtccacgccgtccgtcgcctcggggcacacgatcccccacagcttctgcgtcagcgccactgactctggtttctctccgtcgatgcgctgcttgccagcgaacccggcgtgcaggaggaccgcgccctcgatttgcaactctgacgcggcggccatcatagcgacgttgtggacaaagttcccgccggagctgtccccggccaggaagatgcggcccaggtcgccgtgatgtgatagccaggggtccccgcttccagaggccgcccacttgagcgcgcggaaggagtcctcgtaacctgccggaagcgggtgctctggcgcgaggcggtagttcacggagacgatgagcaagccggccttcgcggcaagggtgttgaggaagggctgatagggcggagacgctgccgagtgggtgacaaagccgccgccgtggaagtagactagcacggggaatttcttggagtagtggtcagacccggtagccgtgtccgggaggtacaggcgaacgtagaggccggagttgctgtctaaaacgacatctttggaggtgacgccggtggcgggatcaaagccggccggcacggtatcggtgccgaccaagcggtcgatgcggcggtcgctgtagatgcggaagaacggagtgtcgagtatgatgtcggagctcggatccatggtgtctgtgagggtgcagcgtgtgggggtagcagcaagaaggcagatagcaggagatctgaaggtccaggtctccagacatctctcactgcggcaggcaaagcgaccagtagccaacgaagccgatattttgggggctgttgggaggcctatcgccgcggaagcgcagaagctggccgtgtggaaattcatgggaatgcggttccagggagggagctacccggccgg

SEQ ID NO: 72916 - DNA, 179 bp, Zea mays
  Clone ID: MRT4577_166499C.1
aaaagtcagatggaaaaagcaactgaagtcttagaaaatagaaaatgtaattttaaactattccaataaagctagaggaggaaggggagttttgactaaagttccttttgtttgttttaaattttcatcaatgtatatagaacaaaatgccatattaaagaggggaatgtggaggactc

SEQ ID NO: 72917 - DNA, 1014 bp, Zea mays
  Clone ID: MRT4577_16649C.1
gccggccgttctcggacgactctcggcaacggatatctctgctctcgcatcgatgaagaacgtagcaaaatgcgatacctggtgtgaattgcagaatcccgcgaaccatcgagtttttgaacgcaagttgcgcccgaagccttctggcggagggcacgtctgcctgggcgtcacgcctgctaacgccgctcgcgcatcctattgccctcgcgccaccgtcgccgccgctgcagcgagccaccgccctgccgtcgcctgaggtagacaccaagccaccgccatggggcgtatgcacagccgcgggaagggtatctcttcatcggcgctgccgtacaagaggactcctccgatctggctcaagacagctaccaccgaggtggaggagatgattaccaaggctgcgaagaagggccagatgccgtcgcagattggtgttctgctccgtgaccagcacggcatcccgcttgtcaagagcgtgactggtagcaagatcctccgcatcctcaaggcccatgggttggcgccggagatcccggaggatctctacttcctcattaagaaggccgtggcgattaggaagcatctggagaggaacaggaaggacaaggactccaaattcagactcattcttgttgagagcaggatccaccgccttgcccgctactacaagcgtaccaagaagctcccacccacctggaagtacgagtcaactacggcgagcactctggtggcctaagtgatatcctctgatggcttggtctttagcacctatgagcttgttctagatatgaatttatgtaattcttgttatgtctggagctggttagatggacaaggaacctcaactttttctatgtttacttggagaatcccataaaccatttttggtttcgcaattctgtctgttaaacgtaacatgcatccatgttttgtcgagcgtttcctccaccatcaaaaattcctgtagattatatttttcttctagttattacatattttctctcacgtcgatga

SEQ ID NO: 72918 - DNA, 150 bp, Zea mays
  Clone ID: MRT4577_1664C.1
aaagaaacaatgactccgtatgtgctcgctggcggcgagattatcgccctcctctacgtcatcaagaatcgaagaggtatcaagctcccgccgtccccgcggtcgatacggctgatcggacacgttcacctcatcggccgcgtcgcaccc

SEQ ID NO: 72919 - DNA, 398 bp, Zea mays
  unsure (1)..(398): unsure at all n locations
  Clone ID: MRT4577_166500C.1
ggggggcccggggggggacaacaaaananccggnggccanacggcagacncnncggggacagaggcacanacccccacgcgaaccggaaacacacgcacagccggcnacaggancggggccgcangaaggcaaccnaaacagaacnccnnaagncacaacgggggaagcaccacaggccgccgcacgaaaacgcagccagagccaagccaaggccccacagccacgaaccaaaaaccaccgaaaccaagcgcaggcgcccgggcccccccaaaggcnccgaagnaccggcagaggagggccacagcgagcaacacaccaggcccggaaccaancgcacccaggaaaccagccaggacggccaaggcgccaaggcanacaccaccaaaggcagcggcag

SEQ ID NO: 72920 - DNA, 169 bp, Zea mays
  Clone ID: MRT4577_166501C.1
gggcagcaccaaaattaacccttgttgcctcaggataaaccaaaaacaaaccctgaagggggtaacacattccatctaaccacaaaccatccgggtggatgctgggtttttctggacccgtggatgaacccagttttaacatctggcacaggtcgccctttaattaaaa

SEQ ID NO: 72921 - DNA, 782 bp, Zea mays
  unsure (1)..(782): unsure at all n locations
  Clone ID: MRT4577_166502C.1
gtacccncgaggcggcgcgggaattgcagcaaatcccttccggaccccgaaaaccctacactccccatcgcgccggcgccggcgccgacgtcgacgccatgctccactccagcttgtccaagtgccaccctctcccgctcctcgcaaccgcgtcctcgccccgccgcaccctcgtcgccttcctcctccgcgccggctacctttcgaagcatccagccacttcaaccgcgcctcgtccgaccacaaccgcccgtgcgagcgccagggtcgacacttccccgggcaaatcccgcttcgggctggaaggcagggtttcgttctccaccgcgccggatgggtccgcattggctggcggcgggagggcgcttccctggcttgcagctgagactggcaacagcggcgcgcccgttgctaggactagcgccggccgatcctcctcgtgggagagctccgcagagaagttcttctcgagagacgaccaatacacgcgaagagaagtgtcgggagtcaggatgtcggacaaggtagctattaaggatgacgatgatgagaatgaggggaatggcaatcctgaacggggaaggattaagggcaggtaccaacgaagagaggtgtcgggaaacaggatgccaaacaaggtggcgattagggaacaagaggatgaggatgagccaattgacaatcccaaatggggaaggattaaagacaggtaccagcgaattgggggagaagggatggcagggtccccgtgatgagaaggtttaggaggggagagatttgac

SEQ ID NO: 72922 - DNA, 289 bp, Zea mays
  Clone ID: MRT4577_166503C.1
atccagctcactctccactggtcgtttactcttgcagctccacccttcactcagtgttagtgtgttattagctataggctctagctatccgcgccactccttcgtgtatccatcagccttctcatcgccaccaatggccactgtcgaggtccagaccccgaccgtcttggcctccgatgaagctcccgtcgtggagaccccgccgtcagccgtcgtgcccgaggagtctgcccccgcctaagccgatgccgaagccgaagctgctgctcctgctgatcccgacgagctt

SEQ ID NO: 72923 - DNA, 636 bp, Zea mays
  Clone ID: MRT4577_166504C.1
cggacgcgtgggcgtgtgcgagcgcctctccatccgggagaggcgcaccacggccgctctcggctgcctcctgtacctcagcctcatcggctacaaggctgcggttccctatttcacagccattcttctcgtcaactacttcgcgtcgttctacgtcatattccggcgcacgtcccagaaccttgaggctctacaggagcagctcagtctcgtagaagaggaaggcatccattcgttgcatggcgcgctcaacacaaagtataccatgttcaagaggtttcagggaacgatgcaggtggccgcagtggcattcatcatggtatacatgagggctgacgacacgccagacaactactggtttcgcgtgcttgtgcgcgagtgggtacagttctgcatcttcatgtacattgggtggaacttcaggatccctgaggcgtcactccatctgcctgccatgccccttgtgaagtcagcatgggagatcaccatgcctcctcctatttacagtgtggagatggacgcagccgatttcaagggtctagtgttggatcagcggcatgttggagtgaggacgactgaagagtcaagctgttctgcacacaaccgtgactgggctggttcagaacccaacccaac

SEQ ID NO: 72924 - DNA, 709 bp, Zea mays
  Clone ID: MRT4577_166505C.1
gccggccggttcgggagattcgtgtcgccggttcatctatatccgatctccgctcgcgctgaacgctgatctccaccgcgctcgccgcagaggagcaggacatcaatcacgacgaggtgggggagccgcctccacaagtacaggccctagtacgactacctcatcatgctgattatcatcgccgacctcgtcgctagcatcgacctaccaccacgccgcgcactcgcttacgtgatgttcgctactggctttgttagatctgctggaaatgacttctacatcctcgcctacacttgactgccgttcgtctaatcgtagcgatgtttgcgataaatttactacaaagcacgacattgctattagccgctcgtctactaccatattgccatgatgatattgctgctggaggatagctacgacgaatccgctctctgctattctgcaaatctggtcccaggaccttgcatatgatgcctctgactgactctgagctcactctggtgggatatctggtctctgtggactcaatggagactgatgtgcctactgcgcatcgttgcgtacttgctgccgacgacggatctatgttgttatggaattgagccgaaaatggcccgaatgattggctgctggctatcccccttgaataagactgagcttgcaggctagggttgactgatctaaagccacacgattttgttttataaat

SEQ ID NO: 72925 - DNA, 259 bp, Zea mays
  Clone ID: MRT4577_166506C.1
ccgacgcggcattccagtttatacactatcttgcgggttcaccaatgggggggttttcggtatctttttcgctcaaatttttttatcgcccaagttttctctacttggtgggcatgaagaagtttcgggatctgcactgactaggcttcatgggcctatttttgatagaagaatttctcccgtcgatcgtgtacacggagcaattgtgtcattgtgcaccaatcagttatagcgctgcaatgttaatatattggtgatt

SEQ ID NO: 72926 - DNA, 371 bp, Zea mays
  Clone ID: MRT4577_166507C.1
atgaaaacctttatctttccgcgcacgtaaattatcagaaaaactggtcaaacatgcaccggcagtttggcagcacaaaagcaacagggcaaaggtgctatgccgtccggctcctaccgttgcttctactgctagtaactgctgcttctgctcgttcacggcacctcaacacaaacgacgcgcaacgcgatgacaacccagctcccagcactaacaagccagctccagtaaagtttattttcagcagggcacgttggctgaggcgacggatagactctattatatggatttgcgaccacattcttaggttagagaaggagatattgctttcattacgggggcaggtcatgatcaaagactttaaaatgaac

SEQ ID NO: 72927 - DNA, 388 bp, Zea mays
  Clone ID: MRT4577_166508C.1
gacctttgggctgatttatgtgcttgtggatgtgcgggtgactttagggttgtctcggtggcggtggtgtgccgagacggtcgatatcgatagtgtggagattgagaaagagaagacggcagtggacgacgggggtaagtttgtagagtctctgaagagtgtgaggaagaagtcgtagaagtaggagtggtaggtggaatgcaaagtggtttgaaaagtggtggagaaggagtgatggtgtgttgatacagagtggtggaggtgcgagcgggaggatgtctccgttgttgtgttgctggacgaggtttgggttgagacggcggtggtgtggtgggagatgtggtgtgagtgggcgggttggtgggtggaggagtgtggggtgtgagtc

SEQ ID NO: 72928 - DNA, 756 bp, Zea mays
  unsure (1)..(756): unsure at all n locations
  Clone ID: MRT4577_166509C.1
atgtctccttttcctccaccgttcctgtcacccacgcagcacgccggagcagcagtagcagtcgagctcggcatcagctcccttgctgctcactttgcagcacctcgccagctccctagtaacgctctgcacctgccgtcgaactctctcagatgtgtttgtgctgagatgccattcgaagtcgatgatctgttcatcgccaccggccgcaagcaccagttttgttgaacgcgagaacgtcttaatcagttgatatgagttcaaaattgatgtgtcgatctgtggtttgacctagtgttctcggcatgtctatgttctggtcgaggccctagatacgtgattgaagatcctttgtggtgatgaaggtgaaatcagcatagcactcgccaagcattctacagaagagctcccaaaataaagagtgaagatttaagatgaagtggttgctgaagaggagtctactccagtgcctgttcatcaagtggatggagccatctaactaatcatcgtgttagaagtatctggaacctcttctctgcaacaaaggagaaggtttattcccttatcttttggttagttacttcatgtggaggccttgaagcttagaatggttatgtgtatctcttatggaaaggcttcacccttccaattattgtaaataagttatgcactnttgngtactatcagggacttggtataaatacatctctttctaccttgtaaaacttgagttctgggatggaaaggggactttac

SEQ ID NO: 72929 - DNA, 752 bp, Zea mays
  Clone ID: MRT4577_16650C.1
gggaaaaaaaaaatagccgctccattttttgtttagttgatgaatagaatagagcggagccgctccgttttttgtttggttggagaaccatatgagtgtatagtggaggaaaaggaggagagcgctcacgtccggtcgttttggtggagcgagagcatttcaactatttatggtaaatttttatatggagactctaggagccgctctggttctcttttattggaaaccaaacatccagaaaatagtaatgtagccacttcattctcctccactcaaccaaacacacacaaagccaggagccaggatctgattccattggtgcatcatctattcatctagaaagtcatcccaagccaggcttctttgctttgtggtgactgccattgcaaagctagcaacatgccatattgagttgcttccgggagcacgggtgtcattgggtaaggttgctcgttcccgaacctcagacaggagagtctggcaatgggcctgtgactatttagggctcatgaatgaaccagccatctgtttatcagtactgggaccgtccactgcccaaggtaatggtcctggtgttgtgcattggcgtggaggaggaacaacgatgtttgtattgcaggtccaccgtttcatgattttcatttaccgacctcctcccaacaaaatgaagatcgggtcagtccggcatgatttctctagcagaatgccttgtgcatatatatagcgaccttattttgtgatcgtaccatgct

SEQ ID NO: 72930 - DNA, 896 bp, Zea mays
  Clone ID: MRT4577_166510C.1
acaaagtacactttacattccagaactcaagttttacaaggtagaaagagatgtatttattacaagtcctgatagtacccaaagtgcataacttattaaaatagttggaagggtgaagcctttccataagatatatacataaacattctaagcttcaaggcctccacatgaagtaactaaccaaaaaaataagggaataaaacttctcctgcaaaaacaacaggggataaaaccctgagtacgcaattactcagcaagacttacccgactaaagaaaagactctcaagggtatgctagctgattgggaatcaaggtaaagtttatcaatgatcaaagactcctttttgcagaaaagcttgctacgagttgatcctttattgcagagaagaggttctagatacttctaacatgatgatcagttagatggctccatccacttaatgaacaggcactggagtagactcgtcttcaacaaccactttatcttaaatcttcactctttattttgggagctctacatgaaattacatgatcatggatgcttatgcttatgtagttagcaaataaggtattataaagcattacatgattacacctacaagctatctgttggaacttgctctcagcagcaaggaggccaacaagggtgaaaggtggtgacaacagggttacgtgctcgggggcaatagctctgttgatctcgcctctcacgggcactgtgcgggggtatttataggtatctgagtgcccagcgtcttgtgttaaggacgcatgtgccctcagacacctattttatccccagaatattcccataaagcagggttacaaactgtaattacaagtattcctttacaagttaggcccgtaatacagaggcggccacgcggggcccgtt

SEQ ID NO: 72931 - DNA, 485 bp, Zea mays
  Clone ID: MRT4577_166511C.1
ccccgcgtccgtagttctagagcgcgggcgggcgccctttttttttttttttttttttttttttttttttttttttttttttttttttttttttttttttttttttttaccctttcattgcaacaaaatgcaatatgggaactggaattcatcgggaaccttcaagtatcccggggggggggggggaggtcaagggtgacccggagaggggtatcaccattgatattgctctggggaaggttgagaccaccaagtactattgcccccttattgaggcccctggacaccgggactttataaaaaacaagaacactgggaccacgccaggtgactgggctggccttataaatgaccccacccctggggggtttgggggggggatctccaagggggggcagacacgggagcatgccctccttggggccacacttggagaggaaacaaaagatttgggggtgcaacaagaggggggcaacccctcccaa

SEQ ID NO: 72932 - DNA, 195 bp, Zea mays
  Clone ID: MRT4577_166512C.1
ggttgataaatgaattttataaccatataaagtattagaaaacattttggtagccggcagtgcctctgtgaagataccatatccctacccatgctattcaatatccagtatcaatcactgttgactgttcgagatgaaaggggaaatgaaagtctgctgagctatgtttcatcaaaaaaaaaaaaaaggggcggc

SEQ ID NO: 72933 - DNA, 642 bp, Zea mays
  unsure (1)..(642): unsure at all n locations
  Clone ID: MRT4577_166513C.1
gcgttcggcggntggcccccagtctcggcaggggggacaggcttgtacaacatttgatcgatgagtcagtgggcctaaagaaataaagcagcccaagatgatctccatcatgggaatccgtggctccggcaagaccgcacttgccacagaggtgcatgagaggcatcttagactatctccagcagcgtacccatccccatacccatattcaaactctactctgcgaacagcgcaatctatagtacaaaacagtgcttttgggtaaactatgggtagactgctgcagacggtcttaggacagagaaattcaataactccggacacaatttggataaaatgatgatcaacatggtcaacttttcatctgacagctgcaacctaaaaggtatgtgataatgttgttgcacaaggaccgaccatacccgggtatagggggagggatgaatcacgtttggataagttaaaatcgaaaataggatcaggacatgcagacgaaaacgaactaatacgaatggaatttgacggaaacgaacgggagatagaaacttaattcggaaatagacatccaatagacaaattcaaagctggtatattagataagttggtataatattatacacagttgttgcatacataaattga

SEQ ID NO: 72934 - DNA, 509 bp, Zea mays
  Clone ID: MRT4577_166514C.1
ttttttttttttttttacaagacacttacattcagaactaagttttacaaggtagaaagagatgtatttacttacaagtcctgatagtacccaaagtgcataacttattaaaatagttggaagggtgaagcctttccataagatatatacataaacattctaagcttcaaggcctccacatgaagtaactaaccaaaaaaataagggaataaaacttctcctttgttgcagagaagaggttctagatacttctaacacgatgatcagttagatggctccatccacttgatgaacaggcactggagtaaactcctcttcaacaaccacttcatcttaaatcttcactctttattttgggagctctgagagagttcgacggcaggtgcagagtgttaccagggagctggcgaggtgctgcaaagtgagcagcaagggagctgatgccgagctcgactgctactgctgctccggcgtgctgcgtgggtgacaggaacggtgggaggaaaagg

SEQ ID NO: 72935 - DNA, 1510 bp, Zea mays
  Clone ID: MRT4577_166515C.1
tacctcgaggccggccgggccgatcttttctttccgcccaaatcccgtttttcccatcccgtgaagaaccatggcacggtactccccaccgtcgctgcgctgcttcttccgctgcgccgccagctccgcctcccgagccgtaggcagcggcactcggaagaagaaccttgtattcttgggctctccccaggtcgccgcctcggtcctggacaagctgctgggcgcgtccggctccccggaatccgcatttcaggtggctgccgtcgtgacgcagccgccggccgccaagaacagggggaggaagttgatgccgtcggccgtcgcgcagttagcgctcgatcgcgggttcccagaggaactcatcttcacgccagaacgagcccgagaagagtcgttcctgtcggccttgaaggaagtggaaccggatgtttgcataactgctgcttacgggaacattctgccccagaaatttcttgatatcccatcgtgcggcacagttaatatacacccaagtttgttgcctctatatcgtggtgcagctcctgtgcagagggcactgcaggatggtgttgcagaaacaggtgtttcccttgcatatactgtccgtgcattggatgcaggtccagtgattgcgtgtgaaaggttttctgttgatgaatgtattaaggcaccagagctactttctatgctgtttcatttaggatccaagctattgattaatgaacttccatccattcttgatggttcggctaaagataaggcacaaccacaggatgactccaaagctacactggcaccaaagttaaattctgaggagtcatggctatcgtttgacgaagaagctaaagtgctgcataacaaggtgcgggcatttgcaggatggcctgggacgcgcgcaaagctgcaactcataaaccaaaacagtgtacccgatgtactagagattaaggttatcagcacgaaggtttcaacatcatgtgtcaaagttggagatgaaaacgagatactattctctgggagctcgttgctgattccttgcagtggttcgacctggctcgaggtgttggagcttcaactccctggaaagaaagtaacaaaggcacaagatttttggaatggtttgcgtggtcagaagctgatgaaattgccatagggggatatctgcattcgcagcacaggagtgtgcctatatgcatagcaagggttattgaggtcagtcattgcgcgaacataagcagggtagtgctagaagcctatatgcggagatctcggttttatgactaccttttccttctggtaaacttggtgctataaactcgtaactcagttacattaggcatgccatttgtattgcttcctcaatttcagaaaacacactgctgtaactatttcagttattcaatttttcactgtcataactgagctacaaacatttgagaaataatacagttatgtggtgagtaataaggcaataatttgccgtaccttcttgaaaaaaaaaaaaaaaaaa

SEQ ID NO: 72936 - DNA, 2044 bp, Zea mays
  Clone ID: MRT4577_166516C.1
cgggacttttaggctgagggagggctcctctcggggacctcgggactgcgccatcccaggctaggggggaatcgcgtcgtccggcgaggaaatcgcaacaacctcccgcttgctagcggaggcggagtagcgggggtcgttggggtcgggctcctctcgtcgacctggatggtaccatataaaccactgtcgggcaaacaacccagagcgtttagagagagagaagacagggagaaggaggaagagccgccgcggtggaccgggtgatttgtcagggttgtcaggggagtcgtcaggacacgggcaagctttgtacgctaccaattcagcgaatgaccgacgggggtgcgtggaattgctcaccggagcaaaccctccgccgccgaaccaccatccttctgagcagcgcacgctagcgtccggttcctggacgcacgccgtgaactcgaagtccaccgctctgtgagcatcaagcgccggcatcgctagggtttcacgcccccatccccccagggcgccgtcgatcccggtcggccatctcccggtgcctggtaactgatcgttaatttcatcgatgggtgccatggaggaccgcagctccaagcaggcaggcgcgggcttggtggcccacctccacgacgacctccttgtggagatcctctcccgcgtccccgccaagtccatctgccggttcaagtgcgtgtccaaggcctggctcgacctcattgccggtcccgaccaccgtaagaagctccgccaacccatgcagggactcatctacatgaatccagagaaggaccgccacagcttcagcttcctggacctgccactgacagtaggatccgtgcctctggacgttgccgaccctgcaggcttcatctccttcctgacggaacaccctgggatccatcgcctcgtcttactggattcctgcaatggcctgatcctattccagcaccttatggagctgccgcactacaacagtttgggctatgtcgtgtgcaacccgaccacgaagcaatggcgagccgtgcccgagcccaactgcagctccaatgtaccaatgaactacacatatttggcttttgatccgactgtatcctcccacttccacctggtccggttcaaaaagaatcgcgagtacatggagcccatgtcggtgcatgcttactcgtctaaaactgggatatggacctatagccaaactgagaaagaagaagaagaatggcagaatcaggtctacttatctataagtaatcgatgcgcctttgttaatggcttcctgcatttgctagtttggggctcgaacaaaatgcagatactcattgtagatgtacaaggacgtccaagaaggatgatcagactgccagacgtggctgctggtaattgtgagggatgctactgtgtttactttggccaatcccaggggcatctgcactgcatcactaaacaattattcgacttcaacgaagagaaatacgagctgtccatctgggctcttcaggattacgatgcacaagagtgggtgctgaaggacactgtgagctccctccagctctttggaggaaattgccccacaagtgtcgcattggagttgtacagcgaggtggccagcatgcatctggatcgcaatgtggtcttcttcttttcacactgtgaacgtagattcatagcatatgacatggacagcaaggaagttagtgttttcagcagttccaaagctatacacaggtggaaggttggttgctatgttccttgtttctcaccggcgcctctcaaataagcactacaagctattagtgcgtggtctaatacaagtatgagctgctagcaacttattagttagactgtaataaggtcaagtgaagtatttcgtccatgagtgtttggtctaattagttccgcaagcctgttgaggcatttatatatatatgtagtctatatttatggatgctagttaaattaatggatacgttgcatgatttatgtttttggctatatataagttattatatgcacgaaaaaaaaaaaaaaaaaagcggcc

SEQ ID NO: 72937 - DNA, 682 bp, Zea mays
  Clone ID: MRT4577_166517C.1
ccggccgggaccgttcctgtcacccacgcagcacgccggagcagcagtagcagtcgagctcggcatcagctcccttgctgctcactttgcagcacctcgccagctccctggagaagttttattcccttatttttttggttagttacttcatgtggaggccttgaagcttagaatgtttatgtatatatcttatggaaaggcttcacccttccaactattttaataagttatgcactttgggtactatcaggacttgtaataaatacatctctttctaccttgtaaaacttgagttctggaatgtaaagtgtactttgtaaaagtcttccgctctatctccaatgtgtgtgtatcaaatgtgattactgtaatatacctgttatgtgggagatccttgggataatgagttccagttggcgaactcgatagccttgttaagttacccggtacacgtgcacagccacccgaggccattaaggcaaggattggtgcatgtgggcccgataacttgggagggctgtcacagcgtggtatcggagcgatcccccattagcatggatattaaagtgatcctttgataaacttcaaaatgattttgagtctaaatgatttgtataaacttaagaatctataatcaaggtttgatagtagaagtgcaaaaaaaaaaaaaaaacccgcggcc

SEQ ID NO: 72938 - DNA, 687 bp, Zea mays
  unsure (1)..(687): unsure at all n locations
  Clone ID: MRT4577_166518C.1
gtccgtgcattggatgcaggtccagtgattgcgtgtgaaaggttttctgttgatgaatgtattaaggcaccagagctactttctatgctgtttcatttaggatccaagctattgattaatgaacttccatccattcttgatggttcggctaaagataaggcacaaccacaggatgactccaaagctacactggcaccaaagttaaattctgaggagtcatggctatcgtttgacgaagaagctaaagtgctgcataacaaggtgagtatctgattctcaatgtgtccaacaaagcttttgccaaccaactctggtaggtgcgggcatttgcaggatggcctgggacgcgcgcaaagctgcaactcataaaccaaaacagtgtacccgatgtactagagattaaggttatcagcacgaaggtttcaacatcatgtgtcaaagttggagatgaaaacgagatactattctctgggagctcgttgctgattccttgcagtggttcgacctggctcgaggtgttggagcttcaactccctggaaagaaagtaacaaaggcacaagatttttggaatggtttgcgtggtcagaagctgatgaaattgccatagggggatatctgcattcgcagcacaggagtgtgcctatatgcatagncagggttattgaggtcagtcattgcgcgaacat

SEQ ID NO: 72939 - DNA, 282 bp, Zea mays
  Clone ID: MRT4577_166519C.1
gtgggtggggttttattttatgaaattagaaaaaaaaaaagggggaaaaaaaaaccccaaggataaaacagaggaaaaaaacaacgcacggcgccctacttaaaaaaaaatcccccccctccgtccaaacaaattgaagacctcaggggcggctagagcccaaggtgggaaaggaagaccctgcacgaaacatgccggaggaaaacttggaacccggaaagggggggaagcggtcccccaaaaaccaaaaacaggcaacgaggaaggaaaagagatcacccc

SEQ ID NO: 72940 - DNA, 230 bp, Zea mays
  Clone ID: MRT4577_16651C.1
ctcacgcgtgcgctgcttcttgctaattcatactgatagaccgcgtgctgtgttcatcacgcacatggatgacttggatgttgctagctaccaatttgaagggagcaacatggtcaagacctggatggaaggggcaaacatcaatgacacggggcttacatataaggatgactcaattgtgattcattcggagggatctctagatctctctggaccagatatatgttgat

SEQ ID NO: 72941 - DNA, 951 bp, Zea mays
  unsure (1)..(951): unsure at all n locations
  Clone ID: MRT4577_166520C.1
acaaaatattcttttcatttctaaaactgaaggttattacataggaagagttacatttattacaagtcctgatatactcaaagtgcataacttattacattagcaggaaggtaggaaccctccaaagcttatacacaagactaactaatcttccttcagaactggaaacgccctccaaccataggaacacctagagtactcatcatcaccttattgcagtgaagaggttctagatacttctaacacgatgatcagttagatggctccatccacttgatgaacaggcactggagtaaactcctcttcaacaaccacttcatcttaaatcttcactctttattttgggagctcttctgtagaatgcttggcgagtgctatgctgatttcaccttcatcaccacaaaggatcttcaatcacgtatgttcaacaaaactggtgcttgcggccggtggcgacgaacagatcatcgattttgaatggcatctcagcccaaacacatctgaaaacatggtgaggacgaaccacggcgagatggggacgaccaaactgctcattctatcgaccaggtggcacgcgacggaagatgagcacgcacccagcgacggaagcaggaggaagcgcgcgcacgacacagtagtagagtcgagtggaggggcgttgatttggaagggagcagggatgaccgaacctgagagagttcgacggcaggtgcagagtgttaccagggagctggcgaggtgctgcaaagtgagcagcaagggagctgatgccgagctcgactgctactgctgctccggcgtgctgcgtgggtgacaggaacggtgggaggaaaaggagacatgagagataggagtgaggggactgatagaagagagtagaaattgagtacgtcttcttgcatgagaaggagcgtacatgagtaagctnctagacctcaactggataagaac

SEQ ID NO: 72942 - DNA, 1007 bp, Zea mays
  Clone ID: MRT4577_166521C.1
agtttgcaacaaaaaaatattaaaaagcattcccagactacacccataaactatgactcccaagggactagaacacatgagttttcatccataaacttacttcatcttttccaagggattaatccatcctatttgtgactttacaaggctttctaagcaaaggatttccaaatagcctccaaattttaccaagtgcttaaatgaccaaaacaaggttattcaaaaattgccataatttttttggcactgcacttttatttctaaaatccaatcctattaattagacctaatagccagagcaatgaatcagctcaccctaatccaacccgactcaacaaaacgtgaaacaacatggttctctcgtccagaccttctgtagaatgcttggcgagtgctatgctgatttcaccttcatcaccacaaaggatcttcaatcacgtatctagggcctcgaccagaacatagacatgacgagaacactaggtcaaaccacagatcgatacatcaattttcaactcatatcaacagattaagacgttctcacgttcaacaaaactggtgcttgcggccggtggcgacgaacagatcatcgatttcgaatggcatctcagcccaaacacatctgaaaacatggtgaggacgaaccacggcgagatggggacgaccaaactgctcattctatcgaccaggtggcacgcgacggaagatgagcacgcacccagcgacggaagcaggaggaagcgcgcgcacgacacagtagtagagtcgagtggaggggcgttgatttggaagggagcagggatgaccgaacctgagagagttcgacggcaggtgcagagtgttaccagggagctggcgaggtgctgcaaagtgagcagcaagggagctgatgtcgagctcgactgctacagctgctccggcgtgctgcgtgggtgacaggaacggtgggaggaaaaggagacatagagacaggagtgaggagactgatagaagagagtagaaatctc

SEQ ID NO: 72943 - DNA, 652 bp, Zea mays
  Clone ID: MRT4577_166522C.1
agggggtacccgaccagacgtacgacatgtggtcggtctccggtgtcagcgcctacacgggcggggtctgggtggcggcgctgcaggcggcggcgggcatggcgcgcgtcgtcggggaccgccccgccgaggcctacttccgcgcgaggcgggacagggcggcgcgcgtgtacgacgccgagctctggaccggcgtctacttccgctactacaacagcggcggctgcggcgccagcgagtccatcatggcggaccagctggcggggcagtggtacgcgcgagcgtgcgggctggagccggtggtggaggacgccaaggcacggagcgcgctggcgaccgtgctggactacaacgtgatgcgggtcaagggcggcgccatcggggccgtgaacgggatgcgccccgacggcaccgtcgacgcatcgtccacgcagtccaaggaggtgtggcccggggtcacgtacgccgttgcggcggccatggtccacgagggcatgacggaggccgcgttccggacggccaagggcgcccacgacgccgcctggggcaacgacggcttcgggtacgcgttccagacgcccgaggcttggacggaggacggcggctatcggtcgctgcactacatgccccgaaatagaggatccaagcttac

SEQ ID NO: 72944 - DNA, 1813 bp, Zea mays
  Clone ID: MRT4577_166523C.1
acaaagtacactttacatttcagaactcaagttttacaaggtagaaagagatgtatttattacaagtcctgatagtacccaaagtgcataatttattacaataataggaagggtgaagcctttccataagagatacacataaacattctaagcttcaaggcctccacatgaagtaactaaccaaaagataagggaataaaacttctcctccaaaaacaacaggggataaaaccctgagtacgcaattactcagcaagacttacccgactaaagaaaagactctcaagggtatgctagctgattgggagtcaaggtaaagtttatcaatgatcaaagactccttttttgcagaaaagcttgctaccagttgatccttaagctaagttttatttcactagttaggttattacctgaatctatatttgcctgatctagttcaagcacttggcctatactagctccattttattcattctcatatttcacttgctaactacgatgatggtcacagggatgagtctccataaccgaggagcaacgacgattcgaaccgattatacccagctggggatctctaaccacacgacatatgtagcacttaacccttgcatatgtcaaccgttcccacggagtcctccactacatgaacaggtccgcgccacccgagagcacattaccctatcaagcgtgctactatgccaggagggtacatgctactcccaccatctctccactcccagtgcgcgattgtctctttacgtatggaatagccgggttcaagcttaccctgtcccataccagggtatgtggctagttgcaaagtctcaaccacaacaggccagtcaacggtacggtccttgatcgacatagacgggcgactctgtctgctcagcgcctggtctagatttattaaccatttccccatttttggtacccggcaggggtactcttttccaatgatgagcccactccggccgaagtggagtcatcaccttagtttgctttgatttttgaatcaaaaagcccataaccaatgttccacaatcattctttttgaaaacaaatgatttttcagtttctaagcagggttaagcattatcagttctttttataaatcagggatcaaggtatagtattcaaattccaaggaatggtaatgcatcaattgttcatcacacaactcctatcacctaatgcatgatttaaggtgataaagcatttaaaacacaaggaaggggcaaatgcaccggggcttgcctttgttgcagagaagaggttctagatacttctaccatgatgatcagttagatggctacatccacttgatgaacaggcactagagcaaactcctcttcagctaccacttcatcttgaatcttcactccttctgttgagggctcttctgtagaatgcttggcgagtgctatgctgatttcaccttcatcaccacaaaggatcttcaatcacgtatctagggcctcgaccagaacatagacatgacgagaacactaggtcaaaccacagatcgatacatcaattttcaactcatatcaacagattaagacgttctcacgttcaacaaaactggtgcttgcggccggtggcgacgaacagatcatcgatttcgaatggcatctcagcccaaacacatctgaaaacatggtgaggacgaaccacggcgagatggggacgaccaaactgctcattctatcgaccaggtggcacgcgacggaagatgagcacgcacccagcgacggaagcatgatgaagcgcgcgcacgacacagtagtatagtccagtggaggggcgttga

SEQ ID NO: 72945 - DNA, 250 bp, Zea mays
  Clone ID: MRT4577_166524C.1
gggtgggtcgttttttatatttttgttctcgttgcgtggatgggcagagagagtatcatccacaccttgagctcacataagaggggcacggtatatgaccccaggcttaacaaaaaatagggggcctccgcaaggaaagaagtcagggcgctactaaccagctgcttcagcatttccttgacggtgaacgatttcgttaagagcgggacttccgggagaagctggccctctaaaggaaactatgaaagta

SEQ ID NO: 72946 - DNA, 1285 bp, Zea mays
  Clone ID: MRT4577_166525C.1
gaatggtaatgcatcagttgttcatcacacaactcctatcacctaatgcatcatttaaggtgataaagcatttaaaacacaaggaaggggcaaatgcaccggggctttgcctttgttgcagagaagaggttctagatacttctaacacgatgatcagttagatggctccatccaccttgatgaacaggcactggagtaaactcctcttcaacaaccacttcatcttaaatcttcactctttattttgggagctctacatgaaatgacatgatcatggatgcttatgtttatgcagtttgcaacaaaaatatttaaaagcattaccagactacacctacaaactatgactaccaagggactgaacacattaatttcatccataaactacttatcttttctaagggataatccatctatttgaactttacaatgctttctaagcaaaggatttccaaatagcccccaaattttaccaagtgcttaaatgaccaaaacaaggttattcaaacattgccatacttttttttggcactgcacttttatttctaaaatccaagcctattaattagacctaatagccagagcaatgaatcaggtcaccctaatccaaccgaactcaacaaacgtgaaacaacatggttctctagtccagaccttctgtagaatgcttggcgagtgctatgctgatttcaccttcatcaccacaaaggatcttcaatcacgtatctagggcctcgaccagaacatagacatgacgagaacactaggtcaaaccacagatcgacacatcaattttcaactcatatcaacagattaagacgttctcacgttcaacaaaactggtgcttgcggccggtggcgacgaacagatcatcgattttgaatggcatctcagcccaaacacatctgaaaacatggtgaggacgaaccacggcgagatggggacgaccaaactgctcattctatcgaccaggtggcacgcgacggaagatgagcacgcacccagcgacggaagcaggaggaagcgcgcgcacgacacagtagtagagtcgagtggaggggcgttgatttggaagggagcagggatgaccgaacctgagagagttcgacggcaggtgcagagtgttaccagggagctggcgaggtgctgcaaagtgagcagcaagggagctgatgccgagctcgactgctactgctgctccggcgtgctgcgtgggtgacaggaacggtgggaggaaaaggagacatgagagataggagtgaggagactgatagaagagagctc

SEQ ID NO: 72947 - DNA, 173 bp, Zea mays
  unsure (1)..(173): unsure at all n locations
  Clone ID: MRT4577_166526C.1
gancagaaacaccctccattaccagacttttctatttccctttttttagccaccacagattcattatttttttggcacagccgagtacgtggattattcgtgttatgcactcagacttacagagagataacaagatgagctctgaaaaagcataaacacgccacatttatttt

SEQ ID NO: 72948 - DNA, 334 bp, Zea mays
  Clone ID: MRT4577_166527C.1
gaagaattgtatttattacaagtcctgatagtacccaaagtgcataacttatttataataattggaagggtgaagcctttccataattgatacacataaacattctaagcttcaaggcctccacatgaagtaactaaccaaaagataagggaataaaacttctcctgcaaaaacaacaggggataaaaccctgagtacgcaattactcagcaagacttacccgactaaagaaaagactctcaagggtttgctagctgattgggaatcaaggtaaactccatcaatgatcaaatactcctttttgcagaaaagcttgctaccagttgatccttaa

SEQ ID NO: 72949 - DNA, 320 bp, Zea mays
  Clone ID: MRT4577_166528C.1
atcattaggaaaccgatataagggcgggtttttttttcaacgatgggcggttccttaaacctgacaaaacatttttgttctccccttcctgctttccctccctgtttggtcacaatacaatcttatctactcctgtactgcactcgactgcactgcactgcactgtacgagagactgcttactggctcttaacttctcttccttgctctccacccaaaggaaaacccaacaagaaccctttctccctcccaagttccaacccctgtttgatcagtccatcgcttggcttccgttccgtcccatcccgtcccggccggtca

SEQ ID NO: 72950 - DNA, 540 bp, Zea mays
  Clone ID: MRT4577_166529C.1
ccgacttactgctctgtcttaagatctgtttttagtctaaccccttatatgtggttcatgtggcgattcagtacttgcgacgagggtgaggtgcttgttcttgatatgtttgggtttgtgtatctgtaactgtgggcacattaggagtaattcagtacttggggggacagggtttgcaatatgatagttccacaggagtaccataaaccccatactttgtgttctcattcaagtttattttctgagcatttctgcttaaaggttgttggtttagtgcttctcgagcattttgtttactatctcggtggagctttgtggtggcaaaaaagcactacttcagcaaataggacttaacatctatgatatatctcttcacttccacttcctaagagcgtagacatgatgttttttttgtctgagttcatttgagcccagcatatttttcttcactggattatctagttccttcgggaagttataggctgccttttttttcttttgggaaaggaggctcaattatgactaatgtgcaacttttgg

SEQ ID NO: 72951 - DNA, 257 bp, Zea mays
  Clone ID: MRT4577_16652C.1
atcgtcagtcggtggcagtttacaagaataatactcaaggaacagtcgcttctgaggttgggacgttgacgagatcgaagaaggtgcgagttgtggaggaacaagatttcggggagggggaggcatgcccgtggatagttggagcgcttgtactcgtgcagctcagtggaattcatgtgactgggcccatcgtgagggagctcggtggaagagctagtctcacagttggtgctgtttcggctagtgatgtgaccggg

SEQ ID NO: 72952 - DNA, 537 bp, Zea mays
  Clone ID: MRT4577_166530C.1
gcgtactaaccactcctcgcttagctagagacggtactagcgggctcaaagtgtcgacagtacgacgacgacgacgcatgggccacacatgggatggcagctctccggcggcgtgccggggttccacggagctgacggggctaccccgggcccaggtgcggggtggcagtgctgactgccgagacggtgggcaggaagaggagcgtagccataggggatccggtggaactacatgagatggggcaccaacctgatcatggtgactacgacgacgcttatgctgttcgaaggggggttggggctggcgccgaccgcgaaccgcaaggagacggaggtgctgaagctgaaggcgcgcgactccgggactgagaccggtgaccccgctcgggatcaccctcgccgacacgctgaatctgtggcgacctctgccaaatgctctatgaatggatcgtgctcgcgctcaaaaacaccggggccctccgacaaagcatcagatagatccatacctatgttttgttaatatcagacttagaagtc

SEQ ID NO: 72953 - DNA, 673 bp, Zea mays
  unsure (1)..(673): unsure at all n locations
  Clone ID: MRT4577_166531C.1
ggtaccctcgggccgccgnctatttccaggaatccattacttgtctctgcgccttactgatgaatactcctcaaatgcccatgcacggaaccagttactgccaccagaactgttatttttgctctctgataattccttacaacattaaattctagccagtgataacattcttgccgcttcagttgttgtgagctccactgttcgatcttcctcagtgcctgagaaagtagtcttccctgttattacagatacgaaaacatcagtggctgacttgtctcccctttgggctaccaatcttgaagggaaggtaaatggagctgtggaaacatgcagaagggaagacaactgggtgatgtgtaagcgtttcaggacatatttcaacttctcacataccatgatagctcagagacttgacccagatgaatgtgattgggcatatggtacgaatataattgatctggcagtttggaggaagacaagcatcaggaatacataccatttatggttgaacgagaatctaaaatctggtcttacactctggaaatttggtactttaccaccagctcttcatacttgtctacactattattgnctacactatctacggcttgggggcaagccgtatttcaagcggtggggaatgtcagcacatctgcacgtgggggaatggata

SEQ ID NO: 72954 - DNA, 384 bp, Zea mays
  Clone ID: MRT4577_166532C.1
acgaccgcaagaatggcataggtatgaattattactggtcagattcagaacggaaaccaagggcaaatcttaacacagctttgcgatcctcgagccttaaccaatttaagggagcatggtatcggcaaaacagacagcacagggattccacattcccactagataaggcccccacaacatgcctgccaagagcacctaccggaaaccccattcctttaaagagctatcttatgcttgagcgctgctccctcaggggggggatcgtgctcctgacggtgaccgaactagcagaggtcatgggggagctctttttattattggggtttccactagataaggcccccacaacatgcctgacaagaggcactacgggaaaacccaata

SEQ ID NO: 72955 - DNA, 242 bp, Zea mays
  Clone ID: MRT4577_166533C.1
aaaaactggggttttttgaagatagaacggatgggaggaaacaagcaaaaaatacaaggggggatttaaagcaaaacaggtacatcaatgaagaattcattaaaaaggaaggcacaccaaaaaggtttggtttaatataaattagggcccggttaatcaaatttaaaaagaaatctgtgttctccttacaaaaggtctaggttaaataacataacactggcgccgttgacaaggaaatcaga

SEQ ID NO: 72956 - DNA, 731 bp, Zea mays
  unsure (1)..(731): unsure at all n locations
  Clone ID: MRT4577_166534C.1
ccggggggagagtggccgagtaattacttaatgttaatgatatatactgaattaaggatatagataatggtgtacccaatttagggcatcttcggttaggggtcgattgagggggattggaggggattaaattccctcctatacaaatttgaatataaggggattaaatcccctccaatgcccctcaaaccacctcaaaccgaacaagcccttggtgggccacatagtaaaagaaaaaatggcataggagtaattacattgaaatttgacatattgcgctccaagtagtaattacattgttttagcatggtagcatagctcaagagaagaggccagctgtgcatgaccattcaacaaaaaatggcatgcatgctaatatgtcataacttcaaaacattctatagatgtcagtattaaatcggcctctatgcaaactacaatgcatcacaaatctgaaactcttaactgaaccagactcacgctcagtccaatgtctcacttccctcccataactctcagcctattgcccgcccccattcctatgcccccactgnggaaggatcattcactttgtttcccatggttccatcccgctccccaccaaccccgtctctcagcccctctccactgcccccctnctttctctcttttaccccccatccccccttgccgttcccgcggccccncgggtgcctnatggctcttccccctttcccccccccccgcccctc

SEQ ID NO: 72957 - DNA, 135 bp, Zea mays
  Clone ID: MRT4577_166535C.1
aattctgacgaaggcgagctacacactgctcagcgacctactactcgcgtcagaaggcatggtgctgagatgcacacgctcgcatcatgctatatgacgagacttaaaacgcggtacggactctcccatctgata

SEQ ID NO: 72958 - DNA, 403 bp, Zea mays
  unsure (1)..(403): unsure at all n locations
  Clone ID: MRT4577_166536C.1
ggggcccgactccgagtctgccgttagctggctagcgggggcgcgtgcgagtgtcttgtgggcctgggcggtggggcccggggtgggccacccgcttttttgttttgagcggtcgggnggctctcggcctctgcttggtttgtcggtggcttgatctccgggggcccatatcacgcggggggtactctggccttggtggcctgcgggggcttggtcgggattccaggtcggggatcctttgggcgtgccgccttctgggggtgccgagagtgcctcgtgggttttttgggggcgggggggggggttccccagagagaagagcgtggggggggggcccctccgtctgggcccggggggggtcgtgggaggagggggggccgggggggtggaggcggtggtaggg

SEQ ID NO: 72959 - DNA, 107 bp, Zea mays
  unsure (1)..(107): unsure at all n locations
  Clone ID: MRT4577_166537C.1
caatacaagggccaagtttgcgnggacatacacgtacatgacaagccggcgcatatgcaacacggggaaacaaaagaattactatgcactcccggcccggccaggcc

SEQ ID NO: 72960 - DNA, 240 bp, Zea mays
  Clone ID: MRT4577_166538C.1
gcccttcctacctatttttcccaacgggttttttgtttcgaaccaaagcaaggccacccgggcccggggccacgcgacccgaacaggacacaaaaagcgtcacggccacaccaccggccgcacaaaccacacacacagctatggatcaaggaggccggagcatgagcaagccaccaccaacgccagcgccccaagagaaggacagaccggaagccgccccaagaccaagtggaaggcacc

SEQ ID NO: 72961 - DNA, 297 bp, Zea mays
  unsure (1)..(297): unsure at all n locations
  Clone ID: MRT4577_166539C.1
ggccgctttttttttttttttttntttttnnnanngntnnnnnntnnntntttgtttntgtgttntttcgtttgntctttctctacttgttcctggtttgcgtgattctggttgtggtgctcntcttcttggcggtgcgnntncttgctgttgcntgcttgcggttttgtggtcgtgtcttctctggttgttgttgtgcctgctgtggccttctctcttcttggttctntgtgtctccggctgctcggtggtgctggtccgcttcctctcgccttccttgttccgggcgtctgtgcc

SEQ ID NO: 72962 - DNA, 427 bp, Zea mays
  Clone ID: MRT4577_16653C.1
gcacgctaagacaagcaaactggtagctgtgacacactattactgctccaccaagctgagaaaagcaaactggtagcagtgacactttctttctagattcaagcacctacgggcacttttgtctttccagatgcaagcacctagtaccagaaacaagggaggacaaccattccacgatttcccacctagaccgccacggcctcgaagcaccaccgtccgcctcagtagccgcctcgggcgactgtgacgatgaaggagaccgcctcggcgatgactgcgagctcgcgtaagaacccccttgcacgtggtacgacatgtgacgtgggctccactcccgcaccaccaccggtagctgcttcgcctcgcctactgccacggtcgttggacaccaccacctcccactgcgtccaccgccccctcgctgcca

SEQ ID NO: 72963 - DNA, 182 bp, Zea mays
  Clone ID: MRT4577_166540C.1
ggccatcaacaggccgaaatgccataaaacccgccacctacttgttatatgctgaagcaaataactttgatcaaaattcgggacatgggcccccccacttttcaaactggcttacaccaatatggcccccaccctttaaaaattaaaagccacaatgtgcactttgcccctgtggaaaccca

SEQ ID NO: 72964 - DNA, 656 bp, Zea mays
  unsure (1)..(656): unsure at all n locations
  Clone ID: MRT4577_166541C.1
ctgtgcggcgctcgagccggccggtcgaagacagtcagtccaccacacagccttccgcctgccctgcctgtagagggctagagctacaagctacaactctgaaagtctgaacagtgcgccgcccaaccagagatggcgccgcataccaccgcagccgccggcggcggcggcggcgaggaggcgctggaggaggccagcactctccggcaccgccacagcgctgccaaggacggcggcgaggagggccaggccaacaacggggtcgccgccgccgccgacgacgacggggaggggaacgcgctgtcggtggagcgcgcgttcgcggaccaggcggtgccgncgnggcgggatttgctgattttgccccccctcccggtcagcttcttcctggacatcatgttcagcgtcatcgtgatgaagatcaacctcaccacggggatcatcccctcgctcaacggctccgcggggctcctcggcttcttcttcgtacgcctctggaccgccgccatccgagaggggcggcctccccagggagcccttcacgcgccaggagaacacccgcattcaaaactgggtaggtcgaagcctacgacatcccccttcagcgggggggtttgggaccaaccttggtttgggcgtgggcgaaaaccatcccc

SEQ ID NO: 72965 - DNA, 587 bp, Zea mays
  Clone ID: MRT4577_166542C.1
attggctcatgttcattggctggagctgcaatctatggcacttcaactaggacatttgaaggcatggagtctaagcaacataaaggtaatccatatcattacggtcggaaagcgtctagatacaagcaccattgcaaaactgtcagatgcaatgccactcaaacacatagcgcacaacagaaatcttaaagagcaactattcagcgagataagaaaggaaatgtacaaaggcgcaaaactgtatcaccgaagcggcggcactccctccattccgctctggaaaatgtggagctcctggtgcaggcggaggaagtagcaacaactactttcgacgattccttctcttctaatgtagcatgctcttggactacctgaatgaattcgagaacaacctgcttgctaagaggcaccgaactggaaatgattgctgcaacggactgatgcaagcatgattgctttgcgttggtctcactggcactagccactactagttatctgatgctgaactgcttcctttcgaacataacatgtgtctctagagtaaaatacaactgaaaatgattgttctgggaacttgctctggcaaa

SEQ ID NO: 72966 - DNA, 2039 bp, Zea mays
  Clone ID: MRT4577_166543C.1
ttcctctatgttgtttaacaagtttctgatgatttttttgctctgatagtacgccgcctactgacatgttgaccccacatggcagccagaagaccgaacggtgtataattccgctacgcatattcgccccctcttctctcgttttcttcttttgccccggaggcgcggacaggtgaggtaccagcaccaccagagcattccgtcctgcccccgcctccacctcgccgcgaccacacctcctctcctccccgccggctcctcctcctcgcatggcgacagcctctcgtccctagccccccagatccagcggcgcgcacctacacacgcgcaaggaaccgtagacgcgcccccgcgcctcccctctctcccgtcctccgccacccatggacgcggggaatggctgcagcgcgcgggcgctggcggcgtgcgtcgtcggcggcatcgtgctgggcgcgtcggtgctcgcgctccacctcgcgggcgggcccgccgccatcccgcccctgcccctgccgccgcccatcggcgcgcttctgccgccgccgccgccgccccgtgcgcgtctacatggacggctgcttcgacatgatgcactacggccactgcaacgcgctgcgccaggcgcgcgcgctcggggacgagctcgtcgtcggcgtcatcagcgacgacgagatcaaggccaacaagggaccccccgttacgccgctccacgagagaatgataatggtccgtgctgtgaaatgggtagatgacatcattccagatgcaccttatgccataactgaagaattcatgaacaagctgttcaatgagtataacatagattacatcatccatggagacgatccttgtttgctaccagacgggactgatgcatatgctcttgccaaaaaggctggtcgatacaagcagattaagagaaccgagggagtgtcaacaacagacattgttggacggatgcttctttgtgttagagagagatcatctgatgcacataaccactcttcactacaaaggcagttcagtagtggacatggtcagaaagttgatgatactggatctggaactggaacaagagtatctcattttcttcccacatctaggcgaatagttcaattctcaaatagcaagggtccaggtccagattctcggatagtttacatagatggtgcttttgatctgttccatgctggacatgtcgagatcttacgacttgctcgagaacttggagattttttgcttgtggggattcacacagatcagaccataagtgcaacacgaggacggcatcgcccaatcatgaatctccatgagcgaagtttgagtgttttggcttgtcgttatgttgatgaggtgatcattggtgctccatgggatgtttcaaaagacatgattaccacgttcaatatctctttagtcgttcatggaacaattgctgaaaacatggacttcacggaggacgatttacacccatatgctgttccaatggctatgggcatctaccgccgactggagagccccctggatatcacaacaagtacaatcatcaggaggattgttgctaaccatgaagcttaccagaagcggaatgagaagaaggaagccagcgagaagaagtactacgagggtaaaagctttgtgaacggggagtgaaggtcggagtagcagcaggactggcatggagattgctgcctcgttcattttaggtctcccaggcttttagcagaggcaacagttggtcgatctacagttgtaccctttcttttttctttttcatcttcttcagtaatctttgatgatcttgctgacatagcttaggaagcataggagcatttctcccccgtgtctgcagccaattttcctcactgtgttgtatatgcgccttccagctgttgtttccagctgctgagctgcatttgagatctataggcttttccacacacacacacagagacattttgaaattgtgcgctgcagtatgaagaagatcatgaatgttagcgtgattaactatttgctgctggtgtttgtctcccatc

SEQ ID NO: 72967 - DNA, 2297 bp, Zea mays
  Clone ID: MRT4577_166544C.1
cttctgtctgtgtttgctctcgtgtagggggcccgccacgaacgcaatcgcgaccgcgacccgcaggtgacatacatacggtgcgagcgtcggcagccggaagcaccggtgacgaagccttccgtgtcatcaggatcgcagggttttgtttcgtttcgcgggcgttgggaatagaatccatggaggcggcaatggggcaaggctgcgcagccgcagagggactttttgtgtaaaatgcggtgggaaggtgcgctgcacctgcaagcagaggtgtgctctactgacagagtttgaactctcaagaggaggcgaggcagaaccgcaatcgcgaccgcgacccgcaggtgacatacatacggtgcgagcgccggaagccggaagcaccggtgacgaagccttccgtgtcatcactcatcaggatctcagggttttgtttcgtttcgcgggcgttgggaatccatccatggcgaggaagatgctcatcgacggggaggtggcggccgtcgcggatggtgggcactatgactacgatctcttcgtcatcggggcgggcagcggcggcgttcgcggctctcgcaccgccgcctccttcggagctaaggttgcgatttgtgagctcccattccaccccatcagctcagagtggctaggaggacatggtgggacttgcgtgatacgtggttgcgtacctaaaaagatactcgtgtatggtgcatcattccgtggagaatttgaggattcgaagaattttgggtgggagattaacggagatattaacttcaattggaaaacgctattggaaaataagactaaagaaattgttagattaaatggtgtgtatcagaggatccttaccagtgccggtgtgacaatgattgaaggggcaggcagtctagttgatgctcatactgttgaagttagccagcccgatggttcaaagcaaaggtataccgcgaagcacattttgatcgcgactggtagccgtgctcaacgtgtcaacatacctggaaaggatctggctattacttctgatgaggccttgagcttggaggagcttccaaagcgcgctgtaatcctgggtggcggatatattgctgttgaatttgcttctatctggagggggatgggtgctgaagtagatttgttttatcgaagagatcttcctctaagaggttttgatgatgagatgagagctattgttgcaagcaaccttgagggaaggggaatcaagttgcatccagggacaaatctctctgagttgagtaaaacggctgacggaataaaagttgtaactgataaaggagaagagctcattgcagatgttgtcctatttgcgacagggcgcacaccaaactcccagagactgaacttgcaagctgcaggcgttgagattgaccgggttggagccatcaaggttgacgaatattctcgtacttctgctcctagtgtatgggctgtgggtgatgtaacaaaccggattaatttaacacctgttgcattgatggaggcaacttgctttgctaaaactgtgtttggtggccagcaagttaagcctgatcacagagatgttccttgtgctgttttctccattccaccactatctgtagtgggcctcagcgaagaacaggccttggaggaagctaatggtgatattcttgttttcatctcatcattcaacccaatgaagaacagcatatccaagcgccaggagaagactatcatgaaactggtagttgatgctgaaactgacaaagtacttggtgcatccatgtgtggaccagacgcacctgaaattatccagggcatcgctattgcggttaaatgtggagccaccaaagcagacttcgacagcactgtcggaatccacccttccgctgctgaagagttcgtgaccatgcgcaccgtgacgaggcgcttgagcccgacatccaagccaaagacgaacttgtaagcaagaaattggtattctggggaaatgttacaccggacaaatactctggtttcatcacgttggtaatttttacgtcattggaactggaaccatgtatattgaaggaataagttgtttttttcatggcaacacaccgaaaataatgagaccgtggactttcttgatacaaataatgagctcaagcagagaacgtttatggttggttctcatctgaaaaaaaaaaaatgtctatgcgattgaatgttcccagatggcagacatggcacaggaagttgtcaaatcaaatggatattcagatgtcataactgtaataaaagggaaagtggaagaaatagagcttccaaaa

SEQ ID NO: 72968 - DNA, 934 bp, Zea mays
  Clone ID: MRT4577_166545C.1
attcggctcgagccagtgtgtcgtccatggcgacatcaaaccgagcaacatcatgctggacgagtccttcaacgccaagctcggcgacttcgggctggcacggctcatcgaccacggaatgagcctgcagaccatgactgccgtcgctggcacgccagggtacctggacccggagtgcgtcatcaccggcaaggcctcccccgagtccgacgtgtacagcttcggcatcgtgctgcttgaggtcgcctgcgggcgccggccgatggcgccgccagcgagcacgggcgagggcaaggacggccaggtgttccggttggtggagtgggcttgggacatgcgcggccggggcgccgctctagacgccgcggacgagcggcttggtggagccttcgacccgtgggagatggaacgcgtggtctccgtcgggctctggtgcgcgcacccggacccaaagatgcgaccgcggatccgccaggctgccgaggcactgcggtcgagaagcttcaggatgccgctcctgccgcccaagatgccggtcgccgtgtacctgcagccgttcggtccctccaccctgcacttcagcgacaccaccacctccgtcgggtcttctgttaccgtgccgtacacttcgaccacgagccgtgcgacgacggcgacggggacggggatgtctaactccagctcgccgccggcggtcactcaacacttgagcccaagagcataggtcaaatgtacaactgtacggcgtacgtcggtatgtgtgtagtgtaattttgttaaaacaaaatacacttaaaagctaggcaaaatttcctaatgtatttttgagaattatgtgcactcatcgcatgagactttcaattgtcctgctacacctagcttttaaaagaataaaatatgattatggtgtatcttggatacaacttgcttttta

SEQ ID NO: 72969 - DNA, 1356 bp, Zea mays
  Clone ID: MRT4577_166546C.1
gggtacctcgaggccggccgggcctgataccatctcatctcagtgaatcatcacacgtacagacagcatcacagcactcacccagcgcgcagtacaacgcaaatggccaggctgggagcactgattccgctggccatcgtcctgctcgccgccgtcgcggccactgccgcgccttcagacaggccacccaaggcgcaggggcccaagccgcacaaggagaaggagaaggagaagcccaagcccatgaaggtgaagtgccgcccccgtaagctctacccttactgccccggcaagccgatggagtgccccgccgagtgttcccagtcatgctacgccgactgcagctcctgcaaacccgtctgcgtgtgcagcgtgccgggggcgtgcggcgacccgcgcttcatcggcggcgacggcaacgccttctacttccacggccgccgggacgccgacttctgcgtgctctccgaccgcgacctccacatcaacgcgcacttcatcggcaagcacggcgccgacggcatgtcccgggacttcacgtggatccaggccatcgccgtgctcttcgacggccacgagctctacgtcggcgccaggaagacggccgcgtgggacgacgacgtcgaccgcatggagctcaccctggacggcgagcccgtgcgcctcctgccgggaaccgacgccgcgtggacgtccggcgccgtgccggcgctgtccgtcacccgcaccagcgcggccaacggcgtgctcgtctcgctcgacggcaggttcaccatcagggccaacgccgtgcccatcaccgaggaggagtccagggtgcaccggtacggcgtcacggccgacgactgcctcgcgcaccttgacctggccttcaagttcggcgcgctcaccgccgacgtgcacggcgtggtcggccagacgtaccgctccgactacgtcaaccggttcgatgtcaaggcctcaatgcccaccatgggaggggacagcaactacaccacgtccagcctcttcgccgctgactgcgccgtggcgcgttacgcgccgtctggcggtagccgtgacgacggcgttgctatggtgtcagagatcgctggcatcacctgtgccagtggcatgggtggccaaggcgtggtgtgcaagaagtaaccaaggaggtgtgcttctacttatttatacgccgacgaaatcacacgagagttaatcgggtaaactatatatgatgttaccggaattgtaactgctatatatatataagcgtgggtgtcttcatcattgtcatgacattcacaccgcaataaggcttgccactggttgtggtattcacatttgattataatacaagtgtatttatgatct

SEQ ID NO: 72970 - DNA, 304 bp, Zea mays
  Clone ID: MRT4577_166547C.1
gagacatgacacaaacattggatgtgcgcggttttttctgttcacacaccattctttttttggtgggcggccacaaccactccgtgatcagatctaattggcacgcccttgacactcagattcgtgcgtgcgcacactggatgcagacaggctctctgcctttacttggcatacgcactcatggtgatgaacatggcctggctactgaatttatcacgtgctgcgtgtgcgcacacactataataagcattgtttgtgtacctatatatccgcacccacactgttcgtgtggtatttcaccaaa

SEQ ID NO: 72971 - DNA, 1189 bp, Zea mays
  unsure (1)..(1189): unsure at all n locations
  Clone ID: MRT4577_166548C.1
ggccggccgggggagtgatttctgaccacgcctnttgagacttcaagtgggcaacgtttctcgcctctcagcgcaaaaagatagatcctctgctctaccggcctaccacgttcgtctcccgcgccggccacccaccgctgccaccgaggtctggacggctcatcttcaacgcgccgggctctggcgccgggcagatgctcttcctcgactgcggcgcaggcggcggtcccggcggcggcttgttccatcgaggcgggagaccgatgcttggccttgaagaagggcgcggcgtaaaacggcccttcttcacctcgcccgacgagctcctcgaggaagagtactacgacgagcagctgccggagaagaagcgccgcctcaccccagagcaggtgcttctgctggagaggagcttcgaggaggagaacaagctggagccggagcgcaagacggagctggcgcgcaagctgggcctgcagcctcgccaggtggccgtctggttccagaaccgccgcgcccggtggaagaccaagcagctcgagcgcgacttcgaccgcctcaaggcctccttcgacgctctccgagcggaccacgacgccctcctccaggacaacaaccgcctccgctcacaggttgtttcatttgtgtcgttgaccgagaagctgcaagagaaggaggatgcgacggagggcggcgccaccgctgacaccgccgcgccggcggtggacgtcgaggcttccctggccgacgacgtcgaggagccagcagagcctgcggcgacgttcgaggtgctgcaggaggtgaagtccgaggacaggctgagcaccggcagcggcgggagcgcggtggtggacgcggacgcgctgctgtacggcaggttcgccgcggcagttgatagcagcgtggagtcgtactttcccggcggcgaggaccactaccacgactgcgggacgatgggccccgtgaatcatggcgccggaggaggcatccagtcggacgacgacggcgccggcagcgacgaggggtgcagctactacgccgacgaagccgccgccgccgccgccgcgttcttcgtcggacacgccacccaccaccacgcggacgaggacgaggacgccggccagatcagctggtggatgtggaactagacgttcgatcttcccacgccgatcgatcgaacggtcttcgaatc

SEQ ID NO: 72972 - DNA, 525 bp, Zea mays
  Clone ID: MRT4577_166549C.1
cggcgctttttttttttttttttttcttttttttttttttttttttttttttttttttttttttttttttttttttttttttttttttttttttttttttccagagaaaaacaaaaaaaaccccgggtcctattggggcccccccaacaaacaaaaaaaaaggccggcccggggccttcgatttaaaaacaaaaacctatttaaccccctgggggaacggggccgggaccctaagcaagaccggggaacccttccccggtaaaaaaaccgggtccggtttttaaactggggcctaaagcaccaaccaaccccccccctaaaaaactttccctaaccttcccattgggtgggggctggccccaaaaaactaaaaaaagggggaaggggacatccttcctacccggggacccaaaacgcggcccccatcctttttaaccggaaaaaaaagggaaaaacaggctgggtcaaccctttaaagggagcccggggaaacccgggggcaagggcccctcccgggtttggggg

SEQ ID NO: 72973 - DNA, 186 bp, Zea mays
  Clone ID: MRT4577_16654C.1
gcagaagcgacatgacgaagggtacgtcatcgtttggaaagcgtctcaataagacgcacacgttgagccgccgctgtggctctaaggcctaccaccttcagaagtcgacctgtggcaaatgtggctaccctgccaagcgccagatgccagtataactggagcgccaaggctgagcgtccagatacc

SEQ ID NO: 72974 - DNA, 1319 bp, Zea mays
  unsure (1)..(1319): unsure at all n locations
  Clone ID: MRT4577_166550C.1
tatttccagagccctccagagcaaaaaaaatatattatcgaatactaaagcattttcctcatcgatagaatatagaattttaaaaagggagcgaaataggttttttcctttttgcagctccgtcgtccaccaacctcctccgatccggccgccgcagcgtagccgaattgtcccctcgctagcttctccggccggctagaggctgtttcaggcggcctcgatctcctccgcgcggctgaggaaggagatcacgcggttgctcaggggctggggcgtgcatgatgggattttggttgattccgatggagactccggcgaggcttctgtggagcacgagcttcttccgccacaagatcgccgccatgctcgcctcctcctcctgcttcttatagatcccaccccctcgccgtcgtcgtcggcacggcagctagctcgctagcttctgtacataggtcgacgcgccatatagatactagtctcggattaagcgataattaaggcaaagaatctccaagtttgcttcgctcttgcattgaaccatggagtctggacggctcatcttcaacgcgccgggctctggcgccgggcagatgctcttcctcgactgcggcgcaggcggcggtcccggcggcggcttgttccatcgaggtattagtcccatccaaatctctagcttgatttgttgattccatggatcttggtacttgggcgttccattcgatcttggcttggaggaattcttgtgtactgattggggttgccatgtgggagtgacgaaggcgggagaccgatgcttggccttgaagaagggcgcggcgtaaaacggccctttttcacctcgcccgacgagctcctcgaggaagagtactacgacgagcagctgccggagaagaagcgccgcctcaccccagagcaggtgcttctgctggagaggagcttcgaggaggagaacaagctggagccggagcgcaagacggagctggcgcgcaagctgggcctgcagcctcgccaggtggccgtctggttccagaaccgccgcgcccggtggaagaccaagcagctcgagcgcgacttcgaccgcctcaaggcctccttcgacgctctccgagcggaccacgacgccctcctccaggacaacaaccgcctccgctcacaggttgtgtcgttgaccgagaagctgcaagagaaggaggatgcgacggagggcggcgccaccgctgacaccgccgcgccggcggtggacgtcgaggcttccttggccgacgacgtcgaggagccagcagagcctgcggcgacgttcgaagtgctgcnnagagtga

SEQ ID NO: 72975 - DNA, 304 bp, Zea mays
  unsure (1)..(304): unsure at all n locations
  Clone ID: MRT4577_166551C.1
tcaacacctttttcttgttttgtgcaataacaagcctctgcctaccctggaatgtgatattgttttccgcttcgttcgattcaccgaacgaaattagttctttcatattttgtaccctatttattgatgcttgaagcaagaaacatccatttttatctttaataaaaaaaaaattatctttatatttgatcaattcttttgccttagnttttaaaaaaattttttaatcattatcattttctctattttaacttaatactttttttataattttttttatctttattttgtcttcctcctcctt

SEQ ID NO: 72976 - DNA, 2578 bp, Zea mays
  Clone ID: MRT4577_166552C.1
ataaaataaactgatttatgtaaaatctttttattgttcaaacagacactcaataaataaataaatgacaaattaagcttacaggaagagtatatatgtatatgtatatgaatgtaatccacctattgcgccccgccattgtcttgtctcgcatgcgtccttgaacacaactttctccgtaggatgaatcagagaacgaatacaagtcggcagaaaagaacacggttgtacattaaacaaccttgcaatccaagctggtctcgttatatatacagcggtgatggtcccttgacggaaggtcctgagtgagatctgaccatgcctttgagacttcatgtgggcaacgtttctctcctctcagcgcaaaaagatagatcctctgctctaccggcctaccacgttcgtctcccgcgccggccacccaccgctgccaccgagggtaaaaccgtcaacccgccttgccccggcgcctataagaagttccctctccatttcgtcagccgggagttccagagccctccagagcaaaaaaaatatattatcgaatactaaagcattttcctcgtcgatagaatatagaattttaaaaagggagcgaaataggttttttcctttttgcagctccgtcgtccaccaacctcctccgatccggccgccgcagcgtagccgaattgtcccctcgctagcttctccggccggctagaggctgtttcaggcggcctcgatctcctccgcgcggctgaggaaggagatcacgcggttgctcaggggctggggcgtgcatgatgggattttggttgattccgatggagactccggcgaggcttctgtggagcacgagcttcttccgccacaagatcgccgccatgctcgcctcctcctcctgcttcttatagatcccaccccctcgccgtcgtcgtcggcacggcagctagctcgctagcttctgtacataggtcgacgcgccatatagatactagtctcggattaagcgataattaaggcaaagaatctccaagtttgcttcgctcttgcattgaaccatggagtctggacggctcatcttcaacgcgccgggctctggcgccgggcagatgctcttcctcgactgcggcgcaggcggcggtcccggcggcggcttgttccatcgaggcgggagaccgatgcttggccttgaagaagggcgcggcgtaaaacggcccttcttcacctcgcccgacgagctcctcgaggaagagtactacgacgagcagctgccgggagaagaagcgccgcctcaccccagagcaggtgcttctgctggagaggagcttcgaggaggagaacaagctggagccggagcgcaagacggagctggcgcgcaagctgggcctgcagcctcgccaggtggccgtctggttccagaaccgccgcgcccggtggaagaccaagcagctcgagcgcgacttcgaccgcctcaaggcctccttcgacgctctccgagcggaccacgacgccctcctccaggacaacaaccgcctccgctcacaggttgtgtcgttgaccgagaagctgcaagagaaggaggatgcgacggagggcggcgccaccgctgacaccgccgcgccggcggtggacgtcgaggcttccctggccgacgacgtcgaggagccagcagagcctgcggcgacgttcgaggtgctgcaggaggtgaagtccgaggacaggctgagcaccggcagcggcgggagcgcggtggtggacgcggacgcgctgctgtacggcaggttcgccgcggcagttgatagcagcgtggagtcgtacttccccggcggcgaggaccactaccacgactgcgggacgatgggccccgtgaatcatggcgccggaggaggcatccagtcggacgacgacgggcgcccggcagcgacgaggggtgcagctactacgccgacgaagccgccgccgccgccgccgcgttcttcgccggacacgccacccaccaccacgcggacgaggacgaggacgccggccagatcagctggtggatgtggaactagacgttcgatcttcccacgccgatcgatcgaccgtcttcgaatcctgtgtcaacaagaagaaaaaagaatcgtgccgtgatttttctttgcgcaacgctgctgtaagcctgtaatggtgaatttctagctatggttatgccgttatgaaggaagaaagtgtatgcatgcatggtagggtaaagagtgggtaattaatatcgttgatcatcccagtcactcgtggtgttccagaagatcaatggagttgggggagaaataagtgcgcatagaggcaagtactactctttttatggcacagtgcctatgtcaaatcagggtgttattaccagttggttttttttaaaaaaaaatactgtactattacgcattttcgcacatgatttagctgtgagttctgcacagtgaaactgaaacagctagtgtagtgtattaatgaatggaacagtgccccccaccgaaaaaaaaaaaaaaaaaaaaaaaaaaaaaaaaaaaaaaaaaaaaaaaaaaaaaaaaaaaaaagacttgaagaaagcttattg

SEQ ID NO: 72977 - DNA, 432 bp, Zea mays
  Clone ID: MRT4577_166553C.1
aaaaaaaaaaaaacaaaaaaaaaaaaaaaaaaaaaaaaaataaaaaaaaaaaaaaaaaaaaaaaaaaaaaaaaaaaaaaaaaaaaaaaaaaaaaaaaaaaaaaaaaaaaaagcctcccctggggggaacgccccaggttgctgccgatataaatttggtgctggatcacccctaagttaattaattaacttgctttttgggtttgtttaaccctttttttggtgggggacctttgtccttcctaggactaaactctcaattttggtgctaaaaagggaaaaactttaaatggcccgcctcttaaaaatttgggccccaaaaaaaaaaaaaaaaagggggccttggccctcaaattttttttccctttagggggggaaaatggcccccttcgggcgaaccccgggaaaaaagtcgttctgggggaaaatttta

SEQ ID NO: 72978 - DNA, 507 bp, Zea mays
  Clone ID: MRT4577_166554C.1
gcacgagccgactgcggatggtggtcggttggcgtcatcctgttcgagctgctggtggggattcctcccttcaacgctgagcacccgcagataatattcgacaacataatgaaccgagagataccctggccacatgtgccagaggagctgagctctgaagcctacgatttgatcgacaggttgctgatggagaacccggtgcagagattgggcgcgacaggtgccggagaggtgaaggctcatccgttcttcaaggacatcaactgggacatgcttgccaggcagaaggtcgcgttcatcccttccacagacgacgagtacgacacgagctacttcgcctgccgccacgcctggagcggcgccggcgagcatggcggcgcggccggcagcgactacgacgaccggagcgaggccagcagcatgagctgcggcagcagtccgcgcagtgactacgaggaagatggcgatgagtgtggcagcatggaagaattcggagcgcccttatcg

SEQ ID NO: 72979 - DNA, 275 bp, Zea mays
  Clone ID: MRT4577_166555C.1
ctttttttttattatatggggctacagttacaggccgtcaccaccaatgggctacaggagaagggcgcgctttccaagtactcatgatcattatggtggtcgttgtagggatctttcaacccgaattctgtcacgaatctccgtcgggactgtttttcacaaaaccttcgtagaccatttggacactttgttcgagttccagatttatatcttccaagagattattacactggacgcaacacatgcctacaagattattgttgaagaccacgatt

SEQ ID NO: 72980 - DNA, 344 bp, Zea mays
  Clone ID: MRT4577_166556C.1
ctcgagccaaattgtatggagctcgagccgaatcaactggaggtatactaatgctatggggcctaccccataacacaagggtgaaattgtacatacgaggtgttaaccctaaaacgctaaatgggtgctactaacaccggaaatttgagctctctactgaacaaatgttgagactgaatcgaaaatactggaatacactggacactcgcccattggtgatgtcagcaaactgcaccatgttggggacactgaaaacgtgaatgtcaacaacctcaacacgctcgtggtcaaagagattgtcgctctgcacgagcttcctgcccttatgctacacgagattggtg

SEQ ID NO: 72981 - DNA, 202 bp, Zea mays
  Clone ID: MRT4577_166557C.1
ctcacacttacgaaccgcgttatctccgatctcgcattgatgacaatgctggcgtttgggctgacacctgacctgtacgggcctacgatctggtcgacctctgtcagataatgaactttcgaggatcaatactgagactctgaaacggttaccgcattccttgaaggcagcatgcacgcatgtctcccaatgatcacgcaga

SEQ ID NO: 72982 - DNA, 1577 bp, Zea mays
  Clone ID: MRT4577_166558C.1
cagtccaccaccgcttcctgtgcagcgccctccctatacgttcccccatttcctgtgttggcggcgatggcgcggcacttcgtgctcaacaccggcgccaagatcccctccgtggggctcggcacctggcagtctgaccccggcgtcgttggcaacgctgtctacgccgccgtcaaggcgggttaccgacatatcgattgtgccagagtttacggcaacgaaaaggagattggtttggcgctgaagaagctatttgaagagggtgtagtgaagcgagaagatatgtttatcacctctaagctatggaatgatcatcatgctcctgaagatgtgcctgaggcactaaatgacagcctgaatgatttgcagcttgagtacctggatctttatcttatccattggccatttagagtcaagaagggaacaaataccagccctgaaaattttgttacacctgacttccctgctacttggggggcaatggaaaagttatatgatgctggcaaagctcgcgctattggtcaaactaagctccatagcttttgtcagtcaactggtgttcatctaactgcttactcaccactaggttcacctggtacaacttggatgaatggtaatgtccttaaagaaccaataatcatctcaatagctgagaaactcgggaaaacttctgcacaagtggctctgcgctggaacattcagatgggtcacagtgttcttccaaagagcacgaatgaagaaaggataaagcaaaaccttgatgtttatgattggtcaattccagatgacttgcttgcaaagttctctgagattaagcaggctaggctacttagaggcaacttcattgttaatccagagagcgtttacaagacccatgaggagctctgggatggtgaactttaagaaggacgccgttgtccctcctgactcctgagcagggagcaagcagcgttccattagggctcgttagatcatttcacctccaaagttgctcttttgaaatgaaggttcagtgctcggaagctctggtgccatcctgtatcacgaactattgagaaatttgtcggtgattttactttgtgctacgggatgtgctgctgcagtctatcctagtgtcagttgattttttctggtaaaactgtgaccaaataagttaattcgccaggcatcattactattggtcaagacccctccccagggcgagtgaatgtgtttgccaattttatttcgtgattttcaggctaggctacttaaaggcaacttcattgttaatccagagagcgtttccaagacccctgaggagctttgggatggtgaactttaaaaaggaccccgttgtccctcctgactcctgagcagggagcaagcagcgttcccttagggctcgttagatcctttcccccccaaagttgctctttttaaataaaggttcagtgctcggaagctttggggccctccggtatcccgaacaattgagaaatttgtcggtgattttcctttgtgctaaaaaaaaaaaaaaaaaaaaaaaaaaaaaaaaaaaaaaaaaaaaaaaaaaaaaaaaaaactcgaggaggggg

SEQ ID NO: 72983 - DNA, 1758 bp, Zea mays
  Clone ID: MRT4577_166559C.1
attgggacctcgagccggcgggaacacttggcgcacgcgctgacgcgcacgcgtccgagcctctagtcggccagtcgggacgaagcctctcgaacgagcgaggccacgaggtgcccgccgcgcccagccggcctcgccgaccgggcccgccggcccctatataggcaggcgccacttcctcctcgcagccaccagacgccagtccaccaccgcttcccgtgcagcgccctccctctacgttcccccatttcctgtgttggcggcgatggcgcggcacttcgtgctcaacaccggcgccaagatcccctccgtggggctcggcacctggcagtctgaccccggcgtcgttggcaacgctgtctacgccgccgtcaaggcgggttaccgacatatcgattgtgccagagtttacggcaacgaaaaggagattggtttggcgctgaagaagctatttgaagagggtgtagtgaagcgagaagatatgtttatcacctctaagctatggaatgatcatcatgctcctgaagatgtgcctgaggcactaaatgacagcctgaatgatttgcagcttgagtacctggatctttatcttatccattggccatttagagtcaagaagggaacaaataccagccctgaaaattttgttacacctgacttccctgctacttggggggcaatggaaaagttatatgatgctggcaaagctcgcgctattggtgtgagtaacttctcctcaaagaaattgggtgatttgcttgctgtagctcgtgtacctccagctgttgatcaggtggaatgtcatcctggttggcagcaaactaagctccatagcttttgtcagtcaactggtgttcatctaactgcttactcaccactaggttcacctggtacaacttggatgaatggtaatgtccttaaagaaccagataatcatctcaatagctgagtagaaactcgggaaaacttctgcacaagtggtgcgctgctggaacattcagatgggtcacagtgttcttccaaagagcacgaatgaagaaaggataaagcaaaaccttgatgtttatgattggtcaattccagatgacttgcttgcaaagttctctgagattaagcaggctaggctacttagaggcaacttcattgtgaatccagagagcgtttacaagacccatgaggagctctgggatggtgaactttaggaaggacgccgttgtccgtcctgactcctgagcagggagcaagcagcgttccattagggcccgtcagatcatttcacctccaaagttgctcttttgaaatgaaggttcagtgctcggaagctctggtgccatcctgtatcacgaactattgagaaatttgtcggtgattttactttgtgctacgggatgtgctgctgcagtctatcctagtgtcagttgattttttctggtaaaactgtgaccaaataagttaattcgccaggcatcattactattggaatttcatcgttttatctcctcactattttttatgctccatgtattctctatgatgagaccatgttgagtagttcactcatataatcacataaaacactgttttacattaaaaatcaacagagtaagctgctgaacgtgctggacggtgcaccatcatatcaagatcctctacaccgacctctgtcacaccgacgtctacttctgggaggccaaggggcaaaccccggtgttcccgaggatcttacgacacgaagcgtgaggcatggtgtaaagcgta

SEQ ID NO: 72984 - DNA, 292 bp, Zea mays
  unsure (1)..(292): unsure at all n locations
  Clone ID: MRT4577_16655C.1
cacactgccgccgagctctccaagcattcagcgacgcatgtgcatatattacgcatgtggtcataactctagtagcagtatgacgaggtgcaggcatctacgtgcaggcttttcaatgagtacaaggaggtatcacgagagaagtcagctgacgctgatatccagttaatatgtgatgtntcaacatattcgagtcgactgctcttattcagcggccttcgtgaacaccttatgcaggtggtgtgtatcacttgcgttcgcatgcagagcatatctctactgctcctcagtc

SEQ ID NO: 72985 - DNA, 189 bp, Zea mays
  Clone ID: MRT4577_166561C.1
ccgaaaccaagtgtgcattttaattacaataggggaaaaaaaccaaaatacaaaatagtcctatacatacggccacaggccccccccctacggatagcctaacaggatgcgactatacatccgaccagccatgaaaaacacctgacagcgtaaaaattcaagcacacactatacccacaccatcctatc

SEQ ID NO: 72986 - DNA, 364 bp, Zea mays
  Clone ID: MRT4577_166562C.1
aaaaaaaaaaaaaaaaaaaaaaaaaaaaaaattaaaaaataaaaaaaaaaaaaaaaaaaaaagaaaaagggaaaaaaaaaaaaaaacaaaaaaaaaaaaaaaaaaaaaaaggggccggcccttttaaagaatcaaactttacttccccttccatccaacgaaatactttttttttagtgtccccaaaaataaatccaatgcccgcctttttaaaacgccggaactggaaaaaccctgcctttaccaaactaaattcctttgcaaaaaatccccttttccccagttggcttaaaacaaaaaaggccccaaccaatcgcctttccaaaaatttgcccaccctaaatggcaaatggaaccccccctt

SEQ ID NO: 72987 - DNA, 229 bp, Zea mays
  Clone ID: MRT4577_166563C.1
ctccgcctctttttgacccatacttataactttctcctcgcggtaacattccattagcctgggttaattagatccaccgctggtgcactccaattccatctcgcaataccctggatttagcccgacactaatccctacagcttattctacacctgtgacatctgattgttcctacttcgaaagcaatcaactagacttcacttactcaataacgcccataagatctctc

SEQ ID NO: 72988 - DNA, 545 bp, Zea mays
  Clone ID: MRT4577_166564C.1
ggaaacaaacggcccagggctttttttgcttcacagtagatttgcaaatcccccgtaataaggggaaccccacaaatccgaaaaacttggaaagaaactaaaaagggttgttttaacccagaaatcacagtaaagcccctcttgttcccagcccatatttgtcttatactaaaaaaaaaaaaaaaccgggccatggggccctaaaaataaggagcctttcaaaacccccttatttgacaaaaatgcaatatgaaaggggcctgaaaaaatttttaattaatttcggcgggacaacccaatgacctacccgagcaaacaggcatcactgttgttgctgttgctgctgggcacctggttgttgttggtaattgggataaccgccttaagccccctaaccatacctgttaagatcctggggttgggcataccccctgccataagcctcataaccttggccatagcccccattggagcccccagccccagggggcggaccccatttattggattcctgctggagttgaccccgtttgttccaaaggctt

SEQ ID NO: 72989 - DNA, 270 bp, Zea mays
  unsure (1)..(270): unsure at all n locations
  Clone ID: MRT4577_166565C.1
agagnatgagggtgatcctcctcgggtcccggcggcaccgccgccgctccctctcttcaccgccgccaagcgctcctcgtcactcgcgaaccttctcttcgctcgcctctatcgcttcttcccggccagtctcatcctccggctcctctcctcctcgcactccactctctcatcccgccggccttcttccacctccggctccgccgcttccaccatatgcgcgatatgtagtgcgggntggacgctatgccactcattgtgtgctcgcac

SEQ ID NO: 72990 - DNA, 493 bp, Zea mays
  Clone ID: MRT4577_166566C.1
gtttttgggttttttgaagtgagccagtcacaaacaattccagttccattacatcccgcgccgcgccacgccaagccaaaccaaaacaacgtttgcaggacgcggacagcggacatggaagacctcgccgcctcgctcacgccttacccgcacagcgcgccgctctacctgctctacgacgccactagtatcgccaacgccagccgcgggctagcgccgccgccgctcctgggcgacggcgacgacgacgacggcggcttcgagttcgccacgacgacgacgcttcttaacggcggcggcgcggcgctgcgcgcgtgcgccagcgacgtgtcggcggcggccttcgcgggcgagctgttcccgctgagcctgccgccgcggctgcagcggcggcccgcgcgctcggcgggggcctcggccgcgacgtcgcccacgccgtcggccgcggcgctgcaggccggatgcaggaagcacaggggcttcgacccgttcg

SEQ ID NO: 72991 - DNA, 471 bp, Zea mays
  Clone ID: MRT4577_166567C.1
ggccccggtaactaaattgcccagaaaaaaaaggggggtcaagaattaaaaaagcccccccggccacaaaaaatgaaacgggccatttggctagctacgggtctttacccggggggggcgagagatggcaaacctatccagcaaccgaaaactttttatgcccaaaagggcccccttccaaaaaaaaactattcagctatcggcacttttgacaccaacatttgaacaaaccattggataaaaacgggtccctggtctaggtttttaaggaactttccaccccatcatttgacgttggaagggttggaaaacaaaaagccaagggggccggactgaaataacaaactgggttaaaaaatccgggcgggggcgccggccccttagggctttttggtccgggcgggctgcctggacccctccggggggagcctgttaatcccgtaacccaaagcgaggacctgggcggcaaaa

SEQ ID NO: 72992 - DNA, 482 bp, Zea mays
  Clone ID: MRT4577_166568C.1
gggtacctcgaggccggccgggccgaggatctggttggcttgtcctagttctgattctcctcctgagtgctctccatatgactaaacctttcaccctctcgccgacgacaccaccagaggtgccgctcccggatcaacgccccaaaatgcccgcaggaggcgatgatagtcgctctcggcctacacgcaatgagctgcagaccctcccgctgcgcagcagagatatctcctccgctgcctctcggccaggtggacagacgccaccacgctgaagatcaactccgcttccaagctccgactatggatgcgcctcctcgtcacgctatatgcattagcgtacaccttaccgagaggacatttcctcccctagcacatggatatgtttttgttggcaaaaacacgaaaagaaactacggccgggaaattgttatcacagcatgtgactgcatctccgtggcaacaacgtgacgtctctgatgtag

SEQ ID NO: 72993 - DNA, 367 bp, Zea mays
  Clone ID: MRT4577_166569C.1
tccgtccgtcttcatctttatccgagagttcctgtgcagtcagtgtgaaaagaagccacgattttagcacgagcgagcgaggggtctggatgaagtcctctcccaagtcttcgatatcgtctatgtcagcccagtcaaaggtgtatcgccgacacggtcggtcgcaacacctctccgagactgtcattcgatcttctgcaagggtgaaccaagatccgatttcgaggagagtcaacgggtggatcttgttcaaagtctcaagcaccctcacaacccgaattcaaaaataatataaccccatgggacaaggtgacccgcaatttgttgatggaaagattcaaaactatttgaaaagtcatgccgattt

SEQ ID NO: 72994 - DNA, 2106 bp, Zea mays
  Clone ID: MRT4577_16656C.1
agcatatatgaccactttcaattcaagggatcacggcgaggtattggctgatgcgctgaagacacttctttgggaaggcaaaccacaggatatgctaagagttgttgctttcatcaaacatttagccacatttgctctctcatttggctctgcagaagcaataacaggtttgttttgaggtatggttttgtttgcccattctttttgagctaatgcctgcaaaacttctataacatcaaagatgattgatagtaataagggtgatatgttcccataaccctatatcgacattttgtatttatttgatcatgttattcctaatcttttatccataaatacaaccccaaaactacagatccattatctgagtggtacactatcttcagtcctttaggagctcagcctcctagagaaaaatacaatatctcagtttcctcgatggcattgaatatcttgagtattcatgtgaagctcaatgattaccacctcgttcctatctgcaacgagaaccctcttgaagcgtacagagacttgtcaatagaaagggaactgttaaaaccagctagcaaagcattgccaataaatctaaaaattggcaaaaaaatcaggaggttccgaagcaattgccagttaatgataagaagaaaaccatacaggaactgatctcaaaagctagaaaggaggttgatgcagaccttagagcagtttccttcactcttgacccgaaggagagaaaagggatacaaaaagaaacactttctgctctgtttgagacttacttccgcattctgaagcatagtatggccgcttcaaattcaaggactaaggtgaataatgtttcccctggtggctcacacccacttctcactccatgcctggagggtttagggaaattttcacatttaattgatttggatttcatgggtgaacttatatcttgcctcaagaagctttctgggtatagtgaccgacaagacgaaattcccaatgataatgcactgtctgtctcagaacgtctgcagtgctgcatagttgtgtttaaagtctggaggagcaaccttgaggcactgaatgtggatctgcaggatttctttgtgcagctctataacctcatactggagtatcggcctgacagggatcatggcgaggtattggctgatgcgctgaagacacttctttgggaaggcagacagcatgatatgctaagagccgctgctttcatcaaacgattagccacatttgctctctcatttggctctgcagaagcaatagcagcattggtcacactgaagcatctcctccaaaaaaacagcaagtgccgcaatatgttggaaaatgattctggtggcggttctctgtcttgcttagttgcgaaatacaaccccgaagctacggatccatatctgagtggtgcactcgcttcagtcctctgggagctcagcctcctagagaagcattatgacatctcagtttcctcgatggcttcgaatatcttgagtatggcaaacctgaatcccacccagaacccagttcctatcttgaacgtgaaccctcttgaagcgtacagagacctgtcattggaaagggaactatcaaaaccggctagcaaagcattgccactgaacctcaaaaggaagcggcgtgccaaggagtttgttgcgctaagcccagatgtgcttcagaaggcagattgctcggtggacaaagacgagctcgaagagaagctgcagagccatttctccgtgctaagaggcatctctgagaatgagaggttgagggcagagctgaaccacacactgtcatccataaacatgtacaaggagtacaagaagcagaaaaggaaaaacatgaaagttaagaccggaaggaaaaaaaacagcaaggctttagccgtttaaggctttagccgtcttatctgttccggaggtctttgcgctcgaccggtggatgggtgtaattttcagttttttttgggcatatttcccattgactactatagtgcagttttctgccacccttttgccgtttctgcacaccacactatgaaagacttgtttgcatttgtgattttgaaaaatggtttaggaaagttatagttttttcccc

SEQ ID NO: 72995 - DNA, 106 bp, Zea mays
  Clone ID: MRT4577_166570C.1
gcgacccagaacactctggaggtaatgataggcctcttaagcataacgatagaccatccttaaactggtaatatctgacagcagatgaagagaacgagtacgggag

SEQ ID NO: 72996 - DNA, 522 bp, Zea mays
  Clone ID: MRT4577_166571C.1
gtggttgtggaacccggttttacagggactcacaactaaaaaatgccgaaactggaatcgcaacgtcttcttctaatgaaacacctcaacgattttgacgatggcctacctgccgtttctaatgcgccttactgcggtctaaaaagcctcatatgacaactggttcactggcgaaaaatgtcctacaaaagcttttttgacatggaacacacttgccatcattacgcatgattacgtctccactctgtttacacagcctgccataaacaggcatggcccaatttcagacataccgaacaaaaccaccatctgattggcttagacattaaataggtgcccgaaaccatgaagttcagcggtcatctgatgctccacaaataacacacttctcaggagttctattaccaacgcctttaataattgtgagaaaaaggtgctgacttgagattaacgccaagatcatccatcctgataaaccatgttagaccactacctagagccctttttataaaagtaaccttt

SEQ ID NO: 72997 - DNA, 606 bp, Zea mays
  unsure (1)..(606): unsure at all n locations
  Clone ID: MRT4577_166572C.1
tgggtacccctcgnaggccggccgggntgtgaacgtttggtgacaagaaagagaggcgggcaatatcaaaaaaaaaaaaaaaaaaaaaaaaaaaaaaaaaaaaaaaaaaaaaaaaaaaaaaaaaaaaaaaaaccacgcccataccagtctaaactcaaacccttgatggggagctcagttgattgagcagcccaagaaccaaaggataagggggggggggggaccgccggacccgggagggacaaaaagcgagcgaggggccgtcgtcagttagcactagcagccatggaagggggcgcgcacaatttcaacggttccaccttaaaggagggcttctccttttgggggaggaacccttacgtcctccgcctcgctttttccgccggaatgggcggcctgtttttcggttacaacaccggggtcatttggggagctttgttttacatccgcgacaacttcgtttaaggggacaggaacacatggtttcaggaaatgatcgtaagcatggcggtggccggcgcaatcatcggggcggccatgggggggtggaccacggaccggttcgggcggcgggggtcaatcctgggggccgactcccttttcttc

SEQ ID NO: 72998 - DNA, 431 bp, Zea mays
  unsure (1)..(431): unsure at all n locations
  Clone ID: MRT4577_166573C.1
aagttcaaacatcaaactttacaaaggattcaagccatactgctgcagaaagagttttggggtacaacacaagaggacacaacaggtctcattaaaccaacgaagccacaaccacgattcatgacacacaaaccacagatgtttattagacgacgaccacgcagatacccaggtacagcagcagcttaaatgaccatggctcaactgaccaccacggagggcggagcaccaggtggagagcgctctccttctggattgctgcagtctgctaggggtgcgaccatcctccagttgctngccagcgaagatcaaacgctgctagctctggggggatgccctttttgtcctgaatctttgccttcacgttgtcactggtgtaggagccctaaacctacagtgttatggccttgtcagtcaaggtctttacaaag

SEQ ID NO: 72999 - DNA, 392 bp, Zea mays
  Clone ID: MRT4577_166574C.1
tttgctgctagtggggcttggggcggttgccctgtaaagctcgagacgaatgggcaactggacataaatggtctgcccaaggttgccattgaccggcccctgttttgtctccgggtttaccttcccctgccgacctttgtctcagcgaaccacggcacagctgggcaaatgttattttataacaaccccgtgattgatgctcccaaaaaagggctgggacctttgacacaagaaaaggttgatcaatgaaggcttcattgaactgggataacacagctagggcatttgtttgggctaggggaacatcttgggttacctcaacctatcctagaatcattttaagtccctaagatgctccgagcatacgtggaagaaacccactatcttaaaat

SEQ ID NO: 73000 - DNA, 127 bp, Zea mays
  Clone ID: MRT4577_166575C.1
gagccactcggccactccctagcacaacaaaccctatggccgcccagcccccgagacatgtcggcgattgtagacaagtgggcacggacacgtcgcaggggcgcgctcagcaggtgagcaatatcaa

SEQ ID NO: 73001 - DNA, 145 bp, Zea mays
  unsure (1)..(145): unsure at all n locations
  Clone ID: MRT4577_166576C.1
tctaggtgaccacctanatgatttggtctctagaacacgaccctgacactttctccgcagcatgctaagtacaaggtaaacctgatagtaccctagttctaacacccaaacttaccgaacttaccctccgaaacctatgcatcct

SEQ ID NO: 73002 - DNA, 232 bp, Zea mays
  unsure (1)..(232): unsure at all n locations
  Clone ID: MRT4577_166577C.1
tctcncaacgcgggacatnattgctgaaagaagaagtttttacaaggggtgggggcgcccccaaattcatccctttcaccttcactattcacgggtggagtccttagaataacaaagtgaagcaaggccccttgtctggtctaactaacttatgcatcgttttcattgggcactctaggattatctccaaaatatcaattctatagccctttgatatacaccctgcgtcttg

SEQ ID NO: 73003 - DNA, 321 bp, Zea mays
  Clone ID: MRT4577_166578C.1
gcctgcaggagccgggccggaattatattgcctgatcgccgatctttgtactcggcggccgacccttatttaaacatatcgaaccaagaacacagcgtgagcgacaaagaaacttgtcatactgatggctaataatccaaaccagttgaatgacccgacattaaggagaatgccctctgctacacacgacttgggcagggacagtcccgacacgaaagctgaacctgaccaaagatggagcgaccactgtgaagcaagtacaaatgatcggtcagaagctcctactcaaaaccgaacggttctctactcattggccaccac

SEQ ID NO: 73004 - DNA, 267 bp, Zea mays
  Clone ID: MRT4577_166579C.1
caggtggcgggcagaggattgatttacaaatgccggtttaccctgaaacaaacgttggactacctgggatgagatgcatacagatgcacggcctccggcaaaccaatgttcttccacaagggggggggagcttattaaactgttgagagctaacgagcatacgggggggggggcacccactgccatcctgaacagagatggattatattctctagcccctgcgacactgcctccatggtccactgatgcctgtccacctttggcctg

SEQ ID NO: 73005 - DNA, 182 bp, Zea mays
  Clone ID: MRT4577_16657C.1
ttgttttgtttttttttttttttgcggccaaccaatcatatggatagtatttcacacacacaggggacaggacacagcccacaggccatttctttaaacaatgcaagattttgtgaagcctgcacctaagagaaatgcaacggggctatttttacatttggctcgtgtttgcaaacaaaatt

SEQ ID NO: 73006 - DNA, 308 bp, Zea mays
  unsure (1)..(308): unsure at all n locations
  Clone ID: MRT4577_166580C.1
ccggccgggngaatcccagaacagtaccgcagcggcagccatggtgctctcgcacgcgagctccggccgggacgacgacgacgcggtggcctccatcttcgcgtcgcgctacgtgcgcgagcgcctgccgcggtgctgaatctcggactgtgcgattgcgtcagcggcttcccctccgggctttcgccagtcaccgggggcgctcggccccggtcctctgcacaccggccggtgaccctgcgtgcttgcctttctcctcccgcctccggtggatcggtaacggggcccggccccggcgggtgcgttgc

SEQ ID NO: 73007 - DNA, 265 bp, Zea mays
  Clone ID: MRT4577_166581C.1
tctttaacacgcgtgggcggacacgtgcgcgggggccttttacgaaaactccgccgacttctggcccagaaccaactagacgcttacgggggaaaggcacccaagcagctgtcgagggagcaggagcaggtggccaccaagtccgggatagggcagggcgcccctgatatgaccgtgtgaggcacgcccgagtacgcacagccgtgatgcaaggtcagcctgcgtcgcctcgactcccgctacatcgacccttactaccagaacc

SEQ ID NO: 73008 - DNA, 424 bp, Zea mays
  unsure (1)..(424): unsure at all n locations
  Clone ID: MRT4577_166582C.1
ggccgggnaatcacatctccactccagcactgaacacttgtatatgattcagtggggtatgctagctagctcgaatcacaatggatcctaccaagttccgtccgtccagtagccacgacacgacggtgacgacgacgaacgctggtgctcctgtgtggaacgacaacgaggctctgactgtgggggctcgtggtcccatcctggtggaggactaccacctgatagagatggtggtgtacttctcgcgcgagcgcttcccggagagcgtggtggacgcgcgcggggtctccgccaagggcttcttggagtggactcacgatgtgatgtctttgacgtgtgttgacttcctgcgggagcctggtgtgtgtgacggtgttgattgtgtgtttttcttgtgttttatttatttttttgggtttttttg

SEQ ID NO: 73009 - DNA, 1008 bp, Zea mays
  Clone ID: MRT4577_166583C.1
ataaccgtccaggtaggaaaggagttgatgcctgcctctgagacaagaatctctggttcagaagaagatgaagagcctcatcagtagaggaagagtgcagaaaaataaatgctatagaataacattaaaacacgagccacgggtgaaaccctcagggccctcgcactgatgcagtcagcgcgcactgccacgagttcatgatcgttatgaaggtaaccaacccactgcctgccctcatatcgtcaggctgtgggttcctgttgttaccagttatgcgccacaatcctcactaatcccatgctggagagacttttggaaaatcaacatctgttttagaatgctgtgtgcagaattttgctgtccaatgttactttgtttccatcaaattaactgtaaatatatgtatatgctctcaattggtttttatttgaagcagtatacatgccactaataattcatgataactcactgcttaattatgttttggttggagtaggaaattcaaatgattttgtgtgaggaaatcaaaagtgcttgtgaatatcgtccatttgaaaaagtgattacagcgcaaggattgctaatgagatatgttgcaagaagctggagtatgtactcgagaagttggatacaatgcaacaaaaccttgaacagagcactgataatgtttagcgagctggctacatattagttgggaatacaacagatatctgatcgatcagtatgcagaaggaatgtagaagcattctatcaactcatgattgcaggaactctgggattgtaacttgtgattccatgttctgtggcagagttattagttttggctgcctgctgatgtccagtagcatagcaatgggtccttgggcttgaagtcgtgggatttcaaggcagtatttttaccgatgagaatttcctgttctgtattttatcgacttgcttcatccttaaaacatgcctttggtacaaaaaaaaaaaaaaaaaggagggcggccgccgacatataagctc

SEQ ID NO: 73010 - DNA, 201 bp, Zea mays
  Clone ID: MRT4577_166584C.1
cctcttgaccgttgtgtgcagggtccaccagaaggtcgggagccaagcgcactatttgtcctagtccccctacagcgaatggatgggtacatcgagtgcctcttgtacgagagcctggaggtgttcctcaggaggcaggacccacagattgagatcgactcacatgaccgtgcatgtgctagacggaatgacatatccgac

SEQ ID NO: 73011 - DNA, 1088 bp, Zea mays
  Clone ID: MRT4577_166585C.1
ccggccgggaagacccacagtactacagacattctctttctatctgcctctccaatcaaaccccaaattcattcctatcaaaatggcacctctgtcagggccaacaagcaagagtaagaagagagctctccgacacgtcctcctcctctgcctcctcctcccatgtatctcccaaccactcccggctccttccccatctccaacggcggcgcctccggcgacgacacttcccctctcgccgttcaacgaccgcctcgacgcggcgtacatcgcgctccaggcgtggaagcacgccatcatcgaggaccccaagaacctgaccgccgactggtgcgggcccttcgtgtgcaactacaccggcgtcttctgcacggcggcgcaggacgacccgcacatcctgaccgtcgccggaatcgacctcaaccacggccgcatcgccgggttcctccccgaccacatcggcctcctggccgacgtcgcgctcatccacctcaactccaaccgcttccacggcacgctgccgccgtccatgcagcacatgcgcctcctctacgagctcgacgccagcaacaacctcttctccgggcgggttcccgtcgttcctcacctcgctgccgtcgctcaagtacctggacctgcgcttcacagcttcgacggagacctgcccgacgccgtgttcgggcggcagctcaacctggacgcactgtttgccaacaacaaccgcttcaacgtgaccctgtcttcgcagagcctgaccaattccacggcgtcggtcatcgtgctcgccaacaccgagctcaccggctgcctgccgccgagcatcggcgacatggccgacacgctggtggagctcatcctcctcaacaccagcatcagctcctgcatcccgccggagatcgggaagctcaagaagctcagggtgctggacctcagccacaacgagctcgccggggagctgccggagagcgtcggagacatggagagcctcgaagtgctcaacgtggcgtacaatcagctgtccggcgtggtgccggagagcatctgcctgctgccgaagctcaagaacctgaccgtcgccggcaactact

SEQ ID NO: 73012 - DNA, 1003 bp, Zea mays
  Clone ID: MRT4577_166586C.1
tcggcgtcgtcgtccgcccgctcacagctgaccgcccgctctggcgctcggccccgtttctgccctcgcccctcggccgcctcggcgcctgtccgagaccgacgtcctcgctccatccacccaacccagcccaaagccgtcagatcgcggcactccgtccaaccctcggcgccaccgatccccttctccgccccctctcctcctcgtcgtcggtgaagatgattccccagagccagagcagctccctgcagcgccttcaacacgtcgagaagcggatagtgcgggtgctggagattgcgggagcggtgatggaggagctgggatactctcagggccctcgcaccgatgcagttggcgcgcactgccgcgagttcatgatggctatgaaggaaattcaaacgacgctgcgtgaggaaatcaaaagtgcttgcgaataccgtccatttgaaaagtgtgattacagcgcaaggattgctaatgagatatgttgcaagaagctggagtatgtactcgagaagttggatacaatgcaacaaaaccttgaactgagcactgataatgtttagcgagctgtctacatattagctgggaatgcaacagatatctgagagatatgttgccagaagctggagtatgtacttatgaagactcatacaatgcaacaaaaccttgggatgagcactgataatgtttagcgagctggctacatattagttgggaatacaacagatatctgatcgatcagtatgcagaaggaacgtagaagcattctatcaattcgtaattgaagaaactctgggatggaacctggtgattccatgttttgtgggttggggaaaagttattagttttggctgcctgctaatgtccagtagcatagcaatgggtccttgggcttgaagtcgtgggattttaaggcactatttttaccgatgagaatttcctgttctgtattttatgggcgtgcttcatccttaaaacacgcctttgggcccttgttccc

SEQ ID NO: 73013 - DNA, 2025 bp, Zea mays
  unsure (1)..(2025): unsure at all n locations
  Clone ID: MRT4577_166587C.1
tgtaanagcctcatcagtagaaggaagatgcangaaaataaatgctatagaataacattaaaacacgagccacgggtgaaaccctcagggccctcgcactgatgcagtcagcgcgcactgccacgagttcatgatcgttatgaaggtaaccaacccactgcctgccctcatatcgtcagggtgggggttcctgttgttaccagttatgcgccacaatcctcactaatcccatgctggagagacttttgggaaaatcaacatctgttttagaatgctgtgtgcagaattttgctgtccaatgttactttgtttccatcaaattaactgtaaatatatgtatatgctctcaattggtttttatttgaagcagtatacatgccactaataattcatgataactcactgcttaattatgttttggttggagtcaagctgatcagcacgactgcgtgggcccggcgtcggcggcgacggtgaaccatagagcagccggcagcgtcgccgtcgcgccgctcccgcactgctcccctgccccggccgccgccgccgtcgtcgtccgcccgctcaccgctgatcgatgaccgcccgctctggcgctcggccttcgccccgtttctgccctcgcccctcagccgcctcggcgcctgtccgagaccgacgtcctctctccatccagtcagttgaccagctcgactgctctagctcgtgctctccgtcgcggatttgatttcttcctttcagcccaacccagcccaaagccgccagatcgcggcactccgtccaaccctcggcgccaccgatccccttctccaccccctctcctcctcgtcgtcggtgaagatgattccccagagccagagcagctccctgcagcgccttcaacacgtcgagaagcggatagtgcgggtgctggagcttgcgggagcggtgatggaggagctgggatactctcagggccctcgcaccgatgcagtcggcgcgcactgccgcgagttcatgatggctatgaaggaaattcaaacgacactgcgtgaggaaatcaaaagtgcttgcgaataccgtccatttgaaaagtgtgattacagcgcaaggattgctaatgagatatgttgcaagaagctggagtatgtactcgagaagttggatacaatgcaacaaaaccttgaacagagcactgataatgtttagcgagctggctacatattagttgggaatacaacagatatctgatcgatcagtatgcagaaggaatgtagaagcattctatcaactcatgattggaggaactctgggattgtaacttgtgattccatgttctgtggcagagttattagttttggctgcctgctgatgtccagtagcatagcaatgggtccttgggcttgaagtcgtgggattttgaggcactatttttaccgacgagaatttcctcttctgtattttatcgacttgcttcatccttaaaacatgcctttggtacattgttaacccatttcttcactggtgatcttcatatattatgcagtgaccgctgttctgattttattgctgatgctggcccgacatccattgcattagaagctcatcaggttttatcggctgcaaatgttgtatgactgtttagtctagcaatctagtttagagagcaagtaagacataaatgagccatttatctgtcactaaccttgaagtctatgacttgtataaaatggctgggtatgccgacaatatcaacctcttcggacatctcaaaaaaaaaaaaaaaatatccctttttttgcaataaagtgtaaactacttagcgaataagaggatactttatgatgccagtaccccctcaatcaagtgattgtgtcaatactttcccgtagcgttagcatgattttagagcttaggataagaaataaagtttcaaattttttgctatgggggtaatagatgatcgacgagtacactgaaganatgtaccagcattctatcaacttataattgcatatagcttttgctcaactgcaggactggaac

SEQ ID NO: 73014 - DNA, 620 bp, Zea mays
  Clone ID: MRT4577_166588C.1
gccggccggtccgggactctaatcaatcaaagaagtctctaagatcaaatcacaccactcgattcttcaactttccccaaccaaaccaccacttctcccctactaaatcctccaaaatgccccgtatggttgcacccccgccatcaggcgaatttcaaatcgtcctcagcaagccctttaatggcgccccaacacacatgatcgaggtaatcggcgagcccaaccgctccgccagcatccgcctctccaactacaacggcggcagcaagtcgtctgagaaaaaaggcgacgtaccccaagacgacgtccgcgaactcatgtctctcgtctccacgctgcggggcttcccctcacacccgagcaaagatatttacggactggacaccaaagttgatttcaacacgatggaggttcagtggggaaaccaggatgaggatcctgcgatggaagggggagaggtagcgggggagcagaaggatgagtttaagaggattgcggagagtattgaggcgttggcgaggcagtttgctaagcaggattcggcggtgtaagaggggtgtttctttttacaaatgatgatgtgatgaatgaacgaaaaaaaaaaaaaaaaaaaggcccta

SEQ ID NO: 73015 - DNA, 249 bp, Zea mays
  Clone ID: MRT4577_166589C.1
atagctgcaaacatagctgtgaccacatgatgatgacgatttactacagcaggcacttgcaatgtcaatggagggtggtgcttcaggatctgcagctgtgactgactctgctatggcagaagctagtgcagttgaccctgacttagcgttggcaagagaagaaggaagacaagtaagacaaaacagaagacgagaagaactgcttcaagctggagtgatgtcgctgtggtgcttttgtgactgatcatc

SEQ ID NO: 73016 - DNA, 343 bp, Zea mays
  Clone ID: MRT4577_16658C.1
acgacgaacctttttgcgacagaccatccagcctggcggtgcgagccctgtacacaaagatccgtatcatgaagggtcgcaacgtgccggattacctgcaaccgcgctagagctgagacaacgtaaagaagagcgaaggccaggcccaagaccgctacattgataagcacataagacacgagctcggcggacgctctgtatcacgtgtgaatcggagggatcatcttatcctacttcgagaatctgccctgcgagcgcgcccaccaagcacaactcgaggagatgtaaaggacctaacggaagcactaaattcgctgccccgttcctcgacggcatcgcggaa

SEQ ID NO: 73017 - DNA, 497 bp, Zea mays
  Clone ID: MRT4577_166590C.1
tcgaggactaagacgtaccgcatagcttgctaacgacggcactttgaatcgctataagctgaaagctagtagaacctatcgcacgaaaaccactcgctattataggcaaaataagcagtgcacgtaggatattgagagggaatcctggtcgtagggtctgtagacactcaagcactgctagtgagtgctacatgccctatgaataccacaaaaacaagtagacaaactaaaggatactgagaaggacacgaagatgactaccaggtaaacattaactcagatatggaggtatgcaggcatgaaaagtctgatccacggccttggcccacgaccatgcacgcgcagatgcatcgcttggaattcacgatttgcttctagacgttgtcaagcacgctcttcatgcataagcacatctgactacctaggtttgatcataagatggaagctcttccatttggtgaaggcattgtacgctagctactctgacaaggctatgt

SEQ ID NO: 73018 - DNA, 674 bp, Zea mays
  Clone ID: MRT4577_166591C.1
cttcgtggaaggcgccgtgatgcccaccctccgaggatcaacagctctgataccacttgtgatgacccgtggccgcggctagggttcgccgggcgtgagtcggtagcagaccggcgaaaagaatttttttctaggacaccgaatgttgcatttgacaaatgactactctcaggcctgcaaactgcacattacaacgtgaagttggttattgaaagggcgcccatagctgcaaacatagctgtgaccacatgatgatgacgatttactacagcaggcacttgcaatgtcaatggagggtggtgcttcaggatctgcagctgtgactgactctgctatggcagaagctagtgcagttgaccctgacttagcgttggcttcctggtgttgatcccaatgatccatctgttaaagatttgttggcatcattgcacaaccagggagagcaagagaagaaggaagacaagtaagacaaaacagaagacgagaagaactgcttcaagctggagtgatgtcgctgtggtgcttttgtgactgatcatctctggagcttttgtgaatgatctagctagctatttgtaaatgatctagttgtgaatgatattataattgtgatacttttgtgaatatataattgtggtgcttttgtgtttatgtgatggatttatgactgtggt

SEQ ID NO: 73019 - DNA, 572 bp, Zea mays
  Clone ID: MRT4577_166592C.1
tgggaccctcgaggccggccggggcctatattaccccacctccacctcaacttctcccaccaccgctttacctgtgagtccttccccgatctacgccgcggcaggaaccacatacccccgcccgcgccgacccgtgacccgccccgaccaatccgccgctccgcgctatgtcacacgcccggaccacaatgaatttgatcctgcccggccggctaaccgacgcccaagacgggaccactgcaccttgcttctgccctatggaggaactagcatgaacgggaaatcctcgacgaccgtcaataagtatcacaaatatcatgtatactatgaatgcaaggaggaaacgaggaaatccaactatactgatatgactgataaacactatgatacttgccactagcttctatgagcatatgtggatggaatccttcactctttgctcaaagatgaaatggataatccatactagagatcatcacaagactagagcatgttcttgccctggcaacgtgtgtagaaaccagaaatgaggaactgatatgagctctgtgaaatatcaggaccactgaaag

SEQ ID NO: 73020 - DNA, 285 bp, Zea mays
  Clone ID: MRT4577_166593C.1
ttttttttttttttttttttttttttttttttttttttttttttttttttttttttgggtttgaaacccttttggaaacttttttttcccaaaaaaaaaaatgaacttattttcctttggaaaccttggaaaaataagttcccaaacttgcccttattaaattgaaaataaaaaatgggactttccaaaaaaaaagcaccttgaaattggtttccaggggaacttatgcttttgggccccttgctaaatgggtgaattgaactgccaataaataaattggcaaac

SEQ ID NO: 73021 - DNA, 431 bp, Zea mays
  Clone ID: MRT4577_166594C.1
tcgagcggccgcccgggcaggtacaagctttttttttttttttttttttttttttttgcttttttttttttttttttttttttttttttatttttttttttttttttttttttttttttttctttttttttttttttttttatttttttttttttttttttttttttttcccaaatcaaaaccaaacttttttttttcatgggcatacccgcccccccccagaaattgttttaccctcacaatcccccccaactttcgaacccgaagctaaaacgaaaaacctggggggcctaaaaagggagctaactaacataaattgcattggcctcactccccccttcccaaccgggaaaccgggctggccattttttttaatgaatccgcctacgcccggggagacccccttaattttttgggccctcctccccttc

SEQ ID NO: 73022 - DNA, 702 bp, Zea mays
  Clone ID: MRT4577_166595C.1
ctgcatactatgctcgtcgctgcaaacaaactaaggtatataaagcgcagttcactttctatgtgctcatgtacataagtacattttatttgtctatatgttctttgtgttagatgaattgtatgactgctgatagttctcaagccagcataatctccattctgtgttttctccctgctagttttactgtagtttgttctgctgtcataataatttgggaaggcatgtctctacttttctcgtttccattcatcgattgcgattatcatcactgaaagggttttatatcacctgttgatttttgggaatcttcatagtattgatggcacaaaaaattcatgttatgcaggacctgacacccaaccaacttcaacaaggttaacagtgttccattatttgagatgagtttgattattacttattacatgaaatcctgatgaagactccccaattaattttgtcagctcttagcaagacattttcagctaaaaagaggaaaagcaaactgcagaaggcatgggatggaacgaaagttgtttataatatagcatcatggagcgcgacggctattggtatctaccagaatcctgcgattgtgcaagcagcaactgcagccttctggacatcctgtcgtgtaatatccaagtttctgtgactagtcatggctggacctggacggtgcaaatatgcaaacattgtgtg

SEQ ID NO: 73023 - DNA, 840 bp, Zea mays
  Clone ID: MRT4577_166596C.1
actcctatgggcgattgggttcatcgaggccggccggccggccggggtgtgctcttgggtcgtcgtcgtcgtcgtgggccttcatttctcctagaaggtcgagaggagaagaaggcgagacgtgcagtccgtcgggcaccgatcgagaacagggaaccgatcaagtcgtacgtcgtcagcatcacgaccggatggcgcgtgccgcgtccagctatgtatccaggagggggctctccgcagcgatgacggtggcggaggagtccgtgaagaaggtggaggagaaggcggtgaagctgggcacggtggccaaggacatcgccagcgccatggccaccacgacggaggagaagacggcgttctgggaacctgaccccgagaccggatactaccgtccggtcaccggcacgaaggaggtggacgccgccgacctgcgcgccgagatgctcaagcggaggattctgcaggacgactgatgcatgcagcatgcactagctgcccctgttcgatcgccaagatcacaccacgacgaagatactgtacctagtagtacgtacgtacgtgtacacctgattatccgaagaagatggccagccgattattaaccattggctatcttcgatcggggccaatttcagaaggaatttcctttactttctgtagcaaatgatcgggttcctgcacagttcatcaggaattccattgtatgctcgtgttggtatatatacgtacgatggggtaccattctggtcaccataaaaaaaaaaaaaaaaaaaaaaaaaaaaaaaaaaaccgtttccccggtgctcaagcgatcttttggaatatatgggagcattgcat

SEQ ID NO: 73024 - DNA, 458 bp, Zea mays
  unsure (1)..(458): unsure at all n locations
  Clone ID: MRT4577_166597C.1
cccacgcgtccgcaacgctaccgtcgtcatggtgttcgacgccatggacagcgatgccgaccgggctgcgatcctggagtggctggaggtgcagatctcggaggccaaggacctggagttcaaccggaaggacgtgctggagaagatggacaggtggcaggcggcgctggaggaggagtcctggctcgaggagtacagcagaaacgagaacagatacaacgttggcaaagggacgcatctcgtgctcaagcgcgccgagaaagcccgcgccctggtcagcaaaatgccggtgatggcggaagctctgatggcgaaggtagtcgcgtgggagaaggagagaggcgccaagttcgagtacgacggtgaggtgctgctggacgtgctggatgactacggaaacgcgaggaaggagaaggagcangagcggaagcggcagcgggaccagcggcggctgctgc

SEQ ID NO: 73025 - DNA, 520 bp, Zea mays
  Clone ID: MRT4577_166598C.1
gattactgtttttattccttttttttacattttttttgcatgttcatttgtagggacttttgtttctgtattgatcgaacccaattgtcttcttgagagaattggaaaggcaaagggagtttttctaagagaaaagggaaattacatgcccttgcccttatgagaatacccaaggaaagctaaaaagcccctaaaaaaacatcaacccccctccccgggcagagattacaagagagggggctaaacctccccctaggcaaaagaattctgtcaccccgcctatggcgctgaacacaactggatcgactaagaggcataatcagcggggggcaccagcccatttttatcccccccagtttcaaaaagaaggggatctgaaagtgtgcacaccacatagtgtgacccctccagattttaacaccgaagcccaaccccttgaggtggaaagccttcaacatcttggccatggtgtgtgcgaaaatcaaagacattatctttgcggggaacataaaacctcccc

SEQ ID NO: 73026 - DNA, 420 bp, Zea mays
  Clone ID: MRT4577_166599C.1
ccgatctctctcccgggggagcaaaatggacgaaaggcgaccccccagcaggggcgctgggtgccttgggaatccgaggaatcccttctctttgccagtcggaggggactagatggagccgaaggggccggagatgggccgagcgctgccccccgggggtcctcggcgccgggagcagcttaggagcgcagcgcagcaggctccattcccggccgccgccgctcagcccattacgcaaacctggcgggtccaaccaaccccgctctgccgccgctgctggaacccaggaggcgtgcttgcaggcttcgggcactacgcggggctggaaataccacgcactgccccttcgcctagacccccgctcgggccacgcgggttctgccctcaaagctggtagctgccccatacttgggggggggg

SEQ ID NO: 73027 - DNA, 389 bp, Zea mays
  Clone ID: MRT4577_16659C.1
gatggttcgggctatcgttgcctacccaatgagactgccacccgcgatcctacatgaacatggcttagctacgacaaggatgtacttctaatatctggaaggcctcgctacttgataaaaagaaatcactaccaggtgacacaaggattggagtgtatacaaagtctgtcacagttagtctggttgacacacaaccaagcctgcaatgtgtctaaaaatatcgtcgccacaatgaagaggaaggaaggacaaattaataaagaactttgtacctacgacaatgcagacccggatctacgatgggaacaatagatgatgagcaaagtttaataatatcccatgatgaataacaataccgtcgtgctgatggcatttcagattcatactca

SEQ ID NO: 73028 - DNA, 615 bp, Zea mays
  Clone ID: MRT4577_1665C.1
cttcttaatatatatcgggagggcggtcttttcctccccggccgagtaaaaccaaatctaaaaatgatattgattaataagttatcaatataactacttgctacaccaattgattattttagtcatgtctcaagttctcaactacttcatctggtctcagtgcaacagataacagactaaaagctcagctgaaaacagaacatacagttttgaattccagcacaagtgtaccaaaaaagaaaagaaagttacacacatgcatcaaatgtggcactagttagatcactcaaatgccatatcctaaaatagcatgccttgattctaaatgttttatcagttaactatgagaaacgtaaggtgtaccatgcaatgttatctagtcatctgattaattgtcctggctggccgctggtccccaacactcggctgggcactccgactcgaccagagcgattagaaacctggtaacctaattaatcatctgactagctgttttggccaactaaacttactgggctagctgttacgctcaaacccaataggatttctctcctatacccccactcatactccctcacctccacaccccgtgagcgacagcaacggaattcgagc

SEQ ID NO: 73029 - DNA, 350 bp, Zea mays
  Clone ID: MRT4577_166600C.1
cggacgcgtgggaaaaaaacaccaaaacatttaattacaaaacaaaacaacaacaaaaaaggaggattttaaaaaacaaaaagacgcccaaaaaaacaaccaactatcaaacccaaaaacagaactccagatcaatcgccataacggcacccacctactcaccattccagacttattcacttctgcctaagccaaagctaccatcgatatcgcttactcaaacgacttcactcaccactgcagcctaccgccactaaatgccgatgcttacatagacaactatcgtatatctgagactcatccattgcttgctcaaaccattttcgaatcatgaataaacatgattttta

SEQ ID NO: 73030 - DNA, 195 bp, Zea mays
  unsure (1)..(195): unsure at all n locations
  Clone ID: MRT4577_166601C.1
cctcgaggccgccaggccggnatcatgcctcattgcactcaccccaaaccaatccgtcgcagacactcaaggtcgcaggatgccgccgtcgcgtgagtaccaccagacccatgatgaaaaggacgacgacacctcacgcgttgttaagctcatcatcgccgagggctgcgctttcgttgttgacagcaaggccgc

SEQ ID NO: 73031 - DNA, 404 bp, Zea mays
  Clone ID: MRT4577_166602C.1
tgggaccctcgaggccggccggggtacttaccggcccgtttagcccgctttttggcccgtttggccatctctacattacatatacaccgtacatatacatgcatggtaaggcatatatacaaccctattaaatatttgtctcatgagagatctctagcagggacggaggcattggtggggcgagcagggctccagcctcctctaccgcttctgagcctataaagtccttgttagagcctctcctaaaagttaacatgtacaatatagtatagaaagagacttatatattatacctgattagttcaatccctctaaaaaaaaaataaaaaaaaaaaaaaaaaaaaaaaaaaaaaaaaaaaaaaaaaaaaaaaaaaaaaaagaaaaaaaaaaaaaaaaaagcggcc

SEQ ID NO: 73032 - DNA, 218 bp, Zea mays
  unsure (1)..(218): unsure at all n locations
  Clone ID: MRT4577_166603C.1
ggcccaaacaccaagnncnccnaggcggcncaggggcngngaacgaaanaaggaggccaaggcgcccggngnnganaccgngccagnacnngggggaccagacacggaccngnagcgcncaaagccngccaagggngnggagaagggaaacccgcnacannccccccnaagcagcagccgcccagncaacaaggaggacaaagccgagnngaaggcag

SEQ ID NO: 73033 - DNA, 116 bp, Zea mays
  Clone ID: MRT4577_166604C.1
cttatcttgacaatggtctacagggtttggggtattccatcgattccactggtggaacagcatccacactggaagcagcacgagccacccgaacaaaagctgcttaaacgacacac

SEQ ID NO: 73034 - DNA, 299 bp, Zea mays
  Clone ID: MRT4577_166605C.1
gtggttgagattttatccccttttcgggaggagccaaattactgcaggaccccttatagaaaaaatattacaaaccttcggaaacgatttatggaatcttgaaaaccttgaacaggaacacacaatttccaattgaaaaacgtttaagaagcctatgcagttacaaaaggtttaaaactttgttttgtggacccaaaccatgcagggaacctatttggcaagcttaagtttttgacttttttttttgccccaagggtggtgttggggacacacttttttttgaggaagttaaaaaccct

SEQ ID NO: 73035 - DNA, 389 bp, Zea mays
  Clone ID: MRT4577_166606C.1
gccggcggcagcggcggggctccttgctgccctccgcgctggaggccttcgctgatgtctcgggaccaccagattttctgaggcacagggttgccgagccagaggaagggacggaggccctcggtgtactcgatcgccgtgggaaagaggggagcaaacagccgcctccaggtaagtagatttaaagactcaattaaagtggaaactggagactaatgtttttttatcctctcctgtttattttggtaacggtagatgaatggaggtcgattagattgctactaatgtagttgcaggtcttgcattgttagagaattgacgtagattttacagcagtacatgtaacaatttaagatatttttaacagagtctggatgcaatttcagttt

SEQ ID NO: 73036 - DNA, 2190 bp, Zea mays
  Clone ID: MRT4577_166607C.1
tttttccctctcctctctcctccgctcctccgctcctccgctccggtctccgccctccctcacctctccgtcccaaaaagggcaacgaaatccagacaccgctccccatctccccttccttcctttcctactcccacactcccccaccctccgctagtactagtactagtaccacaaccaccccaccgggaaaaaacgcgtccgggggtagggccgccgccgccgccagcgccgccgtgcagatcgcggccggatctacggcgctggggcacgggggtccccggatcgacgacgcctcccccgcgggttcggatggctatgcgaaaagaaaaccctgtgcttaatgcttgtcaagcatccaatggccggatcacgcgagctcaagctgctgcaaatcgccgaagctttggagctttcccttctgttccattgcctgcaaaaaccgaacgaaaacagactgcacaagggaaggcaaaacgaggttcttcatatgacaacaccagtgcaagtgttgcactttcaggcccccagcctaaaaggcgcacagtactcagggatgtgaccaatttgagcaatgctaactctaacaaaagttttgctgctgcaccgaagcttcagacaaagccctctctaaggactggaagaaccgtgagcaaaagcaagccgtgcgcaaaaaagattcctaaaaaaccaccaccagctggtaatggaagtgcattgactaatgttttgaacattgctgaagaaacacaagcggagaagattttggcagagagagtggaacccgttctgttgcttgagaacagggggccactgtcattgcagaatgttgaaaggaacagggacagtgcttgtcatgaggtattctttgaggaaagaaacctcagggataaatgtgaaccttctgtgtcaaagaatggggactcttatgtgttagacattgtagatatcgacaaagataatggcaatcctcaaatgtgtgcttcctacgttgtggagatatactcaaacctaatggcttcagagcttatgagaagaccaagtccaaattacatggagggtttgcaacgggacatcacaaagggcatgagagaaatactcattgattggcttgtggaggtttctgaagaatacaagcttgttccagacacgctgtacctaactgtataccttattgaccggtttctttctcggaactacattgaaagacagagactacaacttgtgggaataacaagcatgcttgttgcctcgaaatatgaagagatatgtgctcctcgagtagaagagttctgtttcataaccgacaatacatacacaaaagcagaggtgctgaaaatggagagccagctgctgaatgacctgggatttaacctttctgttccaacaacaaaaacatttctcaggagattccttagagcggcacaagcatctcgtaaaactccttctatgactttaggatttctggccaattatctcgcggagttgactttgaccgaatatgagttcttgaaatttcttccgtcgttggtggcagcatcggccgtgtttcttgctagatggacgcttgaccaatccgatctcccatggaaccagactctagagcactacacgtcttacaaatgctctgacattcaattgtgtgtctgtgctctacgggaactccagcataacaccagtaactgccctcttaacgccatccgcgagaagtacaggcatcaaaagtttgaatgcgtagcgaacctaacttcaccggagttccctcggtcgttcttcagctgacacgccaatggcaccgattgatgagcaacgttagcagcagccgtagcgcaggttgcgttaacattattgtagcatccccttttaccccccaatgtctgatttggatgtgtgttgttatcgagctgctgtgtcccggcctggcctttttcgagtcgcaagtgagatgaagaaggacagagagatggctccttggcttttcttttgtttgtttgacgtaaaaggttcacccggttgtaaacaacactgtgtgtagggctctttgcttgggctgttgttaattaactgtaaggggagatggtccggctggcttgtatgacgacaaacgacgggatgatgtttttgttgacacaattcgttcattggtagcttcggaatggaaattagtttattgccagtgattactctggg

SEQ ID NO: 73037 - DNA, 225 bp, Zea mays
  Clone ID: MRT4577_166608C.1
tatagtgagtcatattagtccgctctcgatcggtccgtcgatggaaccatggtagcagcatgtatcggtcaggagctgtctctcgtaggcaacgacgcgtcgtctagatgtctcagagcatggatgaagcgtttcgggctcgccgcagtgagagggaacagtcttctctgcattgtatctggcaccggttcttctggggtgggggcgaaggagaaggatgaagga

SEQ ID NO: 73038 - DNA, 421 bp, Zea mays
  Clone ID: MRT4577_166609C.1
gggaaaaaacggaacctttaataagaaaaggaaaggaacgaacaaccggaagcggaagcgacaagcgagaccaaaagggaagcgaaggggcaaaccccggcccccgggaggaggaccatcggataaaaggggggagcacaagaaagcagcccacccagcccacacacggggggaaccaccgaccacaggccgctcttccccggggggggggccccaaaacgacccagggccacatctaagggcacagggacccgccccgaaaaaacaaaaaaccccgctcgcccccccccaaaaacgtcccgggcgtcgaaaagcgcggccgcccgcccccggggccaaacccgccgtcggccccacgacccccgggccccccccgggcctcaccgtgggccggcccccgtgggccctccccgggccgggc

SEQ ID NO: 73039 - DNA, 290 bp, Zea mays
  unsure (1)..(290): unsure at all n locations
  Clone ID: MRT4577_16660C.1
gcggaacttcccgcagactattgtgatgtccatgcaggcgttgtgtcgctggatcggctgaacaaattcgtgacggacaccgagatcgacaccgcggccgtggagcgcatcgagagtggcggcgctgaggacacagtggccgtcaaggtgcaaggcagagtgttcgcttgggatgtgccagcggacgaggagatgaagggcaacaacaacaacagcagcaggccccgccatgaggtggcagagaatgacaanggaaatcgggcggagttggtgacagtgctgaggggcat

SEQ ID NO: 73040 - DNA, 353 bp, Zea mays
  Clone ID: MRT4577_166610C.1
aaaaaagtcataataaaaaaaaaaaaaaaaaagaaaaaaaaaaaaaaaaaaaaaaaaaaaaaaataaaacaacaaaaaaaaaaacaaaaaaagaaacaaaaaattaaaagatacgtcgtcccaaaacagaactcacatcatacatcaacgacctggggggctccctacggagggcttgacgttttagaagccgggggagttcatggcggacccggttcgtgcaggaaccgggctccgtgtacgtccacatgtttggcaacgttctcaggtggaacaccttcggctccggccagatgatccgccccggaatgaacttctgtttcgcgaccatggagatcatgcagggcactctc

SEQ ID NO: 73041 - DNA, 141 bp, Zea mays
  Clone ID: MRT4577_166611C.1
gggggtacaagcccggagcctaattttgtcaaaatataaaaattcgttacagattttagcttttttttgcaagaacattttcttgggtttacaaaagtcaacaaagggaacaacaattcttacccacgttgtttttcaccc

SEQ ID NO: 73042 - DNA, 1066 bp, Zea mays
  Clone ID: MRT4577_166612C.1
ggccgggcattgaagcagcatataatctgcctcaaggaaaaatattgtgtagcagatgaggatataatcttatatggtcagtctgttggaagtggtccaaccattgatcttgcatcgcgattgcctgacttgcgagctgtggttttgcatagtcctattttatctggactaagagtaatatatcctgtcaagcggacgttttggtttgacatttacaagaacatcgataaaattggcatggtaaattgtccggtacttgtcattcatggtacatcagatgacgtcgttgactgctcccacggaaaacagctatgggagcattgcaaagtaaaatattctccactgtggttaagtggtggtggccactgcaatctcgagctatatccagattacattaagcacttgaagaagtttgtgtcaagcgttagcaaaaaagcatcatcgaaacctgacccaaaagaaacaacgtcaaaggatgacactaccagtaaagaaacagaggaagcgtacccggagaaacctcaagaggccaagaagtgcccgcagatctcgcgaaagagcctggacagccgattcgggaaatccaaaacagtggatgttcctgataaaccacggatgagctcggacgacatcgacaagttccggaggagcagatgcttggtctggtgatgcctgtgttctgcacagattgtcgaacagtacctgagcgaggatactatagcatggaagtcaagcaactgtattacatcatgctgcgaggaacggcatcagcggttcctgcagcggagaggaaaggactgttaaataagaaaaaaaagaatcaggaagctaccgtcagcatccatcaaagacacagctacttgactgaaaactggtagttcctcagttaatttagcacttacaccgacaacatgttttgcagcatcggttagggtttccatattgtaaaagtgtaccgttattgtctgtaatcacgagggaccgatacaaacatttgcagagtctgaaagccttaacggaatcacgagcaccatagtctattctgggtgcaccagtattcgggctc

SEQ ID NO: 73043 - DNA, 338 bp, Zea mays
  unsure (1)..(338): unsure at all n locations
  Clone ID: MRT4577_166613C.1
ttgggaccctcgaggccggccggngacacacatccaaactaaacaacaccagcttctctaaagatcacaatgatgagagcctggcggtggtggtggccatgctggtcaccgccttattccctgagcccgcatcgccccagcagtgcgagtcgaactgccaacagcaagatgtacaccagctgcctgcactgcaaccatgccggcagaagtcactgacacctccatctcctgccccaggagacaccagagacagtacagaggcaaaagtgccaaaactcccatgcaacacaacaagagcaggatgcaccacatcatgccctagacactgtctcaccaca

SEQ ID NO: 73044 - DNA, 273 bp, Zea mays
  Clone ID: MRT4577_166614C.1
ccaagtgtggtgcctggtgttgacctggccaaggtgcaacgcgctgtgtgcatgatctccaactccaccagtgttgtggaggtgttctaccgcatagaccacaagttcgacctcatgtacgccaagcgtgccttcatgcactggtatgtcggtgagggtatcgaagaaggcgagttctcttaggcccgtgaggttctgacaccactcgaaaaggactacgaggaaggtgacgcttcatatgatgaggacctagaaggtgattatggtgatgag

SEQ ID NO: 73045 - DNA, 612 bp, Zea mays
  Clone ID: MRT4577_166615C.1
ttttttttttttttttttttttttttttttttttttttttttttttttttttttttttttttttttttttttttttttttttttttttttttttttttttttttttttttttttttggccaaaaagggagcgccaaaaggggccaaaaaaggggaaaaccgaaaaaagccaaaaagactgggacggtcaaaggaattgggaaaaaaaaaaaaaaaggcgcaaagggttaaaaaaaaaaaaggaggagaaaaggggtttaaaaaaaaaaaaaacttaaaaggggggaaaggggggaaaaaattttaaaaaaggaaaaaaaaaaggggccgaaagaggaaaaaaaagctaaaaaaatgcgttgatgtttggaaagcccaaaaaggggttaatttttaaaaaaagggggggggggtaaaaaaacgggcaggactaaaaaaaaaaaaaacgaacacgtacggggaaaaatgggaaaaccataaaaaaaatttcaaaaaaaaattttgggggtaaacccaaattagggaaaggcagaagggtttggctaaaaagggttttggacggggggttaaaggcccaattaaattttaaaaacggggaagctttggtcaagcc

SEQ ID NO: 73046 - DNA, 319 bp, Zea mays
  Clone ID: MRT4577_166616C.1
cgctagcgaggaggtctgcagatctttgtgatgaccctgactggcaggaccataacccgcgaggttcagagctgctacaccatcgacaacgtgaatgcgagcacgcacgacatagagggcatccccgcagaccagcagcatatgatcttcgctgtcaagcagatggaggatgaccggaccctagcagtctacaacatccagaaagagagcactctccacctggtgctccgactgcgatgagcccattaagccatgagtcatttaatctgctgctgtacctgagtatatgcgtcgtctggtgccctctggtgtacctcta

SEQ ID NO: 73047 - DNA, 771 bp, Zea mays
  unsure (1)..(771): unsure at all n locations
  Clone ID: MRT4577_166617C.1
cattgggtacctcgaggccggccggggttgttttccgcagtgctcatcactaagaggaagctgatcaactacttcgagcgacactccgtgtcggtagtatccatggcaccactcggtgaaatcgtccgaaatcatgatgcgtctggacacatcgtgaaatggtcccacgaactcaatagacccaacatcgattatgtctctcggacagcaatctagtctcaagcccttgccgacttagtcgtgaagtggacagagtcgaggactcggagtgctcaacaaggtgtcactcctttgcttccatctcctcccccttgacgcctttgaggatgaaaggcggaaggcccccgcagccatcctcgggcttaggcaacacgcccccggaggatgaaggagcagtggctggtggcggtggcagaaggacaaccgcagtcgaatccattgctaggagcccgtcggcggtggcctcagctgtcgtatgatctggagatgggcatgggggaacgacgaccatcgtgtccaccatggaggcctcgacggcaacaacgtcaacagcagtagggcttgcccccatatcaaggatgaacatgcttctccattcccacgaggacagaaggggncacagggacaacgctagcaaccaccaaaggaagttgagaagacgacgcgccccttcgccacaaggaccatgctcttcactgacttacccgacacatatgtgnctggatgggattaaacagagtgaagaacacagagggcgtcattacaaaggag

SEQ ID NO: 73048 - DNA, 245 bp, Zea mays
  Clone ID: MRT4577_166618C.1
agaaaaagccaaaacattctttcagaacatttttaaaatcatgaaggccaaatgaagattaaagattgagatcgatggtagtctgccaatattttgattctgataaactctggaatgaaacaatggaatcttttataaaaaaaaaagaaaaaaagaaaacacacataaaaagacagataaaaaatggggggggccctcactaagctttagttccctaatgaggataatcggcagctgcagaaaaa

SEQ ID NO: 73049 - DNA, 1395 bp, Zea mays
  Clone ID: MRT4577_166619C.1
tataaaagaatgcttcaacttgaaagggaggtgtattaaaaattttgttaaaattgaacattctgcaagcatctttccatagttagaaggaatttgttataaaaatatcaccattttcaccaatataataaataatggttgtttttccatcttgaccaggaagaaatggtctgacacgacaataaaccctgatattgccttttagttcctgtacctcattaaatagcttctgattttcagcaagaaccttatggtaattgtcagcagcatcaaccaagcctttcaaatcatgtccaatgttagatatttcatccctccatttcatttgaagggcaaacatttcctgcttaatagactgagatgatatccttatgtccttaatggacaatttttgattatccataaaactctggaaaatgtttgccttcctggtccaaagttgagatttcagttgggaaacagattcaatttcttcggctttcttttctgattgcattaaaagaaactcagcctccttaagtctaatagccaagtgttcctccatctgcctggcctctgtttcctttctctcgtggtactgttcatgcatcctactcaagacctgtatttcttgctgaagggaagcaattgtattttctgcattctccttttcttgcatcagccgaaccatgtcttgttcacctagttttcttttctcatcaagttttgatttttctacctcaactagctcaagtcgatctactgtcatctcattttcttcatttgtgccatttactaatgtctcgagtgctttaatttttgaacgatacttgtcttcccgggtcttgatgatgctattttgatttcttatgtgatccgcttggatagcaatgcggtgctcattctcttgaacaacattccttagcaagtaaacaacacgatgtggtatttctcctcttttcctctcaatgctctcatctagaatgccattaacaactctaagaagtgattgagtaggggcattatctatacttcttggatgcatcatctctgaaactttggcagcaggaagatcagtgtaggaggctcgcttaagttggaaagcatcatggaccttttgtccagaatgaagaatacttctttgttgagacttaggatcccagtggcctttccatctttcctcgcccagatcttctcccgggtgtcataaccgaaattacaggctcatcagattcttcaaggtccagtttccttctaaggggtgttttagcagcattggtcgtaatggtttgacgcaatcctggagtcacattatcctttagagccaaaagacactcgaccacagaagccactgacccctcctccagatccttgacactgaaacctggcagacccatctccgcaacaaaatagagg

SEQ ID NO: 73050 - DNA, 432 bp, Zea mays
  Clone ID: MRT4577_16661C.1
gccaggcgttctgttcagcggcggttccagttgtttctgcgggagctcatgcaactgcgtgcgcgctaacgttgtgactgtcctgggcagacgaatgaagaccatgactatcggcagaccgaccaccaagagccagcgccggcgggtcctaggggaggactgagggcggcggttgccactgcaacagctgcactagcggtaccagctgacactgatgctgatgcagctggaaatgagcctagccggaaaaggaacacgagtcgagaggactacaacaagttggataaatatagctgcggcttctaaatgagaggctgtcaacaggacaggcaattaaagatccatggacgttactggggttcacggtaatctgtaacgcgctcgatgcctggtccgtctcgcgccggattacatatttatatacatgtgtgc

SEQ ID NO: 73051 - DNA, 466 bp, Zea mays
  Clone ID: MRT4577_166620C.1
gggtacctcgaggccggccgggctctacctcccactccgctcggtcaccagctttgatctgcctctctcctcgcctccgctcgtgttgctctgtactcctaccccccgcaagagcggcgcggaggcggggacaggaatgcctgatgccaaatgttcggacgtgcgcctaagacagagctcctgcaccaagtacgtacgagattcctccgggcgcccaagtcggcgtcccaggcacgacctcaagaaggcctaccgcaaggcagctatcaagaaccaccccgacaagggcggtgaccccgagaagttcaaggagctcgcacaagtctatgaggtgttgagtgatccagagaaacgcgagatttatgatccgtatggtgaatatgtccttaaggaaggaatgggtggcgctgggacccatgctgatccatttgacattttctcatcattctttggaacctcttttgga

SEQ ID NO: 73052 - DNA, 418 bp, Zea mays
  Clone ID: MRT4577_166621C.1
ggaattcggttcttgcgctttatatccgctgattgttacctcatcctcctctatccgtaatagggtaaattataacgatgaggggggtcctcaactgatgatcccataaaccctaacctggatgaatcctagggatacatcggacgattactgaaccctctggagttccagctaccagcggcagctaaaccggactcggtttgactaacttttgcacccttcttgtgataggaccaccaagatcaagctgatcctcgctgctaggaaggatcatgacttcaccattactctcaggccccagatccaggtgcgtttcacccagaggactggctattggctgcggccagcccagtttttagcttaatttacctgcctgagattgaatttccactccagtgccggaaccggaggctcattt

SEQ ID NO: 73053 - DNA, 557 bp, Zea mays
  Clone ID: MRT4577_166622C.1
gccgcgtcggtgatcatcggcttctgcttcggcgcgcagtggccgctgctgttcgccatcatctccgaggtgttcgggctcaagtactactcgtcgctcttcaacttcggctccgcggccagccccgccggcgcctacgtgctcaacgtgatcatcaccgggcgcatgtacgacgccgaggcgaccaggcagcacggcggcgtggccgccgtgggggacaagatctgcaagggggtggtgtgcttcaagcgccccttcatcatcatcacgggcgtcacgttcgccggcgcgctcgtgtcgctggtgttggtctggaggacaaggaacttctacaggggggatatctacgccaagttcaaggtgacaccggcggcggcttctgagtctgagtccctggacggcaaaaacgtcgagatggcggaggagacggagggaaagaggaagaaacaggtggtcaacgacgacttgtactagcttcgtttgattggagcagtgtttggagtgtaatcgtcagtcctcaggctatccgcactcgggcaactctaaatttctactct

SEQ ID NO: 73054 - DNA, 841 bp, Zea mays
  Clone ID: MRT4577_166623C.1
gacccccgaggttcggccggggttagagaatggcggctggcaaaatccgagctggcaaacgcacggcagggagaaagaggagcagggttggctggagtctggcgcggcgctggagggcgactcagacgcgcgacacaggggctagagcaccgctggccatgggagcaggaagcgcgcggagctgggtccgagcaccagtgagctgctcgcggcagaaagaaacagagggacggcgctagggcgagctcggccatgggctggagcagcgactaccatggccgggaaagcagcaggcgcgacagagagctccggtgagctggaggagaccgcggtcatggagaggcgatgtcgtggtgcgcagggagatgctgagctcgcgcgcagggctgagagacgcgcaggagcttgggcgcgagctgaggctgggcgctggagctgaagcaagcagagaacgctggccagagtagcggccagagaaaatggagcacgatggagctgcgcgtgaagaacgacggccagatttttctgtcccacgaacactgaacggcggctgaagataagcgcgcagggggaagaagacctggctggggcggtgggatttttttttctccacacgttgagcggcacggccaggaagatcagcgatcggcggtgggagataagctccagagcgagcaccaatacgggagaggaggagagatattgatgcgtgtctggctttgacgataggaagcagagagagggcggtgaggatagagatggtacgtaggatattttcttcttttttctagattttcttttctctcttttttatcggaaaaaaaaaaaaaaaaaagcggcc

SEQ ID NO: 73055 - DNA, 362 bp, Zea mays
  Clone ID: MRT4577_166624C.1
ttttccctgtttgggggaaggctaattaaacaactttttttcacgtagggggccgggccatatgcttccaaaaaacatgttttttggggccaaactttaaggaaccggtaaatgggttattgggatccggattataccccctaaaaggcccggagggggccccggggaataaatcccaaaaccacgggtaaacaacttttgggcttcctttggaaaacccgaacggggtcactcgctttgggtctggggggggctaaaccctggggctaaaacccgggaaaacgcccatttccaatttaccttccttaaccattgggccgggtccaaaaaaaaattcccagaaaaaataggcggtttaaatc

SEQ ID NO: 73056 - DNA, 279 bp, Zea mays
  Clone ID: MRT4577_166625C.1
cggacgcgtgggcttacttgatattccgtgacaaaacatattctgacagtcatgctacatttcctgctatactctagctaaaaaccttatattaccatttgttatgcgacaacaatggcttcttctacgacgaattcataaacacctatcttattgcctttattaaggactacctcccttacgccgctgatctttgcatctttaccaataattttggcgcctaagctgacgactatgatgctctcattcatcataacgactaagatagttctgatgaat

SEQ ID NO: 73057 - DNA, 425 bp, Zea mays
  Clone ID: MRT4577_166626C.1
acgcgcgcgtacactttccccgccttgggagcggacgaaccagcgaaccacgcgcccccgcccatctctctctatctgactcgtcccaccaccgaatccgaccacgaagatccattcacactctaggcagcggtcgacgcggccgacgagcccgggcgccagagcactgggatagccgtggcggtggggcctctacgcgcaggcgtggtcgcatcacctggccggcgggagcgcgcagacgtcgaccggcggatccccggaggagctgccccgaggacaccgtcacgcgcgggcggaatccctcggtggcgctggggcggactccaccgcaggccgcgtagggttggtgacaggctgccctgttcaggtggagaatggagtaaagttgtcacttgggaaggacagtgccatactgtgcctacaca

SEQ ID NO: 73058 - DNA, 1267 bp, Zea mays
  Clone ID: MRT4577_166627C.1
atggcctcagggcaaacgctaccgctggaaggccctcgttcacgtcccctcacgggggacgagaaccagccattaaagccaaagagccggaggcccggagcacaggtggcactgacggtctcgtcgacggaagcaaccaccgctgcgatgggaagcctcaccagcggcggccgccgcatcagcaccggcgacagcagccgcctgcgcacggcacgaccgtcgtccggatggaggacggacagctgcatcctggccaggcagcagcagttcaccttcccccgcatggctgaaggacgcctcttccgcagagctggaggatgcccttctcccccaaatgctagaggaagaagcgggtcgccggcccacgcggaggcaggccccaactcgagcgccaacccccacggggtcgcactcctcaaacagcagcaaaaagaaggcaacgtaggtgcaccccatatggggactcgaaaggtggaagggcgcgatgaatgcgaagagtgtgaaggcatggctactgcctggggggtcgatccctttttaaagggcaagcgacacctccggcaggagaagcggacaccgttttgcctccgtcatgatgaccgcgtcaaaaaagggaccgggaaagggggtatttcaaaaaaggatccttcccagcgaaggaaacgggccccgagccctcctactgatcaggggttcgaaggttgcaccctccggggttcggcaaccgccccagagcactcgggctccgtgccctttactgattaggggttcgaaggctggcccctcggaagggttcgacagccgccccagagcatgcaaagtcagggatgaccctgggtacgtcagttacatggacgaggctcgggctacgctcccgaggtaccctaggacatttccgagaccagcgggaacgatttgtaatggaatcccaccggagggaggcaccgagccctcggaccctatcgaatgggtccgagtccagcaaatcacatgcagggtaagactaagaacagtaagtcgcggcctctcccgagttcagcctcgggcacaacagggagctccgcctcgcccgaacccaggcctcggcctcgggggaaggtctctgtctcgcccgacccccggcctcggcctcagcctcggcctcgggggaaggtccccgtctcgcccgacctcagtctcgacctcaagagaagtcaccgcctcgcccgacctcggccttggaccgactacgcaacaggagatacatcattgccctacccctagctag

SEQ ID NO: 73059 - DNA, 516 bp, Zea mays
  unsure (1)..(516): unsure at all n locations
  Clone ID: MRT4577_166628C.1
aaagccaaaaaaacccctttttatttggcaaaggggcccccaaggttttttgggggaaaccccccccggtttagggggttccaaagtttccaccaaaatttttttttaaaattaccgggggcctttgggaaaaaaaaaaaaaaaaaccccggggggggaccttgatgcccaacgcatgggggggaattggaactagtttttttgagggaaaggggggacccatttttttttcggaatgggggataaaccctggggaaaaggggctgaaatgtttaaaaaacaaaggggaaaaactgattcgggggggaaaaacaggggggccccttaactttgggggtttttcctggcccaggataggaaatggggggaaccttggggcctgggggccttcaaaggggtcaaagaaaaaaaaatcgttttggggaggcccaacaaaccagggaaaatttaagggggcccaaggaaggggtttttgccccctaaccaggacccaanaaaaagttctttgtttttttt

SEQ ID NO: 73060 - DNA, 329 bp, Zea mays
  Clone ID: MRT4577_166629C.1
cggcccggttccggacttgtaataaaaattcctcaatttctctttaggtgtgcaaactttaaatccatatgatataatggcagcgtgtattacatcttgtatcccaggcctgacttgctcttatatttggtgatgtaggatacgctttgcctttgtgacagagagaagaaaccaatgaacattaggaatcactatcaagggctgtaataatgtgattcttgtaaactaattttgcctttatagttcattggattttgtaacctggaccattcgaagatgtgcagctggcattcgttgatgcttggattttatttctggatccgtttctt

SEQ ID NO: 73061 - DNA, 647 bp, Zea mays
  unsure (1)..(647): unsure at all n locations
  Clone ID: MRT4577_16662C.1
cgcggcgctaaagggtaaggagggtaggtgcaggagcgctccgcgtgctgggccgcctcgtccngggctgccggaagctacccacgcccgcgctgctggnggaggccgccgactangtggcngcgctgnagatgcaggtcngngccatgcgcgcgctcgccaangcgntggcgcagctgtcgtcgccggcggacgcggaggcggaggcggaggcggagaggtgaggcgtgaccacgtgggtgggtgggattgactgcttgattggcctagccgcctggccccatgacatgattgatcaccagctccagcttccagctcgctcccccacctgccggattccgatggggggatcgggggaagaagaaaacaataatcatttgcggtgcgttcgtgggttgctcttgtcgggagagattggtggtgggactagcagagtgatgaccatttcgttctatgcagcttgaatcgctgctgctcgtgatttgttgtaaattccgtacaccttactcctactaccccagctgcctgctacttgtgcataaagcaaatgctgctcctctcatcgcctgttnctntgcgctgtggtactttactcttgtgtcagtacaaaagatttggtggataattgtgtctggcgtgccatgatt

SEQ ID NO: 73062 - DNA, 583 bp, Zea mays
  Clone ID: MRT4577_166630C.1
gcacgagtgtacactgacttcgacctgctggccgacttcccggagccgacgctggacttcctcgcggacatccccgaggagaagctgccgctgccggagccgttccccgcggcgagccccgacgagtgcccgtccgacgcggaggcggcgtcgccggcgaggtggcagcaggtggacgacttctttcaggacatcaccgacctgttccagatcgacccgctgcccgtcgtctagcgctcccgcccgcccgccagccctcccctccctctgcgcaccggatccgcctagcccgtccggccaattttgttttcgtgctgttgttgtttttttgggtcctagtcgttaattcttttagcgtaaggtgaagagagagagagataagaggtgtccgtccggctctggcagtgcgtccttgtggccccgccgccgccgctgctgccatgtgtgccgagcatctacccccccggcaaggaggaagaagagtccttgaccggggcgagcgaggctgtctgtctgccccttgctccccccccgagttatcagtaatcgtcgggggttataatccagtcatgagtaattagcg

SEQ ID NO: 73063 - DNA, 290 bp, Zea mays
  Clone ID: MRT4577_166631C.1
cgctcctgtgcaccctgctgccggcgtcgcctgcccgtggcataaactgtcaccgtaactgtggggggtgtcaaagcgcacgagctcccgtagaagagcaagactgacctgcgagcgcaggtcaaggagctgaagtatgagctatccctcctccgcgtagacaacgtcaccggcggcgcacccaacaagctatacaagaacaacgtggtgcgcacctctatcgagcgcgagctcacagcgatctctcataagcagaaatcggcgttgcgggaggcgtacaataagaagaa

SEQ ID NO: 73064 - DNA, 135 bp, Zea mays
  Clone ID: MRT4577_166632C.1
ttcgactccgattctgggatgccaggacccagcagacggttagttggcgtttttctcagagactttgaaaatgtgtgaagggcttcggcctctgagacttcaagtaactgtgcggcttgctgtggggccaggact

SEQ ID NO: 73065 - DNA, 1221 bp, Zea mays
  Clone ID: MRT4577_166633C.1
gggtacctcgaggccggccgggccgggattttccgagaagctctatatataaaaccgattgaggaggagctagcagctcgagtgcaggtccgcagcaggtgtccagaaccccagaacccagcgagcacacaagaattcaagcagcagcgcgatgagctacccacgcagcagcaagagcgacccaacgacgaagaaacaggcagcggcggcggcggtggcgtcagaagaacagcaggcaaagatgataaatgaagtgcgggaactcctgcggccggcggagatgccgggcttcttgacggactccaccgtccgccgcttcctccacgctaggagctggagcgcagcgcaagccaccaaggctctcaaggaaaccgtcaagtggaggcgccagtacaggccggacgaaatccgttgggatgacattcctggaagggagcatgaggtgaagagagcgtacatagctgactacctcgacaaggatggccggactgtggtggtaacagtgccggcgataaagagccaaatttcagcgaaggagcaggtgaaactactagtttacaccttggagagctgtaccgcgggctcagaaaacgggcaagaaagtgttgtttggatagctgacttccgtggatggacactgtcaagtactccgttggcacagtcacgtcaatcgatgaacatcattcagaaacattacccagggctgatagcagccgcgatccttttcgaccctccaaagatctttgaatccttttggaagatgctaagttacttcatcgagccggagctggaaaagaaggtgaaattcgtgtacactgacaatcctgagagccagaggataatggccgacatgtttgacatggagaagctggactccgcatttggtggccgcagcgcgtctggcatcgacgttgccaagtattccgagagaatgcgaacaggagatcagattaggggtcttcgctaacggcaaatggaatactgctatctcacagttcgtcaagaaactgttcagataacaagataattaaaatggatcactacggaattctagtggttacatcacaacagaccaggatgaattatgatgtctgctagatatattattagctctgaatgattgggataccaggtttttgatgatccgtgtaatgagatgacatgacaatatatacatgggccgtccacactgtgagcagtctctagtctatatctatatct

SEQ ID NO: 73066 - DNA, 173 bp, Zea mays
  Clone ID: MRT4577_166634C.1
ggcaatcaataaataaataaatgaataaccgtttaaccttctggggatccgggaatgcattaatgcttcaaaccgcgaaagcactccttgaggccttgacagtttaacagcaacaaacccacaaaccctggatggggggatggtaacatccggtctcccggacccacggggga

SEQ ID NO: 73067 - DNA, 428 bp, Zea mays
  unsure (1)..(428): unsure at all n locations
  Clone ID: MRT4577_166635C.1
acttttntttttttctttttgttttcttttttttttttgggttttttttatatgttttttcccttatttttcctcccattggggccaaaagggtgcaccccacattaaaatgccccaaacggaagcccaaaattcattataaaaaaaatggccccaccacaaaagaatcctaaaatcaccaagggccggcgtcatcaggtttataaaagggagaccggcatgcttaactgaccaaaaaaaagggggaaaagaaaaaaaaaccctcaaaaaatgggcggttctatcggaaatggatgagaaccatgccaaaatctcaaaatttttgtaaaaaactccatttctaaaaaaccaaaacagctgggcttttcaaaggggggaacaaatctgcaaaaaaatcccccaaaaaaaggggaaaccccgggaaaatc

SEQ ID NO: 73068 - DNA, 393 bp, Zea mays
  Clone ID: MRT4577_166636C.1
tttttggggaaaaatggaacaggatgtgttttgaggaaagctggttctttatatgcaagctaaccatttaccaaaccgctgacacagattttacaataaggtagagtagacaagacttaacggtgtgtggacaggcaaattgtcggaccccacccgcaagacctagttttgtcaaaaaaaagcaagacatcatctaacctccccctaaaagaaagtgacagccatactgaaacggggaacaccaccggggatcatataatgcaaacacattctaggagaaactgacatggacattgagggaacttttgagccaacaactgtcccagagtgcgggcacacgagagctggtggcttgctcactggagaggcccagacatgagggacccaacctgg

SEQ ID NO: 73069 - DNA, 337 bp, Zea mays
  Clone ID: MRT4577_166637C.1
acgcgtacgcttgaccacagacacgagcgaattgagtctatgcgcaactgtgccgtgcagccatggcgactagggtacggctcaccaccctactcctacacttactacttgttggcacccacttcaccagccgagtagctaaaactgattcctaggaaaatgctgatgcagctgaagttggtgaatgcgctgatctaggtattgaggctgatgatacacagagttccagcgacggacctttaagccctgctactggcgtacagacagtagtatgattccccaaacatgctggcaaaatagcactagcacgtgaagaaactgaattactagttggtct

SEQ ID NO: 73070 - DNA, 2913 bp, Zea mays
  Clone ID: MRT4577_166638C.1
aaattcggcacgaggcacctacacagctacctcgaagtcgaagctcgcgcgtcccctcgagaactcgttcgctcgctacgtttccctccgtttgccgagtgccgcgcgggagcacgcgcccatggcgacgccgccggcggcggcgacggcgtccgcgcttcccaagtctggggcggtatccaagggctacaactttgcatccacttgggaacagagcgcgccgctcacggagcagcagaaggccgcgatcgccgcgctctcccacgccgtggcggagcggccattcccgcccaacctggaaaaaagttcagggaaggatgaaggcgtggctgttcccgagaaagaatctgctttggaggaggccggtgcaatagatgcagtcttggtgaatacacatcagttctacaagtggttttcagaactggagtcagctatgaaatctgagactgaggaaaaatatcgactttatgagaatacattacaggagcgtgttaacacatgtgacgtaatccttaagcaggttgatgatacattgagcttatttgaagaactgcagtctttgcactcaagcgttgccacgaagacaaaaactttgcatgatgcttgcgaccaacttttggttgagaaacaaaggctgatcgagtttgcagaggcacttcgaagcaggctcaattactttgatgaattagaaaatgtatcaagcagcttttactctcaaaatatgaacattggaaatgaacagtttcttccactgttgaagcgccttgatgattgtatctcgtatgttgaaaacaacccgcaatatgctgaatctgctgtttatttggtcaagtttcgccaacttcaatctcgtgcactgggtatgattcgctcacatgtgttgtcaatacttaaaggtgcttcatcccaggttcaagctgcaattcgaagcagcgattctggcaaaaacattgtcacagagggtgtggaggcatctcttatctatgttcgcttcaaggcggctgctagcgagctaaaaccaatattaggtgaaattgaaagtagatcttctaggaaggagtacgcacagattctttctgagtgtcacagtttgttctgtgagcagcggctgtacttggtacgaggcatggtgcagcaacgaatcttggagtttgcaagaaaagaggccttgccttctttgacaaggtctggctgtgcctatctgatggaggcatgccagtttgagcaccagctttttgcccacttcttcccagcatctgctgctgatgtttctagtatggctcctttaatggaccctctgtgcacctacttgtatgatactctgaggcctagactgatatatgaaggaaacattgattctctttgcgaacttgttgatattctgaaagttgaagtgctgggggaacaactaagcagacgcggtgaatcagtagccggtctccgtccaatattgcaaaggatacttgcagatgttcatgagcggctagcattttgtgctcggactcatatccgtgaagagattgcaaatttccgtccttctgtcgaagatctagattatcctgggaaacttgaacgacctgtggatatgtcttcaagtgctactgttggtgacaactcagacatatatataacatggtacagaccattggagaaaacagtttcatgcctttcaaagctatatcgctgcttagagccttctgtcttcactggattagcccaggaagctgtagaagtttgctcaacatctcttcagaatgcaagcagggttatctcaaagaaagcaaccccaatggatggtcagctttttctgattaagcacctcctcattctacgagaacagattgctccatttgatattgagttctctgtcacacataaggagttggatttctcccatttattggatcacctaagaaggattctcaggggtcaggtctcattatttgattggtccaggtcaacatcactagctaggaccttttctcctcgtgttttggagaaccaaattgatgccagaaaagagttggagaaaagccttaaagctacctgtgaagagtttataatgtccataactaaattagtagttgacccaatgctttcttttgttactaaggtaactgccgtcaaagttgcattgtcctctggtagccagggtcagaaattagattcagttctagcaaaacctttgaagactcaagcttttgcttctcctgataaagttgctgagctagttcagaaggttgccgctgccattcaacaagatttgcccaaagtaatgaccaagatgaggttgtatttgcaaaatccatctactcggatgatcttattcaaacctatcaagacaaatatagttgaggctcatatacagctgcattcccttctgaagtcggagtactctagtgaagaaatgcaatccatcggtatgttgccgatacctgacctgcagtctcagcttgacagccttttgtagtttgcatacaccatacagcggcgctgctgtagtccatgttgacgttgcagtgcagttctttcaagtaacgcaagtaaagttgttaccacaatttcgaacctctctaccatatcgttgttgtaacttttcattgtttatattgaaaaatggaaatggaacgcctcccatgattcatgtgattgtggacaatctggaagtttgaactcatatcctgtggtgacttatgtatattgtacacgcacgttggatcctcctctgaaattgactggaatagtttcaaccgatcatgggttgttcatccaaaagaacggaagaaactgcccctgaacagaaataaccaggggggccgtgtgcgggggggccgttataaaggtcccagaaccatacacgggtgctttcaacattcttcctttttaatatgtgactgttgagctattcaacag

SEQ ID NO: 73071 - DNA, 796 bp, Zea mays
  Clone ID: MRT4577_166639C.1
aacatggtacagaccttggagaaaacagtttcatgcctttcaaagctatatcgctgcttagagccttctgtcttcactggattagcccaggaagctgtagaagtttgctcaacatctcttcaggtcggtacacaattttcgactcaactccctcctcttttctttgttttacatgggatcaactatcaagataaaataaaacacttcctgcttttatgctatgatgtattatcttactgtttttttactctgagaaacacactattgatgttgtgaacagaatgcaagcagggttatctcaaagaaagcaaccccaatggatggtcagctttttctgattaagcacctcctcattctacgagaacaggtgtccatctatctgcacttcaggaaaaattcatcttgctcattaatttcattttgtgatttgtaaggtaccatacctgtttgcagattgctccatttgatattgagttctctgtcacacataaggagttggatttctcccatttattggatcacctaagaaggattctcaggggtcaggtctcattatttgattggtccaggtcaacatcactagctaggaccttttctcctcgtgttttggagaaccaaattgatgccagaaaagagttggagaaaagccttaaagctacctgtgaagagtttataatgtccataactaaattagtagttgacccaatgctttcttttgttactaaggtaactgccgtcaaaggtgcattgtcctctggtagccaggatcagaaattagattcagttctagcaaaac

SEQ ID NO: 73072 - DNA, 511 bp, Zea mays
  unsure (1)..(511): unsure at all n locations
  Clone ID: MRT4577_16663C.1
ccaagagagacccgggcggcgcgcgggcgcgccggcgagcgcaccaaaggcgcggcagagggccacacggcncaccggcgccgagggccagaaaccgacagcgccacccaccagngacgacaacggccnccgaacagcgaggggcgcaagccnanaggccacaacaagcgagggcggcgagcggccgacagcaaccaagggcccaanagcaacaccaccccgcggcacagcgaacaagacaaaccaacgcaacgcaacagcagcaacagnaccgaccagcacggagccacccagccagggggaacccgggcgccgacnngcaacagcagcggcncgccnccaacccancggcgcgagcaaacgnagncgcagaccagcaacaacaacaaaggcaacagnnccggccagcgcggaggcaacgagccagggngaacccngccggcgaccgacagcagcaacaacggcggcaaacgagcccgcccgccggggccaaggcaccgacagacccgca

SEQ ID NO: 73073 - DNA, 434 bp, Zea mays
  Clone ID: MRT4577_166640C.1
tctccccgttctagttttgtacagtcccgagacagtaataacagtacacattggtgcgtttggtgcttcttcaggaatctccctggaccgacccatcgtcgtgacctgcggatccggcgtgactgcctgcatactcgccctggtccggaaccttcccagttcatcttggacttttactaccaccaggcggcaggcgcctagcagagccgatccctggtaacatctgtcgtttaattaacaggggctgtacaggatcggaaagcatgatgtgccagtctacgacgggtcctggacggagtgggaggcgcagtcggactccgattaccccaaagtcaccgcttgagcgtctgggactgggagttggcagcatgatggcattgtgtttgcgacaggctgaaccgattttatggagcactggaagcattgtattctcc

SEQ ID NO: 73074 - DNA, 288 bp, Zea mays
  Clone ID: MRT4577_166641C.1
aattcggcacgaggcccacccgaatcttttctgcttgttgaatctgaaatttgtgctgggttgagcagcgtccgtccttgcgcttagcgaattcgcggtgtttacgctccgatgcctcacgtaaggctatctctcaggcttcccaaaagctcgggtaggttgaatcgtggagagttccacagcgtcctagccgccgttgtggcctgacctcgccataaccttccattccatggaggtctccaccatcagcttatcgtccccgccgccgggtgccacgccggccgacct

SEQ ID NO: 73075 - DNA, 439 bp, Zea mays
  Clone ID: MRT4577_166642C.1
ggccgcaaatcgaggggtactcaggcaaatgcacaaattttacaaaaacaaacgggcccggaattcacggttacaagcagttcaccctgacggcgacaactgtttttttaaggaaggaaacgatgcaagcggcgccggcccaggggcggcctgagacagtcaaagatgcatgcacttgcacgagagaaactaaacgggggcgaccggaaaaagagagctggatgccctatctgccctaaacacccctagggcggtcggtttaggattttaatagtcgcgggaggggacctgccccccggtgggggagatgaacagcacttttaaaataaccccggggaggccctccccgatgaggggcccaacccaatacacccactggtagccccactcccagctgacgaggggggggcccaaggacacgggggggtttatggacccc

SEQ ID NO: 73076 - DNA, 969 bp, Zea mays
  Clone ID: MRT4577_166643C.1
tcttgcctggagccccaatgggcaatacctcgccagcggaggctatgacaacactgtctttatctggaaggtcgagaaggaggttactagccttcgcaccctggagcatcccactatcctgagtgcgatcgcctggcatcccgatggtgagttgctggccacctcctgccacgacggcaatattcgactttggcactggcaaaccgggcagtgtgtcactcgcatcagcggtcatcaaggagaaattctgacccttaaattttcccccgatggcaagcgactctacagcagcagtcaagacgaaacctggaaaacctgggactggcaaacgggtacctgcctcgccagcgatcgccttgatcgcccctatgaaggaatgaatatttccgaagtccgagggttgaccgaagttcggaaagcagcattgagagcactgggagctacggaagggagtcaacctccaggtgaccttgtgaggtggctccgaaaaactgaacaggggagaaagctctaacctgtggtcacaacagaaaagttagactaagcgacgccttcacaggagccgcttgtcttcaaaaccagacatgaaacgttagcttcatccggctcctcaataatttgacccttatcataggaacatctggatgcttgaaaaatccgcttttggagctttaaaaggggtgacaacagaaaggggtacatgcacgatggcaggattgccacccttgaaggggtggttgctcactatgccagtggcgtgacccctagtatctcgactaagctatgaccatgaccagaaaccagaaggtagtgaaagcgagtagacccaggttcggagacgatgttgtcggggagctaacgtaaccggtgctatcggatggctaccatctcggaaaggtagtgcaaagggaggtaacgcttccaacccttctacctcagctctccaactactaggtagctgactaagac

SEQ ID NO: 73077 - DNA, 199 bp, Zea mays
  Clone ID: MRT4577_166644C.1
cccacgcgtccgatggcatttatcgctacttgtagtctttcaacatggccattaaccacatagactgtagcgacttataagatagcactactccgatgggaccaaactttactcgtcatcctcatcgtcgtcatctgcgccgcccgaagagttgacttggttgagcctttcaatgagactggccttactttgctcgtat

SEQ ID NO: 73078 - DNA, 537 bp, Zea mays
  unsure (1)..(537): unsure at all n locations
  Clone ID: MRT4577_166645C.1
ggggtggggtggggttaaaaaaatttttttttgtggttttttttttttttttttttttttttttttttttttttttttttttttgggaaggagcaaagcacggagtaacaggactgacattacatttattaccccccggcaaaaaatggggggttgaaggggggagttcagtnctacacaaaccaactaggcactcactactatatactaggagggacgggccaaatatcacccaccccataacaaagggcaaaataaacgggggggacacccgccgaacaagaacaacaatacacaaacacaagtttttatataggggggaccagctaaaaaaaaacaagcgggcgttttagataaccacaagggccagcaaacaagggctttttactggccaaccaactcgccccaactaagggggggtgcccctgggctcgcccctgtaaaaccacacccaaaccgggggggaattgggcttccgcccgcccaaaaagttggcccccatgcccttgggggccaggttgctccccggggggaaaa

SEQ ID NO: 73079 - DNA, 299 bp, Zea mays
  unsure (1)..(299): unsure at all n locations
  Clone ID: MRT4577_166646C.1
gcagggggagntcccccgaaagacggcacaaaagaggcgacgacccgccgatcccccggcgccggcaaagaggagaggccaccaaccggacaagcaccaccgccggagcctaccaagcgaaaggagagaaggagctgtctgcgacgccgacggatacagcgagacggccacccctaaggcccgctggagcatgctacatgaggacaacgggcgacaacgagaagcccgagcccgaggaccccacccgcgaaaaccaggccgacaaccgcacgagacagggggcacacgctcagcgagga

SEQ ID NO: 73080 - DNA, 294 bp, Zea mays
  Clone ID: MRT4577_166648C.1
catagaatgaattctcaatctgttcaaccatcagaaatggagtggtaacatggatgaacagattgagaacccattctatggttgaattactagagattttgatttagaaaaaatagaacgattagaggatgcaaagcaaaccacataaagggagaacacaactgatcgcctcatgtcccgagtttgtcagatgtgtaggaacaacacattcgagtttctaatgtattgattgtaattggtagctgctctgattatctatcttcgttctctctcggctcttgatgtgcaagcaag

SEQ ID NO: 73081 - DNA, 745 bp, Zea mays
  Clone ID: MRT4577_166649C.1
ggtacccccgggttcggccgggcaagatttacagctaggtcctggtgcttaatttggttattagattaaaaaatcttacatggagtcgattgggacagggacaaaaaaggggagaacgttgaaattccattacttgggagagaccgcacaaactactggtaatattgctccaactatgttctaaagattccatgacgcggtaagatgttaagaaatccaaacatgttaattgactatataattattgttcacacttaatctcgatttcgacttaaccctttattagaaaactacatggtcgatggggtcaagcaaacgaaaagtttatgataaaaatgtcctttagttctttttccccaaatctactactacactcttttttgaacaacaatctactgctacacttttttgttatctataaaacattgaccacatcttcagatagtcctctattcgataagttccgtctagagagtttattttagtgcaaaaaacaacatagtgcctactgcctcctaccttgtcgggaaatgttacacacagacctatagacagttacatacggaccacatttttagatattgcgctgcttgataagcttcgtctcgagagtttattttagtacaaataacaacttaggtccccatacgtgatcaggaaatgttacacatcactatgttactatatttatttctttctctatgatattttttcacacccattgattgcacagcaccaccattta

SEQ ID NO: 73082 - DNA, 253 bp, Zea mays
  unsure (1)..(253): unsure at all n locations
  Clone ID: MRT4577_16664C.1
tcgagccggccgggaccgatgnaccgacgcgagcgatccctgcccctggtccccccgcagacggagccgtttcgcccccgcgcgaacagagcggatccactgagcgggcgtgacaccgaagcaagacaaaggcacgacggcggcgacgatgaagaccgctgaccaccgcttgcagggcatcgcctcgtgcatccgcgaactcccccacttcaccacggcgacgatcatgcgccagcacatcaggacgaggatg

SEQ ID NO: 73083 - DNA, 282 bp, Zea mays
  Clone ID: MRT4577_166650C.1
tgataggtctgctgctctctcccctactctgtattgccctctctgctactttggaagagcacactggcatccttgatgtctgttttgccggctaatgtgccagttgtattcacgttggatcccacctccccgacgctattccacactacgagttatacaagtcagtctccatgttgtgcatagagactaaatttccttcttgtgaggagaagatgaaacactctctcgcctatctaaacaacaccttgaaagaagaacccaagaagacgagtgctgttcatt

SEQ ID NO: 73084 - DNA, 2365 bp, Zea mays
  Clone ID: MRT4577_166651C.1
gccatgataaatcccttggccgcctcgaggccggccgggacaagctcctcctcctctcctccctacacactccagaggcagcacgtgctgccgtgctggagcaccactaggccgcagctgcaccaccatggcgggcgcgccgctgcggaggtcggaccttgacttcgccgacgtctttggtggcccgccgcgccgggtgtctgggaacgagcaccgctcgcagcgcggctcgcaggacacctcgtcgttcgagtccgcgacgagggcggggagcggcggacaggacacgcccgttttcggggaccgggggagctccgaccgaagaaggcagctcggggaggagttctacaaggacatatttcccgggagcgaggcagcgtcgcccaggcggagcggcgccggggattgggggaatgtgttcggcgcgcaggcttcgcctgtctccacggcccgcccgcgatcgagcttctccattcggttcaacagaggcatggacagttcaatgcctacttctccctctcagcaaatgtccaacagaaacgatgatggcacatcttatgcttatagtgttccaacttcacccaatgcatccatgaacaattatcttgctcaaggggcagcccgacaagattcgaagaagaatcccttctcatggcatcgctatccatttctatctaggttccgttctcaaagtggagaaaagaagagcacatctaatcatgtcagctcaatggacaatgaatttgaagggactcctgttaacttggaaagtatcatggccaataacaagttccatttttccttctacaagtgggcaggcaaaggagccttgttagtgttgccagctactgcacaagaaaagtccgtagacatcattggactgagaagcttccctcaagtggtcattcaaggtattgatctaattgattgtgaagacagcatgtcaactgccaccggaacagccaaaaatcagacagattacgaagattcgaaatctggaaaacatagcgcattttcagtaaccaaggatggagctattcctttactctttgaagactacatgcaaggaacgaaacagagcaatgatcatacaaagaatgatgtttcatcaactaccctgagttctaaaatttctcgatcaccttcaggggagagaagtcgtagtagcagggtgaaggaaaagatgaagggtttcataaaactatttagccctgagtgttcaccaaagcgcaaacgagcaccggaaacacaaaggcaaacatctgtggggaaaaatggaaccaaaactgaactgcatgataagttcagcatgtccagtttggaggccagtgaggatgtggaaacggtacaaatgaacagccagaatgcttttactgccgaaccttttccattgtttcagatgactgaagtgcaagagaggttggacaaaccagttttgacagcgaatagtaaaatggatacagctacgggaagtaatgaggccgcttctaatgagcccatccatgatgatacaaaagacaaagcggccaacacaatagagcatgaggacattgaagatcttgatggatgtgtggttgagcatttttctgaagaccatgttcttcataatgatcaggaaaaggagctaataaagatatcagaagctaaaattcgcgaatggtctaggggaaaagaaggaaatattaggtcattgctttcaacactgcaatatgtcttatggcctgagagtggatggaaaccagttccacttgttgatataattgaaggagcagcagttaagaaggcttaccagaaagcattattgtgccttcatccagataagttgcagcaacgaggtgctgccatgcatcagaagtgtatagcagagaaggtttttgacattttacaggaagcatggaaggaattcaattcggtcacttttggatagtactaggagtttatttcactactgtattggtccaatgatctatcgcacaggcatattgcttcccggtgtctgcaacagttagttggttgaaacaacctagaacagtacagcaaatgggcaaccgagagttcggtttgtgaatttcggtgcacagtcaatgccgacctccgccatttcttcaaaattccgactgtaacaagtgtaatatgtaatattggttaatcaggtttaatggatccagacgatgactgaaatgtcatttaaggaatgctttgtgcacagccatttgatgtgtgcctagtagctgttggtgcataaattttgtctaagcttcggatgaaaaaggttatcaatcttttatctgactgttgaaaaaaaaaaaattataatacaaataaataaaatatttatataataaagggcggccgccgactagtg

SEQ ID NO: 73085 - DNA, 391 bp, Zea mays
  Clone ID: MRT4577_166652C.1
gcaatttcttggcacaagtttatgacgtgatctagtgagcattatgctactcagagtacaaaataacaagtagatttactttttaacatgtataatggtgctttaaccaggaggaatcaggccgtcccttgccaaagtttggtgaatgggatgtcaacgatccggcttccgcagacggatttactgtcatattcaacaaagccagagatgagaagaagggtgggaatggtcaagacacagactcaccttccaaggaccccaggactgagagggtggagtcttatgctgcaaaaccaagcacggtgcgtttattcatgacttgtatcaattctcttctttgaactccacctgatgacgagttgacacgaaccccaatttcatttcttaaacc

SEQ ID NO: 73086 - DNA, 400 bp, Zea mays
  Clone ID: MRT4577_166653C.1
aagatattgagacacgaacaccaatgcttatatcttctcacttatgacttcatggcaactcctattgattatccaccagttcagcactgcttcctacaaagatgctttaccagagatactggaggtcctgagagcagcttgcttgacccacaagctgccattagctcagacatgggtcacatgtgctcaacaagggaaacgaggcagccgacattccgacgagaactaccggtactgcatctccaccattgatgaagcatgctttgtgaatgaagccgagatgcggggctttcatgaggcctgctccgagcaccaccttctgcgcggagagggggttgcagggaaggcctttacaacataccagccatgcttcttgccagacattggatcctcaactaaa

SEQ ID NO: 73087 - DNA, 690 bp, Zea mays
  Clone ID: MRT4577_166654C.1
ctcaaccgcgtgttccaccacatcacggacacgcacgtcgcgcaccacctcttctccaccatgccgcactaccacgccgtggaggccaccagggcgatcaggcccgtcctcggcgagtactaccagttcgacccgacccctgtcgccaaggccacctggcgcgaggccagggagtgcatctacgtcgagcctgagaaccgcaaccgcaagggcgtcttctggtacaacagcaagttctagccgccgcttgcagagctgagggcgtgctttttccctaggaatgggaggagaaatcaggaggagaagatggtaatgtctccatctacctgtctaatggttagtcaccagtctttagacaggaagagagcatttgggcttcagagaaggaggcttactgcactactgcagtgccatcgctagatctgcccctgccatcgagtacaagtaggcaaatttagtgtgtctgtgcccatggctgtgagctttgggtactctcaagtagtcaagttctcccctttttttttttgtttgagttttagtcccccctgttgtaggcttgccggcggcggtcgttgcgtgcccgcccttgtcgtgtgcgtcttgccatctcttcgtgcttccttcgttgttgttgttgtaaaacagtagtctggtgtctttggcggaataccagatcgtgaaacaccccac

SEQ ID NO: 73088 - DNA, 340 bp, Zea mays
  Clone ID: MRT4577_166655C.1
ccccctaataataaacccaagcctaaaaggcgatggggggggggataaaaagaaagaccaccgggccccccccgaagcggggcagatacaatcacagacaagagacgaaacaaggggcaacgaacaggggcagacacacagaacacagggaagacggacacaggagaagggaaaaaaccgagaggaaaaaaagggagggggaaaccacaggggaaagaccgccaacgcagcaaaagggaaaaaaagcgcaaggcgaacaggaagagaacaaagaacgccgcgacggcacagccagcaccaagccgaaaggcgggaaacggcacaaagaggcgcgcccagc

SEQ ID NO: 73089 - DNA, 1797 bp, Zea mays
  Clone ID: MRT4577_166656C.1
aaccgaggcggccaggctccctcctccctcctcctccctgcaaatcgccaaatcctgcaggcaccaccgctcgttttcctgtgcggggaacaggagagaaggggagagaccgagagagggggaggcgcggcgtccgccggatctgctccgacccccgacgcagcctgtcacgccgtcctcactctcagccagcgaaaatgggtgccggaggcaggatgaccgagaaggagcgggaggagcaggagcaagtcgcccgtgctaccggcggtggcgcggcagtgcagcggtcgccggtggagaagccgccgttcacgttggggcagatcaagaaggcgatcccgccgcactgcttcgagcgctccgtgctgaggtccttctcctacgtggcccacgacctggcgaccgccgcggcgctcctctacctcgcggtggccgtgataccggcgctacccagcccgctccgctacgcggcctggccgctgtactgggtggcccaggggtgcgtgtgcacgggcgtgtgggtgatcgcgcacgagtgcggccaccacgccttctccgaccacgcgctcctggacgacgccgtcggcctggcgctgcactcggcgctgctggtgccctacttctcgtggaagtacagccaccggcgccaccactccaacacggggtccctggagcgcgacgaggtgttcgtgccgaggaccaaggaggcgctgccgtggtacgccccgtacgtgcacggcagccccgcgggccggctggcgcacgtcgccgtgcagctcaccctgggctggccgctgtacctggccaccaacgcgtcgggccgcccgtacccgcgcttcgcctgccacttcgacccctacggcccgatctacggcgaccgggagcgcgcccagatcttcgtctcggacgccggcgtcgcggccgtggcgttcgggctgtacaagctggcggcggcgttcgggctctggtgggtggtgcgcgtgtacgccgtgccgctgctgatcgtcaacgcgtggctggtgctcatcacgtacctgcagcacacccacccggcgctgccccactacgactcgggcgagtgggactggctgcgcggcgcgctcgccaccgtcgaccgcgactacggcgtcctcaaccgcgtgttccaccacatcacggacacgcacgtcgcgcaccacctcttctccaccatgccgcactaccacgccgtggaggccaccagggcgatcaggcccgtcctcggcgactactaccagttcgacccgacccctgtcgccaaggccacctggcgcgaggccagggagtgcatctacgtcgagcctgagatccgcaacagcaagggcgtcttctggtacaacagcaagttctagccgccgcttgctttttccctaggaatgggaggagaaatcaggatgagaagatggtaatgtctccatctacctgtctaatggttagtcaccagtctttagacaggaagagagcatttgggcttcagaaaaggaggcttactgcactactgcagtgccatcgctagatctaggcaaattcagtgtgtctgtgcccatggctgtgagctttgggtactctcaagtagtcaagttctcttgtttttgtttttagtcgtcgctgttgtaggcttgccggcggcggccgttgcgtggccgcgccttgtcgtgtgcgtcttgcttttgtgtgcgttcgtgctcccttgtttttgtgtgcgttcgtgctcccttcgtgttgttgtaaaacactagtctggtgtctttggcggaataactaacagatcgtcgaacg

SEQ ID NO: 73090 - DNA, 1829 bp, Zea mays
  Clone ID: MRT4577_166657C.1
cattgggtacctcgaggccggccgggggaaccgaggcggtcaggctccctcctccttcctcctccctgcaaatcctgcaggcaccaccgctcgttttcctgtccgggggacaggagagaaggggagagaccgagagagggtgaggcgcggcgtccgcccgatctgctccgccccccgaagcagcctgtcacgtcgtcctcactctcagcaaccagcgaaaatgggtgccggaggcaggatgaccgagaaggagcgggagaagcatgagcaggagcaggtcgcccgtgctaccggcggtggcgcggcagtgcagcggtcgccggtggagaagccgccgttcacgttggggcagatcaagaaggcgatcccgccgcactgcttcgagcgctccgtgctgaggtccttctcgtacgtggcccacgacctgtcgctcgccgcggcgctcctctacctcgcggtggccgtgataccggcgctaccctgcccgcctccgctacgcggcctggccgctgtactgggtggcccaggggtgcgtgtgcacgggcgtgtgggtgatcgcgcacgagtgcggccaccacgccttctccgaccacgcgctcctggacgacgccgtcggcctggcgctgcactcggcgctgctggtgccctacttctcgtggaagtacagccaccggcgccaccactccaacacggggtccctggagcgcgacgaggtgttcgtgccgaggaccaaggaggcgctgccgtggtacgccccgtacgtgcacggcagccccgcgggccggctggcgcacgtcgccgtgcagctcaccctgggctggccgctgtacctggccaccaacgcgtcggggcgcccgtacccgcgcttcgcctgccacttcgacccctacggcccgatctacggcgaccgggagcgcgcccagatcttcgtctcggacgccggcgtcgcggccgtggcgttcgggctgtacaagctggcggcggcgttcgggctctggtgggtggtgcgcgtgtacgccgtgccgctgctgatcgtcaacgcgtggctggtgctcatcacgtacctgcagcacacccacccggcgctgccccactacgactcgggcgagtgggactggctgcgcggcgcgctcgccaccgtcgaccgagactacggcgtcctcaaccgcgtgttccaccacatcacggacacgcacgtcgcgcaccacctcttctccaccatgccgcactaccacgccgtggaggccaccagggcgatcaggcccgtcctcggcgagtactaccagttcgacccgacccctgtcgccaaggccacctggcgcgaggccagggagtgcatctacgtcgagcctgagaaccgcaaccgcaagggcgtcttctggtacaacagcaagttctagccgccgcttgctttttccctaggaatgggaggagaaatcaggatgagaagatggtaatgtctgcatctacctgtctaatggttagtcaccagtctttagacaggaagagagcatttgggcttcagaaaaggaggcttactgcactactgcagtgccatcgctagatttaaggcaaattcagtgtgtctgtgcccatggctgtgagctttgggtactctcaagtagtcaagttctcttgtttttgtttttagtcgtcgctgttgtaggcttgccggcggcggtcgttgcgtggccgcgccttgtcgtgtgcgtcttgccatctcttcgtgctcccttcgtgttgttgtaaaacactagtctggtgtctttggcggaataacagatcgtcgaacgacaaaaaaaaaaaaaaaaaaactcgagacctcgtgc

SEQ ID NO: 73091 - DNA, 770 bp, Zea mays
  Clone ID: MRT4577_166658C.1
cgggggaaccgaggcggccaggctccctcctccctcctccctcctcctccctgcaaatcgccaaatcctgcaggcaccaccgctcgttttcctgtgcggggaacaggagagaaggggagagaccgagagagggggaggcgcggcgtccgccggatctgctccgacccccgacgcagcctgtcacgccgtcctcactctcagcaaccagcgaaaatgggtgccggaggcaggatgaccgagaaggagcgggagaagcatgagcaggagcaggtcgcccgtgctaccggcggtggcgcggcagtgcagcggtcgccggtggagaagccgccgttcacgttggggcagatcaagaaggcgatcccgccgcactgcttcgagcgctccgtgctgaggtccttctcgtacgtggcccacgacctggcgctcgccgcggcgctcctctacctcgcggtggccgtgataccggcgctaccctgcccgctccgctacgcggcctggccgctgtactgggtggcccaggggtgcgtgtgcacgggcgtgtgggtgatcgcgcacgagtgcggccaccacgccttctccgaccacgcgctcctggacgacgccgtcggcctggcgctgcactcggcgctgctggtgccctacttctcgtggaagtacagccaccggcgccaccactccaacacggggtccctggagcgcgacgaggtgttcgtgccgaggaccaaggaggcgctgccgtggtacgccccgtacgtgcacggcagccccgc

SEQ ID NO: 73092 - DNA, 160 bp, Zea mays
  Clone ID: MRT4577_166659C.1
tgtctccagttgactctcaacagaatgcttcaagtgtttgtgaagaaaaacctatacctgctgaacgccaccgagggtcaagtcacagacaagaagctgtgcagtcaccagtgttttctcctgcccagaaacaaatccaccaaaaatcgctacctctgcc

SEQ ID NO: 73093 - DNA, 2391 bp, Zea mays
  Clone ID: MRT4577_16665C.1
cattgggtacctcgaggccggccggggcctctgcttcctcctccccccccccctcgtctgccctcgagatcccacaccgcgcgcgtgccacgttgtcttcgtcctccgcgcgccttcggtcaccccgccgcctgtactgtactgtacctgcggtagtacggcgcaggaacaagaaggatttgccagcatgagcggggagctgcaggtgcatgcatctatcgttgggttcttggcttggttggggggtgaactgagtctggatgcgccgaacgggatgttgggggaggcgagagtgagagcacggtcgctcgcttgaggtgcggcgccgtctgccgtgcggtgtcgtggcggtctagtagaggaagctaggaagaggatgatgggagctctgcagctgcagagcaatggcgacggcgctgctgaggggctcttaccggacccgggctacgtcgaggttgatcctaccgggaggtatggcaggtacaacgagattctcggcaaggggtcctcaaagactgtgtaccgggccttcgacgagcaccggggcatggaggtggcgtggaaccaggtgcagctgcacgacttcctgcgcggcccggcggagctggagcgcctctacggcgagatccacctgctcaagtccctccgccaccgcgccgtcatgcggctccacgcgtcctgggccgacgccgccgcgccccgcctcgccgtcaacttcgtcaccgagctcttcacctccggcacgctgcgccagtaccgcctccggcacccgcgggccggcgccgccgcggtccggcactggtgccggcagatcctcgacggcctcgcctacctccacgcgcgcggcgtcatccaccgcgacctcaagtgcgacaacatcttcgtcaacggcagccagggccaggtcaagatcggcgacttcggcctcgccaccgtggcccgccgccgcggctcgccgcacgcggcgcgctgcgtcgtgggcacgccggagttcatggcgcccgaggtgtacgcggagggctacgacgagcgcgccgacgtctactcgttcggcatgtgcgtcctcgagatggtcacgctcgagtacccctacagcgagtgcgtgcaccccgtgcacatctacaagaaagtcacctccgggataaagccggcggctctgtacaaggtgaaagaccccgcggtgaggcggttcatcgacaggtgcctggcgccggcgtcgcggcggccgagcgcggccgagctgctcagcgacccgttcctgcagctggaagacggctgcggcctcggctacggagacgacgcggactacagcgccatgtacaactacctgcaccagcccgcgtgcctggaccaccaccaccatgccggcagcattggctccacggcgagcaacggggtggtgtccaatggcggcggcggcggcggcggcagatgggacgacgagtccgaggacgaggacgacgatggcagcatgttccaaggcatcgaccagctgttcaacgagcacgaagacgacgagctgcacgttgctggtgtcgacatcaccatcaagggcaagaggatggaggacggacgcatcttcctccggctgcgtatcgccgacaaagatggcacagggagggtccggaacatctacttccccttcgacgcggacgcggacacggctctgagcgtggccaccgagatggtggcggagctggacatcaccgaccacgaggtgacccacatcgccgagatgatcgacggcgaggtgggcgcgctgctgccgcactggaggccgggtcctggcatggacgacgacggcggcggcggcgccggtccggacacgtcgggcgctaccgaccgctgcaagaactgccggtccagcgcgtcctccgccgggtcgctggacgactacatgtcggcggcggcggcggcgcggcgcggctgccggtgcgcggagctgcacggccggttcgaggagatcacgttccaggccgacgaagagcaggtgcggttccagggctctgggtgcagctccgacgacggaggcgggcaggctgagcagtgcgccggggacggaggcagtaaggcttgaggacatccatggcaatggcactactgtaactgaacgttcggaccagccttgacctggttcctcgcaggagcaactcctgttttaaaaatctgaaaatgccatcagtgcagccgcacagctgcttgtaagtgaacatttttgtagctctggttgagcatacgatcgttaagacgggtatagtttgaagtttcaacaggcaagtgctttccctgatctttggtggtggttttttttccactctaaaactggtttgtagaactcacacagaatgacagaatagtgtattataaatagataaccaaagacagttggat

SEQ ID NO: 73094 - DNA, 581 bp, Zea mays
  Clone ID: MRT4577_166660C.1
tgtgctttcacgtcatttgttgctgattgcactgtgttcttttcaccatccttctttcttccagcattcaaaccctagcgcgccgccaccatctcccgtttgatcacgccacaaaccgagtcaaagccgcttccttgtttttctccttcggttacgtcaaaaaaaacagaaacaaaaaaaagaaaaaagaaaacgaaagagaaaggatagaaccatagaacaaacaaaaaaagaaaggagaaaggatacaaagcggttgtctcatcttggtcgttttaaacataacttgaggtaccttccttaaaccgggcataacttttcgctcggttgtccaaaaaatctgaaatttttacaggagcttgttgacatcattatgaggccagacaaacactcacgacttgtttggtttcgataaaattgtcaaaaaaattcaggaaaataaagaaaaaaattcgtcaaagctcttgcacgcttttcagagaacttactctttttctgtagaccacatttgatctctgttttaggtaaaacttggtgtagctcctattttgttgctacttgtgctgagctttcaatcggct

SEQ ID NO: 73095 - DNA, 464 bp, Zea mays
  Clone ID: MRT4577_166661C.1
gagccacgcgtcacgcgtgcggcatgcatattaagaggaagaagaagaagatggtccttaaggagcacgctctaggagaagctatcgctcctcagggacagctgccacacgtgcggaccgaggactgcaccggcactcgcttagacgcatgctcagcaataggaggtagtgcacaggccaaacgactgcttggccacagatgtgagatctatatagcacgtaaatactcgacgacctggatgacatccaagcctacacgtagaccttgtcccttcatcatgacacagagtcggtttctggcggtgcattatacgggagcattgctaaggagctcgggaacctagtcagtctcatgatgctcgttgagatggactatgtagtgtcatgacctatgcgatgagacatatacatttacgcaagacgtgtgctcaatttaactgacgtgcatgtacatatcagatcta

SEQ ID NO: 73096 - DNA, 424 bp, Zea mays
  Clone ID: MRT4577_166662C.1
gcgacatttaagtccagagctcgtgcacattgttcgttagatcatcgtatgccggcagttgagtaatagagacgggacacgagatcttggaattctccaaaaagaagtgacggacaggcctatggcgaactacaataacggctagcgctactggaggcgacgcgtggacggtgaccccgaacactatcacccacactatgcacctgtatgacttattcaagggctataaggagagcctctccaggcaatggccgtccgacaaaccgctggataatgaggctttatagggagacgttactgtatttattttacattcatgtctatgggggtgagtaatgcttatcctataatgcatgagaaaaacgataggcgttccagacaggcactagagaccacagatgacaatgctggatagcccatagat

SEQ ID NO: 73097 - DNA, 159 bp, Zea mays
  Clone ID: MRT4577_166664C.1
gtgcctcataagaagaacaagaaggaccccaccgtttcctctgcggccgcggcggcctcggacgatctaagtgcatatggcacgtctggcaacgacgcctcgttcgagcataccgccatccaggctttcggctggccattttacccgtccgcttgatga

SEQ ID NO: 73098 - DNA, 410 bp, Zea mays
  Clone ID: MRT4577_166665C.1
acaaaagctccaattatacttcaacaacagagtttccgtagagatacccagtcacgatggtaaggatgacctatacgtcaaagtatacgtaacagtagactactaccttcactgccaacagagttcgatggagatccaggtatctggctaatcaactactcttagagaggtcaatctagaactgaactaggaagaaattgctgacatgctcagaagactggacacactatatatatatagcatctaccttgagcatagcaacctcacgctcaagaattgcgacgtatgactcatgttgatacaggaaattccttgcaatctgtgagaactgcaagcaaatgctattgccaaaatatacaatgcactataatgtgtattataatcatttttttcgaaacttatttgtgcaa

SEQ ID NO: 73099 - DNA, 1851 bp, Zea mays
  Clone ID: MRT4577_166666C.1
ggacccccgggtcggcaggggtattagtgccatatggccattgccatcccatctgcccatcgtcgtccagccgtccagggatccaggctgaggcttaataataaagcactctttccgctcctttgatcccaccactctgcagaaccatggccggcgaggaacaccagcagaacaccagccaccgcggccaccatttcctggtggtggcctacggcatgcagggccacgtcaacccagcgcgcgccctggctcaccgcctcgccaagctcagcgacgtcgtaggcggctgccccatcctcgccacgctctccgtgcacgtcgccgcccaccgccgcatgttcccggcaccgctggacccggacaccgccggcgaggaggatgaggaggaggccagcgacggcgtcatctcctacgtgccccattcggacggcttcgacgacggctccttgcccagaacccccgaggactgggcccgcagacgccgcgtgagccgcgagagcctctccgccatgctcgcccgtttcgccggcggcgggcggcccgtcacctgcgtggtgtgcacgctgctggtgcccgcggcggtggacgccgcgacgcgccacggcgtccccttcgccgtgtactggatccagccggccaccgtcctcgccgccgcgtaccactacttccacggctacggcgaggccgtcgccgccgccgacccggcgcacgaggtgagcctgcctgggctacgccgccctctccgggtccgggacttcccgtcctacctggtggacacgacgggcagcccgctggccaggtccgtcgtcgggatgttccgggagctgttcgagagcgtggaccggtggcggcctaaagtcctcgtgaacacgttcgacgagctggaggcgggcgtgctctcggagacgaagcgacacctcgacgtggtgtacgtggcgttcgggagcgccggcgcgcacaccggctaggagatggaggaggtggcccaagggctgctgcaggctggactgtacagccacgtcgacgccgacaggaagagggagctcgagtggctcggagcgcagccggagagctcggtggtgtacgtgtcgttcgggagcatagcgacgcacaccgagcagcagatggaggaggttgtccaagggctgctgcaggctggacggccgtacttgctggccgcgcgcagctggcacgggctcgaggacgacggtgcgcgccacgtcctggacaaggccgcccagagcagcggcggccgtgggacggtcgtggactggtgcgaccagccggaggtcctggcgcacccggccgtcgggtgcttcgtctcgcactgcggctggaactcgacgttggaggccgtggcggccggcgtgccgctcgtcggcgtgcccagcctgtttgaccagccaacgaacacgtacttggtggtggaggagtggggggtcggcgtcagaggggagcgtgacggtgagggcgtgttagctgcgacggagctggcgagatgcgttgagctggtcatgggtcaaggtacaaaagcaacggcgataagggagagagtaaaggctttgagagagatggcgcagcaggcggcacgagcaggtgggccggcggagagaaaccttgaggactttgttaactctgtcggtgatagcttccgtcctgtcggaatttcagttgcggaaaaaactgatgaatctcgtacatgttcatcagaatgacttccgtacagatattatttttatctacattctacaaggagtacctgatataccatgtacgtatattttttttaagataatggatggaataaggttccagctaaaaaaaaaaaaaaaaaaaaccccccccccaccc

SEQ ID NO: 73100 - DNA, 470 bp, Zea mays
  Clone ID: MRT4577_166667C.1
gagctcgacgccggcgtctgacgcaaccgcctcggcttcgagttggatctgctgggcgtcacgtacctcacggcagtgatcaaggagacgttccgtatgcacccggccacggcgctgtggctgccccgggttgccgacgaggagtgcgtggtggacagcgtgcgcatgcccgacggcaccacgctgctggtgaacgtctggacgatcgtccgagacgccgaggcgatcgccgagcctctcgaggtgcggaccgggcgattgctcccgggcggctccgacgcgggagtcgatggccttagggagcgattttgagctcatcccggacggcgccggtcgtggaatctgcgcgctccttacctggagtctgatgatggtcacgctgatgacgggcacactggtgcacgccctgtactggtacctgggcgacgcaatgaccgtggacaagctagacatggaggaggcctacggtc

SEQ ID NO: 73101 - DNA, 240 bp, Zea mays
  Clone ID: MRT4577_166668C.1
cgtaggaaataacatgtttatcactaaggccattataaggccgcgaacggtaaaaaggacgtctggctggggtttttcgataagcttcctccccctgtcgagcactgcaaactgcgacgctgctttcatgtctggcgagacccgccacggctataaagcataccaaactttacgccctggaagtgcctggtgccctattctgtttgcaacatgcggtgtaccggataccactccccctta

SEQ ID NO: 73102 - DNA, 385 bp, Zea mays
  Clone ID: MRT4577_166669C.1
ggggggcggaactgaatgcctttaaagagcccgccaaataggagggaaacatggttgttaaaaaaaaatcaacaaacgtttgcagctggcgatcgatggttcaaaagggggagccctaatcggggtttttttccttccaaagctaataatgagctgttcctaaaaaaaaattggggagggctcaaatttcatttttgctgaagaaggcaactaaaggggcttttttgcagggggggaaaattacatttgaccatttttttggacttctgctaatcgggggtgttttgctaaagggaactttggtggtggtggtgcttaaagcgggtggttataaaactccgggagaattagttttatgcccaagcacatgatctgaattttttgg

SEQ ID NO: 73103 - DNA, 782 bp, Zea mays
  Clone ID: MRT4577_16666C.1
cccgcttcaaatctcttatgtccgcgcccccccatggctgccagcgcccaggagcttcccccggcgcagcagcagccagcggcggagcagcctccgtccttggcgttggcgctggtgcctcagccgcaggcgcaggcgcagattaagccgaccagggtctcgctgtcctacgaggagatctccaagctcttctccctccccatcgcggaggccgcctccatcctaggcgtttgcaccagcgtcctcaagaggatatgccgcacccacggtattgtcagatggccgtatcgaaagattgtttctgggaagggtgatgacgcaaaaaatgctgaaagagagaaagccatgcagcttcttgagttgtcaaaaattgcaaaacaaaaggctataagctcttctggttcattagcgacgtcatcatcaggtgctttccagggagtgccaaaagctcaacaaggcagtgcgaaggcaggatcagctataggtagacaaaatgccccaagcttgtcccagtttagccaagccaaagacatccccacctacatggatgatttcaagtacggatttccatcatctggcctgtctactgaaacaatgaaatggtgggggactgacagccacacagagactgctcccgcgaaagacgataaccgggaaggctccgaatcaacaaatgaggcatcaaaaggtatgaccgatgacgagttagactggggagcagacgaacccgaagctgatgccgacggagtggctgctgcaactgacccgtcggcgcagctctg

SEQ ID NO: 73104 - DNA, 431 bp, Zea mays
  Clone ID: MRT4577_166670C.1
attagatacgcacaaattttatcattttttatatatcaatacaatacaacttatacgagaaccgaggtgaataggcaaagcacctcatgttggaccttaacaaacacaagatggtaggcacttgcgggaacatgacatgacataaggttctccagttctgctgtcctgaaataggacaactgagaaggctggcatgtccacataaaggggtatgcattcaaagggcaaggatggcaaccattgatctagccactgtttggtatattaacaaactggctgatcttgtttgtactactatgatcgatacacacttctatgttaacgcttgctaaatactttttccatccagaacaagtgatcagtattatatcaagcttggctttaggtctgactgacatctttgcacatatgctgcagagagcagagccaag

SEQ ID NO: 73105 - DNA, 624 bp, Zea mays
  unsure (1)..(624): unsure at all n locations
  Clone ID: MRT4577_166671C.1
ggaccctcttttaaaccggcctccgggaaggaaacccgctcaggaccctaaaaagaaccaaatccccaaaaaaaaaatggtttgggggaaatggactccggcagggcaggcggcctggacaggaaccaaagcaggaaacccgggggggggggaccgggcacccttgggaaggcgggggggccaaatagagcatccaaaccccggacccagcagttcccgccgccggtgttttgggcccttcccggccaccccgggataaaagaggcccaaaggtaaaaggggggggggggcctggttttgcccctaacctcgccccggggaacccccgggggcccggggtaacccccgggcgggccccttgggggcgggggggttcccggcccccccttttccccccggcaattnggcccctggcccgggggcgggggggggtcccgcgcgggcccgggccctgcgccccccgcgccccgggcgcggggggggggccgggccgccccggcgggcccgcgggccccggggggggccgccgcgggggggcgggggccggggggggcgcgggggggcggggcgcggcgcggggggcgggcggggcggcgcgcgcggggcggggggggcggggggccc

SEQ ID NO: 73106 - DNA, 796 bp, Zea mays
  unsure (1)..(796): unsure at all n locations
  Clone ID: MRT4577_166672C.1
gccggccgggtcgggaggcaacgagtagccagccagctagccagccgatgcatcacctgattcctttcagccaggtcccagattccattgatccatcccattccactccaccgcccctacctgacctgacctgagataagcaaacgcacacctgcggtgcgggctgcggctccgctcatcgctgccagccagtccaggtcactgcctccctcgttccacaccatgccagcggccactctcgccgtgcgggtggccgccatcctgctcctcctcgcccgtggcggatccgggtcggcgcccgtggagttcgtgctcagtggcttcgcgagcggcaacgtcacgaccagcggcgcggccgtggtcacctcctccggcctcctgcagctcaccaacgcgaccaacgaggtgttcgggcacggcttctaccccgtgccgttccgcttcaaggacgcctcctccacgccgcgctccttctccaccaccttcgtgttcgccatggtgccgcggtacgacgacgcgcacggccacgggatcgccttcgcgctggcgccgtcgccgacgggccccggcgcggtggccgggaagaacctcggcctgttcaacacgtccgacgacacggggaaggccaggnagcggnggtcgtcgccgtcgagctcgacacggccaagggacgaggagtttagcgacatcaacgacaacccgtncggcatcgacgcaacagnctggtgtccgtgagctcagnccccggcggcgtacgtcgacgccggcagcctagtcaaatcannctggtcagcgg

SEQ ID NO: 73107 - DNA, 349 bp, Zea mays
  unsure (1)..(349): unsure at all n locations
  Clone ID: MRT4577_166673C.1
ggggcggaaaccccaaaaaaaacggcccccngggccagggggacccnngaaagacaagcacgccgggggcgaagagcccccccnaaaaaancaaaacccaagggggaaacaccccgcaaannnaccccccaaagcccaaaggaagggggaacacacaaccccggannaggaaagaaaccgggaaaaccgggggaacccggagnncccccccccagggggaaaagnccaaaagaaancaacaaaaaggcccganggggganngacaaacgggggaaacccggaaaaancccccgggggcccnggggggcccccccggaaaaaggggggaacaacnncgaaaaccncaacc

SEQ ID NO: 73108 - DNA, 394 bp, Zea mays
  Clone ID: MRT4577_166674C.1
gctagctcctcctgcacgtgccgctcactgaattggctcgatccgcacgcagtccgttttctttctttgatctggagaacgggaaccaggagctcaagatcgacctcaaggacctgttcatgaacaacgctattcagagggatgttaccgggagcaggaaggctgttgtcatccacgtcccatacagactgtgcaaggccttcaggaagatccatgtcatactcgtcagggagctggaaaagaaattcagcggcaaggatgtggtaattgttgctacacggataatagttagcacacacatgaagggttcagctgctctgcgcccttgcaccatgactttgactgctgttcacgatggcattttggaggatgttgactacccatctgagattgt

SEQ ID NO: 73109 - DNA, 552 bp, Zea mays
  unsure (1)..(552): unsure at all n locations
  Clone ID: MRT4577_166675C.1
ncttctcagaggtgggctcgtttctcctccccctcttaccaagacctcctcgggttacggttccttaaggacttgcggagggagatggcggcagcatgatgtgcagcaccgttgcttcgccggagatcttgcctgagccaccaccagcgagtcgctggagaatgccttcgcctcctacgctgagatcctccactccgagggcatgcaccgaccgtgagacggagaggtcccgcggctacggcttcgttaccttctcctccgagaactccatgctcgaggctatcctaaaactgaacgctcacgagctcggcggtcgaaacatcaccgatatccatcaccatgccctcggaggtggcggcgaagagcctcgactacgctgccgggcgcgcgggtggccccttctatgctggcccacgtcgtgacggcccctatggccctcctggcgattacggcgaccggcgcaagggtggcgacagcgattactacggaggaggtgcatacggcgctccaagtgactttggcggtgatgaatacggcgctcctgccgacttc

SEQ ID NO: 73110 - DNA, 612 bp, Zea mays
  Clone ID: MRT4577_166676C.1
ccgggaagcatcgagctaggcaggcgtggcgccaaaccaaaaacttctcatggtcgccactgtcccagggcgcgtagctaggtagcttacatacgccatgtggcctgcctcaccagcgctgccggggatgagtgcgctgcacgggtctcacacgcaaggtccatactccacaggcatcttcgcggccgcaatgcgcttcttcgctccctcctacgacctcttctgcatgtcgcgcggcaccaagatggtgacacgaatctacaatttgaactccacgacggacagacccgcaccggtgacgcccaactctacggctctgacgaaccctctgcccattatgcgctacggaggaggttcatctctacttccgctggttgggtcaccaagagaggcccgatactcaggaccctgttgctgtcatgggcatgcactatctgctctcagcccagtgcggcctctcgatcggacactcctgcagatcgagaatggacatcgactcatgcttcttcacgcttctgccgtcgcgttacagatataagcgtcagacttactctctggcatgcaccatcatgcccgcattagcactgctagaggagccgcatccgctccatc

SEQ ID NO: 73111 - DNA, 137 bp, Zea mays
  unsure (1)..(137): unsure at all n locations
  Clone ID: MRT4577_166677C.1
ggcttctcatggantgaactctttgttntggnacntcnttcacaagcttttactgcaactcntaggaagtcgacagccttgccggcttttgttaggnttctgcagggcgtcttgctantgggataantgcangaatt

SEQ ID NO: 73112 - DNA, 308 bp, Zea mays
  Clone ID: MRT4577_166678C.1
cacacaccgcacgcgcccagcacgggggcgcggggccccccaacaaacaaccacgcagaagcgaggcgagacgcacaaacagcgacagcacggaaggaaggccagccaaaaaccgcacagacacacgaaaggccaaacaaacagcacagaacaagcacaccccccgaccaccagcagagggggggggggggcaggcagaacagagacgaccgcaccccgacagaccacaacaagcagaaggagagcagccgccgcccccaccacggccgagcgagggaaggagaacacgggacgccacgccagcaagc

SEQ ID NO: 73113 - DNA, 341 bp, Zea mays
  Clone ID: MRT4577_166679C.1
aaaaacccgacctctaatggcatttttttacaaacaagaactaactcattacaggatgggcataatcacatggtaaaagagggggctagtagcttttaaccaatatttcaggggacattcaggggccccaaccaattcatgggtgaagacattaattacgaaagataccattcggccaaacatcctaaaaattattatcggttccaaaaacgctgttttttttttttttaaaaccgcaagggaaaggaagcaaattctcccaccaggggtcaaattaccatcccgggtttaaaaattagcccccccacataaagggggaacacaaggggggccgaggaaaa

SEQ ID NO: 73114 - DNA, 799 bp, Zea mays
  Clone ID: MRT4577_16667C.1
ctgacggtcattgaggcgatgaactgcgggctgacaacctttgcgacgaaccagggacggcagccccagaaggcgcaggaccttgtaccatgactgcacctaggcccaaagaaaggcaagtgtgcccactcttaagaactttactgaagagagaaccgcgggagcaactgactgaccaattcgatgtttcacaatcccaaatttggttgctgctacgaagacacagactaggatccagaggatcatgaccagctgaacatgggctcgacgtatggcttctggaagactctgaacaaggaggagagagtggccaagcagcgctacctgcagatgtgctacaacctccagttcaggaacctggcaaagactgtcccaaggctgtttgaacatcctcctccgcaagccccagcaggcgcagggcctagtacgatgacggtaacgaggccgaaagaaagaaagacacagactaggatccagaggatcatgaccagcttgatggggcagaagcctgctacttctgaataataataatacattagagccagggagacgagatgggtgtgcatgcgtgatctcctcaagccaaggtcctggcggctgcacatatattcattcattccattgagaccggaccagatcagtgtttattgtgaaatttgttgtggtgttgcatgtgtggttttcatctgtgtactgttgattggagagctggatgatgtaaagagagtgaaagtgcacatggttacaattgataataataatttatgacaaggattgaggaatgttgtgtgaccggacc

SEQ ID NO: 73115 - DNA, 1209 bp, Zea mays
  Clone ID: MRT4577_166680C.1
gaaagatgtggcgctgaatttcctgaggaagtccttaaacaagcttgagaatccaaatgacgtcctcgccttattgttagctgctaagatatgcagcaaggagcgccatcttgcctctgagggtgtcgaatacgcaagaagagtaatcgcctgtgccgaatcatcggatcctcatctgaagagcgtcggcctccatttcttggggagctgtctaggcaacaagtccaaggtcgtttcgtcggactaccaaagatctctgctgcagacggagactctcaagtcgcttgcagagtcgattggccttaaccgctacaacgccgacctcatattcgacatgggagttgagtacgccgagcaaaggaacatgaatgccgccctgagatgcgccaaggagttcatcgaggcaacgggcgggtcggtttcgaaaggatggaggctgctagcgttgattctttctgcgcagcagaggttctcggaagcggaagtcgcgacggacgctgccttagatgagactgcgaagctggatcaaggatctttgcttagggtaaaggccaagttgaaggttgctcagtcgtcgcccatggaagcagttgaagcgtaccgtgctcttctggctctcgttcaggcccaaaagaactccccgggcggatcttgcaagagcgctacagaggacgcggatggtagtgtctccgagtttgaaatctggcaacggacgcgtgggttgtactccagcctctcgtactggagagatgctgagatttgtttgaacaaggctagagccctcaagttgtactcagctgcaacactccatgcagaaggctacatgcatgaggcgcgagatcaaacaacggatgcactggccgcctacgtcaacgcgttctcgaccgagcttgagcatgtgccgtccaaggtggccatcggcgcaatgctctccaagcaaggtcccaggtttctacctgcagcgaggtgcttcctctcggacgcccttagagtcgagcccacaaaccggatggcttggctttacctaggaaaagtgcacaggtctgatgggaggatctctgacgctgccgactgctttcaggcagcggtgatgctagaggattggatccagtggaaagtttaagttcgctcttatgagctcccatccttcatgtggggtgggttcttccttccgctttaattttctcctgtgcatagctggaggaaata

SEQ ID NO: 73116 - DNA, 361 bp, Zea mays
  Clone ID: MRT4577_166681C.1
ggcgggaaatggaacgatcagagagagagagagagcgcatagtcgacatgaaggtggcaagaaggaagtggccggtgcggtggtggccatactgctggttctgcagctcatggcagctccaccgacggccatggccgcccgctcgccgcacggatccgtgccgcatctatccctctcgacgactcccttactaacgatgatattaatgccttctcccctctgcccgcgaaacctgccgctgagtttcctaatgcccccctctgataccagaccgtctctgcggttgtaccctcaagactccctggtaatgctgatgatgctaatcctcctgcggcattttttcctcctccccctcctcctg

SEQ ID NO: 73117 - DNA, 215 bp, Zea mays
  unsure (1)..(215): unsure at all n locations
  Clone ID: MRT4577_166682C.1
atataaatggtttttccgttttatcccccaanacagggaaaaaatgttggggtgatagattctgtcaaaagggactgggacccgtattccctatcctggctcttaaaagccaaggctttagctttgggtccaaaataggatgtttaaaccctctgttccctttgggttagtgtaaattcctaacaaaaaaaaatccacatctttgttaatttatt

SEQ ID NO: 73118 - DNA, 427 bp, Zea mays
  Clone ID: MRT4577_166683C.1
cgacaacgacctccccgactaccgtcaatccaggggccgctgtctatttgcgacatcctgctctgcgccgggttccgtgacccaatgtcaccgagtacatctgcgggcgccaaggtgagggctggagtgcaagcacttcggcaccggcaagctcgagcgctccatcgacggggtgaccgacgggaacggcacgtacacgatcgagctcaaggacagccacgaggaggacatctgcgaggtggtcttggtggagagcccgcgcaaggactgcgaccaggtgcaggcggacagggaccgcgccggcgttctgctcaccaggaacgtcggcatcagcgacaacctgcgccccgccaacccgctcggctacctcaaggacgtgccgctgcccatctgcgcctcgctgctcaaacagttggactcggacgac

SEQ ID NO: 73119 - DNA, 603 bp, Zea mays
  Clone ID: MRT4577_166684C.1
ggaggagaccctgaccgaatgatgctgaccttctctgtcttcccgtcaccaaaggtctcagacaccgttgttgagccatacaatgctacactttccgttcaccaactcgttgagaacgctgatgagtgtatggtgcttgacaatgaagctttatacgacatatgcttccgcacgctaaagcttgccaccccttcctttggtgacctgaaccatcttatctctgctaccatgagcggtgtcacatgctgcctgaggttccctggacaactcaactctgatctccgcaagcttgctgttaatctcattccattcccacgtctccacttcttcatggttggcttcgcaccgctgacgtcgcgtgggtcacaaatgtaccgtgctctcaccgttcctgagctgactcagcaaatgtgggatgccaagaacatgatgtgcgccgcagacccccgccatggccgctacctcaccgcctccgcctgcttccgagggaagatgagcaccaaggaggtggacgagcagatgctcaacgtccagaacaagaactcgtcgtacttcgttgagtggatccccaacaacgtcaagtcaagcgtgtgcgacatgccg

SEQ ID NO: 73120 - DNA, 341 bp, Zea mays
  unsure (1)..(341): unsure at all n locations
  Clone ID: MRT4577_166685C.1
cccacgcgtccggcaggctccgggcttaagattgcttctcttctctcctccaaggtgtagggactgatcccgcgcgcggcgccaccatgcggcagaaggcggtatcgcttttcttgtgctacctgctgctcttcacttgcagtggggtggaggcaggtaagaaaaagtgctcggagagctcggacagcggctccgggttctggaaggccctgaccttcatggccgtcggaggaggactcgcagtcgccgggctgcccgcgctgggcttcaccggcgccggcatcgcggccaactcggtggctgnctcgctgatgagctggtctgcgatccttgatgggggc

SEQ ID NO: 73121 - DNA, 415 bp, Zea mays
  Clone ID: MRT4577_166686C.1
gtggttgcaagattataggggctatatataccttataggtatcgtctgcggtgacgatcgatggcggatatggtgaatcggtctctagaaatggtaggcaaacgaaatttattcagttcttcatgccccgttcttagcttgtttctgctgggcggggtggggcactggggcggggtgcatctctatattgttgtccattatatttcaggtgtatgatgatatgtaaacttataacacatgcatgttgcatggatttccttgctatctttggcatgcaacgtgttcatgtgcatggtgcaagaggcgatatagtgtgtgtgtatacacacacatatgggagtacttgataaaaaaagatcgaggaactactgaacaatcattcacctattaattcgagacagtttgcaacaataaa

SEQ ID NO: 73122 - DNA, 364 bp, Zea mays
  Clone ID: MRT4577_166687C.1
ccgtacccggtccggaattcccggtcgcccacgcgtccgaccatacttcattgcaacgacatttatcagatagcacggtggggaaaaaaaaaaaggtcagaaacacaaaacgagaagaatagaaaaaactgctatcgcccctacgaacatggattaccacttgccaaaatggggcgtccactttataagatccaatgcttagcacactctcatgcaagatggctgctttcctatagagccccctaaattaaggatactggcctgtgcatgtcaccacagagacttgggaaaccatggcctttcccaatttaacccctttgctgaaaagcctcgttttgacagctaccgttaaactgataaggcc

SEQ ID NO: 73123 - DNA, 424 bp, Zea mays
  Clone ID: MRT4577_166688C.1
gaattccggtccggaccacacccttccgtccaaatttcaaggatccttttggggaggtttcaaggaaggaaccggccattgaaaggggcaacctttgcctgggggaggaggaagccattccattggggggaccagctttccctggttaaggtggctggaatttttattgtccacaggatggtggcttcgcattttacaaggggcctgaaatggtttaaccagaaagccaaactgttgctcgaaaggaaaccatccattcaaatgtcgttgaaccagataattgccccaagactcaaaaggccgttttagcaggcccagagggagaaattcctgctgaaaattctggtgggccggggtctgaaatggccaaatgcaccgggatgccgaaggatgctccaccacttacagcagcaggtgcaattcc

SEQ ID NO: 73124 - DNA, 627 bp, Zea mays
  Clone ID: MRT4577_166689C.1
gtcacaatataatcagagtatttattacatagtggaagacttattacaaaataaaataataaatataaaacgaactaaggatcgttggcgccaaagtcaactgagaaacgccacctagatcagatcaagctcctcgatacttgactccacttgaaaccacctgttcttctcctggcacttgagattccagttaccagggtgattcttcaaatcctcgtgacctcacggctgatcaagacggcaaggccgaaccgcggtgcccttcgaagcacgcccaggtccgcgacacggccggacgacggcgcccgcgcagccttcaacgcccggcgagggtcccggtccgctccaccctcacgcacagggaagtccctgaacgtccagtacacgactccgttgagcactctcccggcggcaacgctcgtgtactctctctcctactaactcatggccatggcgaggccatcgactttttctgcgtcgagtggtggtgtatccagatcgataggcggggggaaacacagtcggctggccttgtagccatcggcgagcggcaatcacggaggggatttcggtcctaatctttgtaatagctaatgagagaaatccggccagcccccgagtccacgc

SEQ ID NO: 73125 - DNA, 433 bp, Zea mays
  Clone ID: MRT4577_16668C.1
gacagcgtcaccgtgggggacattgctactgtcattccacaatgcttgtggcatcggctccgacaagatccgcatggatccattgactcgggtttacttggcagtgataagttttatcaattctttagctaaattgttcttgatgtaactgttcctaagtcacaatctagctaaagactacacagagctgcttgacgcatctgcacagcatggatacgcatgaatccattgactcgagtttacttgatcagtgcaaaatgttatgaagtcgttagctatattgtacttgaagtaaatgtaccttactcacagtttttgtcgggaatgctcttgttctgttactttcatgatgttctgccgtctaatcacatctgaagcttgaattggtatcaagaaagccggggccctctggttgtagtaaattgagaacccc

SEQ ID NO: 73126 - DNA, 284 bp, Zea mays
  Clone ID: MRT4577_166690C.1
taggacgacatataattccaattcatataagaacataaccggctcattatgtcttgaaatacgaggaatgggaattacccgaggaatttcgatactgattttctttgccttaaagataggcctagtgagaaaacatataattacaaatcatatatgaacatttttgcctactcacttcttgagaatgaggaatcggaatcacccgtggaatctcgatatcatagccttcgtctccaagataggcatattgtgaagtcaaatctttacacttgatatatgaacat

SEQ ID NO: 73127 - DNA, 401 bp, Zea mays
  Clone ID: MRT4577_166691C.1
atttggctcgagcgctgccccggaaaatgtcctcacccccccgcagagaaaccctagccggggcgccataaccaaatactgccacgctcgaaaattaacggaggcttccttgccgcgaatagatcgatattcgagcgatctgctcgattggaacgattctgggtgctcttcgattgattaggccgtcaaagccgtcaaatcttgtgacctctcgaaggggaagagcgcggtagaccgacggtcatgtccaggtgctatcaatacccgacgccggtgaactagggaaacccagtggccgaggccgaggcggaatcgaccgataaggaaagccgaacctctggattaacacacacacaccggatcgcacgctctttctggctgttgctgctaggatctgcggg

SEQ ID NO: 73128 - DNA, 553 bp, Zea mays
  Clone ID: MRT4577_166692C.1
ggaggcaacaacctttttttttatggccaaaaacggcaaaacggcccaatcaaaggcttaaaaaacggggcaaagggctatcgaacaaaaaaacgggctttctttttcgggggaaaaattccccgggggggaaaccaaaacctatccccccctggaaatggcccaattgggcagggccaatttcccgcccccaaaggctaagcaaaccggccattaaccccctttttctaaaaaaatccggggggggccccttttggggcggggccccccctgaccccaaaaaagccccccctacagcgctcgggaaaaagccattaaacctgggcaaacggacccccagggcacccacaaaaaccccaacaataagcggaaaaacgggggcgggggccaatccctgctttggaggaccccccccagttttatattgggggggcccaacagggattgggggacccttttccaaatctacttggacaaaccccgattaaaacctatgggtatgggagggaaggccaaatcgaacctgacaaaatgcttgcccttgggcaaatct

SEQ ID NO: 73129 - DNA, 465 bp, Zea mays
  unsure (1)..(465): unsure at all n locations
  Clone ID: MRT4577_166693C.1
gcgaatgggtacccctcgagccggccggggcgcgcctgcccccggctcgggccgcaagcggctcgacctcacttcccgtgtgggggggcttcaatggccctccgaccgcttctagtatccgctgccgggggattgcctgcccccaccccatgtgcgcctgcgcctgcccctcggttgatgcggtgcgctgtccgtctcactcccggcggcctcttgcgggtcctgcgctctcgtcgcggtgcggtgtggaggtgcgcgctgcttgtnggctcggggcccgagcggaggagcacatctgggtgttggngtcgtccagaggcgcctgctgggggatggggcctagggactccatgccttcgcatgggtgcggctactctgcttatgattacgggagtgctccatcgggagacacctggtgaaaccctgggggttggttctgcgttgtcgtgtgtggttcgcgccttc

SEQ ID NO: 73130 - DNA, 1125 bp, Zea mays
  Clone ID: MRT4577_166694C.1
cattgggtacctcgaggccggccggagaaatgctgatagatagaacccgattcgttcctcctcctccccggtccccaccttcgcacgggtgctctgcccgtgcgagtgttcgacggccacgccgcgccgcccagctgctccggcacccgcccttcttcgtcgagctcgggatcagcatctcgcttgttctgggctccccattcggcctctcctcgccctaactctattttgcagcatgagaccagcacaacagcccgaatcataggcttgacgcagagaccccatctcatctgcgctcccgcgctggcctaacgctaacggagccagaagcaaagggtttagagggatgtcttcagaggagctaagggcgagcttttcagatttggtggtgggttcgccaacccagatagagggcaaaacttatcctttaggtgatttgttgtctgaggagggcatacaggtcacttgtttcacagaggatcttcatgatgcagtacttcactttcagatagtgaggttttctaaacagatctatgtgtgggttggatgcaacacagcaaagtttggccatttatatgctgctgcaaccactaggacggataacagagtgagcgtgacctctgtactaggaggaacatctgataacaccggatcaagtatggctcgccgtctagtgttgaagaccggtctgaacattgtctagcatgcagcatcccaaaagacagccccattcttgaggcagctgcggagaggaagctggtggagaagctgaaaggtttgggctacattaaaaccgcagtccgcagctgtgaatgctaacacttccacggcaccatgatccgtggcatgatctagtgagctttcggtcgacgttcatcactagatgcatgatgagcagttgtgatgtttggtgggcttgattggctaactgtttcatctgttctttcacgtgattaccgtcgcagcagctatggctgccgacaaccgatgattggctgcttgaaatatgagatggagacttatcctagaacgggggagtaagtaacatggtactcccttcgatcatttttatttgtcgtgttttagttcaaaaacaacaaatatttgagcaagggtttgtgtgct

SEQ ID NO: 73131 - DNA, 418 bp, Zea mays
  Clone ID: MRT4577_166695C.1
cgtacttcgacctgccgctggagcttctgaggatcagcagcgttgacacggagtcgccggtcacggcggcgttcgtcttcgacggcaaccgcggccggagcgccaagaagatcgtgcctgagatcccggacctcgattttagcttccccgcgccgccggttttctcgaatccttcgtcgccaaggtcttgaaagttgaaactatcatagaggaggtgctcaatatcccgcaacgcgttgcgctttcggtgttccactctgttcctatacatgtcatcgtcgtcttctttttcttgctgtgcatctgatatgcacgtaggttaaggttgcaaaattgtcacggggctggctgatgtctggtgattaggtcaaattatgcgattctatattcgatcaagctagcacgctgtgcattgcac

SEQ ID NO: 73132 - DNA, 134 bp, Zea mays
  Clone ID: MRT4577_166696C.1
ttcttttgctcttcaccaggaaccccaacaccggagagaataagctgtataaagaattcctggtgaacgctcatggtgaggatgtggttctcttaatacaatccccataagaccttgactccattataacctta

SEQ ID NO: 73133 - DNA, 1277 bp, Zea mays
  Clone ID: MRT4577_166697C.1
gtgcggcgctcgaggcggccggtctcgccggtcccactagtccccttcccttccctcgcctaccttcgcacgggtgctctgcccgttcgacggccacgccgcgccgcccagctgctccggcacccgcccttcttcgtcgagctcgggatcagcatctcgcttgttctgggctccccattcggcctctcctcgccctaactctattttgcagcatgagaccagcacaacagcccgaatcataggcttgacgcagagaccccatctcatctgcgctcccgcgcgtggcctaacgctaacggagccagaagcaaaggagaggattccacaagcttcgagttgccgaaacattttgttaaatctactgcttgtgtgggatcattagtgcaaatccggtgcttgcgcgtgcaggctgtgctacccatgcgtcttggctattgtgaataaaagggtttagagggatgtcttcagaggagctgagggcgagcttttcagatttggcggtgggttcgccaacccagacagagggcaaaacgtatccttcaggtgatttgtcgtctgaggaggtcatgcaagtcacttgtttcacagaggatcttcatgatgtagtacttcactttcagatagtgaggttttctaaacagatctatgtgtgggttggatgcaacacagcaaagtttggccatttatacgctgctgcaaccactaggccggataacagagtgagcgtgacctctgtactaggaggaacatctgataacaccggatcaagtatggctcgccgtctagcttttagtaccagaaaggctgcatcctacatgtcccagtgttgaagaccggtctgaacattgtcctagcatgcagcatcccaaaagacagccccattcttgaggcagctgcggagaggaagctggtggagaagctgaaaggtttgggctacattaaaaccgcagctgtgaatgctaacacttccacggcaccatgatccgtggcatgatctagtgagctttcggtcgacgttcatcactagatgcatcatgatcatgagcagttgtgatgtttggtgggcttgattggctaactgtttcatctgttctttcgcgtggtaaaagttattatgaacattttggtgtatggagtgtttaaaagcactagagctaatagatagttggctaaaactactggtgaatttagctagttaactattagctaacttgctaaaaatagttaatagttgaattattaactagtatgtttggatgtctttagctaattttaac

SEQ ID NO: 73134 - DNA, 553 bp, Zea mays
  Clone ID: MRT4577_166698C.1
cccacgcatcttttttagccggtcacaattctatagatcacccgggtgcatattgaagctaactggctggaccccattgactgaactgatgtcggtgccttttacacatggggagctgatattagggaactccatgagaacatctggtatgggagtagtccacctgagagagattttcaaggtccgggtcacgccatcatggttagagagaaggagcatgacacctgactggcacatgagcagaaggctgccacaaatcaaagctcccccctggcacaaggtattaaacaaatcgccgccgtcagatgctgtggatctggtctctaagcgtctggagtgcaccccaaacaccacatgcactgctgcggaggcgctggaacacccattctttgaccagcttcgagagactaatactcgactgccaaatgggcgattactgccactccttttcaattggcccgcctacgaagagaaaggagtgccagcatacattgatgcgaaatagtgttcagaacatgcgaagaagccatgctcttatgttggaacgggagat

SEQ ID NO: 73135 - DNA, 662 bp, Zea mays
  Clone ID: MRT4577_166699C.1
gggcaattgggttcctcgaggccggccaaaaaaaaaaaaaaaaaaagggaaaaaaaaaaaaaaaatgtcaccggccgggaagcagcagctgctagagcaaacccaagagccaagcggcagcagccagctaataattaagcagccaaattaagtgcgacgatggcgtcgtccatcaccagaaccgcatgtctcctcgtgctcacactgttcgtcgtctccgcggcgatcatcttgcccagctccctgtgccatggagcccgcggcgtcgggttaggtatcggcggcggcgctttggaccctgaccgtccagcgtgcgtcggggtcggggcatgcccagttcgtgggcgcccctttcctatcgtcaaaccgtcccccccatccaacggaggggacccacatcactgatgcctgcctcggatcacgcgccctccgtcgtatcggtctgtctacgatggaacgatgcaccgtgcacgagcacgactgcatgctactagctactagctatctcgtgtacctgtacagtcgtcgtgcttatgtacgtacgtatggtcaattaataaaactggagtgggatgatgatggtgaaaaaaaaaaaaaaaaaaaaaaaaaaaaaaaaaaaaaaaaaaaaaaaaacccgcggccgaggtccaatttttgtttcc

SEQ ID NO: 73136 - DNA, 484 bp, Zea mays
  Clone ID: MRT4577_16669C.1
cctcaatccttgtcataaattattattatcaattgtaaccatgtgcactttcactctctttacatcatccagctctccaatcaacagtacacagatgaaaaccacacatgcaacaccacaacaaatttcacaataaacactgatctggtccggtctcaatggaatgaatgaatatatgtgcagccgccaggaccttggcttgaggagatcacgcatgcacacccatctcgtctccctggctctaatgtattattattattcagaagtagcaggcttctgccccatcaagctggtcatgatcctctggatcctagtctgtgtctttctgcagcaaccagatttgggattgtgaaacaacgaattggtcagtcagttgctcccgcggtctctcttcagtaaagttcttaagagtgggcacacttgcctttctttcggcctcgttaccgtcatcgtactaggccctgcgcctgctggggcttgcgga

SEQ ID NO: 73137 - DNA, 322 bp, Zea mays
  Clone ID: MRT4577_1666C.1
aaaggcaaacaacactttttttttaggggggtcaaatgaaaaggataattggggggccgcatgtccaaaatatttttgggcctcgatcatttcaggccccacaaaacaatcgaatttttgggataagcaacaccccccagtttgtttaaagggccccacccccccccttcgaatgcccctgaagggaaaatatcccggggaaaagcaaaaaaatgccggctaggaaaccggttgggaagttgccccccttgtgaaaccccccatatgtttctccttcagagcatttccggagatttggggccccattgcctcaccttttttt

SEQ ID NO: 73138 - DNA, 640 bp, Zea mays
  Clone ID: MRT4577_166700C.1
ttgggtacctcgaggccggccggggtcaagcagcagctgctagagcaaacccaagagccaagcggcagcagccagctaataattaagcagccaaattaagtgcgacgatggcgtcgtccatcaccagaaccgcatgtctcctcgtgctcacactgttcgtcgtctccgcggcggtcatcttgcccacctccttgtgccatggagcccgcagcgtcgggttaggtatcggcggcggcgctttggaccctgaccgtccagcgtgcgtcggggtcggggcatgcccagttcgtgggcgcccctaccttcccagtccctatcacggtggcgggcctggtagtaactcctaccctgtcgccaaaccgttccccccatccaacggaggggacccacatcactgatgcctgcctcggatcacgcgccctccgtcgtatctgtcggtctacgatggaacgatgcaccgtgcacgagcacgactgcatgctactagctactagctatctcgtgtacctgtgcattcgtcgtgcttatgtacgtacgtatggtcaattaataaaactggagtcggatgatgatggtgagaaaaaaaaaaaaaaaaaagcggcctggggtatgtcgttggttcatatagacaaccacttgc

SEQ ID NO: 73139 - DNA, 689 bp, Zea mays
  Clone ID: MRT4577_166701C.1
gggtacctcgaggacggcgaatttgggtcgaggccggccgggaagcagcagctgctagagcaaacctaagagccaagcggcagcagccagctaataattaagcagccaaattaagtgcgacgatggcgtcgtccatcaccagaaccgcatgtctcctcgtgctcacactgttcgtcgtctccgcggcggtcatcttgcccagctccctgtgccatggagcccgcggcgtcgggttaggtatcggcggcggcgctttggaccctgaccgtccagcgtgcgtcggggtcggggcatgcccagttcgtgggcgcccctttcctatcgtcaaaccgtcccccccatccaacggaggggacccacatcactgatgcctgcctcggatcacgcgccctccgtcgtatcggtctgtctacgatggaacgatgcaccgtgcacgagcacgactgcatgctactagctactagctatctcgtgtacctgtacagtcgtcgtgcttatgtacgtacgtatggtcaattaataaaactggagtcggatgatgatggtgagaatttcttgtactggatgatgacatgcatatgtcgttggttcatatagacgaccacttgcaaaataaatgaatatatggtgatatgggaaaaaaaaaaaagtgacactttgcggccgtcgttggaaaaaaaaaaaaaaaa

SEQ ID NO: 73140 - DNA, 826 bp, Zea mays
  Clone ID: MRT4577_166702C.1
gtcaagttttcgctgctagagcaaacccaagagccaagtgccagcagccagctaataattaagcagccaaattaagtgcgacgatggcgtcgtccatcaccagaaccgcatgtctcctcgtgctcacactgttcgtcgtctccgcggcgatcatcttgcccacctccttgtgccatggagcccgcagcgtcggttagctattctaattaaactgctctcggttcactatatgtatattccatcttcctgtagcgtgcgtcgaacagagtggattattgtatcaggttgctgtgtgctcctacgagctctctgatgagaaagaaataatataaaccacttaatcgacatgaccttcctaatttttgcagggttaggtatcggcggcggcgctttggaccctgaccgtccagcgtgcgtcggggtcggggcatgcccagttcgtgggcgcccctaccttcccagtccctatcacggtggcgggcctggtagtaactcctaccctgtcgccaaaccgttccccccatccaacggaggggacccacatcactgatgcctgcctcggatcacgcgccctccgtcgtatctgtcgatctacgatggaacgatgcaccgtgcacgagcacgactgcatgctactagctactagctgtctcgtgtacctgtgcagtcgtcgtgcttatgtacgtacgtatggtcaattaataaaactggagtcggatgatgatggtgagaatttcttgtactggatgatgacatgcatatgtcgttggttcatatagacgaccccttgcaaaataaatgaatatggtgatatgggaccgctgcc

SEQ ID NO: 73141 - DNA, 412 bp, Zea mays
  Clone ID: MRT4577_166703C.1
cctcgaggcggccttctgatctcatctcgtgcatgtcggtacgctaaggatcatactgacccatcactatcctattctatattcctctcctcctgcaagtaacaaatcagatctgacctgtgacaagagagatcggttgttatcccacctcctaagaacgggatggacaatgttgacactgtctgtttcctgctcgcattctgcaaccacggaagtagtgttgagtgccgaattgacatgaagaatctgattggcgaagcatcttgcacaatctgtcaagaaaacttcagcacaactgctaatgcactcactgagcctattgatatatatactgaatgcattgatgactgtgagcgtgtcaacactgttgaaggagacgatgatgagtgagcttgccccatgtgatgaaact

SEQ ID NO: 73142 - DNA, 329 bp, Zea mays
  Clone ID: MRT4577_166704C.1
ctatggattcccacctagaggcatgcttacagctaaaagctacagctcacccttcggtggatggccaccggatgcaccgttaagaggtggattgtcctgggaccagagggcggcccgaccaacccatgcttcggcgaaggtggtggatatgactgctacactcataattcataaccatatgatatgcagggacccacctacccttctgagcgtgggagtaacaacagttatgggcaatatcagggccatatctctcagcaagctcatgacccttgacatgcaccgcaacagcactacagacatggctgtggtgatccctgctacattgc

SEQ ID NO: 73143 - DNA, 840 bp, Zea mays
  Clone ID: MRT4577_166705C.1
ttccgggcaccggcaagcagcagctgctagagcaaacccaagagccaagcggcagcagccagctaataattaagcagccaaattaagtgcgacgatggcgtcgtccatcaccagaaccgcatgtctcctcgtgctcacactgttcgtcgtctccgcggcggtcatcttgcccagctccctgtgccatggagcccgcggcgtcggttagctctgctattctaattaattaaactgctctcggttcactatatattccatcttcctgtagcgtgcgtagaacagagtggattattgtatcaggttgctgtctgctcctactacgagctctctgatgagaaagaaataatataaaccacgaattcgacatgattttcctaatttttgcagggttaggtatcggcggcggcgctttggaccctgaccgtccagcgtgcgtcggggtcggggcatgcccagttcgtgggggcccctttcctatcgtcaaaccgtcccccccatccaacggaggggacccacatcactgatgcctgcctcggatcacgcgccctccgtcgtatcggtcggtctacgatggaacgatgcaccgtgcacgagcacgactgcatgctactagctactagcttatctcgtgtacctgtacagtcgtcgtgcttatgtacgtacgtatggtcaattaataaaactggagtgggatgatgatggtgagaatttcttgtactggatgatgacatgcatatgtcgttggttcatatagacgaccacttgcaaaataaatgaatatatggtgatatgggaacgctgccatgtgagcccaaaaaaaaaaaaaaaaaatttgcggcc

SEQ ID NO: 73144 - DNA, 425 bp, Zea mays
  Clone ID: MRT4577_166706C.1
aggagaaaatggcctcctagtattattaggatctggtttggttaaaggaaacctttcacattgcaactcattgggagcaccatgggctggtggatgacattgggggttcagctagaaaccatgggctgctccatgttgggagctttagctagaatccagggatctacctttggatgttggccggcagcagcagtgggtaataacaaataatctgatcagagcaatgactcaagaatcttttcaaataatttttcactagctaccctcactgggtctgatgggaagagacataacaaagggggcactccatttttctgggggggggaaaaaaacccacccaagaactttcatttttggaaaccggccccaaaaaaaaccccttttttccggccaacaggggtttacttacaaacaatttaaagatc

SEQ ID NO: 73145 - DNA, 636 bp, Zea mays
  unsure (1)..(636): unsure at all n locations
  Clone ID: MRT4577_166707C.1
ttgggaccctcgaggccggccgggaaaaaaaagcaggaggctgctagagcaaacctaagagccaagcggcagcagccagctaataattaagcagccaaattaagtgcgacgatggcgtcgtccatcaccagaaccgcatgtctcctcgtgctcacactgttcgtcgtctccgcggcggtcatcttgcccagctccctgtgccatggagcccgcggcgtcgggttaggtatcggcggcggcgctttggaccctgaccgtccagcgtgcgtcggggtcggggcatgcccagttcgtgggcgcccctttcctatcgtcaaaccgtcccccccatccaacggaggggacccacatcactgatgcctgcctcggatcacgcgccctccatcgtatcggtcggtctacgatggaacgatgcaccgcgcacgagcacgactgtatgctactagctactagctactctatctcgtgtacctgtacagtcgtcgtgcttatgtacgtacgtatggtcaattaataaaactggtagtcggatgatgatggtgagaatttcttgtactggatgatgacatgaatatgtcgntggttcttggtttggtttaaaaaaacaaaggtgacatgaaaaaagaatggaatgcg

SEQ ID NO: 73146 - DNA, 261 bp, Zea mays
  Clone ID: MRT4577_166708C.1
gactcgcgtgcttaagcactcgactggcctcatggcgccggccgccgccaaggggatcggagcaagaggcattaacacagggcactggagcagcacatgcaagctgactctggacacttccgaccgcacgtggaaaacaagctagatggcgagcatattaaggaccctgaggacacatgcagctggctgtactgcttatgagaagcgatcacgggtgctgatgacagttggcaaggagctgatgcgctaaggcactggata

SEQ ID NO: 73147 - DNA, 420 bp, Zea mays
  Clone ID: MRT4577_166709C.1
ttcagtagttagtagcattactttcagtcttctttacattgaaaaacaaatcgtttctggagatgaagcaattggacagtgtaaaacaaaaggctaaagacccatccatgccgcgaggcgtgattgatataaaaaaaaaaaaaaaaaaaaaaaaaaaaaaaaaaaaaaaaaaaaaaaaaaaaaaaaaaaaaaaagaaaaaaaaaaaaaacctgccggggggaccctttcgaaggggcattttttgggggtatccttcaaactggtggctgatggggcatgcctttcgagggcccatttggccctataataaggccttttacatttcattggccgagtttttaaaacctctgttttgaaaaacccttggggtaacccactttattcccctagcaaaacatccccttttagcaagctggttt

SEQ ID NO: 73148 - DNA, 818 bp, Zea mays
  Clone ID: MRT4577_16670C.1
ctataatagtgacattgatgacagaaatctgaaaaatcaaggatacaactagaggatcgctgaccgaatgaccgtgcggggaagatttgttgggccgagtgcatttccttcccttttgcacccgactggctcccaatctgacttcggaattcgttctcttctctaaagtctcaattccacaagcgtccacacgcggactgcttccagagcggaagacgcgtcagcatgaacccgtcaagcactcaagcaaggtccctcgccatagacatgctatcatcaggtgccagcaagaaatgcagcagaggctgaccaagagcatcagatgttcagacggaacagcaacatccggagacttcgacaggcaggattcgcctaatgcttgctcttacagtaagctataaactcgttgccaaatacattacactggcgctattgctatggtaaccttgccttgtgtccttgtggagcggacactgggctctgcatcacccaccctgtacatggccaaaagatttcacacaacagccgactgtcctcaccacctcagctgcttcgctcctttcttcttcacagcagcgttgaagcgcccgtcgaccatgctgatctgatccataagggacctccggacgtgtcccggcggcgtctctgttatgccggccaagtacacgtcggaggagaggtcgaacttcagtgaggccatgggggtgttgggcctcttgaccaggtcatcctccagcagtatctccgccacgcgcgacagtatgctgaatgctaccccgacaagaaccctagagtatgcctccacgattgcattcccc

SEQ ID NO: 73149 - DNA, 400 bp, Zea mays
  Clone ID: MRT4577_166710C.1
cgtccgaatactgcggctgattgtaaaactcatgtcctgtttctgctgatctggccgaaccattggggcggctgtctgaatatccgcgcgccccccgatactgccaatctctggcccatacaccgtacataatgcctcgagttcatccaataatgatgcacataagcggacctgtactggtgtgaccaactcataccgtactgtccggtacagagcaagatcttcgagacgttcgacgctacgatcaccaaaagaaagtcagggccggacgttctagaggatgccaaggctgctcacttctggcctacaacaagatcggtcgtgtatagggaccccctgactaactatacgggacgttattagccaaccaagtcacggcgaaaacccaggagctacccat

SEQ ID NO: 73150 - DNA, 198 bp, Zea mays
  unsure (1)..(198): unsure at all n locations
  Clone ID: MRT4577_166711C.1
nnnnagnanancnaggattaccatggannaanngaacnngagnagggggaaggaaaanaagagagcggagaanaaccnnaaccancncgnggncancccacnnaacgcncccgagggggcgcacnnganncaccaaggncangagccganngnacaagngaagaggcaccaccccanagcgaagccggaaccgaccga

SEQ ID NO: 73151 - DNA, 1089 bp, Zea mays
  Clone ID: MRT4577_166712C.1
ccccgcgtccgaaactgcaaaccagcaacgcatcccgagccaagcggcagatcgttatcaggcggcgtcacgcgctcacgcctgtctcctcgcccccttcggccctccctcctcccggcgagctcctctaccacgggtgtaccaaccaaccaccagtccaccaagcgcgcgggcgccatcaggtagaccggcccctgcgttagacccaacccaaccctatctaccgtgacgctcgatcggcttcgggttagtttgcgccgtgaggctgagtcatggaagtgccgccactgccaacggcgtcggaaggggagcgccgaagcgtagcgacggggtcgtgcctccccaggctggtctccggcgtcctctcgggggccctcaccggcatcttcgccgttgctggaggcctgacgggggcgttcaccggcgcattggccggccgagcttccgacagcggcgtcctccggggagccggcctgggggcctttgcgggggcggtactatccatcgaggttctcgaggcttcgcgcgcctactggagcgcggaccgatcgagcccgcagagcacgtcctccatgggggatttcatagaacagctccttcatgctcgatttgtgcaagaccagtatgagccatcggcatatatggcctatcgttggcaggttggcattgccgacaatgatgatatgtttgatgtccttgaagatgttttatccgaagggctctcacaagatactctaaagaagttgccacatcatgtggttcctgcaccaattggtgaaagcttgtcttgcgctatttgcctgcaggatgttattagcggagagacagcgaggaagttgccaaagtgctctcacaccttccatcagccttgtgtggacagatggttcattgaccatggttcatgcccagtatgtagacaggatgtgtaggtagatcatgatcgattctgggttatcatgcctttgtaaagttgctaccctcgtcatatagaagaaagatacagtacgtagcatgtaaaaagtcctgcacttgttcctattatgaaaaatggtttacacatcagtaattgagttcaaaaaaaaaaaaaaa

SEQ ID NO: 73152 - DNA, 287 bp, Zea mays
  Clone ID: MRT4577_166713C.1
ccgacgcgtgcgcccagcatccgagatttctcctttggccaggtccccatcgccgcggggctttgcccacctatcccccgcccggtagtagcctatacgccgttgcctagatggagttcatagacttcgtcggtagggtgctcttcgtcgccgctttcctcctatacgcctaccaggagtttaatgaattcggtgctgatggtggaccagcagctaaggcccttcggtccaaattcaacgtgtttgtcaaaaatgtatctgctcatctgggagtagctatgccacac

SEQ ID NO: 73153 - DNA, 174 bp, Zea mays
  Clone ID: MRT4577_166714C.1
taaaaaacaaccagattcaaagccccctaccacctcactctaataagggtgtatggaggggatattacaactttcataaatgtccattcattgaaagctcatataaggatcttacttccctcatacatttcatcagcggaatattctatatttaaaaacccaatccttcaacct

SEQ ID NO: 73154 - DNA, 400 bp, Zea mays
  Clone ID: MRT4577_166715C.1
gcactcgtacgtccaaagcaaaattcccatactttttacgacatcatacttacctcactactcgcgatcgcgtccacttttaccataaggcacccaaattccactttcaacttcaagaacattataaactacatatcaaaatcacaaactctcttggatcaatacaactcaacccagattacatgattcacctacaatcatcataactatatctataatctatcttacatcaatctgccaatatcacttgccaatacatctacactagctaatccaaccagtcaaccaactacttcaattcattataacatactgacatttacactcaagcaatcagaatactagccacgactatatctatattatgacagacactccctcataatgtcgctacattatc

SEQ ID NO: 73155 - DNA, 363 bp, Zea mays
  unsure (1)..(363): unsure at all n locations
  Clone ID: MRT4577_166716C.1
gcgtccgtacacattaataaatnatcagctggaggcggtattgctgtggcactgacgatgactttaggagcactccaaaagaattgcaaaaaattccccaaaaactgattatggagggcatactaaaactgattacgggtggaataaaagtttactccagcagtttccccaaaataaaaactgggggggggcgggaccaacttttaatgcatgtagctagcccacatgcatgtcgttggtttttttaaatttgcatgccactgccctgtgttctctcacaccagcaggacacgttcgtcacgccaccagctagcgtgcgcacgtacgcagtttattgggggaactttgttgtcgcgcatgtgg

SEQ ID NO: 73156 - DNA, 142 bp, Zea mays
  Clone ID: MRT4577_166717C.1
aggtatattaatgaagttctgcttttccttctctgacttttcaacgacagcatagacaccttaggaatctgagctagttgagttgtcagtgctttgcagagatagacatttgggagcagttttgctcagcatgttttaaacg

SEQ ID NO: 73157 - DNA, 285 bp, Zea mays
  unsure (1)..(285): unsure at all n locations
  Clone ID: MRT4577_166718C.1
accccaaccaccaagaaccaaaaggagagggtgttagcccanaacccgcccaatctcccccaaaacggagacagacgccaacacacaccaaagcaaataaaaaagagcggaaacgaaccagcaagcaagacgccagcacgaagggcactcggacccaaaccaagaaacagagcacaagaaacgcacggatgccacccacataccaaacacactggaccacgccagcaccacccgactcgcaacagcaaagaccccaggaaaaacccacaaaaagacccacagcaa

SEQ ID NO: 73158 - DNA, 225 bp, Zea mays
  unsure (1)..(225): unsure at all n locations
  Clone ID: MRT4577_166719C.1
ttcttctggtctcctgtatctgtcctcttggcgagggtttttatagcaggtagatatgacatgctcnccctaccttcccatggctctgaagtcttcattggtggcctgccccgcgacatcactgatgatgacctcctttagctgtttctgccgttgtgagaaatatatttggtgatgttttcctttgttatattctcatatgttaacatggttttctttttttca

SEQ ID NO: 73159 - DNA, 263 bp, Zea mays
  Clone ID: MRT4577_16671C.1
gccagcgcgcagtggtcgtcgacctgcagcccccaccagtcgatgccattgacgcccctggactgcagcacggcataggagaggatgcccatgaaggcgacgccggcgtcgaggcctgcggagagcacgtagttgggccgcgcccaccaggccttgtaccgccggtagacgacgtagttgaacgcgagtccgacggcgccccacatgaggtagttaacggagcgcgccggcggcatcatccccggggcgcccagcagcacagg

SEQ ID NO: 73160 - DNA, 115 bp, Zea mays
  Clone ID: MRT4577_166720C.1
ctcatcgtcagcgacgacctgccacactgaggcgaattcgtcagcgcgagcgtgtgcttcatctaccttcgtgagtggatccaacggtcaggtctgatgtacctcatctgcatcg

SEQ ID NO: 73161 - DNA, 213 bp, Zea mays
  unsure (1)..(213): unsure at all n locations
  Clone ID: MRT4577_166721C.1
gcgggaagaaatgcatgccagcaaccggccactgccaaattgctcctcaatgggtgggtcaaggggacggccctccttgcgcttctcaagcttcctcgngacatgggtgctctttttcgtttcctcaactgctgcctcaacctcttgccctcaacattatccttctttgcagcaggggttttcttcttcctaccaatggcaactccataggga

SEQ ID NO: 73162 - DNA, 1388 bp, Zea mays
  Clone ID: MRT4577_166722C.1
ccggccggggaacacaagccgccaccgttgccgtagccgtgttcttggactctgttacgtgctgccattttgccaggctagccccctcctcctcttcttcctcttcttcttttcgcgacgatcagagaagaagatgacgatcaccattgaacagccccagctcggtgagcttttttctgttttctttcttcgctcgtgttcttctccctcccctgtttgcctattgggaagtttcgtttcatggcgatgaatggtcgtcatggcgcagatgcggtggcggagaggaaagtccccggcggaggtgaccccgcggagctggtgctcgacgccggcttcgtcgtgccggacgccaacgccttcggcaataccttcaggtgaaacagcctactgatttgctacggtgggttcttggggatccgtacgtcgacgccaaaactcaaaggccaggcgcaagcagagaagattggggcttatctagatatgcacatatttatataatggaattaaccaatacgtgttgaggtggattttaagatgaaaactaaagtaatttttactttaatctacgtcaacgtggattgataataaatagtacctcagatcagttcactaaaaaaaaaaaaaaaaaaaaaaaacacgactctcggcaacggatatctcggctctcgcatcgatgaagaacgtagcaaaatgcgatacctggtgtgaattgcagaatcccgcgaaccatcgagttttttgaacgcaagttgcgcccgaagccttctggcggagggcacgtctgcctcgacgccgggccggcggggaaagccgccaccgttgccgtagccgtgttcttggactctgttacgtgctgccattttgccaaggctagccccctcctcctcttcttcctcttcttcttttcgcgacgatcagagaagaagatgacgatcaccattgaacagccccagctcgatgcggtggcggagaggaaagtccccggcggaggtgaccccgcggagctggtgctcgacgccggcttcgtcgtgccggacgccaacgccttcggcaataccttcaggtgaaacagcctactgatttgctacggtgggttcttggggatccgtacgtcgacgccaaaactcaaaggccaggcgcaagcagagaagattggggcttatctagatatgcacatatttatataatggaattaaccaatacgtgttgaggtggattttaagatgaaaactaaagtaatttttactttaatctacgtcaacgtggattgataataaatagtacctcagatcacttgtgtgcttctcgttccgagtcaaagacggaaacagacgcgtgacgtgacgcatttttccgtaaaaaaaaaaaaaaaaaaggcccctagggcc

SEQ ID NO: 73163 - DNA, 328 bp, Zea mays
  Clone ID: MRT4577_166723C.1
gtttcaaatgttttattagtatccaatattatggacaattgatcaaaatttgtctgtttctttttttgtttcttacgtccacttcttcatcgccgcactggtgtaggtgcgtctggtggtttcattgcttcctctgctataatctgcaaccagctgttgtgaggttgttcagagcaagtggaaccagttcacaggggcagttctatctgttctggaaaattttaatacattctgctatcagaaaggaaagaatcttgcccatcatcctttctggcatggtgccagttttaatattcgaaaggaactttggcggcaccctcggcctggc

SEQ ID NO: 73164 - DNA, 2135 bp, Zea mays
  Clone ID: MRT4577_166724C.1
atcttttcttttccttttcttttcttttttgttgggtttccttggtacgtgatcgatctgatatatgctgctgctggtagctgctccctgctctccacatgaattcagcagcacctgcacctataaagagagccggccggcctgcttcagccttgcttagcctcttgcttgcattgcatgtaagcatttctaaggccggccttgcgagagttgggcagctcgatcgcccatcgctagctacgagcagatcagcaggaatgcacgcatcactcggcatgtcaagctcaagcagcagcagcagcaggggttggtcgtcgtactcccccctgctcttcgccaccctgcttacactactactctgctcccagctcgccattgccaaggagcagtaccatgagttcgtggtgaaggaggcgactgtgacgcggctgtgcgggacgcagcagcagcggatcatgacggtgaacgggcagttccccggtccgacggtggaggtggccgagggcgacgccctcatcgtgcgcgtccgcaaccggggcagctacaacgtgacggtgcactggcacggcgtgcggcagatgcgcacggcctgggccgacggcccggagttcgtcacgcagtgccccatccgccccggcacctcctacacctaccgcttcaccgtcgccggacaggaaggcacgctctggtggcacgcgcacagctcctggctccgcgccaccgtccacggcgcgctgatcatccgcccgcgcgccggcgtcccgtacccgttcaacgccggcgacacgccagccagggagatcaccatcatactaggggaatggtggaacatgaaccccatcgacgtcgtgcgcaccgccacccgcaccggcgccgcgcccaacatctccgacgccttaaccgtcaacggccagcccggcgatctctacaagtgctcatccaacggcaccacgacgttctcggtcacgtccggcgagacgaacctgctgcgcttcatcaacgccgcgctcaacacggagctcttcgtctccctggccggccacaccatgacggtggtgggcgccgacgcctcctacaccaagccgtacgccacgcccgtcatcttggtcgcgcctggccagaccaccgacgtgctcgtcaccttcgaccagccccccagccgctactacctcgccgcgcgcgcctacgccagcgcccagggcgtccccttcgacaacaccaccaccacggccatcttcgactacggcaccggcgccagcaacagcagcagccccgcgatgcccaccctcccggcctacaacgacaccgcgacggccacggcgttcaccacgagcctgcgcggcctccgcgcggcggaccttcccgcgcgcgtcgacgagagcctcttcttcaccgtcggcgtcggcctcttcaactgctccagcggccagacctgcggcgggcccaacaacacgcgcttcgcggccagcatcaacaacgtctccttcgtgctcccgtccaccacctccatcctgcaggcgcactacgcgtacgccgccggcggggcgacgccagcaggcgtgttcaccgccgacttcccggcgaacccgccggtgcggttcgactacacggcgccgaacgtcagccgcgcgctgtggcagcccgtgccgggcacccgggtgtacagcctcaagtacggcgccgccgtgcagctggtgctccagggcaccaacgtgttcgcggccgagaaccaccccatccacctccacggctacgacttctacatcctcgccgagggcttcggcaacttcgacgccgccgcggacaccgccagcttcaacatggacgacccgcccatgaggaacacggtgggcgtgccggtcaacggctgggcggtcatccgcttcgtggcggataatcccggggtgtggctcatgcactgccacctggacgtgcacatcacctggggtctcgccatggcgttcctggtggaggacggcgtcggggagctgcagtcactggaggcgccgccgtctgacctgcccatctgctagctcattgcatagggggcctcaactcatttattatgctcaaaattcgtcaaggaacattcttgccgatttataattaattcaatcatataatactattcaaac

SEQ ID NO: 73165 - DNA, 655 bp, Zea mays
  Clone ID: MRT4577_166725C.1
acttctgtacccacattccagcttggcatctagtgcacatccagcccgagcaggaggagctgttgcaagccacgatgtctgtctccagctcctcggagcaagagcaccgagccgctcgagcgcacaagcgaaaggccggtcatccagatccgacctcatgatccttgcgcggcacctcgctccatcaccgaccgcatcgttgtcttatactgcggacgcctctccgccagcctccgaacgaaacgtcctcctgttcccctccgtactatcgcccatactcatcctctgccgactcgcatgtgtctacccgccggacccgtatcctccaagtggctcacactgcgatctcccgacgatcttgcgtaggaccctgacccctagcgtccagtgtcactgcgtcagctaatgctgccccatttgaacactgctacctctctctctatgcactagaccctgcgaggcccaatatgacccctgctgcagagtcggatgaatgcgtgaagcatcacaggctgtggccgcctctgaggaaacctccaagagcatgcttgtcacgaggaagctcgagaagcagactgagggactcatccttgacccacaccttgaggagaccatcggctatgaacgtgtggtgtaatgcatgtcctcccgccct

SEQ ID NO: 73166 - DNA, 441 bp, Zea mays
  Clone ID: MRT4577_166726C.1
ctcattggcatgctaatgaacacttgcatatcatctgagtgtggtattatgcatcctcacgggtcaggacagattggtgtgcttccataacatgattagtaagttttagtttttcttccttcttacttcagagatcttctaaagattggaactggagcagcaaaccatgtagaaagaagaaaagttaaccgactacatgttgaagtagtcatagtgattgcacatattgcatctgattcagattgttgtatggcaaattgctcgtccactcatgtttgaaccacgaaggttttagttatacattttcatttcctaaatagttgtttctcctaggccctagtgcggtacattccccatgccaagacaatcttattttaatttgacaatggaaatgacttgttcgtttgacttataacttactaacagttcaataactctcgt

SEQ ID NO: 73167 - DNA, 514 bp, Zea mays
  Clone ID: MRT4577_166727C.1
tttttttttttttttttttttttttttttttttttttttttttttttttttttttttttttttttttttttttttttttttttttttttttttttaaaaaaaccagggaaaaaaagggagaaggaatgggggggaacaaacggggaaaaaaaaacgggaaagggaaagggggggggaaaaaaaaatgaaaatgggggctggcccccccaaaattcccccaaaagcatgcatgttcggggggaaacgggcgcccctaattaaaaaaaaaaaaaacaattaaacccttaaaaaggggaaagaaaagaccgggggcgaaaattaaaactggaaaaaggagcgggaaccaacctcggggaagaaattggccgggaaaacttttttggccacaaactgcctggcggactcgttggggaagcccatggaaaaggggccacggagcgggcggttggggtcaatcccccaaagggggccccaaaaatcgggcatgggccccaagggggcgggagttgctctg

SEQ ID NO: 73168 - DNA, 305 bp, Zea mays
  Clone ID: MRT4577_166728C.1
ggaaccctgatgaactttgttcaatggtcaaaagtccacatttttggggattttgacacttcgggcaaactaggggggttccaaaaataaagggttgggccaccttttttagttttgtggcacgcttttttgggcttgtttccagattattcaagggacaggatttgggcccaacccagggccccccccaagaaagggaaaacacacacgggtggcggttagggtttcaacttaaaagggttttccagccagggttttttctttgcacattggattgggcttcgggtttttttggaaacaaccaa

SEQ ID NO: 73169 - DNA, 178 bp, Zea mays
  unsure (1)..(178): unsure at all n locations
  Clone ID: MRT4577_166729C.1
aggaggatnagcccgccgnctgggtctcgagaacatgttcagccgcctgggaagcgtgtgggagactgggagtctgtcttatttcgggtagaatgggtagttcgggtaccgcggatgaatacccgcttaggcccacacttactttgggtctttagtattggtaccccccggtagccgt

SEQ ID NO: 73170 - DNA, 2520 bp, Zea mays
  Clone ID: MRT4577_16672C.1
ccagaatacctggccggcgttcgcgtcggcggggaggcgcctcatgatgatcatcgtcgctgccatgggctcgctcatcctctgcgagaagatctacctcggggccgtcctccgcgccgcgatcatcgtggctgggctctactccatactttttggcaaggagaaggatactcgagacaaagaggcggaccccaaaacggcgcttacatgggagtgtgcgccgcgtcatattcttcctctagagttgagcggaatcgcgaattgaaaacggaagttaccaattcacccgactcgatagacacaccgactctgctctaagcgagaatccgaggagcgctgccaagcgcctccgcgacgggatcgacgcgacttgattcgcgagtttcaacgtcgcgaggagagcagaaaattacgcaggcagagcggctgccggctgggtgttgaagctagagcggctaggagcaggttcggagcgctaccaaacaggcccttaacctaagcgctcctgcccttcggatccggaagttggaggcgcgcgaggaggcgaggcttgcaaggtctcccttgctagacggcaacggggtgacgatggcgcacgagcggggcgccgccgcatccacccacccagcggctccaacctccgaggaagacgcgctatttattgatttattacatgaagcgcccctgtctggtcaccgggagcctagaagcatagttggtgggaccttgtactgtatcttattggtaggttttgctgctgttgccatttcagctccatggatatttcttttcgcgccagatatgatctctccattgctatgtagctccaatgctatccttctcgttcttacaggcatttttcaacaatattgggttcaccaggtcaggaaagtgagattgcagggctattacgattttagccagaaactgaagcgtattgctcgacttccatttgctactattgcttgtgggactgctttgatgctcttaatcatggtctggcaacctcttttacaaatactatcagtttcactgcttctcaggattgccattgtagttgaagtcacgtgtgctggatgttttatgggcttatatttatggcacatccacaaatacaactctttgaatgggcagcctgatattttgcggtcattatattctgcactccaaccatctaatactttggaagatcgaagatatcatgatgcccgtctttctgatcagcagatggcgttacttcagtaccaaagagagaatatccattatctgagtgaggaggttctccgcttgcaagaatgcttaagcaaataccagagaactgctggaaccactcctcaggttgatcttgcccatcttttagcaactcgtgatcaagaactccgagcactcactgctgagatgaatcaagtgcactccgaacttcaacatgcccgtggtttgatcgatgaaaaggattcagagctccagcgtatccgtctgagcaacaaccagtatgttgaagaaaacgataggctcagagctattctcggtgagtggagtgctcgagccgcaaagcttgaacgtgcattggaggcagagcgggtgtcaaacgtcgaattgaggaaaaatattgcaaagtttagaggtcatttgtacaaagagcaggaggcctgacttcggtatgttatagctggttccagaattttacctaaggcacctgactaaaggcacaatttttggatatagaagggtatctcggtctggatccattcgaactgggattggcacgtgattgttcgatgacgcatggaatatgcgtctagtggtttgtagaatgcgtagtttgatgtacatgtgttcgtaggtttgagcatgtagagtatggtatccctcgaaaaaaaaggaatatggtattcatgtggttgaaaactgctgagtagtgtgaacatggtagtgtcttgtggggtgtggttcgcaggagacaaggggaggagccatggaaatttcatgcaggatagttgataggatcccccccaaatttctatcccttattttaagaataattttccagatttcaggcatttaaatttgatttctcattggaaatgttgccagccctggtcgttcttgtaggtgtgcggcagataggattatgcgtcctaactgaagaggcagctaggaaagaatcttaacgcaaacaagaacaacaggatcccccctccgtctccaatcaatagagttcctttccgataaacgacgccgtccaatgaaatgtacccccttcattcccagacccaattgggcccgcccttgaagcttcatgggccactcgcccctgaacccagttgcccctatagttttcttcgtcggatttgtttgttttttcattctatggtctattttattctgtgggactcttttctttcctttggtgtttagagacatttggtaataattcagattagttcatgtcaaaaaaaaaaaaaagaaaaaaaaaaaaaaaaaaaaaagaaaaaaaaaaaaaaaaaggcccctagggcc

SEQ ID NO: 73171 - DNA, 226 bp, Zea mays
  Clone ID: MRT4577_166730C.1
cggacgcgtgggatttggcggtatgttttcatgcttagcacgaaagtcttgcgggtggcctgcaggggctggtgggacagcggaaggagtgaacaactactacaccagctatgccgccgtcaggcacctgcagaggggcaacgccagggccacatgttacggacagcccaacagtgcttgtccctactacaacggcggcccttgctgttttaataactataaccag

SEQ ID NO: 73172 - DNA, 260 bp, Zea mays
  Clone ID: MRT4577_166731C.1
tctcataaaggaactttttttttccatatctaggattatgatcaacatctatacttaatgcacaatacaagcctacaaaaataattgcagtaaatacataataacggttatgcataaaaccgggacttgcctagaatccaacactagctagtgtttgctagagggtaatcactcgacgagcatccactttttcagtccatccttcttcgggttgtccaccaacttcatcttgtggtccaccccccttcacgtccttcctg

SEQ ID NO: 73173 - DNA, 723 bp, Zea mays
  Clone ID: MRT4577_166732C.1
tttttttttttttttttttttttttttttttttttttttttttttttttttttttttttttttttttttttttttttttttttttttttttgggaaagggggcccccccttaaaaaagggaaaaaatttttttaaaacccccaccccgaacatttttttttaaaggaaaacccgggaccttttaaaaccccccaccccaaatttagaaaaaggacccgggggcaaaccgggggggccccaaccaaaaaaaaatttttttggcccccccaactaaggttttgggggcccggggggaaaaacctttttgccccaaagggcccctgtttccaaccaagccccggaaaccgggcccccaaaaaccccccttcccattgggaaaatcggggggggcccccccccggattccttttacccccaaaaagtcccccccagaagggaaaagggggaaaaacccccccccgcgaggggggggggggggcccaaaaaaaaactttggaaaaaaaaaaaggggcccccccccgttgaaaaaaacaacagaaatttttttcatcattttgggaccccccggggtcccccccggaagaatctcccccccaggccgggaagcctggcccccccccggggttttaaccaagggtttgggcaaagggaaacccccaaattcccgtttttggaaccccgcccccgagggggggtatccaaaaaggccccctaccctttttg

SEQ ID NO: 73174 - DNA, 388 bp, Zea mays
  Clone ID: MRT4577_166733C.1
atatttctccattctccatctctcagacgtacactgactcgagttggtcacttcctcctatgcctcgcgataactctagccgagcctcctgatatctgcgccgctggtcgaggcatgtctgataggatcgacatcaccctccatgacttcataactaagaacgataaaagtaacctctcctccgcgcgggcgcgtctgatgcgacaactgatccgcgctgttcgagacccccgcatccacctacactaccagaggttccttgaaaagcgattgcaacacgaagaccacctaccaaactacgtacagctctgacgctgatagtgagcacaacatgtacctcatgacatcctcgtaatagatgaccatgaccatgagctctccgagttcg

SEQ ID NO: 73175 - DNA, 1026 bp, Zea mays
  Clone ID: MRT4577_166734C.1
cgaggccggccgggatcgtgcgctgcacgcgaagcacagctcgccttgcctctgttcagctcacggcggaagacgagggcgacagcacacgagagggaggcaggagcggaagcgcgcaaggaggtcagtgaagcacgcgcccacggcccacatccagagcagcacagcaccgcgcgatggcgtgcatcaacatgtacaaccctgacggcgcgcccgggttcggcggcgggccgcagccgccggccgcgctgggcccgcgcgtctccttctccagcgacttcgccgtggagccgccgccggtgcagaaccgagcgatgagcctgcggtgccaggaggaggacgtcaacttcgagttctccgtgggcagccaccccatgatggcggccgaccagctcttctccaagggcaggatccttcccctcagggacaacggcggctgcttcgccgccgcgcggccaaccaccacgctgcgcgacgagctctgtggcggcggcggcggcggcggcggcgccagcgacgacgacgagagggcctccgccgccggaagcaaggggtccggccggtggaaggagatgctcggcctgcggaaggcgctctgcgtcggcgtcggcggcggcggcggcaacggcgctcccgccaagaaggttggtagcggcaagaagggcgtcgccgacgacatggcagcgtccaatcaggatgcatcatgcgtctatctgcatgaccgtgccgatgggaaaaacgaatccgacaggcatggggagtgggtgcacagcgccacacacttcacatgcatgaagcttacttttgctcggctcctccttcctgatgctgttgttcgatgaacctcttgaatagtgcttgccatcatcgacccatgggctagctagctaggttttgtagattgttgtcagcgagtctgcttattgtgtgctaggtggcctggccgctgaaaagaagccaccccaaaaaaatgtgtgtaattttccttgtaaaaatattctaagtgctatgattttctctctatcc

SEQ ID NO: 73176 - DNA, 142 bp, Zea mays
  Clone ID: MRT4577_166735C.1
tacgcacgcatgctacatcattactattatattatggcacctaactataattaaccggccggcgagcgccaacaacgcgactattataacaaagccgtcacttaccaaaatagccttgctgcacaacctccttccttcagct

SEQ ID NO: 73177 - DNA, 297 bp, Zea mays
  Clone ID: MRT4577_166736C.1
tttatctttataaatctcaaccaatatattgagtatgggtaggaaacacatgccggtatgagggcaccattatcgagtacatctcatatgtaatctaaaagatggcacctccaacgatgggttgatgcctcgacaagacatgattcatcaaaaagaaccgattgtatggcatgaattgttgctgctgtaggaaggcagagaccaatgtgttagccactgccaatggattaagtgactgtagtcgctgttgtaagtacccaccagagttcaacatacttacttgatttaatggaaaca

SEQ ID NO: 73178 - DNA, 624 bp, Zea mays
  Clone ID: MRT4577_166737C.1
cggacgcttgggcggacgcgtgggcggacgcgtgggaaaaaaaaaaaaaaaaaaaaaaaaaaaaaaaaaaaaaaaaaaaaaaaaaaaaaaaaaaaaaaaaaaaaaaaaaaaaaaaaaaaaaaaaaaaaaaaaaaaaaaaaaaaaaaaaaaaaaaaaaaaaaggggcgccctttttaaagaaggggggtttacttccccttcattcaaacttaaaattttttttttagggcaactaaaataaatttaattgcccggtttttaaaaacttggaaattgaaaaaaccttgggttacccaaattaaatccctttaaaaaaaatccctttttcccaatttggttaaaaaaaaaaaagcccccaacaaatcccctttcaaaaaatttcccaaccttaattggaaaatggaaccccccttttaccgcccattaaaccccgggggttttggtgtttaccccaagggtaacctttaattttccaagccccttagccccctttcttttcgttttttccctttctttttccccaactttcccggtttttcccctaaaattttaaaatgggggcttcctttaaggttccaaattaagtttttaagggaccttaaacccaaaaaaattttttaaggg

SEQ ID NO: 73179 - DNA, 215 bp, Zea mays
  Clone ID: MRT4577_166738C.1
tttaaatgtacgggctgataattgtgttgagtgtgaactactgagaggttgtgtggaaggaatataataaggatggacaagatttaaatgcatgcaggttgaattgaatcagtatggaactaagattgtttcgaattttggcgatcgacaggtttgcttttaacagaattagatttagggccgttggtgaatagggcagcttgaggaaagcgggg

SEQ ID NO: 73180 - DNA, 662 bp, Zea mays
  unsure (1)..(662): unsure at all n locations
  Clone ID: MRT4577_166739C.1
ccggccgggaccttgcaaccttccttgagttctcctatgcttcgtgtgtgtttcaccggtgtgaggggagagattggtgagcgatccgccgccataaaggctctgattcaccgtcgttgcggcgtccggtttgggccggagatcttcgtccggttccaggggcctattccatggcgtcgcgagggtgcatgtgacgatagggatgctgggattgctcgtcggtgtcaagaaccctcgcggagccgccaaaccccgtcgtcggccctcagcaccgatctatcaccgcagtgaggtcacgagaatctaaagatcatcctgtcacctggaatcttgagtctcaggtcaaggacaggtaccctaggatgaggaacatgaaggatggcgtgatgtgttcgtgagaggtctaggtcgtcgtctcccagtcaactttgggttgctggattgttgtcttcgtatgatgtaattatttattattttgtacagaactccattatatagtaatgttgtgacattcgtttttgtaccatgagtcatcatatgtgtaagacttggtcctagcacacttggtggttatttcacgcccgggttttggtgccccaagaactcatgtgtgacaactaatgagactgcttgaccgcanaaaaaaaaaaaaaaatttgcgg

SEQ ID NO: 73181 - DNA, 292 bp, Zea mays
  Clone ID: MRT4577_16673C.1
caacaagcaacataaaaagtggaatttagtttcaacaatagaacaacaacgggggccgggatatattcgctgcggatgctcctcgctctttctgcatgcaacgctaacgcgacaatgctccctcaacgctcacaagctcctataggttccattctttcctcgataccttccatcaacgattgcttaagtctgtgaaaacccacctctgcaaccctatacgctccaacacgcaatcgtagcaagcaacatacctttatcacccttgttgcaacaatcgccagccctatctttg

SEQ ID NO: 73182 - DNA, 348 bp, Zea mays
  Clone ID: MRT4577_166740C.1
accatgttttccctatcatctgccgccgccacagccccttccttcgccgcaccagcgccagcccgcgccgcgcccagaaggaggtccttcaccgtgcgcgcctctctccgcaaggccaccggcaccgccgccgtgtcaatggctgccagcgccctgcttgccggcgctgccatgatcccaggaggtgctgctgggagcatgcgaccgtgggatcggcttccagcccagcaagctcaccgccaaggaccgctgacaccatcacatccaagaacaacgacggcttcccgaacaacctcacactccgacgaacacaagctgtcgagcgtcatcaaagtcaccaagatctct

SEQ ID NO: 73183 - DNA, 625 bp, Zea mays
  Clone ID: MRT4577_166741C.1
gtgagtgtgtgtttgctaatatgagcagcagttgctaacggatatagatactatgcgagccttggtctccggatgtcgtctaacatacattactcgctggtgagccgaagtgataaggggacgacagtataccatgtgcatgacccataggctagaggtgatcgttcatagcgcttagtgcgacactcgtgccatgagagcgacagatattggaaagcatgcgattacatactttgacgcacctattacatattataggttaaatgtagctgatactaaatagatggcattttaactagctttggtattacgggtttgtatgtgtgccaattggtaatatttattgtatcactgtgagactttgtagggtaggcaaagtgatagacgacgactgctgtttagtgatctcctgtgaagtaaacacaatctacctgctatcatctagttcgcatgatcaaaatgtgatgccactactgattcatttgcaacatgctatgatcgtaacgatacactttggatttggactcctgcccaagatttaccaaaaacagcacatgctatgtattctgttaaagcagcagtgaaatggtatagaggaggtcttttgccatggagtatgatcttg

SEQ ID NO: 73184 - DNA, 174 bp, Zea mays
  Clone ID: MRT4577_166742C.1
tgagttatttaccattgttttgatggatagcgaccacattcttttacacgttcaagccttggttttgtgtaatggtctttgaacgatactaaaattgacccccgcgatggcctgtgttactatctacacaaagtgtgctgggactcctaactgcacacagttgacctaatctat

SEQ ID NO: 73185 - DNA, 233 bp, Zea mays
  unsure (1)..(233): unsure at all n locations
  Clone ID: MRT4577_166743C.1
ggcagagcggaatacctattttatgctaacacacacactcaagacacaacacaattcgtaggcagcgagcgactctactatacctctgagagggaccgtgccaaggatagaaganagagagattcgttatttctggctgggntgagaaagggtggggttaaaggtgattgnnnaattaatctcattttttagttttccgccctcaaaanatgaggggggggtttttttttttt

SEQ ID NO: 73186 - DNA, 548 bp, Zea mays
  unsure (1)..(548): unsure at all n locations
  Clone ID: MRT4577_166744C.1
gtttttgtgtggttttttaaaaaaaaatttttttttttttttttttttttttttttttttttttttttttttttttttttttttacaaaacaaaaagaaccaaaaaaccaagaataaatcccacatacattttttgaaacaccaaaaaagggggggggggggggaaccaaatatgttttattcaatacccagcctaaaactaaaaaaaaaaaccgccaaaccccacccctgctcctttttttgaaaaaccctcccgggctaaaagggtcgaaaaaaaaaaacttggccctgcccgcaaggatgaccccggggagggccccccccggggcccccccattgggggtaccccaacaactggggcccggggccacatagcacccctttacgccggggttctcccctgtgcccgggggccctgcgggggggccccggtggttgaacccctgttctcgcgcccccctgggggccnttttttttttnagttggcctggccccccccgccggggcgcggcccggggtttcggtccccccccccctccccggtcccc

SEQ ID NO: 73187 - DNA, 103 bp, Zea mays
  Clone ID: MRT4577_166745C.1
ctcacacgtactcccacgcgtgcagagatacagcttacgccttgttggttgacataagattgtacccgggatcgttcccgctaagaaaagttcatataaatta

SEQ ID NO: 73188 - DNA, 1792 bp, Zea mays
  Clone ID: MRT4577_166746C.1
ctcgaggccggccgggacgacacgtcattgccgtggcccagcgctagttcccagaagcagccgcgagcttccaccgccttcttcccgtgcattttctcgagcgacggagcgatccgttcgggccgtccaccacagcgagagagagcggcagaggcgcagagcgcaaccgagcgagagagagaggacggcgacggcggagatgatggggtggggagaggaggtggtggctctgtccctgcgaggctacggctatggcaacgaggaggacgaccggccggagaagccgcggcggtacggggtgacggagatgcggagccccttctactccttccgccccgcaaaccaggcgctccaggaaatattggattctcttagtccattcgttgatggtttgaagttctctggcggatgccatagtttgatgggaaaggagttggttagagagatcactgatctagcacacaggcatgacatttatgtgagcacaggtgattgggcagagcatttgctgcgccaaggaccctcttctttcaagcaatatgtagaggaatgcaaggccttagggtttgacacaattgagctgaatgctgggtctctcaacctccctgaagaggctctgttgagactagtccgcctcatcaagagtagtggtttaagggcaaagccaatgttttcggtgaagtttgacagttctgatattcctgcgtctggtgatagggcctttggggcttacatagctccagtcaaagggaagacctcagaaagagttgaagatgttgacctgctgattaggagggcagagagatgcttggaagcaggcgctgatatgatcatgatcgatgctgatgatgtttgccagcgtgctgaatctctgaggacagacatcatcgccaagattgtaggccggctcgggcttgataaaaccatgtttgaagcttccaactccaacacctcggagtggttcgtcagacgttatggcccaagggtaaatctctttgttgaacactctgacgtgatgaatctggagcgcctccggggcttcaacatgcgcagaagcaactcggcctcccgttttgcctcgccgttcttcctgatctaatgggctaatggccattccccttcctgagatgtgtaagatacttctacatgttctcaccctcgcagagcttgttatggcctagagatgtaaccgcctttgttaatgcctcgatgtagcccccagcgagcagcgcatagcacctgttatgttgtcagcgtcgctactgataatcggttctgttggtcaatgctactataataatcggttgtggtgcaaaaaaaaaaaaaaaaaaaaaaaaaaaaaaaaaaaaaaaaaaaaaaaaaaaaaaaaaaaaaaaaaaaaaaaaaaaaaaaaaaaaaaaaaaaaaaaaaaaaaaaaaaaaaaaaaaggggcgttttgcattcccgggtaaaaaagaaaaaacagtggattttaaactcgattggaaggccctttcctgaaaaaaagggaaaaatttgttcttttgttgttcccccccctactcttttgggcccttgggccccccgttccttggggggcaacccttccgcttttccgggtcttgccggtccggtcttacgcgaagttcggggggaagttttccgaaagggggtttttctttaatttgggccccaatactttaagggactccggggggggaccgggccaccctgccccctcggggttcgttccctccgccttaaacggggcccagggggcccccatcggggcccaggggggtttcggccggtt

SEQ ID NO: 73189 - DNA, 290 bp, Zea mays
  Clone ID: MRT4577_166747C.1
gaagaagaaacaactgaaactgcaaaacagaaatatgaacagttcagcagacctggcacacactccatttacaggtttacgttaagctcatctgaacagaactactggagcatgggcgaaatatacaatagagatatacgtctggtgtgacaaaagaccagcgaccctttcctactttttcccttgaagagcagaggcaaaaggaaaaggcaagcaacaccgtcgaaataggacatgaacatgaaacttactgttttgtttacgttcaaaaacttgttgttttgttcctt

SEQ ID NO: 73190 - DNA, 406 bp, Zea mays
  Clone ID: MRT4577_166748C.1
gggatataaccaaaagacacacaaccccccagaaacaaagcccaaagaaaaacccacacccccaacctagaacacagggggggcacggggaatccccccaaagagggggtaacccaacactaacccccggggacaggggggaacccccaaattattcaaaacaactggcggattccgcgctattagaccagggggcccacaaacgaccccatttccccccggcaacctgggggccgaaaaacttgggggcccaaaccattatggacagggcgggcttgacccccggggacctgcgggtcttgagaccccaagcagggttcacccaaagggagttgggggcaaacccggggagcatttttccaacgcgggcgggaaactcctcgggggggggaaccctggggaaggg

SEQ ID NO: 73191 - DNA, 222 bp, Zea mays
  unsure (1)..(222): unsure at all n locations
  Clone ID: MRT4577_166749C.1
tcggcgcgcttttgcatcattcactattcccncannttagcaaacatgtctacggtgctccagcgccctattctttgttactttccagtgcttcggccgtaagaagactgttgntgcctactcctacgccaagccggttcgcgttctgatcaaggtgaatcgggttcccattgatctcattctgccggagatgctccgtctttaggccttctagcccatcct

SEQ ID NO: 73192 - DNA, 381 bp, Zea mays
  unsure (1)..(381): unsure at all n locations
  Clone ID: MRT4577_16674C.1
cccccccctaaatanttcccgcgacaacnangggggaagcaaaagcctgcatcagtgaaaaaacgacacgcggcgcaaaaaaaacagccgacaacggaccaaaccagaacggacagcgacgcataaaaacacgaacgggagcaacgcccgggcggtgacgcagacaaagcagaaggacaaaaatgacacacgaggatttacggaacgtgcggaatggacgtgacacggagagacgggacgggggcacgtacacggcctcggaaaaaaacccgggggatcgggggtacccgggaagcacaaaaccaactagccgcgaccagactaatggctgccgtggaacgccataacaagggaggcacggaccacgggggcacaaccctg

SEQ ID NO: 73193 - DNA, 532 bp, Zea mays
  Clone ID: MRT4577_166750C.1
tctttctcgctcggtcggtcggtcggaaaaaacttgaagaaaaaaaggagcgtctctcgcatcgcatctcatcttcccgaccctctcgctccgccgccgccaccgccccccgaccctcgccgacacgccgctcctccgccgcgcgcgccctcctcctgcgcctcccacgcggtcccgtcggatgctcccctccgccgccccgctgcccctccgccgagcgtgccagactcctccaccgccgccgccgccgcctcgttcttcttccaggcccgggaggagcccgtgaggttaccgtagcgcaagcccaggcagcaacccggctgagctcacccgtcttcaccagcaggggtcgtccggccgccaccgcgcgtcgccggtcgtgtcaccgccgccgcttctgctgcttatgagagccctcactgccgccacaatctcctccccgatacgcgccctcctcctcctccacccctccttcccctcaaccttccggctccctcccaccatgaagccctcctcctcctctggataacga

SEQ ID NO: 73194 - DNA, 553 bp, Zea mays
  Clone ID: MRT4577_166751C.1
ccggccgggattctcgatcaaccctggcgactaacccatccagcaagaatggacgctgatacccccgcagaagtgcggtctggccggtggcctcaacaaggggcacaaaactacccctcatgttgtaaagccccgagcttcccgaaccaagggtcacctgataaagcacaccgttttcgttcgcgaggctgtgaaggaggatgctggcctcgccccctactagcgccgagtcatcgaggtgctcctgaactacaaggacaaacgtgcccgtaagctcgataagaagatactcggaaccttcggccgcgccaaggacaaggtcgaagaactccaaagtgtcatcgctgagtatcgacgtgctggtcactaaatctgttaatctgatttctgggaatctgtaaccgaatagagttcgcatggattggaagtgatcacggtatgatctaaaaaattaacgagatttgatgctccgtggcaaacaagctgcggctcaccggaataccaacactttcaagcaatttatggcaaaaaaaaaagaaaaaaaggagtggcc

SEQ ID NO: 73195 - DNA, 109 bp, Zea mays
  Clone ID: MRT4577_166752C.1
cggatatctcggctctcgcatccattaagaacgtagcaaaatgagataccagtgcttaatgtgtactataaaaccacgggccccaacccctcaagtatcctcaaaagtc

SEQ ID NO: 73196 - DNA, 466 bp, Zea mays
  Clone ID: MRT4577_166753C.1
atcattcttccatgaactctagcacctgactctcccgaatcgctttaatatccatgagcacgtgcactaccacggccaggacattctcaggctagcccccaacttacgccgggatatccacacctactgttgaacccgatgccatcgtcaaagttatcgaagacaccgagttatgaacacgccgagcttatggtgaaatcttaaggatccagaagctcctgtctccttacatcaataacaggcctatgaacagacctcactacaggcgtgcaatgccgcgaccacaaacaaagacctctctaccaacaataaaacctgtgtggggtatgaaaccctcgtgccgtgcgcccttgcagatgaaaaacctggctcttagaccaagaccacgcttatggtggatgctaaaaataactccctcgtccatggaacctgctacaagctggctcgttcaatgtgaccctctgcg

SEQ ID NO: 73197 - DNA, 225 bp, Zea mays
  Clone ID: MRT4577_166754C.1
atgagtgcatgccatttaaccatataagctttgacgaagaccggaaagcatgacacatctgcccagggccccaccaaacgtgtaacgagcagccataggtcctggcacatcaaccctggccatggccgctgcaactacatatccatcgataactagatcaagagtgaaccttgcttgactagacctagacctgttgctgctgctccttggtccacttacaccact

SEQ ID NO: 73198 - DNA, 201 bp, Zea mays
  Clone ID: MRT4577_166755C.1
attcggctcgagcggaccttgaccgcgaccgttgcgccagaggctcccgattatcacggaccggggagacgaaggcatttccttgtggacaaacctagccgccgagaaactaaacgcatggatctctgcgggagatcacttgtaccacccttcagttaacacaggagctagtttgaacaacctgcaacgcaggccagtcct

SEQ ID NO: 73199 - DNA, 2553 bp, Zea mays
  Clone ID: MRT4577_166756C.1
atgctgatattgaggaagaaaatgctgatgaagagcattttgatcccatcaaaacccagccacctagattttgagaagtctactgtgtctgaagccgacgtgcccatgatgatgaaactgggctactttggagaagctaagaggaagtttgttcgttttgccggagaagaaaccactccaacgccaaaggatgatgaagtagtagttttcaaaagtttcttcagagcaggattacggtttcccctaaacgagatgataggagaggttttgaaaatttttgaaatttaccttcatcagttgacccctaacgctatcgttaggctcagtatcttcatctgggccctccgaagccaaggggtgaacccagatgccgaagcattctgccgagtgcatgagctgcactatcaaacaaaggccagagaagatggtttacatgagaattttggctgttataatttcgcgtatcgcaaagatacgaaggcttcggtcctcagctatcgcaccaagtggccaaccggctggaagagtgaatggttttatattaaagccaatgaaaagagaagggggaaactgatgacgatggtcatgcacccgttggctttaagcttcagaatgaccagacttttgtgcaacatgcagccagggtcagcatgccaactatctgtattagagttcagggtggtggctgaacagatcagcactagggatctggttcaagaatacttggctaatagaacatctccgacgtcaagtgaatggagcatactgaagctaatgggaacaaagaaaaaacttgagcttgttcgattgccttatcgttttaaatttgagaaacagttcaaggagccttgccaagagtggctggaaatgattgagacaatgtgcaatgaaattttgggaaactataccaaaaaagaagatcaattaatgattgcagcctttggcacccgggccaaaacgaaggttgaaccaggtgccaaaggggcaaaaaggaaaagggttgtcagcgttctgagcaggcaggctaccagaatggtgaaggaagatgaaaaaactttaaagaagagaaaatccagtcccgagccgaaagctgtggctttgaagaagagaaaggctgctactctagagccgaaggtgactgaggtggaagaggaaactccttcaacacctcctgctgccgaagtagaagagattttaaaggtaatgactgaatctttacctatcatgctgctaagtcctctgggaccgcaactaacgaagctttttcagaagaaaggagaaccttcgactacaaagagggcagatgggctgaagaagcgaaggattggtagcgtgatgcaagccattgaaaagacgccaccttcggccttggcatcgaagatagcacctactataagcgccgaggctgctgacgaagcaaacgtatcagccgaagctgcagctgccaccaaagctgccaacctggaggctaccttatctgggattgataaaatgatactgggtcatggcccagtgcctgacaaagggaaaggaattgccgaagctgcttcggaaggaaaaggtttcgatcttcagaacctggttggtcaagaactctttgaggccgagaagaaggagctacaggaatatggcatttcgtgtggctaccagctaggagccatgctctttggtggaatcgaagaaggggccttgggatgtgtttgtgaccgtactggggcgaaaataatcggcactctatcaaagagtatcggttttccgaagcttgaagccgatattagcagctaccgacgacaacatatcgtcggtagtttgttttattccaactttaagagtatgctgctgagcaaagcgctgcaaatgcaacaagacctcgaggataaaaagaacgaaattataatcgagggtctagagagcaaaatcaaagaatacgaagcttctcttgagaagaaagatttcctactccaagtagtggaaggttcccttgcagaagcacaaaccaaaaatgctagattaaacagtgagcttctccaaaaatcagagagcttcgaacaagaaagagaagatttgcaaacaaaatacgaagctgaagctactgaaaatacgaagctgaagcaatccttggaagagcttcggaacatgtgtctggaatttggcacccgttgcatacaacgactaaagaaggtttttaactcggttggggccagcgatgagaaatttaccccttcagccgaaaacatatgcagcaccttcgaacatgttgaaggcgaaatagaggcactcgacgaagtaatagccgggcactgtgacttctgtgccctgctagcttcacgtggcacagccgcagcaattttgaaggctcgctatacgcacgcaaaaattttaaatagaccaaacttcagcctatctgcatcggacttggttgacatccccaatatagcccgaagcatagggagcagatttataacacaaatttgggcaaagggtggtcgagaattagctagcgatgaggcccgaagcctgctaaagtcggatgacgatgccgaaggtcaatag

SEQ ID NO: 73200 - DNA, 1031 bp, Zea mays
  unsure (1)..(1031): unsure at all n locations
  Clone ID: MRT4577_166757C.1
ccgacgcgtgagaatacggaaagagccaaagctctgatcgagctagcagcgcgaaagagaaataactactacctcgttaccacagatcgatcgcactgctggccctgaatccggcttatatatatagatatatatatatatatatatcgatatatatatatatatatatatatatctatatatatatgtatatgcctatacacgagtagttgtctgcattgtcagcgttcaagtggaggaggaagaatctaggggacaggatcactctacgccaacaactagtcgctccttttggaaagacgaacacagcatcggtgctccatgagaccatcgagtacatcaagttcctccacgaccctagttggtgtccttagtgctgcatacttgaagaacaacggtccatcataattcgccacgagggtttcagagctcaagtcctgacaagtcgtccaaggacgacgacagccatgccagcgagatttcgctcaagggccgggggctgtgcttggtccccatatcgagcacgttcgccgtagccagcgaggtgcccgtcgacttcgtgtggagcactccgttcgctgccaactttaggtagaagaaggatgagaattgagaaagagccaaagctctgatcgatcagaggcgtcgaaagagaaataactactacctcgttaccacagatcgatcgacctgctggccctgaatcctgattatatatatatatatatatatatatatgtttcttagtctagtgacctagtagctagcagtgtatgactgtgtatggtcatggttatctctcataactgtactagtactaagcttattgcagactaagctttgctagctagagatgaacctttggaatgagtccttgaaagacttggactcattctccaggttcatctatctatccacccagggtgtaagctaataagggatcacctaatatatttgagagggcacaaaaaaaatctaaaaagcggccaaaaaaaaaaannnnnnnnnnnnnnnnnnnnnnnnnnnnnnnn

SEQ ID NO: 73201 - DNA, 306 bp, Zea mays
  Clone ID: MRT4577_166758C.1
atggatacctcactcatcaccttccgcctccgggactcctacgcctccgggactcctacgcctccgggatatggatacctcactcatcaccttccgcgaaaggttccgcccgcgcggataagcggttctgctatcgaaaaagtcctaaatgctcgggtagaaaacgactttcgcgctttcgactatatcgattgcgggatcctaaaaacgacgagagtacacgtaagcggcaaggccgaccgagccgagggactcctacgcctccgggatacggatacctcactcatcaccatccgtgaaaagtaa

SEQ ID NO: 73202 - DNA, 194 bp, Zea mays
  Clone ID: MRT4577_166759C.1
actcgatccatctgactctccgctggtcgctcactcttgcaactccatccttcactcagtcttagtctcttattagctctaggctctagctagccgcgcgactccttcatgtagccatcagccttctcatcgccaccaatgggcactgccgaggtccagactccgaccgtcatggcggctgaggaagcgcccgt

SEQ ID NO: 73203 - DNA, 393 bp, Zea mays
  Clone ID: MRT4577_16675C.1
acggcgaccctttaataggaagcttgaaaaccttttttatctttagcccgttcgggggggggaacctttcaaactttccggcctacggaacctccttaagccccttgttgtggggcgttaaggtcggccttgtccacggttacttcttgggggggccttttgggctaacgggcccgttccgaaaaacccccttgcacggccaggccggtccgcttggatcctccggcctgtttgcaatcctaagggtttgcttaacaattaacggggtcgcctttttaaacaagggggacccttcaacggggcctttgttaacgcttactcggtggaaaaaggaggccaacaagttgcaaacttccaacggttgggcaaagtttaccgggggatttttttttg

SEQ ID NO: 73204 - DNA, 1123 bp, Zea mays
  Clone ID: MRT4577_166760C.1
tacaaccatctacactgacgtcctaatataacttacagaaggatccatggcccaaggtctcccagagcgcaaaggatcttgtcacgaggatgcttgacccagatccttgtacacggttgacggcaaagcaagtccttggttagtagccttaagttcaatcttataagtttactgaaaaccaaatagaacgggcaggctgcatccgttcctagaaaaaaaaacaaggtttttcttgaagagcctgttattgccatcattgaagaaaaaaaaccgaaatggtttaatcatgctgcgtatttaaccataagcactttatcgtggaaaaaaacagagcacccttggctcaagaatgctgataaggcttcaaatgtgtcactcggagaggttgttcggtcgaggctgaagcagttgtcgtctatgaacaagcttaagaagaaggcacttggagtaagttgcagataactcgctgttactacccttaattccttcaagcgacaggccgactgatctctctcttttttttttgccaatgattaatgcaggtcgtcgccatgaatttaccgatggaagagattggcaaattcaaagagatgttccatacaatggacaaaaacaaggacggtagtttgtcacttgaagagctgaaggagggtttccggataaacgatcatcctgaaaatctgcgtttgatggaaaaaggtgagtagctcacttttccaggattcccaagaatcatatcagtgaccatttcagcagtgcctagtgccaaagtaagtccacttccttcgtgtccagttgcaatcaaaatatttgagagattaggaataaagtcaataactggctttccatcaggcatgtatggacgatgccctattctgatttgagtattctgatcaatatcaaaagaaacattcttcattgcaggaaaaaactctcctgcacgttcccatatacactgaacaaccggacgcgtgggctccctcgaaaaacctttgaactcccggctgcttcctagaactaaatttccctttgtatctaaggttgcagtcattgatactgataaagcaccaagctcatcttcactagattctgaagctatgtgtgtgctatttgactttgtaat

SEQ ID NO: 73205 - DNA, 320 bp, Zea mays
  Clone ID: MRT4577_166761C.1
gggacaaatgtcgaagttcggtttttacaatggcaacggaatttttttcagcccgtcacataaaaccctgccctgacccttgtcacgaattcagtcctccccccaataatgacctcttcaggaactaacggcttcgctttttttgcaacaagggaactgcaatcaccctgcatttaccttggccaggaagcccggaaacctaaatcaggatctaacgaagtcccaagccggctttcaggtttcttgtagatgccacaaaaagggcccggttttttttccttttttgcttatacccaggctacccaataggttttaacttt

SEQ ID NO: 73206 - DNA, 3808 bp, Zea mays
  unsure (1)..(3808): unsure at all n locations
  Clone ID: MRT4577_166762C.1
cggacgcgtggcacgcgtccgcccacgcgtccggatagcgagcacccggcgtcgggcgacggtggcgccatgggtggctgccactccgccatcgcggccaccaagctgaagattctgcgccgcggaggccggggtgccgctgccgtcctccccgtcaccaaccacgacggcccgtgctgctcctccgaccacggcagcaaggagaagaagaagaaaaagaagggcgccaggaagggcaggaaacgcgcctccatcctgggcgacgccggcaccttcgacccggacttctcgcggcggtaccggctcggcgcggagctcgggcgcggcgagttcggcgtcacgaggcggtgcgaggacgccgccacgggggaggccctggcgtgcaagacgatccggcggaagcggctgctcctgcgcctcgccgggcccgacgcgaccgacgtgcagcgcgaggtggagatcacgcggcgcatgtcggaggtgagcgggggcagggtcgcgtgcctgcgcgaggcgtgcgaggacgacgacggtgtgcacctcgtcatggagctctgcgagggcggcgagctcttcgaccgcatcttcgagcggaagcactactccgagcgcgccgccgccaagctcgcccgcaccatcgtcgaggtcgtgcagctgtgccacgagaacggagtgatgcacagggacctgaagccggagaacttcctgttcgtgaacaagtcggaggagtcacctctcaaggccatcgacttcggcctctccgtgttcttcaagcctggagatcggttcaccgaagtggttggcagcgggtgttacatggctccagaggttctcaagagaagctatgggccagagatagacgtgtggagcgctggtgtcatcctgcacatccttctctgcgggttccctccgttttggggaggctccgatgagaaaattgcacagtcgatactccgtggggtaattaacttacagaaggatccatggcccaaggtctcccagagcgcaaaggatcttgtcacgaggatgcttgacccagatccttgtacacggttgacggcaaagcaagtccttgagcacccttggctcaagaatgctgataaggcttcaaatgtgtcactcggagaggttgttcggtcgaggctgaagcagttgtcgtctatgaacaagcttaagaagaaggcacttggagtcgtcgccatgaatttaccgatggaagagattggcaaattcaaagagatgttccatacaatggacaaaaacaaggacggtagtttgtcacttgaagagctgaaggagggtttccggataaacgatcatcctgttccagaggaagagataaagatgttgttacaagcgggcgatatacatggaactgacacattagattgtgaggaatttgtgacagtcttgcttcacattaaaaagatgagtaatgacgagtatctacctaaagctttcgagttcttcgacaaagacgggaatggttttattgaaatgtccgagttaatggagactctaagtgatggtgaactaaagcctgatgagcaattggttaacgacattattcaagaggttgacaaggataaggatggtcgcatcagttacccagagtttgaattgatgatgaaaagtggatcggactggaggaacgcctctagacgttactcaacagagaatttcagcagcctcagtcaaaaactgtgcaaagatactttatgaaacaagaaagtagtttccaagcagcaattactgactgaagtaccacaccctcaacctcaactaaacagcatcaaagacaacgcaaaagcaggattactggatctggtggaaataagggttgaaggagatcacatataccagttgcatgcttgacaaacttcgtcaactagcaagccctctggcattgtcctttgctctggaagtaaaatttactattccaatagaatacatgacttagacatagacagatgtaaaggatgccccagcatccatgcaatccactaaccaaaatttggcattttactactgtcaaatatataaagacggtacgcaacagaggtgttccgctgccccagtcaaaaaggaggcttcggccgccccggccgccctgaggcggcctgagcctgggaccgatgccggagcgcgaggagggtgcgcccacgcccacgccatcgccatgggccgtagacagagaggctcttgggggtgcgcaacgatagcaaagctgaggagtagacgcgcgtgggggtagggattccggaggtgaacgccatggtagcatccattgcaggagaaggccggccaggtgatctggcgatgggcgtttgatggacaaatgagtagctcacttttcacgcgtccgaagaatcatatcagtgaccatttcagcagtgcctagtgccaaagtaagtccacttccttcgtgtccagttgcaatcaaaatatttgagagattaggaataaagtcaataactggctttccatcaggcatgtatggacgatgccctattctgatttgagtattctgatcaatatcaaaagaaacattcttcattgcaggaaaaaactctcctgcacgttcccatatacactgaacaacggatctatcaacctccctcgaaaaacctttgaactcccggctgcttcctagaactaaatttccctttgtatctaaggttgcagtcattgatactgataaagcaccaagctcatcttcactagattctgaagctatgtgtgtgctatttgactttgtaatctgatggtcaacatatccaacctccattagggcatgatttaacttaaccttgtcgaatttctccaacacaagaagatgaccctttcgtggcttgacaggaatatccaacgtcaaagctggttctacgaaactatgcaataaggatcgagtccaggcaccagaagcaattacaaaagcttttctgccatacaatatgtttctggaagtttggacagcttcaacttttccagtaacgtccgatcttattaatgacatggcaggatcattatagaactccctataccttccttctgaggaatacgagttattggtcttctcaatcaaagagacagcctggaatgcatcaatctgacagtcttgcggcaagaacatagcaccgccatctttccctacactgagtgccggttctaatgcatgtaatgaagatgctgacaagaattccgcatgtatgcctgcctgagacagagccttggtcctttcgtccaatgtgcccagctcttccgaacttctccccactagcaagcttcctgtcctcataaaaaacaatttctcccgcgcccccccgcctccntggccgtcaacctcggtcgccagctcctcccaaagttgcttactccgcagcgccagctcccacgtgtcagtccccggcgtccggtgcgacatccatatgtatccctgccctgcgcctgtggcaccagagcaggggacggcagcgtcggcgatggcaacggagagcgaagtgtggaggaggaggtggcgcgcgatggcaagccctacgattccagcgcccacaactacaacatcgtggtgggaggcttcggccgccccggccgccgctgcggcggcctgggcctgggaccgatgccggagcgcgaggagggggcgcccacgcccacgccatcgccatgggccgtagacagagaggctcttgggggtgcgcaacgatagcaaagctgaagagtagaagcgcgtgggggtagggcttccggaggtgaacgccatggtagcatccattgcaggagaaggccggcctcgaggtacccaatg

SEQ ID NO: 73207 - DNA, 545 bp, Zea mays
  Clone ID: MRT4577_166763C.1
gaggagacgagctcaagcgactcgctactattttctggagcgaaagtccgtaatgctgcctgtgagtctgattgtcttgggacggaccgggatgatgggctctcccgtgacctgctgacgttccagctggcacgggtcattaacgcaacatgcggtcgagccctgcacatgcgacccgcgcactctgaaagagctctacattctcaaaggcacggacagagcgtgcaccaagcttagtcactggatgaactgccgaccgcagcttgatttcaaggaggcgtgtctcaaactgacgctgctgtcacaggtcggacctttaaaagcacagtggtctagcgtgctgtccgacgacgatgatgccgatgactctgattaaggatgaaaccttatttacaaccggacatagctaatatcccttggctacatcctaccgagcggtctggtaccatgtgaaagactggcaagtgctgaatgaccgacggaacccgggtggacttggagctgcaggaggccatcgccgcgtacccggacgcggtgcaccgtgt

SEQ ID NO: 73208 - DNA, 1096 bp, Zea mays
  Clone ID: MRT4577_166764C.1
ccggccgggatagatgccagtcctcccctgccgggccggcagcacaagcaagggaagggagggcacctctaggctccagccatggcgcagcagctgctgctcctcctccccgccccttccagaactttcttgaaggccctcccctctccctttctctcctacctcccccggcgccaccttgtccccgttaccgccgttcccgtagcacccggcatccggcggggcctgctccggtacgcgacgaagcgttcaagcttggtcgaagaactggagattgccaaggagaagcagccgcatagcaggcgcgccaatggcatcttctggatcttgctgctcaatttcggcatctacatggccgaccacttgttccagattcggcaaataaaatcactatacctgtatcatgcattcccttcatggttccagtttgtgacatcaacattttgccatgccaactggaatcatctttcaagcaatttattctttgtgtatatctttggaaagcttgtcgaggaggaagagggtaactttgctctctggatgtcttacattttgactggtgctggggcaaacttgatttcatggctagctcttccaacatcctctgtgtcacttggagcatctggtgctgtttttggccttttcaccattagtgttctagttaagatgtcatgggactggagaaagattcttgaagtgcttatccttggacaatttgttgttgacaaggtcttggaagcagcacgtgcaacaacaatcacgggccagtcatttcaagtgaacaacatcgctcatgtgtcaggtgctttgattggtgccgcgttggtgtttctggttagcagaatccctttttcatccaatgatgataatccaaaggcaacaaaaagagtaaatagaaaataaaggtttgtcaacaacattatcaacctaacgtattactatcaatttttcattcattatcattccttcatatgatagctaccttttgaaaattcagttgtaacatttctgatttaaatgaaagatacatctgaaagttcagtgccggagtataaagttcgtttgtagaccaaaaaaaaaaaaaaagtcgacgcgg

SEQ ID NO: 73209 - DNA, 148 bp, Zea mays
  Clone ID: MRT4577_166765C.1
gggaacctgaacccgcggagctactacgagtgggcgcatcgacatccttggactgacgggttcctggtggctgcaagtactgggctagaaggggtggtgaagggggaactccgaactcctgcggagcttaccttactaagtgctacca

SEQ ID NO: 73210 - DNA, 494 bp, Zea mays
  Clone ID: MRT4577_166766C.1
acacgacgctctgttgagtcgaccaccacgcggccacgaccgagtacaagatcagtggcaactgacaagctagccataccacgccctgggacggaggctgctccgactaacaacccgtccttgaagattgcttcaaggcccaagaagctcaaagctcaccgagcgacgggtatcaccacagacattgcactggggaggggtgagaccaccgcagtctgaccgcagcgacattgatgcgccgggcgacaccggacttcatcgagaccatgaacactgcaaccatcgatgctgagcagcgcggtccgtgagattaactccaccgctgaagagatgtgacgcagggatctcataagcaggccagacccgggagcatgctatccttgcggccactccaggagtgcaacagatgcactgcttctcgacacaaatgaatgacacaggctggcaatacatgaaggtgcggtgagaggagaccgtaaagggcggctcatcct

SEQ ID NO: 73211 - DNA, 602 bp, Zea mays
  Clone ID: MRT4577_166767C.1
caactagtggatcctttgttctgcagggttttcacgcaagccacatattaatgatgagaaagtgacttctaagcttgatccaatgtaaatgacatgtccaattgagtactgacatgtgagttaacgttgatgctctcattttccaaattattattactatataagggatcacgtgggttcacatttgctttggagcgttcacagcccctactcctcagtatttcggcctgcacatctgtaacctttagtcaatttttgatttcctttctgacgtaaattatattagctgaattatatcaagtaaaggtaatggattggaccagttttatttatagtgtaaaatgttgtagtgagaatatttactgttatgtgctacaaaaagatgctatcagtgaacagttgttttagagttgtgacaatgcattggatgatttggtctggacagctgattcaatgttctcttccttgaaggtggttgtaatttctttatggggttttcattgttcagatttcatttggaacacgcatatatgtttctatgattttatcatttaatacaattaattatggtcaacttgaatcatgatgagcctggtactttg

SEQ ID NO: 73212 - DNA, 222 bp, Zea mays
  Clone ID: MRT4577_166768C.1
ttctgtctaccttttccccaactccctctcgggtattttcctccgcaggcgggggcccctcatcattatccccttaccaccgactaatcttccccagctgagttaatccccgactggtccaatgcgtagatattttttctctcctaaacccccacggggttacccctattcaaagtgctcaacgaggggaaactttccaaggtctaagatctattgaaggag

SEQ ID NO: 73213 - DNA, 562 bp, Zea mays
  unsure (1)..(562): unsure at all n locations
  Clone ID: MRT4577_166769C.1
ctactattanaacatgctcttgtatggtgngagtttgcttcaaaagtaaagatattgatattttggatcttagacccatgaacacatgcactttttacctcagtcctatcaaagagctgtgtaagaagttgattcagcgagtacgatgtgatttttttttggaaggggaagaatgttgccgaatcttgtgaagtggttgccatcccagttgctgaaatcctgtacttttcactgcttgttcgttgccgtgttccttgtaaatgtgaatacttattactttggagactcacgtcacgtgttcttacggtgcaaaaaaaaaaaaaaaaaaaaaaaaaaaaaaaaaaaaaaaaaaaaaaaaaaaaaaaaaaaaaaaaaaaaaaaataaaaaaaaaaatattttccgctattaaaaattctataaattatatttttttttaaaaaaaaaaaaaaaaaaaaaggggggggccgtttttgggggtccattttttgttcccccgggcgggcggggttttttttttttttgggggccccctaaatttatattggggccgtttttttaaaa

SEQ ID NO: 73214 - DNA, 325 bp, Zea mays
  Clone ID: MRT4577_16676C.1
ctaaagttttttctttcatagctctatttttttttttttttttaagaaccagttgagatttatatgtactagatagatatgcagtagtaatggatcatcatggcagcagatcagcataatctcagtacgtaatggaaaatcctctcacgcgcgtttagagagctcaagacctatcacgcgtctgcataccatacaagaaatcacctggcgttgtttctccttcgtcgttggtgcatcgcatcatctcctcgagctgcaggcaatactggtagtagtactcgtgcccgtccggctgctgcggcgtcgtcgtcgtcgtcgttgccac

SEQ ID NO: 73215 - DNA, 310 bp, Zea mays
  Clone ID: MRT4577_166770C.1
aaaaaaaaaaaacaaacaaaacaatgacaattactatatacaaaaaaaaaaaaaaaaaaaacgaaaggcctaaaataataatacaagaacaaaaagccaaaaaaaccaaataaaccgaaatctgatcaaagacagcacaaaaacatgaaatatagggggatgaactttatgctgacctggcctaatcacaattctcaactggtcctttgtccttaatgaccagcccccgattgaaacttgcttcccgatcgcttttgcaatcaagactggagaaaaccatcttgatgcctatgttattcacgttatccaa

SEQ ID NO: 73216 - DNA, 389 bp, Zea mays
  Clone ID: MRT4577_166771C.1
attaaaacattcgggggcattcgaaagacaaaccccccagggtacatttaatggggggggggaaaaccgaactacgggcccattttggggtaggactattggcctttcattttaagggggggcaaggacaagctggagttttttttaaaaagaaaaaaagggggggaacaaaatcaacggggatcgggtaagggggacataaaatttcatgaaacccccttctccaatggggcgcgaggccccaccccaatggagcgaaagagggatccgggggcccccattcataaaggtaaagcctcctggaccctgaccttggtcccggaaaaccccccccccgttaaattgccgtgggggggggggggggccaggaacccgggatctaaaactag

SEQ ID NO: 73217 - DNA, 233 bp, Zea mays
  Clone ID: MRT4577_166772C.1
tatctaggcaggcctggtcccgaagatcacccttctctggtcgacgcagggcaactaacatgcgccatggagcgccgggggagacggcctacccgtgctaaacgcgctggacgcagcgaagaccagtcgggagcacttcacggccatcatcgtcgccggcatgggcttcttcacggaggcctacgacctcttctgcatctccctacgtcagcaagtgctgggccgcatctagt

SEQ ID NO: 73218 - DNA, 1291 bp, Zea mays
  unsure (1)..(1291): unsure at all n locations
  Clone ID: MRT4577_166773C.1
ggtaccggcncccttccctcggttttttttttttttttttttttttttttttttttttttatatgcatcaacaagacaacaacgtaacatacaaataatttgtatgatactttcaattgaacttattccgtcccagatgattatgcagcaccaggcacaagccgtgcatcaattacaggtacagctaggagtacatgaccaaagaatactaatttatacagatctatttcatgatcatctttatgccttttgaaactgaaaaaaaaatagcacaagagcgcagcagttcttgttacaagctgcaaacctgccatcaattcttcagaaaaaatttcgagtatatcctcttgcagtacggactggtcctaagtagttcctcatgtggtaggattgcatttatcagtgcggaatgaagtgagccctttgaattcttgagagcagagtagacgacatagtttgcatagcagtgcggaagcagttgctccaggtgtggcgtggcaaggatttccaatatgatcttggccttgtcaacctccttgaacactttcaggcatttctccacaacattgctgctgaacttctgcatggacaggtggatatacttgcctccaaactgttgcgcaaggcttgaattcgcagttggtatcttcaagtccagtacaacctggacaacgtagttcccatatgcatcttcggcaagcttaaacccattgtgagcaatggcggcaaccagcttgtccctgtgctcaccacgcgaccgcgcaatgcaccgctgtaggacacagcaaccgtggatttgcatcccgatatcgacgcagtggagtgcagcagcagcaaagatcgccttattatcgtttgaagcaaacgaatgcaaacacttttgcacgacatggttgccattggtatccttgatgagctccaagaagccagggcgcagagcatccatgacaagaccaatctcttcccttgcactgagtctctcaatcagcttctgcaccgcccgtgtcccatggacgttgagggatatcctgacgagcgcgaaggggtcggcggtgagggtgagcacaagcgccatcctctgcccgtcgtcgcagacggcgagcagcttctgcatgaggtagttcccgaacgggtccaccatcagctgcgcggcgtggctccagacgccggcgaagatatagtcgacctcgcgcttgccgtcgtcgagcctctgctgcagcaggcggcacccgtgctggtcgcgcgcccatgtggtacaagaccccgcgcaggccggcctcgagggtcccaa

SEQ ID NO: 73219 - DNA, 839 bp, Zea mays
  Clone ID: MRT4577_166774C.1
cctcgaggccggcctgcgcggggtcatgtaccacatgggcgcgcgaccagcacgggtgccgcctgctgcagcagaggctcgacgacggcaagcgcgaggtcgactatatcttcgccggcgtctggagccacgccgcgcagctgatggtggacccgttcgggaactacctcatgcagaagctgctcgccgtctgcgacgacgggcagaggatggcgcttgtgctcaccctcaccgccgaccccttcgcgctcgtcaggatatccctcaacgtccatgggtataactgtcaattcactcccagattttttttgtctgttgttgttaccaatgtgcatatttttgcttttgctcctgggtggcttgtggttttggttgaattcggtgatggcgtttcaggacacgggcggtgcagaagctgattgagagactcagtgcaagggaagagattggtcttgtcatggatgctctgcgccctggcttcttggagctcatcaaggataccaatggcaaccatgtcgtgcaaaagtgtttgcattcgtttgcttcaaacgataataaggcgatctttgctgctgctgcactccactgcgtcgatatcgggatgcaaatccacggttgctgtgtcctacagcggtgcattgcgcggtcgcgtggtgagcacagggacaagctggttgccgccattgctcacaatgggtttaagcttgccgaagatgcatatggggactacgttgtccaggttgtactggacttgaagataccaactgcgaaaattcagcttgcgcaacagtttggaggcaagtatatccacctgtccatgcagaaagtcagcagcaatg

SEQ ID NO: 73220 - DNA, 110 bp, Zea mays
  Clone ID: MRT4577_166775C.1
attgtcgtatgctattgttgctctcaattgcttttgatgaggcaaacccttatagactttggtttcaaattaaccaaattatcctatactgtgaaattaatgatagtgaa

SEQ ID NO: 73221 - DNA, 372 bp, Zea mays
  Clone ID: MRT4577_166776C.1
ctgctgaccggaccatctctgaaacggtggcaggaagagggggccccaagaagagcaggcggtcggcgctggtgggctggttcggggagaaggacgtgaaggcggagcgggtggtgtacaccgccgacttcaccgtcgacgggtccttcggcgagccgggcgcggtcgccgtgctcaaccggcaccagcgcgagttcttcgtcgagagcatcgtggtggagggctttccctccggccccgcgcacttcacctgcaactcgtgggtgcagcccacgcgcgtgcaccgcgacccgcgcgtgttcttcaccaacaagccgtacctgccggcgcagacgccgccggggctgcgggagctccgccgcctggagctca

SEQ ID NO: 73222 - DNA, 282 bp, Zea mays
  Clone ID: MRT4577_166777C.1
tacattaccactgcttacatgccctacatcttcaacttcatctcaattctctgacaatgttagctcagactcataactctcactctctcaaatacacttctatccctcgagaagcctatcaactactttagcatcatgaaccacgaatagatcccatttcgtgatgctaacacttactacgtcttaaagtcctacagtttattaactgaccatgacaaagcttatggacatctgaaagatctgcctaaaataatcttatctatctacaattcttacattcac

SEQ ID NO: 73223 - DNA, 336 bp, Zea mays
  Clone ID: MRT4577_166778C.1
atgtcgtgatgtcatatcttcttcatactgttttgaccgcgtactccatcttcctacctttcaccattatcatttggggagtatggaccttgggaaagactgaagagattgaagtccactacattgcgatgccgtgacattgaaaacacaatccggcccgaaagtctgggcatatgcaacccctcccaagaagaaaggcgagcaacttggtgtgctataacatttgaatgccctgccgaccattagccaaatgatgacgatcagagccgttatgcccccaaccaccatgaggttaaacctcaggttttgaaaccacatttttcccctgaaatctct

SEQ ID NO: 73224 - DNA, 223 bp, Zea mays
  Clone ID: MRT4577_166779C.1
ggggaaaccaaaattttacgttggtgaaaaaaaaagggtcgggggaaattgtttccctttggtgttataaaatcaccgccattttaaaatttccattcacagaaaaaagtgccacccttgcaaaaaaaccaataggtttggattaaaaaaccccgttggactttgttttaaccggtaatttgggggaaccaatggtttgcccccccaaaaaacacaaagggtg

SEQ ID NO: 73225 - DNA, 1024 bp, Zea mays
  Clone ID: MRT4577_16677C.1
agatcgattcggcacctccagcgttgagccaactccgccgccctgtcgttttcgcctctccctagcatttaccggaagaaacgagggtggccgccgccttctcccgctctgcctctcttcatgggccaggtcgagagccaggctacccgtccgtcggaggagccttctccacccgtcgtggagccgtcgccgccgtcttctgccccgcctccgtcctcccttgaggcgcttgccgcagaggccatgtcatttgacgaggatgacactgaggagtcaatcgaaatgaaggtacagaaagctctggactgtccatgtgtcgctgatttgaaaaatggtccttgtggaggtcaattcgtcgatgcattttcctgcttcctcaggagcacagaagaagagaagggatcggattgcgtgaaacccttcatcacattgcaggattgcattaaagcaaatccagaggcattctctaaggagattttggaggaagaggagaatgagaaggaggcagataagtccaacctgaaagttagagctccatcatggtccagagaatccaaccctaaggtttgagattgcatgatattaaatgataaccgtatagaagttctccagtagtggagtagcggattgattttagagagagcaaagaggcatcataaattgattggcagaaatacccatatttagtttggtagaaatgcctcacgatatttttttgagaatgtacatgtcaattcaagtatcaacctagaaacatgaacatgtaattcgattctttaaggtagttgattgatttcagagagcgaggtatcataaattgattaacagaaatacccatattttgtgtataagaaatgcttcatggtatccacaattttagaatgtacatgtcatttcaagtatcaatcgagaactgatgaacttgtaattcgattcctagatacagggcatatttgatcaccactgtattattatactatgaaatatacatatgattatcataatctaggttatgaactataat

SEQ ID NO: 73226 - DNA, 373 bp, Zea mays
  Clone ID: MRT4577_166780C.1
gtggtaaaaaggagggtacgctgttgatggaagcagtacaagaggcctgatgtgttggctgcgagccagcctccatcgggggggggggggtggggagacctaacaactgcgcctaggatgttgggccgtggggagggccgcacctagcaacactggcccatagatcgtagcactcttttagggaaaatagccttgcttggatccaccaatgcgtgcaagaactgccatggtccccagaggcctgctaagaccgcacgtgccgcccttgccgctgtgcttgttcacagatctgtcatgccccgcggagattgtgctgtccatgagaggttccttggtccccacctcgctgctggctgccttgctcacggtggcg

SEQ ID NO: 73227 - DNA, 401 bp, Zea mays
  Clone ID: MRT4577_166781C.1
tgctccgactcccgcgtgtgcccgtcggggaccctgggcctgcagcccggcgagggcttcaccggccgcaacatcgccgccatgggcccagcctacgacaaaagacaagtacaccgggatcggggccgccatcgaagaacgcgggtgggcgctcaagggggagggcctcggggtcattggccacagatggtggcgggggatcaagggggtcctctccctccaggaagggggaactggcaacttccaatttggtgagaaatggggtaagaaagggtttcctggccagaataaggtgaagaaaaaacacgcatcggtggcggtcgatgaccagtgggtctattctagagaaggaggggcggggaacctgcccctgggagaaacctcaagaaaccacccccctc

SEQ ID NO: 73228 - DNA, 645 bp, Zea mays
  Clone ID: MRT4577_166782C.1
ttcccagaaaccgtggatcttctgactctgctgacccaattcctgtctgatttacccgaccccgagcgaacgtcaactgtcgacgccatgaggagctccgtagcaaatctctactggcacaatcccacccaaatctgacgcaacatatctctctagagaaagtcacaaaatgccacttgccactgacaatgatgcgatatccgagcccatggaatcattgcgtgaacatgacaaaactgaccctctccagacgacacgcatgccacgacatgagagagagaaaacctgactaacctcctcctcctcggactcttctcagtcactcacagaagcttgagtcgatcccctacatctctcgttcttctgaccatgccggtctttccaaacgccggcatgagcacctacctaaagaacacacctgctgacaacgtccactcggaccccatattcaccaccattactcccactctacgaacggtcgcaacagcaatcatggctgaccccactgacctatgggtgtgctacgtgtcgaccatgagaatccacgtctaccctcgccagagtgatatgctcatccgcgaaggggcgtgcaagcttcccatcaacgataatctctgcccatgctgtcagactaccttattccat

SEQ ID NO: 73229 - DNA, 1188 bp, Zea mays
  Clone ID: MRT4577_166783C.1
atggagagcggctacgaactacacagtcgtggtcgagccgctcgaggtctcaacgcccttcacaacctgcagcgcatcatggaggaggagaaggtcaggatggcctcctacaacttggagggcggggcacagatgtggtacattcagcctctgcgtccaggtccacaacctgtagtccctcgcggctgctatgagcctggcacgccagctggagctctaggagcactatacacagacacgttcacgtctcatggcctactaccagccccagcacccttcattggggaggtagctgcgcggcgcttgggcctcaccatcgagccacgaccacgactcacagcaatggtggccaatggtgagcgcgtggcctgcctgggagtccttcgtcaggcccaggtcgacataagtggcttggtgttctgcgtcgacctcttcgtaatgcccttagccgagcacaacgtcatcctcggtacgcaatggatgggcacactcgggcctattgtctgggacttcaacgctcggaccatggcgttccagtgggagggacgcaacgtccgatggagtggcatatgccctccatccacgccgattctcctcgccgccacaacggatgacgccctcgttgacggggtgttgaaccccttcaccaacattttcgccgagccgatcgtcctacctctggcgtggggctgcgaccaccacatcgtcctcaagcccggctcatccagggtggtggacgcattttcgatcccgatcgtcgatgagcacctcgacgaactccatggggcgcgcctcttcaccaagctagacctacagttggggtataaccaagtacggatgttgtcggtggacatccataaaatggcgttccatacccatgacggcctctacgagttcctggtgatgtcgttcgggttgtgcaacgccccagcaacattacaggctctaatgaacgatgtattgcgcccctacattcgccagtttgtgcttgtcttctttgatgacattttgatatacaacacctcttgggtggaccacctaaggcatcttcgcgccgtcctcgacacactgcgccaacaccgcctctttgtgaagaagtccaagtgctcatttggtgtcgactttgtcgcctacctgggccacgtcatcttggcggagggcgtaactatggaccctgcaaaggtctag

SEQ ID NO: 73230 - DNA, 154 bp, Zea mays
  Clone ID: MRT4577_166784C.1
attctattggcagatttacagtcatgccagcattcttctctgatgtgtacgtttgcatttcacctcaattagtgttgtagttggtttatacaagatatttttcatctgtctgtgaattttatctctgacttggactctcagttgtatggttttg

SEQ ID NO: 73231 - DNA, 252 bp, Zea mays
  Clone ID: MRT4577_166785C.1
cccacccgtcccaatatatttatgatagtttgtggtttgtaggtggcggccacgtaacgtgccgggtgttcctatttgcggtgcgtcacaccatgtttgtaacaaacagccttggggttagaactcattttttcccccattcctaaacccagtgtggggcctcattttataaacccgcgagagcgggtacgccccttgcaagaagagagaagggtttcttccgcgctccttaagttcatttccagggagact

SEQ ID NO: 73232 - DNA, 1425 bp, Zea mays
  Clone ID: MRT4577_166786C.1
gccggccgggtcgggatttcttttttctttccatcgaattcctcgtcaccaacacgcacgcggcctctgcctccgcgtctccatcctgaggctccgaatcgatctcccttccccaccaaaccggagcacttcggaggccggacccggcgagaagcgaccgaccgcagccagctcacgtctccctcttcatccaccatgctgagggtcgcgggcaggcgcctctcgtccgctctcgcctggcgccccgccgccgccgcctcaggctcccggggccctctcgccggtacactacccggccgcgacgacgacgacacacgcgactgcagggcgcgtttcgccatcgaatctcccttcttcgccgctgccagagggttttcagcagagactcttgctccaagaaaccaggatgtgggcttatctgagctcccagcaactgtggcagctgtgaagaatccaagtggaaaaatcgtgtatgatgagtataaccatgagcgctacccacctggagaccccagcaagcgtgcatttgcctactttgtgctgagtggtgggaggttcatttacgcatctttgctgcgacttctcgtcttaaaatttgtcctaagcatgtcagcaagtaaggatgttctcgcgcttgcctcacttgaggttgacctctcaagcattgagcctggaaccacggtgacggtgaagtggcgtggcaagccggtcttcataaggcggaggacagaggatgatatcaagttggccaacagtgttgacgtcgcatccctccgccacccagagcaagatgcagagcgcgtcaagaaccccgaatggctggtcgtcattggggtctgcactcacctgggctgcatcccgctccctaatgcaggagactttggtggctggttctgcccgtgccacggctcgcactacgacatttctggtaggatccgcaagggcccggcacccttcaacctggaagtgccgacatacagcttcttggaagagaacaagcttctcatcggctgagattgctgttagtgttgttcgtgtcatcgtgtggccctgtcgtttttgtttgatcaacaacttcaccttttctcttgcctgggttagggcatacctttgtgggctgtttctgagtgcagtgttgttgctagcacctgacactaatgaataacctgatgctacataaaggatactgttaattgttgtcaaatttggttctgtttttttttcctgacagcaatgaacaatcttctgctactgaaaaaaaaaaaaaaaaagcgtccaaagtactctgcgttttttccctgatctcaagagggattgattatgcaacacattttttaactgctaccgtccatttttatctcgtcggttagtaggaatgtaatcggatattaatgaatacccctccccccatatttgttttttaag

SEQ ID NO: 73233 - DNA, 163 bp, Zea mays
  Clone ID: MRT4577_166787C.1
gccttttcagctgctaatggccttgacatttagtggtgcaaggctccagaaaatggactgattgcttcagaccttgtaagtggatcttgatgtacagccagagaaagcggctgaaagaggaggctatgggggtgagcgatatgaaacgatcgagtcttctaaa

SEQ ID NO: 73234 - DNA, 114 bp, Zea mays
  Clone ID: MRT4577_166788C.1
gaattcggctgagataatggaaaactaataacttgtagaacgaaagaaacgagggcgaggattgcgtataagtgaactcatcaagtctgagatatcgccaccactaaattggat

SEQ ID NO: 73235 - DNA, 956 bp, Zea mays
  Clone ID: MRT4577_166789C.1
cagaagactcttcaccattggcatcgtccgatcctctaaaggagagagacttgggagcagattctaccaaggatccaacccaagcgtcttcaacttcagtggtcaaatcaggactgtctgaaactccatcatattctgcacctgatcctaatgcctcatatggagtagaagaatcactgtcaaaatccaactcggatgaaaagaacgctgcactgagcctgtcccgctggctgaaatcttcctccgctgatgctgagaatcaagatgatgacgactgcagctttctaactgagaagcctgtcttcatggttgcacctgatctgaacttggataccagtaaccctactcctaggttgcccaaggcatgggatggcaacggtatccccaacacaacgaccagatacagagagagggtcagttggcacaccacgccatttgaacaaagactgctgaaggtgttgtctgatgaggaccgttgccctccaaggaaagtcgtccgggggaagctgttccacctcgaggagacagctgagtagcgggcagggtgatcatattagcccaactgtgatgaggctgtcagcgacctgttatgaaactgagctcagaagctggtaccgtcatgcatgctgctgaaggtgccgtgtacaaatagcataatttctgttggggtgtgatgctgtgtataaatgacagtttgagctgggttgtgaatatgagttactgtaccgtcatgcatgcagcattgttggctcactgctcacaagcacaccggtctgtagctcactctatggtcgcaccagcactgacatgagtgaaacgtacatttgttttctatgtatttgtgtctgaaaacaggcttcaaggccttatgtgtcacatacaggcatgaaaagaaaattgttacatacatatggcaccactttcttgttaataacatctgaaagtctaattttttc

SEQ ID NO: 73236 - DNA, 335 bp, Zea mays
  Clone ID: MRT4577_16678C.1
aaaaaaaaggcgggaagcttttgttatataaaagggggtttgaaagctgcctcaaaggggaaacaaatttttcgggccacttggaaaaccaggggggctaattgctatgattcccccccccccccgggggctttttggcttttttccggctttaaaatgttccccaaatttgcccctgaaaggggcggggttccttaaagctggggtttcaaagccgggggatctagggggggggggcccacattttaaatttgcggggaggggagcttcatggcaagccccagagatatttcccatttttgggtaacgcggactgactaaacacatttttactg

SEQ ID NO: 73237 - DNA, 755 bp, Zea mays
  unsure (1)..(755): unsure at all n locations
  Clone ID: MRT4577_166790C.1
ttcctcaatggccgtctctctcctccccgctccccaccgctcctcgctccctcgccgccgctccagccgccgagaggagagatcgatcccttcacggcaggcgctccaccgcaatcttctccattagggccggcgacggaggtacggggaggagggttttggtgtgttcccttggttgggagggttcttggggtttgggtgtatggacccaatgccgactctggtcaaggaggaggaggatggccatgggacaggagaatcgccgggggccacggcggcatcgaggccggtgaaggggctgcgcgatgccaggccgtcgctgttcctgacaaagacgtacgacatggtcgatgaccggagcaccgacgacgtcgtgtcgtggagcgctggcaataacagcctcgtcgtgtgggatctgcaccacttctccacagtgctgctgccgaggcacttcaagcacagcaacttctccagctttgtcaagcagctcaacacctatggtttcagaaaggtggatcctgatcgatgggagtttgccaatgagggttttctacggngacagaggcaccttctgaagaacatcagacgtcgaagacctcccgctaatactgcttcaaatcagcaatctcttggatcataccttgaggtgggacactttgggaaatcatacagataccgaccagctgaaaagggacaagcaactattgatggcagaagtggtgaaagctaaggcagaacagcagagcatgaaaacg

SEQ ID NO: 73238 - DNA, 379 bp, Zea mays
  unsure (1)..(379): unsure at all n locations
  Clone ID: MRT4577_166791C.1
ggccgcttttttttttttttttttaggtgggggggggggggtttttttttttctctgtggggggttgttttccttttttttttctggggaaaccgtcctctgggtgggcctgaaaccgtgacaacggcgaaaacgggatcagacatgctgntgcaaacagccaacacatggcctgttccgggggggggggggcacctctgatttattgaaaatgggaaaactggggaaggctcgcctggccccggggggctgcccccactccaggccccccatcccagttatttgaaccaggagggccgatcccctcggggtcagtttcctcgccattcccgccggcctcccgagcccccggctgcttggcgcccccagccaccggggg

SEQ ID NO: 73239 - DNA, 1289 bp, Zea mays
  Clone ID: MRT4577_166792C.1
cttttgttgggtttgttgagccatggtctactcatgccgcaaagaaatcctaaaaggctatcgatccatattcacctgcacaactgttgcccgtgaagttggaccctaatgaaggaactttacacattttagttcgtgcaaatctaaaggaagacccaaaggtgaccggatctgcacatgctctttttgtcaaagggttttacataaaagaacctgggaaattaaatctgactccaagttgcaatcatagtgtcattactatcgatggaaatactgatattgagttgttctggaatgctaaagatttactcagagtcagtcgtgttgacacaaatgagaacaatggtgttcttagtcgagttgtttaccgggttgaagcgctaaaaaggctatcgttctctgacaaggttactatcgttcttcctgccactggtcaaactgaagaagttgaagtcagctacgatacaggagaggaggcagagtcaccatcatcatggggcctaaccacaactgctgttatgctcacatgcatcattgtgacaatagtcactgttgcacttttcattaagttgctgcagagacctatcagacaggcaccatcagggagcatgacagcatccacaccagcacgagcaccagcagccgatcccgcagccatggctgatcctgcatccccggctaatggtcagttctctcctcgtacaccccagcctttcatggagtacgtgaggaggaccattgatgacacaccgtactataagcgtgatgccaggaggcgattcaacccgcagaacacctactgagcatgcgtggcagcgtgtagtgtggactggttggtctgttgtaacgttcctgatttaggtccgcagttggtttagaaccacagttgtagttcttgcacgagtatgcccttgctgtgagaatgctgtaaaatttgtggttctagcagcacgtgcggtgaggggtggacatctattttggtagaagcctgttgtttgccattttgccaacaggtataggacatctgttttgttagaagcatgttgtttgacatttcgccatagatataggacatcaattttgttagaaccctgtcgttaattcttggcatgtaattttaggtctgtacattggagtacgggacaaccaaacccttggtttagacaactgttttagctcaattgctgcagataaaaaaaaaaaaaaaaaaaaaattagtttatttaaaaaaaaaaaaaaaaaaaaaaaagaaaataaaaaaaaaaaaaaaatgtgaatccattcaactc

SEQ ID NO: 73240 - DNA, 712 bp, Zea mays
  unsure (1)..(712): unsure at all n locations
  Clone ID: MRT4577_166793C.1
ccggccggatggcagtcgccagcgcccttccatccatggaagcgcgcccacactcacacctccatctcccccccttctctctccctcaatcgccctgatccagatacccaagcacgcgcgtggcgaagagacgggtgtaacctccaggatgattcagggtcgatggcgtggatcgaaaatgaccgggcgccttggcgtcatccaaccagcgcggagctccatccgcaacaaattcgagtggcctcgcctccggtcccggtcagtagacccggtcgtgcagatcggcaggaacttcacccccgtcggtgagcagtcaccgacttcatctccaacgactccgacgaagacaggcggctccagagcgcgcgtcacggagatctccgtcatcaccgtgtccgacagcggggtcccatgcctcacgtttgggtccaggaatgcgtctttcctcttggaggtgccactcggcgtcgctgcctcgctccccgatgagggccacattgggggtcgtgcagttgatagcggtgtcatgatcgaggagcgcttgaatcttgtcatacacgcctgctagggcgaacctgaatcctgtcgtgtttgaagggtaccaggtgtgtggtgtccctggtgggcagctgatgacaccatagagacgggtgtccccttctcctctgnttgactgcctccacatccgcttctataaattttagatgcatgc

SEQ ID NO: 73241 - DNA, 585 bp, Zea mays
  Clone ID: MRT4577_166794C.1
atggactttcccgaccaggagcttgaccctcgtgtgggcttcacttccgtggagctccaactatatttgtattctcatgttaagaatacttctcataatgcttatcatgttacgtgcaatgataagtttactccttgcactgtgattgcttcatctagtgataggagtatagctaggcgccatgctcctcctaatgtttcccatgcacctaagaatgcatctcatggaccttcaattttattttgcacttttgatgcatcttatgtaattcattgtaagaataatagaattgttgctaaaaatgtgagaccaaaatgcaagagaatgcacaaaccacatgagggagagaagaacatgttcacctcctatgcaagaacaaggattctcataacacgatcatctttggagatgggaatcaaggcaagaaggagtgatggttcattagcatttaaaggtgtatctaacagaaagctctacttagtagattttactaaggaaaatgtcgatctagatgcatgtttacttgctaagaccaacatgggggcatctccgtctagcacatgtagggatgaagaaccttcataa

SEQ ID NO: 73242 - DNA, 488 bp, Zea mays
  Clone ID: MRT4577_166795C.1
tacaatatccggttgctgatttgtttaatgcaaggtgaacgcgaaaacagctggatctggggaggggacgggctgccagagctcgtgccatttgctccaaacaagggttgaccggcgcgcaaagcaaatccattcgcgcccccgcagcgttggaacgccaagattgaatagatggtggtggtggagaaagaaaatccattagtgcctggtggcggcggcatctgattctgatttctggggattccctccttttttttagcagatgcgtctggtggcctagagtggaataaacgctttaaaattatcaaaggaatttgtgagggcctacaatatcttcacgagaacaatattgttcacttagatctcaagcctaccaatatactgctcaacgataacatggtcccgaaaatatctgattttggtctctcaaggtgtttcgaagaaatgcaaagtcgaactatgacgtcaacactaggttggatccattg

SEQ ID NO: 73243 - DNA, 769 bp, Zea mays
  unsure (1)..(769): unsure at all n locations
  Clone ID: MRT4577_166796C.1
agccggccgggnaaanaattaaaaaaaaaacgaccgggaaaccccaacgcagacgaaaatcagaacaactacaaaaaccaaaatgcctcatctccaccactactcacccgtgctactgctcctcgccgtcttcgtctacctatcgacacgctacgtgcacggtgaccatgccgacggcggccaccaggaccttcccgccctgctctccttcaaggcgtacaacccgaacgccacggccctggcgtcctgggtcggccccagcccgtgcaccggcacgtggttcggggtcaggtgctacaggggcagggtggcgggggtcttcctggacagcgcctcgctggccggcaccgtggcgccgctgctcgggctcggccgaatcagggtgctcgccgtcaggaacaactccctgtccggcaccctccccccgctggacaactccacggcgagcccgtggctgaggcacctgctcgtctcccacaacaagctcagcggaagcctcagcatctcgctggccgctctacgcaccctgagagcagagcacaacggcctccgtggaggcctggaagcgctgcgcgtcccgatgctcaggagcttcaacgtgtcggggaacaggctcgccggggagatctccggcgacctgtccaggttcccgagctccgctttcggtgacaatcttgctctctgtggtccgcctctgccacaatgtgtccatgcgtacgatgctctaggccggtcatcaggtaactcgagcactagtgctactgccgct

SEQ ID NO: 73244 - DNA, 259 bp, Zea mays
  Clone ID: MRT4577_166797C.1
attaatacgtgcgacgcggggatggatctaattggaatctgggaagaaaggccattatgaacttacaaaggctaagcaatgaattgaggtcgcttggggggttgttggaccgcagctcagaacaagggggagctcctggcagaccaccataaccaataaacatactatgctaagcgaatttaccgagtattcgggaagaggggagaaaagtttgagaaacttgcttggggctaaacagttgatcttaagaagtcacaaa

SEQ ID NO: 73245 - DNA, 159 bp, Zea mays
  Clone ID: MRT4577_166798C.1
tttgattttcaaaagcagatgaataaacaatcctgcgccatacttatgtgaattgcattgcacgtcaacacatggagcgatgaacaacaaccaccggcaagtgggggcatcgaaccacttatggccgattccaaagagtaaacacacatttttactaca

SEQ ID NO: 73246 - DNA, 824 bp, Zea mays
  Clone ID: MRT4577_166799C.1
aggcagcccttatcctgctatgcctggtatgcagtatcctggatcatatcccggtggtcccatgggcaaccgtcatttgggaaattctcacaatccgattaaagctccaaattcgaatgccaattccactgtttcttctagtcccagcagcaatgctggtgggcaggttgaaggtcctcctggagccaacctatttatttatcatatcccacaagaatacggtgaccaggagctttccagcgccttccagagtttcggaagagtagtaagcgctaaggtgttcgtagataaagcaacgggcgtgagcaaatgcttcggttttgtgagctacgactctcctgcctccgcgcaggcagccatcaacaggatgaacggctaccagttaggcggtaaaaagctcaaggtacaactgaagagagaaaacaacaccaagcacagtagtaaaccgttttgacagacaaggcagcagccgtccggtacccggtacatattaattgaccatcaacacattgcagcagcagcctcagggcctggggagggaagagacccgtgtacccctctttgttcacttcaacattcttggagattcgtcagtcagctcagctcgtgtaattcattgcagcagacataggccgtagcagcagtttgtaccatgatcagatcacttgtacacatgattcattcaattgttactgacagccggctttcatcctagaataattcgctgtgacaaccttatcatttgctgacgaatgaagtcaggtagacttgttcatctatggaatgaaaaaaacaaacgcgcgagggggccctgcttataacac

SEQ ID NO: 73247 - DNA, 680 bp, Zea mays
  Clone ID: MRT4577_16679C.1
gggtgaattccaattcctttaaaatgaagggatccaaacgccccgtcaatgtaatcgtcgcaacatcactatgaaagcagatacacatgtatcgaacctttggtgttaagcaaaaacttataggcctaagaaagttactgttaaggaagacaggcggtggttgaacagctccagcctgtagttttattggccccagtctcattcatggtccgtctaatctccatggcttctgctgttcggccagcggctgtgtacatctatgagcaaaatgtagtaaccaccctcatgtgggtttaggatccttagtttctggactgccttctctgccatgtcaatattgccatgcatacggcatgcaccaagtaaaacgccccagaccacatcattgtttggaatcgacatttgctctatcatcttgtacgcttcatcaagttgccctgcccgactaagcaagtctaccatgcacccatagtgctcaatggtcacttccactttgccataatctcctctttgcattgcgtcgaacacagtgcgcccctcctcaacacagcccttgtgtgcatacaccgtgagcactgcaagcagcgtcaccccatctggcttcagataattgtcatcagccagcatcatatgaaacaaagcaagtgtgttttccacatcaccatgtgatgcatatgctg

SEQ ID NO: 73248 - DNA, 1758 bp, Zea mays
  unsure (1)..(1758): unsure at all n locations
  Clone ID: MRT4577_1667C.1
ggccgctttttttttttttttttagcaaagtcgaccacaaattcacgacaatttcatgtacagacagaaggaactaagttgcaggtaatacaaaatttggcaataaccaatcaaacttaagtcgttgccgcctccgttggatggaaagaaaacttattttatttcaagtaaacaatgatgcaaattgcaatgaatcacatgctctcaagaaaaaacaaggatattcgacgcgttcacagctctacactctaatgaaaactaaacaacccctctggctatgcacacaactttcttcccgatggcactgccccatggccatgaaatgaacacaggcttctacaaatcctttttggatgattgcctgcctatctagagatacactcttgatgcagcatggaaaactggaggaagacactacctacctagcaggcgcgaacctcagtgaaccggcttgaagctggctcacagttgctgttactaagtttgagggagccaaagaggcaggacaatctcctcatgatgggactgcgagtggctacttccaacgacaccgcatctttcctggtaccaatataagtatcatagccctcaagatctgcttctgttacgaggactgcatcggtgcacccagacccagtggggctggctggcctaggtagcataatttgataaagtggtaagccactatcttcgcagtcaaactccatcacgtggtaatcatcatttcctgttgtgttcgtacagccagcttcaatggcttctaggaaacaggccaggtttgtactccgtactggaagttgtccaccggtgagagctccaaatgaattaacagcatgccactgcgagggtgccaaaagcactcgaggcctaatggatcgtacatgatccaaagctgcttcaggggtcatgttcctgtatttaatcaagtagcacaatacaatagtggtgcttcgtcctcttccagctttacaatgaacatatgtagtaccgccttgtgatgcattccgatggatgaaatctatggcttgagaaatatcctcgaatgaaggtgcaaagaggtaatctcttgttggaattaccaggtgctcaatctcattagcctggtataaagatgttgggacaagagtttcataaggttcattcaacgttacaaccccttgaactccaagctgcttcaaccgtggaacatcacttgggaaaggaacagcgcccagcaaaataaactggtcgacgcgatcccaccaccggaagtccgcctcgaaccggttgcgcaagacgttgtagagcagcgtcgggtagaacagcaccctcgcgccggcgccgacgagcgcgtgcttcgccttaagccgtacgagctcgccgctcgcctggacctcctcctgctgctcttgctgaaacaccaggcccgcaacgtcgtcaccgtctcccgattcgcagatcctcatttcccaccaccgcagcagctcgcgaatcctcgcgccgagacgcctccagcgtccgcctccgcttccacaacgagaagatccgtggaggcacggaagagggagggaaatcggtggatcgagacagtggggtagccttgctcgcgaccgtggcctggggacgcgagaaatgggacgagtgatttttgtctaaaaccccagcagcagaaggcggaatggcggaatgcggaaacaggtggcacggattgctgattcggaaggaagcggagctgcccacttcgaggctctttttttgatngtcacctcccggccnngg

SEQ ID NO: 73249 - DNA, 423 bp, Zea mays
  unsure (1)..(423): unsure at all n locations
  Clone ID: MRT4577_166800C.1
ccaaccaaataatccccactttatttatttatttgaaatacacggcagcccaagtggaaacagttaagtatacatgcagaagcacactagctggcaggaggaaaattgaagctggtgcaggaaagcccaattgcgttgaggaaaggggaaaatccgaactgttttttgtccaggtcaagcagaagaagggggttttgaagttggaaccaaaagataacgggcgggggggctgggcctggggccgggacaaagccgaggcaaggggagttggggttaacttgaacaatggagttgggggagaaaacngaaaagttttgattgtgttaaagaataaagggtaaattggggaagggggaaggagaaaaaaatttgtgggagttgggggaaggnggaagactagataaagggggaaaaggtggggaa

SEQ ID NO: 73250 - DNA, 171 bp, Zea mays
  Clone ID: MRT4577_166801C.1
actatgcaagggcttacgatcccacacctatgaaagtgtgaagacagggtcggaataatggcacccgaggagtttgccgagatcgcctgccacaccaacgactagttctactcccgcatggccaaagccaatgaacaaggcaagctggcagtcatcgacttcaaggccccc

SEQ ID NO: 73251 - DNA, 408 bp, Zea mays
  Clone ID: MRT4577_166802C.1
gctcgaattccgttgctgtcgtcgcttgcttccgtcggacgcctccatgtgtgtcctgacgaagaaacatcacggtccggatcggggagtttggactctcctgagggggccgagtgaccgagggcgagtcgtcgatgggcatggcggaagaaggcgaactcggctccgctcgacgtcactgacgaccacgagcacacgaaggaaggggtcgcgctcacaaagcgttgccgtcggtggactccgagccagcaccgcaacaaccatcgccgtcgtgggtgttcttcatcgccgcatccgtcgtccgacagtccaattggcgacgccagtctccgatcgggttttcccccatcgacggtccttcttggaccacactccttagatccatcacatatgcaccacatcctcaat

SEQ ID NO: 73252 - DNA, 473 bp, Zea mays
  unsure (1)..(473): unsure at all n locations
  Clone ID: MRT4577_166803C.1
ccggccgggacgatgtccngagcagaaactatcgcatgcacttgtcgatgaatgtggcagggcctccattcagagaccacggacgggatgcattggtcgctgcaggatcatcacctattaagggggacgtgacgtttatgctaagcgatttacctgagttcactctgaaccaggttgatgagtttgacctcccagaccgagtggttgtgaagcatgatggtagccggttcactaaagctttggaagatcgctatgcacaaggaacagccgaacttgtaaaggcccttcaagacgttgagccagatgaaccgtactgggaggatcttcgcaatgtcaatctccggaagaaggaccttaccaacttgcatcgccttgacgaactgtgctaccagcttgaggagcttgatgtctcaaacaacaagatcagtcaagtggaaggcataccttactctatgcgacggttgcaagtacag

SEQ ID NO: 73253 - DNA, 180 bp, Zea mays
  Clone ID: MRT4577_166804C.1
gccggccgggtcgggggttgatgagtaaatgacctgtgggccagagcgtgattaacggccaggattcagtctctgtgccttgtctggtgctgtagatgatcgttcctggtcaggagcccctggctaagggtggcccacaggttgtctgacaggtaaaaaaaaaaaaaaaaaaggccccta

SEQ ID NO: 73254 - DNA, 267 bp, Zea mays
  unsure (1)..(267): unsure at all n locations
  Clone ID: MRT4577_166805C.1
ggcgaccacgcgtncagggagtgctatataacacctgaaaagcttttcagttcaaaggtgaaagaaacttgctctggtgcgggcactctcagacagctgaccctagatcccatttgctgggacaggcacacgcaaagcatgctacacaagtacatatgcactgctctacgcgctgcagacatgcatctcattgacggtgataacccgaacttatgcatacttgagggccactgagagtgaattatgcttataacgaaagtgtaccta

SEQ ID NO: 73255 - DNA, 379 bp, Zea mays
  Clone ID: MRT4577_166806C.1
aattaaaacggtatttggttctaatactttttcaaaaatttggggaccagaaccaactatcctgggttacaaataaaacctcgtaggccaccctacaactaagggggctcaaaaggacggacttaaaggccacctttaaaaagacaaaaattgtgaagccgaccaacggggacccgaaaaaagctgagggcccagaacaggctggatgcacacaggcaacgaccaactggtctcaagtggaatccctaccagacatacaaaattatgcgacctcgtaaatggggtctggtttaaccctaggggaattccctaggccaggttaatctatttcggggctggcacttgccaatttgggggcaaccccttaatccaaaagcaa

SEQ ID NO: 73256 - DNA, 378 bp, Zea mays
  Clone ID: MRT4577_166807C.1
gaggccaaccgagagcaggataataaaacaccgatcctgaataaaacgaaatcgtataccaagaaatttacatcctcttcggtaaatatgaattcaccagatggtgcccagagttctggattattactacaagatgagaaggacgatgaggtcgagtgccaactggaacattactataaagatttcagtgatttagatccaaagaggcactatgctattcgtatattcaatactgatgacacttttacgactctctcatgtactccagcgactaccgtcgaagagataatacctgcacttaaaagaaaatttaacattacagcgcaagggaattttcaaatttccctgaaggtgggaaagttgtgttctagatcgcga

SEQ ID NO: 73257 - DNA, 404 bp, Zea mays
  Clone ID: MRT4577_166808C.1
ttaaaaaaaaaaaaaaaaaaaaaaaaaaaaaaaagaaaaaaaaaaaaaaaaaaaaaaaaaaaaaaaaaaaaaaaaaaaaaaaaaaaaaaaaaaaaaaaatataaggaaaagataaatcattttttattgaaacgaagatttacaaacgacaagggctgggaaatttaataacgtttcgaatgttaaaaagtttgggggtggcgtgccttttttcttctggtggcatttttcgttttttgcgcgtgtgcttgttctgcgtttaggggctgtgtgcttttccccttttgttaaatggggcgcgccttgtaggggtgctttataccccctctgttgtggtgttttttgcccccggggtgtgtttttttgccggcgctttaccgtctgtttttttggcgctcttgcgt

SEQ ID NO: 73258 - DNA, 374 bp, Zea mays
  Clone ID: MRT4577_166809C.1
accgaaaaagggtttccccccgctttatattataaagcaatcaccaccacaatacatccgagcaaacaacaaaagaaaggaaaaggaaaaacggcaaagatacacaatgctacagaacgactaacgggattcaaatgcaccaagcaaaggcttgagcatcgaagccctcagcaagctccacatcctgccattgataaggtgaagccaaggagactagtcactgtcggaggacgaccacactgtcaccttccgtgcaccatcactgcagaaccgccatccgcctccgcctccaaagaaggccccctgccctctcgtcctgggccgtaggacgccacgccgtcggtaggcagagctgctcacccctgagcacgcat

SEQ ID NO: 73259 - DNA, 715 bp, Zea mays
  Clone ID: MRT4577_16680C.1
ccggccgggttcttcgacgggctgctcagcttcttcggcggattcgcgttcgcgcccacaacctatttccttccatgcatcatgtggctcgcaatctacaagcccaaacggttcagcctctcatggttcaccaactggatctgcatcatccttggagtgcttctgatggtgctggcgccgattggagggctccggcagatcattatcagcgccaagacatacaagttctaccagtaaacattgcacaattatcgtgcaaaaaacaacgcaaaccccttgcttcaccagtaactgacagacaagtcttgttaggccatatataccatgttacgatcagctgaacaggttctggattttgttccatgagggcttccaactccttgtttaatttggcacgacaaaaaactcgcaccgggtgctctaatcggcggtcgattacagcgtccagtgcgagttctttgccgtgccaaaattgaaaggaggtcggctcggatgccggggcatgcatacaggacctagaacccgtttcggttgatgagaatgttcctggcatgtaatgcttcccttgttggttgtggtctaacctaggagtttgctttgagtggatctttgtacaattgtacgtgtatatgatgtttttttacattattcaggggaattggatcttagcttctgtgtgtgtatgcgtaaaaagggaaagagttgtgcttcatat

SEQ ID NO: 73260 - DNA, 397 bp, Zea mays
  Clone ID: MRT4577_166810C.1
agagaaaaatatgacaactcaatttcagactggcttcatcagagacaaatttagttcttttagtgccttctatgttctatcccttgctcccctctagcatctgattcacttgtacctagctgcagatttcgactctccactctgctgtaattaaccattttaattcaaaatttacagtagggcttccccctcctaaactttcaaaaaaaaagacacgccggtcaattttgcaggcgacccgtccatcctttttgacttggcgttccaattccaacatacacacgggcaatgcttacgtacggtagcaaataaccgcatcataaattaaatttagagaagggaatgcccttattattttaaataaaagaagggaggcattaccaatatagctctggcc

SEQ ID NO: 73261 - DNA, 638 bp, Zea mays
  Clone ID: MRT4577_166811C.1
ttcgcccatcctgctgcatcacgggaaccagactagaagagaccacacccacaacagtgacttatggctctggtagccctacctatactacggagcggcttagaagcacacacataactgccttggcttccacatcaagatcggagactttggctcagaagcgagttgctttttagagagcccatctatgccatgaatacgatagataagaactattaagcaaacagaagcccagcatgaaacagcagatcccaacgcctaacgagaagtgcattatccctgattgaaggcttagaaaacagaacctgacacaaaggggccaaagtcttatggtcagacaggaaaaaaacagatgttacccacaggtgaacaaggatcatcaacactatctacttatcacttgcaaaactgacaccaaataaccctcttactaatctgttacttaccatgtactctttctaaaatgtacgaacctctcctttatgcataattatagtgtgataatctctataatcatcacaatctgcaactgaccgtacatactagaatcatccaatgagctctaacaataaacttcaactgatactactagatcagacttaagcctgataaccagcaataccggtactagcttagca

SEQ ID NO: 73262 - DNA, 1006 bp, Zea mays
  Clone ID: MRT4577_166812C.1
cattgggtacctcgaggccggccgggatgatcactgccatggtgggccgtacaccggcccaggccccgcgagtcagtgacgtacccgtgacgcggccctccgagtcccaaacccctgctgcaagaaagaagctataaggaaagctaatccccctcgtcgagtgctccgcatctcgcattctcgccggtgctgctgcaattaacgccgcccccggccaaccacccgaaacctacctccgccgccgttgtcgccaccgtcaacatggcgagccaaggggagccctcggcctctgcttccgatccgaaggagaagaaggacttctcgacggcgatcctggagaggaaaaagtcaccgaaccgccttgtcgtcgacgaggccaccaacgacgataactccgtcgtcgcgctgcaccctgacaccatggagaggctgcagctcttccgcggcgacaccgtgctcctcaaggtctaatatgtctaagccgagcttttcacagcagctttgggaagttgagctggtttagcagattgtattatcacgcgaccgatctgtgtgtgaccgacccgaattcggtgtattcatagtgcagatctattagaaataaccttagctttatcactgtaaagtacttgctgagtttgctgagggtatttgggcccctctgattcgctgctatagtatgtagatttttgccaatttgcattcgtacaccattgattcagttgaaggttaatagtaatctagattgcttttattgcttcagtagcatattttaatatacttggtttgttatgttcaaatattctcctcatacatttgttatagatttaaatgcaaccactctttttgcttgaatatctcatgttcatcgttagaacagggaatcaacactatctagtattattcaaatttgtgctcgttgttctggtagatggagatgatgggctgcatacagaattgttattttatgattcctagcatgataatttggatgtgatggctggac

SEQ ID NO: 73263 - DNA, 228 bp, Zea mays
  unsure (1)..(228): unsure at all n locations
  Clone ID: MRT4577_166813C.1
ttttattttaagggggtacatgaaattacagatccaggacgggtttggtttaggtacaggccggttctctgcaagatctttagtcgcgcaaaaagaaggatcagccggtcgggaaganggaaaaggggggccgaatatcgaggtatccaattgtcaagagcagcatatgtgggggattgaatagcaccggttgtgtggaatgaacatacgtttttagggtgggtaaag

SEQ ID NO: 73264 - DNA, 144 bp, Zea mays
  unsure (1)..(144): unsure at all n locations
  Clone ID: MRT4577_166814C.1
gcacgacacgacaccaagtcgaggagctcgaganncnccantcatangccggcgtgaactccagcntngtcgggctcaancccgncgcggcagtgccgnggcgccgccgcctcatcncngtcnancgggtncngctggcntcgc

SEQ ID NO: 73265 - DNA, 771 bp, Zea mays
  Clone ID: MRT4577_166815C.1
ctagctcgccgggggcaccgccgctcgtcgttgcaacgccggtcacaggaaccggcgggattcggcagccctcagtctggatcgacgtccatgcctccagcttcgacatgcacgccagctggacggcgccgtgaatcgcctcgttttctagtgcgttcttgctcccagcgtgcaggaacctcttggaccgaggccgccttcctcggttccgtcagccgccgcggtcgtcatcctcaccgaacagctatagggactttgagggactctgctttgtccacatctgctctggaccacagatttgaagccgcggatccctcctacttcttcctgacgctgaccgccattaccactgcccatagctcgttgctctgctctgtccgacctcgccactaacagcaggatgagagaaagagagattgatttgctagtgcaagtatctaatgagccagatgccagctgttttgatcttttcagcaaacgctattgggaagttgtgagtgtgggagcgacactgtttttatttcagtaacttgctggcataaatgttgccgtgtactactctacgtccatgttccacagtacaggtcttgcatctaatgttgcagcgagtgctcttgttcggtgatgccaatgtttttggcaccatgattgcatctccactgatggtcaagcaaggaaggaagagccttctcataacaagattatctggaatgggcttgtcgatgttactcttgtcattgtccttcacttggaaggctttagcaccttatt

SEQ ID NO: 73266 - DNA, 280 bp, Zea mays
  Clone ID: MRT4577_166816C.1
ccaacttcatacttcgagcggcggggaactatcccatagcgatctcatactccaccaacgatttcaagaagccatccgagggcttctaccacatcaaccttaacgcaaatggacaccatggacatctgttgttcttcatcattatgaagtactcccaactaaccaaccattttaacgcttatagcaaccttcactctatggtcatgaatgccaaatccatcctgatccattgccacaaccttaacggcaaccatacccccacttacctccatattcaata

SEQ ID NO: 73267 - DNA, 224 bp, Zea mays
  unsure (1)..(224): unsure at all n locations
  Clone ID: MRT4577_166817C.1
gcacaacaacnacaacaacnngngcnaggaaaccangcngcccacncncagcaacagcagggncnnccaaacaaccaacnggcngcanngaacacagcngcnnannngcaacaacaacaaccanncagncagcnagcngcngccnacccccagcacaancnnccaaacaaccaacaggcagcanngaacacngcngcgnannaacaacagcaacagcgaccacc

SEQ ID NO: 73268 - DNA, 457 bp, Zea mays
  unsure (1)..(457): unsure at all n locations
  Clone ID: MRT4577_166818C.1
ggaaacaaaaccgttgggaaccaagcagccaaaccgttgcagggccgcctgtatggctttggactatggcccatgtccacgtttcctggcccgcctaaactggcatttaatcagctttttatgctacgggggtctttacagcaactgccctgacatgccctcaattaaatcatttacacctacccccaggcagaaggggagcaaaaacagaggggtctaggccatcctgggcgcctccctgaacccgatactgaagctgttttgcaggtgggccttcttggggggcccccccaccgggggtttttgaattatcgccacgaacttgttgtagtttatgcccccgtcgttgtcctggtccacttccccgatcaagtcctccagttggacgtngcccaggccgaactcttggcacgccacctgaagtttgtcgggggagatgaagccncttgccgtcctt

SEQ ID NO: 73269 - DNA, 1905 bp, Zea mays
  Clone ID: MRT4577_16681C.1
ctgtccgcgagctgcatctcaatctccatctccttctttctctccaccttctcctttgtgtgactccggccattggtgaagggaagctccgagccgccggaagggaagccaggcgccatggggacgcaggcctcgccggacaactacacgccgcccaaggatgagaggactgctcgggagaaggcgatcgatgactggcttcctatcacgtcgtcgaggaaagcaaagtggtggtactcggccttccacaatgtcaccgccatggttggcgctggggtgctcagcctcccctacgccatgtctgaacttggttggggtcctggcatcgcggtgatgaccttgtcgtggatcatcacggtgtacacgctgtggcagatggtggagatgcatgagatagtccccgggaagcgtttcgaccggtaccatgagctcgggcagcacgccttcggcgataagctcggcctctggatcgtggtgccacagcagcttgtcgtcgaggtcagcctgaacattgtgtacatggttaccggcggcaactcgctcaagaagttccacgacgtgatctgtgacggcaagtgcaaggacatcaagctcacttacttcatcatgatcttcgcctctgtccacttcgtcctctcccagctgccaaacttcaactccatctcgggcatctccctcgccgcagccgtcatgtcggtcggctactcggcgatcgcgtggaccgcgtcggcggcgcaggggaaggcggcggaggcggaggccgactacagcctgcgcgccacgaccatgccggggaaggtgttcggcttcctgggcgcgctgggcgacgtggcgttcacgtacgccgggcacaacgtggtgctggagatccaggccaccatcccgtccacaccggggaagccgtccaagaagcccatgtggaagggcgtcatcgtcgcctacgtcgtcatcgccgcgtgctacctccccgtcgcgctcgtcggctactgggccttcggcaacggcgtcgacgagaacatcctcatcaccctgaaccggccgcggtggctcatcgccgccgccaacatgatggtcgtcgtccacgtcgtcggcagctaccaggtgtaccgccatgccggtgttcgacatgatcgagacggtgctgggaagggaagtactggttcacgccggggttcaggctccgtctcattgcccggactgtctacgttgcactcacaatggttcgtggccatcacattccccttcttcagcgagctggctcagtttccttcggtgggattcgcctacgcacccacgagctacttccttccgtgcatcatgtggctcatcatctacaagcccaaacggttcagcctctcatggttcaccaactggatctgcatcatccttggagtgcttctgatggtgctggcgccgattggagggctccggcagatcattatcagcgccaagacatacaagttctaccagtaaacattgcacgattatcgtccaaaaacataccagttctaccagtaactgacagacaagtcttaggccatatataccatgttaccatcagctgacacaggttctggattctgttccatgagggctcccaactccttgtttaatttggcacgacaaaaagctcgcaccgggtgctctaatcggcggccgattacagcgtccagtgcgagttctttgccgtgccaaaattgaaaggaggtcggctcggatgccggggcatgcatacaggacctagaacccgtttcggttgatgagaatgttcctggcatgtaatgcttcccttgttggttgtggtctaacctaggagtttgctttgagtggatctttgtacaattgtacgtgtatatgatgtttttttacattattcaggagaaaaaaaaaaaaaaaaaagcggcc

SEQ ID NO: 73270 - DNA, 628 bp, Zea mays
  unsure (1)..(628): unsure at all n locations
  Clone ID: MRT4577_166820C.1
ccccaaaccgcgcgcgctgtgttgcataccgacatccacaccactgaacccaagcacaccgtccaaacgtccccggcggaggggtggccagcagcagctacaacaaaccaccccgcagaatcaactaccctcccaacttccaacgttcggcacgtactccgacgacgacgggaggaggttactaataaggttgacaaggttagaaatggtttgaaggaggagaacatagagggcgacataatcagtaccaatgagtaagacgtgatatccaatatcctataaaactnttcttcgcagattctccctgagaacaacaacgtttaggatgttttcgacgaggtcatcctaattatgacaatggaggtctcccaggtttttatagagaactagaaggtaaatcaataattgaccgaggttgtctactagaatctccaggacattatcgtgtttcatgtgttactgaactacaattttatgctaatggtaatcgagtaaaatttgttggacgtcgtcgacaagtatattgtcctagttactaagaaggttattttgatgaaggttctggttcttaacatgccaatataggacttgaaggtcaataacatggaggtcatggtcctaatcatgg

SEQ ID NO: 73271 - DNA, 534 bp, Zea mays
  unsure (1)..(534): unsure at all n locations
  Clone ID: MRT4577_166821C.1
gggtacctcgaggccggccgggccgggataacctacgagtctccgccggggtgcggcttcggtacggctccaagcatccgcgtacggagaaaagcaccgcagaccttgtcagagcctttcctcttcccggagggtcctacagggagggctcatccccaggcggcgcacgctccatcctctaagaggacgttgcggaagtaccggtaccggggaatggagccatatgcgatatgcgagatgtccactacacacctccgccagatcattgcccggggggccaggagaacgtcccaaagggggctgaagaggacagccctggcgttcatcattaaaatgatcaacgatagaaaagatgctcactgcatggagganaagacactattcagatgaagatgcatcgccgtaacctgaacgttgtccctgacatgattgcaagcagtggtggggactgccatgcagatacattcgaacacgtagagatccaggctgagatgatccggcactacccagctgatatctccaatcccgataagc

SEQ ID NO: 73272 - DNA, 276 bp, Zea mays
  Clone ID: MRT4577_166822C.1
cacccaccgttcgctctcgctcccaggccttctgccgcccggcccgcgccgcgccatagaagagccgtcgacggggagcagcagggccgccgcggcgcgcgcgccccgggtggtgggcgtgctggctgggctgctggagcgcgcggcggagcgcggcgacacggcgactcctacactggcggactcagcgttccagggccgcgcgctgccggatattcccgtgcggcggtactcgtattttatataccggtacgccgagttcttctttttctgcta

SEQ ID NO: 73273 - DNA, 533 bp, Zea mays
  Clone ID: MRT4577_166823C.1
tcaacttgatgtgtcacgagtactatggtcttgttcttgagtgcacctctaacacattccttgaagatctcagtgcccgtgtgcgcatcgaccgcgctgaatacatcgtcgaggaggtagatgtcgcagtcctggtagacggcgcgggcgagctggatgcgctgcttctgcccgccactaaggttgatgccgcgctccccgatctccgtttggtccccgaattccatcatctccaggtccttctccaggcagcacaccctgatcacctccttgtacctctcccggtgcatgggcttcccgaacaggatgttttcctcaatggtgccgttctggatccatgccgtctgcgccacgtatgccgtgctgccgcaaacctttaccttgccggagaacttgcgcatctcgccgaggatgcagcccagcagcgacgacttgccggagccaaccatgcccaccactgccgccagcgcacccgtccggatgtccaggtcgatcccgcgcagcacctcctggccggcgtccacctcgtcgtc

SEQ ID NO: 73274 - DNA, 316 bp, Zea mays
  Clone ID: MRT4577_166824C.1
gcaggtgaagaaaagttacataggtgttcatcagcagatagaggcagagatgatcaaggttaccaaaacagaattggagaagttaaaaaacagctatagacaattaataaaagaaatgaattctgccaaagagaaatataaagaagctttagctaaaggttaggcaaaattttaaaaattgtttacttaggtgatttttattcttactgtttgaacgttatctttgtaagtagtggaatgattccatttagagcatttcacatataaaaaactcaaaatcaacccacattggctaattggtcaaaaaaaaaagaaa

SEQ ID NO: 73275 - DNA, 259 bp, Zea mays
  Clone ID: MRT4577_166825C.1
aaagacagtggcatgaggtagctcggatgccccacaagttcttccaaggatttggtgaattcgatgatgtttttgcctgcagcgaatcatcatgggccaaatccaggttttctcatgtgggggctggtccatccattattgtctgagatggtgcccccatgactctgcagcaccagcacggtcgatacgagccagagacgccattgatgaggtttcgacgctagctgctgtctgctgtgtgcgaatagtgctcagctga

SEQ ID NO: 73276 - DNA, 470 bp, Zea mays
  Clone ID: MRT4577_166826C.1
aaaacatcttgccctcttgctgtccttaacggcgctttttttttttttttttaccaaaaaataccgttacttaggttgcgagccggatcttgaaccccctatcagggccaaaaaataaccaccacaaagtccaaccaaccacaaaagttaagcggacacaccgccctgcaaacttggagactgggccacgactgcagcacactcaaactgaccaaaccgtaccaccttgacttggggccagggccgccgtgcgaggggcgtctgtctgccgcgcgccgccatgtcttacgccctgtcattgcatatggggtgaagcttcactcttattgctcaactgtcgtgggagctggttgggtcaccagctgatggcggtgatgctctcactttttgcatcgcggagcttgaccaattttgtcttactgttgcccgacctggtcgacccgaattcgacgtcctgcagctccactttc

SEQ ID NO: 73277 - DNA, 168 bp, Zea mays
  Clone ID: MRT4577_166827C.1
gtcctttttgtatttttttatagacgagaaaacccgttactagacgtcgttttttcatggatgattgctttgattcccaacaatactgctgagaccccttttttgtctccacccggaaaaactggccccaaaaatgccacaaactgtgcgggggggatgtcactaaaa

SEQ ID NO: 73278 - DNA, 929 bp, Zea mays
  unsure (1)..(929): unsure at all n locations
  Clone ID: MRT4577_166828C.1
ctccttaagacagagccaggccgccaaattaaacttgaccatttcctctctctctttctctctaactccgggtccctctctctctctctctattctctccatccttgcttctgggaagctcatcagccatggacgatgccgctgcagaggaagaagcttccatgttcgagaccagccatgtcctcggcgccctgctggcctcctcgccgttgctggcgcgcgcctgggaccgctgcacagccgcctccgccgcagcgccgtggttcgttcacggcgaagacggcggcaaggtgtacgtggggttctctggggtgcaggctgcgcttacggcggcaggcgcggcggtggccggcggcggcgccgacatcttcgcgccggtgagtctcggcggggacgcggcggggcggatgttcgcgccgctggtcgccgccgagcccgacccggccgctaccggggagccggttgccgtgcaggcgctggcgctgcagtgcttcctgaaactctgctgcagtcctgatttccagatgcttctgaatcagatcaggggcaaggcagtcgtgttcacgggccactcccttggtggcgccgttgcggccctcacggcgctacactacctctgcatctcatcgtcaagctcgccacctgctcctcctgtcctgtgcgtcacctttggaagcccattacttggcaacgaggcgctgtccagggccatcctgcgtgagcactggggtggtaacttctgccacgtagtctcacagcacgatgtcgtnccaaggctcctcttctgctccccggacgccgtacccgcgcacatcattgttggaatgcaactgcagcaatggtcggcgtggactcggcccacaggagctgtgagcacggtcaccgcgcacatggcggtcactgacaaagacgtgctccggcagctgatc

SEQ ID NO: 73279 - DNA, 366 bp, Zea mays
  Clone ID: MRT4577_166829C.1
tttaagggacaaaaaaaggggaggggcgattaattttgtttcacatgccaaagaacacaaatccctcccagtggacataccgaacatacagtctttacaacaccaaacacattggacccaccatacaacaggggctaaccaacgcaaaacgaatcccaatgctcaaatcacaacccaaactccaggaaatcctggcaccagagccgaacagatacacgcactcagctgacacaggagactattgtatcctagccagacactttactgggattgccatcagaggcacctaaaggatgagctcacgcaggctttaaggcacccatatccagacggcacttgcacatggctgttggaaatgaatgacat

SEQ ID NO: 73280 - DNA, 363 bp, Zea mays
  Clone ID: MRT4577_16682C.1
ggtgcatgagggggggcaaaacatctaggcacaccaactacaacaactagaggaagcaaacttagctgaatactgtcaacaccattagattcatccattcaaccaactgggtgcagtgaactgtgatggttattggcaacaacagtgaccattcagccagatgggcgctggctacccccagcaataacttccatgaaaccaactatgcaggatagaactatgctgctcattcacagctgctacaactactaccattgatccaggtagctgatgtgagccctgctgtcttctcgacacaacaacaggcggtggcgggctacctgcacgctatgcctaacgctggaactctcttacaacagcaac

SEQ ID NO: 73281 - DNA, 783 bp, Zea mays
  Clone ID: MRT4577_166830C.1
cattgggaccctcgaggccggccgggtctgctccatgggatactctcagaggacaatatatactgaagtattgacgcaacaagcactatacaccggcggcaatggcagagctagcattattgtccccgcctcaaagaccctacaacaacacgcacagcgtcatctcttcgggcagcaaagagaacctgccgggggacgtgatcaccccgtgcagccgctgctccaggaagctgctcctggcaggcgccgcgtccttcgcgttctgcctcctgtccgtcgccgcgtgcctcctactgcgcttcctccttcggcgctggtgccgtcgccgccgcggtccaggtctcgtgcagcaggaggaggaggaggcgcagctaaagctcggcggcggcggcggccttgacgccgaagccattgctctgctgccttcttccttcccgtaccaccggcgaggcaacgacaaccccgaggtggagtgcgccgtgtgcctcggcgtcctggacgaagggcagacggctaggcagctccctggctgcgcgcacgtgttccaccagcagtgcgtcgacgcctggcttgcgtcgaacgcgtcgtgcccggtctgccgccggaggactggcccgcaggctgaggaggaagccgcggcggcgccggtcgacgtgtagacgtatagtaattactgcagtgccggcagcgttgtcctaccatgagctcaagctagagctgtcgccacaatgactcaataatgaaagtggtttgggttgaaaataattttttttatgccagaag

SEQ ID NO: 73282 - DNA, 353 bp, Zea mays
  Clone ID: MRT4577_166831C.1
cgcataccagctggtcttacactagttctatatcgaactcttgaacccacacatgcttattaacatgtataggggcgacaccagcggggtggtcaccatggagcacaccatgcactacatcatgcaggacattagctggctcttgatcaggcattgggtctacctgggcgcgttcagtggtctcggtagtggtcacggatgagacgcccgcgcagaagaacgccctggtcattatccaggttatgaatgacggggcgtacggcgatgcgcatgagcaggccagtgacatcatcgtgaatctcaaggtgagcgtccggctgagcgagcgcttcaacaagatcatgcacaagcac

SEQ ID NO: 73283 - DNA, 326 bp, Zea mays
  Clone ID: MRT4577_166832C.1
tctgcgctccgtcgacgttgcttaccgcctatctgggcaagcaccgccgcatgagcgaaggatcgtaaagatggcggtgccgctgatgacgcataagatcgagaagaagagggtcacgcatttcaagaggccctattttgaccggtacaagtgccttaagccaagctggctcaagcccaacggtattgactccggagtgaggcgtcagttcaagggatgcacctggatgcccaacactggatatggctgcgacatgaagaccaggcactaccttgctaacaagttcaaaaagttcagttgtttacaatggattctaactggagctt

SEQ ID NO: 73284 - DNA, 305 bp, Zea mays
  Clone ID: MRT4577_166833C.1
cgcacgcgtaccgctacatgcgcaatttgcgcgagtgagtcccaagacctccggagacggtcgccatggtacgcatctcataccccacggtggcgatcgctaactacgaccacatcatgggcaccatcacgcgtgacacgcgctatcgcatggtgaacaccagcaatgtcccacgcggcgcaaagatcacgaccatgttgatgaacgggagcccgcgccacaggcatacgcagaagatgcacagctgtagacaaggacggcaaacctgaaaggcccatacatacgagactgttaagggacacctg

SEQ ID NO: 73285 - DNA, 595 bp, Zea mays
  Clone ID: MRT4577_166834C.1
aattagtttcaggttgtcctaaaaccaactattttaagttgggacaattgtgattataccctccattgtcctctcatattcagtggactaagggtgctctaatagcacatcatcatggaggggctatagcgagagcctcaggttaccgcctttgaagcacactaggatgtcaatggagatagcaagggccagttgtcgaccttctcgggccaattgggcatggaacttgtcccctgtgtcctagcttcatcgcaacttgtgtgaaagcaacacatgcacctacgagggggggggtaaatttttaaactaggccacaaatgaatccctagaacaaaacctatgcaaataatgaatctagaatgtgcaaactaagttttgtctaagtgttgctacgcaaggtcctgactaatcctcgttggtgtccctacataaagggaagcccacgcgagggccaagcaccacggtcgagtaactccatagagagccgcgggacttctcccacgcaagtggtgctccgcttctggctcctctcggacgctccccgccgtctccactatcgagctttcagccgaaacggccgcggtccttgttccct

SEQ ID NO: 73286 - DNA, 663 bp, Zea mays
  Clone ID: MRT4577_166835C.1
cattgggtacctcgaggccggccgggaccgtcataaagccccccgggggccgggggccgggcctcgtctcgtttcagttcctcgtcgccctcgccacttcgccgccgccgctttggctccacccagtccgcttccggcatccgcccatggctgcggcccccgcccgccacctcgccgcggccttcacggccgccgctgcgcaccagcgcgtcgcgttcaggcgcgtccaggtccgggccccggtgtccgcctctctctccttcccgccgcgccatcccgcgccatttcgcggcagggccagcctcgcctgccccgccgccgcctctctatccgtcccctccggcgccgcgcctccgggctccgtgccattcaacctcctgccgcccgactccgaccctttcatcgagtgggacccgcccccgggcgactccgccccctcgccgctcgctggcggcggtgcttccgggggtgccacgctggtcgtgctgctcggctggctcggcgcgcgccagaagcacctgcgccgctacgccgacctctaccgcgagcgcggggtcggcgcggtgcggttcgtcgtgcccgtgcgcgagctcgtcggcctcgacctcggccgccgcgtcgagcgcagggtcgccgacctctccgagcaggtcgccgcgtggt

SEQ ID NO: 73287 - DNA, 452 bp, Zea mays
  Clone ID: MRT4577_166836C.1
atcttgggatgacaggtttgtctgattgatatagcgaattagctacattgagtcttggctggacatgtcttccgggtttttagataggatagaatagcgagcaggaccaatctctgcacggccgaactgttaaatagaaaactatgcttcagtcgcagaaattactacaaaaatgtttttttttgcatatgtgaaattcacacttcacagtccatttattaaactttttagaagtcgtggtatgcattgcaatataccattcattacttcaccttggcgtgctgaatggaattctcaaacttacagctgattcatacgcttgttccattttaggccatgtttggccaatgcacaaggagaatgtcaactacggcgacagcactgaactcaactgtggccagtggagcagcaaattcaggattcaagctggttgttcaaaaggggctcatgtg

SEQ ID NO: 73288 - DNA, 381 bp, Zea mays
  Clone ID: MRT4577_166837C.1
aaaagaagaggggaaaaatgattttacattggtccgtaaacatgcctattttcaaacgggaggccgatcggttccagaccagattcacaggacactccagaatacagtacacgtacacaggtgtcatttcgaacacacttaacggctgaaagatcaaccgaacgaggctaagcattttggtaccaacaccatgcggccggaccttttttgtctataactaaaccaggcacgggtccgtcggactttacacacacctcgagattggaacgccggctagggagagcataggacactttagaaaaccatggccaccgggtggctcactgattggaggtgctggcatccatcgagcggagccccttcgctgcactggtggggaac

SEQ ID NO: 73289 - DNA, 271 bp, Zea mays
  Clone ID: MRT4577_166838C.1
cttaaaaaaaaacccactgggataaaaaaagggggggtccgtgtaccgtacagagttttacacttcgggaatgaaaacttttcttatgacaaggacagggtttaccgaagaggtaagtcccccttttacttaaacataactgactttcttaaaaacgattgggactaaacccaaacacccaggggggggcacttattaccacagatcgatcgatagccaccaactttattttagcaacacggcagcagttgctgaccacaggggggtttgc

SEQ ID NO: 73290 - DNA, 307 bp, Zea mays
  Clone ID: MRT4577_166839C.1
cttgcttgggtgagcagagaatagtggatgatacggggtaaaagatgatggacgtcaccttgcaggtggtcgcggacacggagccggtgcttgtgcaaggtggtgccgtctacggtgaggtcaatgacaacccgttcggggaggacgtcgaaaatgctgatggttacattgaatgaagatagcaaggaacagtgatacagcaggaacaggctgaagtacctgggggcgttttcgggccaaacgaactagtagctgaggaggaagttaatgagccagtactggtgggacaccgggtggatgtggaagg

SEQ ID NO: 73291 - DNA, 288 bp, Zea mays
  Clone ID: MRT4577_16683C.1
gtgcgatccttgacaaacttgctcagggtgatgtttcatacggtaatgttattgcatatgtgactcgcggaaatgatcagcacgtttgcttctatgacgaagacgatatgttctggcacgctcggaataatagctactgctgctattactaccagaactgtagtgagccaaaatccttgtacgatgattacatctgcaccttctacacgaggaacgctctcaagaaccattcgtacaagagaccattaccatatgaagggactgagctctatacgcctacgaggtgtt

SEQ ID NO: 73292 - DNA, 467 bp, Zea mays
  Clone ID: MRT4577_166840C.1
tccatgcgtccgctcacgcgttcgcccacgcgtacggtgtatatatatactggatcaatggatatcacaggatgtaatgtataaatggatctctttggcgtaactaccctactagactactaaaagacactgatccatgattatatagtgactgtatttatcgtaacaagatagacgggaaacatcacacccatacgtggaggagaggtgacccacatatacatacgccagtatggcttgaactacaaggcaattgcacatctaagctatatgcctagatacagcctcttaacacccactcgcagacgctgtgcgagaatcacggacgcacagtagactgaatatcgcatgacaaactgaacaagcaagctcttgggcataatgtcagctaactgcagagaggacaacatctggagcaccctaactaggctcaggttgggagcgctgtctgagccaggcaggttttg

SEQ ID NO: 73293 - DNA, 204 bp, Zea mays
  Clone ID: MRT4577_166841C.1
gcggccggtcttcaaaaaaagggagtgaaggctccatcatatccaacgccaccagctagcagcagcagcagcagcatgaacaccaccagcacgcctcgcctcgccaccctcccgaagctaccggcggaggcgacaccgctgatgagagcagataaaaaggacgcccccaaggatccggcggaggagaaagcggcgccagggccg

SEQ ID NO: 73294 - DNA, 216 bp, Zea mays
  unsure (1)..(216): unsure at all n locations
  Clone ID: MRT4577_166842C.1
gagcgcgagncaccggcgaaaggggggagcgcgggcacgcaaagcggcaaaacaggaaggaagcagaaacgagggggcacgacaagaacaagagcccaggcgacaacaagggcgccaacgaagacaaccccaagaaggccaaccagaagcacgacaagaaaaggcaccacgacaagaaccccaacaacaagaaggaggccgagaacaaggacaagc

SEQ ID NO: 73295 - DNA, 267 bp, Zea mays
  Clone ID: MRT4577_166843C.1
atatttttttttttttattcaaaccaaattctgattgaaaaaatatggaatcctagttaggaccaataagacagactaacagaaaaggcaaatgaccgacattgatttacagtagcatatagttcatccttagtgaaatcaatgttatttaatcgtataggctgactattcgccttagggacgatttgatccacatggatgatcctagttgactctaatcagtggttagttgttttgatctccaggaacttatattggggacaattt

SEQ ID NO: 73296 - DNA, 229 bp, Zea mays
  Clone ID: MRT4577_166844C.1
cacgacgacctgctcttccactactccgaccagtacctcgccgacgacgtagcctgcttctaggagtcgctccgtcacgcacggcgcgaggtgttcgacgacgcccagccgcggcggcgcaagatccagcggctcctcctggcggacggcatcactggcaagcacatcaggacaggtgaggatgtgtcactgtccatgcgcatctgagcgacattgctgctgatgacca

SEQ ID NO: 73297 - DNA, 562 bp, Zea mays
  Clone ID: MRT4577_166845C.1
gccctgggtcacacagtgactgtatcaggatctgctatcaggctacgagcttcagtgacattcattcaccttcaacgtgctcgctatcggcattcttatggaggcctagggaaagtggctcacccaacgtcctgttgatgtggacattggtgccaatccatccgacaaggtggtgaggacaaaagccttgatgacacagctaagaaggtcgttgatattgaagacacattccgtatacaggagcaacctctcttctgacaagaaatcatttgtgaattacatcataaaatacatcaagaatctcactagctgtgtatggcatccagtagaaagcggatgattacaaaaagggtgtcaagggtgcacaccaacttctccttatcaacctcaatgacctccaattttttgctggtgagtccatgaaagatgatgcggctgccgtatccgactattacaacgatggtgccactaatacgacattcctctatttctctcatggacttaaagagatcaactgctacgcctgcagacaaattacttacccatgttgagtactatctat

SEQ ID NO: 73298 - DNA, 401 bp, Zea mays
  Clone ID: MRT4577_166847C.1
cgggccgaccacacgcgtccggcagggcccaaaattaagtggcctttttttgaaaggtgtaaaatgctgaaagataaaatatggcgcggcgttttttttgagaaggatgggtttcaaagtgtttttataaccattccgttgtccaaatttaacttggatttttttccggttaaaaaaaaaaattttgggttgttttcaacagtaaaaagggttttaaaggggttaattccatcctttggccatgatcttgatggccttttatttaagggttggtacaatccttatgtaactcgaactaattaaggtttcctgaagtgtaaatcccttgggatgaattttttgtattttcttttccgcctttccaatgtattcttttacttggttttcttttttgagtgggt

SEQ ID NO: 73299 - DNA, 452 bp, Zea mays
  Clone ID: MRT4577_166848C.1
ccaaagttgtcttagataatcggatcaattgtccgtacgtaagaagggtggagatgtaattagagtggacatggcgttgctaatatgatcgtttgcagcttgcggtcactttgggggacagatatcccccagatccactagaaggcaagaaggcctcgcggaaggctttgggcctattatctcgcaaggccatcccttcgtgggccaggggaggactactggtggaatgggccgatgcgtgataaggaataagtctcaggcccaagcaactcgacaaactcaagcgctatctgcagcgtccgcccgactttcccgcgcgcagtgcccttggacgtcggaatggatcagagataaatcaacaagattacaggaagataagttcagtcggttcactattgtttaggtacacatcatcatcatacacacatgtagtgccccacggtcgagtatat

SEQ ID NO: 73300 - DNA, 316 bp, Zea mays
  unsure (1)..(316): unsure at all n locations
  Clone ID: MRT4577_16684C.1
atgataaaatttttaatggcatcagcccccaaaattgagttcatcttgtcatgtgggtggatgggcgaatttgccatgtttctgctccttatccacatggggtgcatatgtttcccaaaaactctgtgtcgtttgcggcgctgcgttgcgtcggggaacatgcagttcattttgattaatctgaaaggtgcgtccttgnncgaggcaaattggtgtttctccaaagcttcatgatcccccnatccgacactggcgtgtctctttgcttaaggtccccaacccctgncctgcctgctctgctgatgtttaagatgcc

SEQ ID NO: 73301 - DNA, 806 bp, Zea mays
  unsure (1)..(806): unsure at all n locations
  Clone ID: MRT4577_166850C.1
gctcagnaagcggggaggaagaaaaagtcgatcgatggcgtccaactatcgtggnacaccgactgggcgagggnagtggacggttccatcggccctcacagccacagcaccagcacgaccccgacgggcggcgcggcggcggcggcggcatcgcccgcgacccacgccgggtcgttcaagtgccggctccaccgcaccaactcccagggccacggccacggccacccgcacccgtccccgccggcctcccccgtaccgccggcgcatggcgtcccgggcgcttcctcccgcaccgtcgaggccctgtgagtgtccgaggccaaagacgggcgaggcgtggggaaagtgagaagatgatgggatatacttgtcgtgtcagtctgtcagaaggaaaggagtgaagctattattccctcttgttgtgatccgcgctgttttgcctcttcccccctacccgtttcctcccttcgtgctggttgtggttctaaattcctgattgccggccgtcccgccttcttccttgccaagacgagactctcctcctcctgccactgctaccgctgctcctctcaactggtgaactggatcctgatttggggagaaggttaaactggatgcctttccatgtaattaattgcctctctttaccattctacgtgctactagtattgaagtatcatcacccttgttgtgtccttctgtctgtggtgtgatggtcatggactcatggtctgtgtttcttcggtgaagagttcgtacccgtacataaaagatcttcaatcaaaaaaaaaaaaaaaaaagcggcc

SEQ ID NO: 73302 - DNA, 146 bp, Zea mays
  Clone ID: MRT4577_166851C.1
gggcacaacaaattgttttgcccttataatcacaattgcgccaacaaaaacgcgctccccaaagttacaacccgagcaggaaaccgctcattgcctgggggcgtaacaacccaaacaaattgccttacagtaaaaaaaccaatgcc

SEQ ID NO: 73303 - DNA, 259 bp, Zea mays
  Clone ID: MRT4577_166852C.1
gccgggttcgagtatttgccgctctgtgagcctgcttccgtcttcttccgccgccgccgccgtcgtcttcgtccgtagatcagagagcggggaggaagaaaaagcgatcgatggcgtccaactacgtggacacgacgggcgaggagggacggttccacggccctcacagccacagcaccagcacggcgcagggcgtctcgtcttccgcttcctcccgcaccgtcgaggccctgtgagtgtccgaggccaaagacgggcg

SEQ ID NO: 73304 - DNA, 238 bp, Zea mays
  Clone ID: MRT4577_166853C.1
ccgacgcgtgggaaaacacgtactgattgctcaagagcttggcctgcaagtcctggggggtatcatatgatgggcaaatacaatttaagctccgaaactttctactaccaccccatcacttgcgataccaaatgctatatcaaatgctggactagactcatccaatgttcatattgttgagattaatctagccttttctgctgccgtactagcaaatcaaaagttacttgtgattgct

SEQ ID NO: 73305 - DNA, 406 bp, Zea mays
  Clone ID: MRT4577_166854C.1
ctcgaggccggccgggccgggagtttgccgctctgtgagcctgctgccgtcttcttccgccgccgccgccgtcgtcttcgtccgtagatcagagagcggggaggaagaaaaagcgatcgatggcgtccaactacgtggacacgacgggcgaggagggacggttccacggccctcacagccacagcaccagcacgaccccgacgggcggcgcggcggcggcggcggcggcggggccaagtgcgtgtgcgcgcccgcgacccacgccgggtcgttcaagtgccggctccaccgcaccaactcccagggccacggccacggccacccgcacccgtccccgccggcatcccccgccgcgccggcgaggggcgcgggggcttcccattcctcgctcgcgtacctggtcctc

SEQ ID NO: 73306 - DNA, 841 bp, Zea mays
  Clone ID: MRT4577_166855C.1
accacagacagaaggaattcacaacaagggtgatgatacttcaatactagtagtacgtraatggtaaagagatgcaattaattacataggcatccagtttaaccttctccccaaatcaggatccagttcaccagttgagaggagcagcggtagcagtggcaggaggrggagagtctcgtcttggcaaggragarggsgggacggccggcaatcaggaatttagaaccacaaccagcacgaagggaggaaacgggtagggggrrgaggcaaaacagcgcggatcacaacaagagggagggaataatagcttccctcctttccttctgacagactgacacgacaagtatatcccatcatcttctcactttccccgcgtctcgcccgtctttggcctcggacactcacagggcctcgacggtgcgggaggaagcggaagacgagacgccctgcgccggcgcggcgggggaggccggcggggacgggtgcgggtggccgtggccctgggagttggtgcggtggagccggcacttgaacgacccggcgtgggtcgcgggcgcgcacacgcacttggccccgccgccgccgccgtggctgtggcccgcggaggacgcggaggagaagctgcgccggaagttgcgcggcgatgccscggccgccgccgcgccgcccgtcggggtcgtgctggtgctgtggctgtragggccgtggaaccgtccctcctcgcccgtcgtgtccacgtagttggacgccatcgatcggtttttcttcctccccgctctctgatctgctgctctacggacgaagacgacggcggsggcggcggaaraagacgggcagcagg

SEQ ID NO: 73307 - DNA, 2129 bp, Zea mays
  unsure (1)..(2129): unsure at all n locations
  Clone ID: MRT4577_166856C.1
aaacaaaggagaacaattctcacgaggtctgtccagcctgggagataccaacctcaaaaaccaccagtggtggagtcaatgataagaacagcgcagtcagcttgggaagtgccagtaatcatattcttgatgaagtcacggtgtccaggggcatcaatgacagtgcagtagtacttggtggtctcgaacttccacagagcaatatcaatcgngatacctctcacacgctcggccgngagcnngncaagcacccaggcaaacnngaaagaccgcggggcgatgggccgcgacaaaaaaacacgaaccacncaaccgcaccgncgtcaatcccgcccgttttttttttttttttttttttttttttttttttttttttttttttttttttttttttttttttttttacggggcccaactcttcaccgaaaaaaacacgggagtagcttgctccccaatggacacacagaccattaccatcacaccacagacagaaggaattcacaacaagggtgatgatacttcaatactagtagtacgtagaatggtaaagagaggcaattaattacataggcatccagtttaaccttctccccaaatcaggatccagttcaccagttgagaggagcagcggtagcagtggcaggaggaggagagtctcgtcttggcaaggaagaaggagggacggttccacggccctcacagccacagcaccagcacgaccccgacgggcggcgcggcggcggcggcggcatcgccgcgcaacttccggcgcagcttctcctccgcgtcctccgcgggccacagccacggcggcggcggcggcggggccaagtgcgtgtgcgcgcccgcgacccacgccgggtcgttcaagtgccggctccaccgcaccaactcccagggccacggtcacggccacccgcacccgtccccgtcagcctactccgtcgttccaggccactgggcttagccattctgtgagcctgctgccgtcttcttccgccgccgccgccgtcgtcgtcttcgtccgtagcagatcagagagcggggaggaagaaaaagcgatcgatggcgtccaactacgtggacacgccgggcgaggagggacggttccacggccctcacagccacagcaccagcacgaccccgacgggcggcgcggcggcggcggcggcatcgccgcgcaacttccggcgcagcttctcctccgcgtcctccgcgggccacagccacggcggcggcggcggnagacgcagatggatgttggacacgacgggcgaggccggccgggacccaacgagcctcacatttcgcaactcacactgataatcctaatatccaaccactcgacatcctaatctctccctctcagacacaatggtctctttcaccaccctcctcaccctcgctgccggcgctctcgctgcccctgcccctgccgacacgcagtccccgccacagcaggttctgcccgcaggctaccccaacccttgggcctggcacgtcgaagacttcgaagccggctgtgtgcgcagcggctgctactaccgattcaacctctcagttcccgcaaccgaagcctacccacaaggcggcaagtactcctgcagcggcaccgagaatggcgagtttggcaatgaaaacactttcgaagactgcagcattgttggagatgacaatgccgctaccgctgccgccaagctgggtaggaggatcaactccgagcctcccaagcaactttatgttagcttcttgaagccaggttccgcagccgaccagacgaacccatacaactttaccgcaatcacgactgattggacgtacaacgcgtttgtcgccgtcgatgaggagtttgacgtctaccctactatctggcaacagtaccctcttccccagagcaaggtagcttgatttgtttgaaggatctgggaaggaacggaaatcggtcgccaaacctgactatgcgatggagcgggtccatggaaacttccagtctttgcggtttctcaacttctctccatgtttccaaaactatagaaccttgtagatatgcaaccatgtagatactatgatgattagatttaacgcaatatttttttgatctttccaaaaaaaaaaaaaaaaaagcccct

SEQ ID NO: 73308 - DNA, 309 bp, Zea mays
  Clone ID: MRT4577_166857C.1
gggaaaaaaaggggccgacccacacgtccgaaccttgcaacataaaaagaacaattttttatcaacaatccaacaccaacaacggcggggatttatacacttctgccgctccacaattcttcataccccaacactataaccacaatgctcacaaaatcatatcaatttcctatttcccccatacctccaacctacctaccatcaaatatttcaataccctattaacaaacacttctgcaaccctatagcctacaacacatcatttcccacagcgtcatacatttaccacctatcctccaacaaccgtta

SEQ ID NO: 73309 - DNA, 586 bp, Zea mays
  unsure (1)..(586): unsure at all n locations
  Clone ID: MRT4577_166858C.1
ctgcgnttcgcagagccatgagggtgcgcgggcgcggggattggctccctcgcgtgtggggtggtggtggccaccgtgtcgagctttctcaacccgtgcagcctcgaggagatcagattcttcgctcagaagaagaacctggggcccatactgttcgacaccgagccggcagagatcgcgggggttttcgatggtagactggaggataaggaagcgaaggaggcgttcgaagggctgatgcggtgccacgaattcaagctcgaggcgaacgagagcgattcaagaggctgtgtgtcgaggacagtcacactgcttcggtccaagcttgggcggaagaacatcgccgagagggagagcgaagcctctgatggcctgccttttccgcgcaaccggcattttgtgggaagggagaaggagctgagcgagatcgaaggcgtgctctttggttcgaccgccgcgggtatccaggaagtggattgcccgagggcttccagtacaaatgagagatcgagcggcgtatctgatggatttgctgatgaggacagtgacaccgcgaggaaatctaatgccaggtacatcagtttgg

SEQ ID NO: 73310 - DNA, 174 bp, Zea mays
  Clone ID: MRT4577_16685C.1
gtcgagctggtcttaaggggcagcggcgcctggcaccctcgcttcttgaaaccgggccgccctcttggacccagaaggtgcgcgggctggcgcggagcggtgctctacggggcgccggttgcgtgaggctcgggttcgggtcagacggaacagttgtgtccttttggggggggg

SEQ ID NO: 73311 - DNA, 431 bp, Zea mays
  Clone ID: MRT4577_166860C.1
aaccaaggtttaatattccggggggggggtggagttaaagggggattttagggggatttaaaggttacacgggggggggattgggaaacaacgaaggggggtttacaaatttgggagggaactttgggggaacgaaaaaaacagatcggtgagaaaggggcctcaatggttaaggattgggaactgggaaaccaaggttacttaaatatactttagaggggtttaaaactttatttttaattaaaaagggtttaggggaagaaccttttggaaaaatttaagaccaaaaacccttaacggggggttttgttccactgggggtgaaaccccggagaaaaaaaaaaagggtctttttgagaacctttttttttgggcgtaaatgggtggttggaaaaaaaaaaaacaccgctaccaggggggggttgtttggg

SEQ ID NO: 73312 - DNA, 143 bp, Zea mays
  Clone ID: MRT4577_166861C.1
ccagtacatatatttaataggcgggctccaaggatcacgctaacattgaagccaacggtactggatgataaagtccctggactcgcccaagtatcatgtttaacgcgtggtgaaatgtccttattgggatcgatacaagaact

SEQ ID NO: 73313 - DNA, 694 bp, Zea mays
  Clone ID: MRT4577_166862C.1
gaaagaaagcaatggaaatcagtagattattactatcattacaaactatatatgcagctgctactagttatatatgaacataacaagcacatacatacatacagcagtatatatgatgatactatatctatgcggagacttatatatactagctatggactatggtgtggtggtcatgagccgtagcatcccaaaaaccatgacagcgtcgtcctggcatggccgccgggcgaagacgacgacgcggccgccgccgatctggcgtcgtcccaacctgctggagcacccagcagtgccttcctgtgcttcctcttgttcttggtgtgcgccaccttcccgcgcaccgtcacctccttcttcccgaagtccaccatgtagtccagcagcccgttcatcttggagacgacgtcggcgacccgctgccggcagtgcgagcaacccatgttggcgctcatcaccaccacctgcaccgatgggagggagagatcttccgcaaacctcagagcctgtagcttgcttggcgtgctgctgacggttgcgtccgacgaggcgccgaagctccgcttggaggaggaggaggaggactcactccccctgtcgtcttcattccctccgtgctccagctccatgtccatggcggcgtgcgcgtgggctcttcttgatgcttgagctccccctccctttccggccgaga

SEQ ID NO: 73314 - DNA, 2650 bp, Zea mays
  Clone ID: MRT4577_166863C.1
gccgatctggcgtcgtcccaacctgctggagcacccagcagtgccttcctgtgcttcctcttgttcttggtgtgcgccaccttcccgcgcaccgtcacctccttcttcccgaagtccaccatgtagtccagcagcccgttcatcttggagacgacgtcggcgacccgctgccggcagtgcgagcaacccatgttggcgctcatcaccaccacctgcacctgcgcatgcatggttccagcgacgcatcattcattcattcgcatccgcattgcctctacgcgcgtaatgaataaaagaaaatgttgcttctctcgaaataaaacacacgttccgttttctaaaaaaacaaaacaaaacaaaactagcctatacgtaattaataaaaagctagttaattaagagcatctccaagagactggataaatggcttgtcaagttaaattttagctatttaatagcaaaatagctcttcaacagactatccgtttaacttgccaagctatccggctctttaaattgaccctctcactagctaaatttggctagcaactctcgccagttaaactaacttacatgtttaagagtctgttcgaatgaaatgttatatatagagtttaatctttatagacagataaatagagtaaaaagtaaagagtatattaatcccaccttccactgatcgatcaggacgtacgtacggctagagttcattgtatatagttgaggggaatatattcgtacgtagcacagggaagctaggagggaagagatgcatatgttcctctccaaaagtcacatggctagctgctgccactcttgaaccctaatgcagattgttctaataatctaatcctacacagccacaggcagccaccagctaggcagctagcggtattatatatactccattcgttcttttttatttgtcacgttttagtttaaaaataaactaacgaacaaggaacaagaacgataacggaggtagtagtatatagcagcatatgccgtgcgtgctaatctatcagctacgcaagccacttgcattatattatatatagtagatgaatactagtcgcatcgcatggcatcttaccgttgcgatcttctctgatcaggcaacaggccaatgcaaagactcctccggagatctagtcccattcccatacagattaaactcgtgcaggaggaattctagagattaagaaatataatgttcggtcatagcagctagctaactgatgatggtgaaatactgtaaatgactgagtcaaatataatggtcaaaaacacacactgcacatgcaggcaggaacgcccgccagtatatcatatgatgttgggatgagaaggagaagcgtgtgcgcttaattaatttattattatcaggtcaaaggaagcgtgtgcaagcgtagttggtgagggggttataaacgaggagcattcatcaggcatggcggctgcctgtacagtgaacctgctcgtgccttagcctattcgtctactgcctggcatgctcaccggtcaaagacagacggtttcactttcaccttcgttatgggctcctggccgccagacaagcagctcgagctctctcccggcaacagccaacagctaataacagctcatcagctgtggccgagaacggcgcaacaaacaagtggctgcaatagcatagcattgcattgcattgcatagagcggcgcaagaaacaggctacaggcgctgcatgcgtgcccggtgtctgctaccagcagattcagtctcttggtcttgccaacaagttactgccattgatttgcatgtggacaagaacaataatgtgtagctcacagattctcatctccaggatcatcagagcaagttaaaagatactacagtagaaagaaagagagacagacagacagacagggaagcaaacttgctccctgcactggagttgtttggcggattggcactaagccactaacagtaacaggggctggacttctcacctttacgctaaaagccggactgggagggcaaaaagcgaccgggtcccttttgagaatccaaggagatcaaaccagcagccaggctccagcatctctctcttcctcttctccctcgatgtgtgcagtggaacaacggacactgaacgtgtggagatggagactgtctgtcgaaatgcggtgaaggatggagtgactttactgtgctacgacactaccactgaagcctgaacagcaaaggctagcatcatatcctcaacgaggcaggaaggagagagcacagagtcctgctccggcagaaagacagagtcgctagcagagtgattgatagtcgcagctgggtttcaagaacccaacgacatgcaagccattgcggagttctcatttcttggcgctgatcagcttgctggcaatgatgaggaagaaagggagagcgcgtaccgatgggagggagagatcttccgcaaacctcagagcctgtagcttgcttggcgtgctgctgacggttgcgtccgacgaggcgccgaagctccgcttggaggaggaggaggaggactcactccccctgtcgtcttcattccctccgtgctccagctccatgtccctggcggcgtgcgcgtgggctcttcttgatgcttgagctccccctccccggacgcgtg

SEQ ID NO: 73315 - DNA, 348 bp, Zea mays
  Clone ID: MRT4577_166864C.1
aaaagcgccatttttttctttggattaacttaaaacaaatccttgcaggggttacaagattccttggtccccaatccattctggttgaagccaaggtcttcttgagcccaggattaacaccggtcttaccacttgcacaaaggggaccttgcattaaaaacaccaattgggcaccaccaagggggccgaccgaggttaacccttttggcctggggtaaccataacggtgccgaacaggttaccttggccgggcgggcccaaccgttcagttcctccagttcccgtcggagttgccgtagccgccgccacggttgccaccgccgtagccgccaccaccaacccccggta

SEQ ID NO: 73316 - DNA, 585 bp, Zea mays
  Clone ID: MRT4577_166865C.1
tggagaaactaattcttgaacttgattgatccataatacatgtcttgtaaaaggtccattctgtcactcaagtatcctgagagtccactttgcctcttaaactattgtttggtttacttaatcccttgagattataataagggctcagatcagccacttctcactatgctggttttattaaactattttgataacgcagaaggttgtgtggctctaacatctggttcctcattctctctccccacctgatccctctgttgcaactacgtacccaattgctcatcccagtggtgttactttgtgccatcaggtggctgctgtggtgctctccaagtatttctatgagcccatggattccaccatatgatatgcagacaggaagcaatgtcatgatgcacatccagaccattaaggggctttaataatcatttctagatacgaaaatgcaatgcttcatgcaatctgcacataactccatgcatcctattagtggtaatgtttggattctgatcttacctacaagaggaaacgggttggggggtgcaatatatgaaatggggatgtgacaccatacatggcaacagt

SEQ ID NO: 73317 - DNA, 704 bp, Zea mays
  Clone ID: MRT4577_166866C.1
cagggccgcttttttttttttttttttcgggtaaagctgggtgcgccctaggtgccttttttttttttttttttcatataatgactaagtatatagagataaatgtcacaaaaattattacattgtggaagtgtcttacaagaataaatgataacaataaagcaaactaataattattccttggtgccataacgctgactcggagacgccacctagattagctcgcactcctcgttgtagacctcctcctgggctacctgctcttcaccgggattatgcagcgagcgggcctggccgtggtggctagattccatgaaggcgagagcaagtccggcgagcgattccccacgctctagccaccatcgatgctaggctctatgttacgaacgcgcggcccagaccaatactccctaagttctcttcgctggagcgctacgccagcgagcacccgattctgtggatgcgccacctcccgcactcttggtttctctcgaaggcaaggatgttcagtggtttggtgcggtgggggtggccgaccggatcctctgattcatatgggagcggaggtgggattgttacggagctggacctggagccaggattctcggtggcggttgcaacgtcgcgcgcgagcacggcgcggagaagacccccacacaatagctcggagtgcctggccggtccggccggcaaccgagggtacc

SEQ ID NO: 73318 - DNA, 449 bp, Zea mays
  unsure (1)..(449): unsure at all n locations
  Clone ID: MRT4577_166867C.1
tgactttgctcgcgnaaagaaaggnagttctctaggtagtgtctctaacctgtcgtactgacttctgtcgatagaagagaaggggccagatgctgcttaggtgtgatctatcctatccatccatggataataaagaagttgtggattgctgttttattaaaaaaaaaaaaaaaaaaaaaaaaaaaaaaaaaaaaaaaaaaaaaaaaaaaaaaaaaaaaaaaaaaaaaaaaaaaaaaaaaaaaaaaaaaaaaaaaaaaaaaaaaaaaaaaaaaaaaaaaaagggggggcgccttttaaaaaaaccaaattttacttccccgtttttccaaataaaaatttttttttaagggaccccaaaataaaataaatggccctgttttaaaaaacgtggaaatgggaaaaaccctgggttaaccaaaataaaagtttttgaaaaaaacccctttttc

SEQ ID NO: 73319 - DNA, 416 bp, Zea mays
  Clone ID: MRT4577_166868C.1
gggtgttcctctacaagagctatgacaagctgtgcacccgtccggaacctcgccattcttatcgaggcagttagcaaggttaataaatggcgcacgtcatagcattcgtctacgagcagcacgaggcagcgctgcacggtgtcgcctcccgcggaaggaacgagagcaacaagaaagcgcccgcgtcgctctccgggctgttccacaagcgcaaggtggtggacctggcaggtcccaagcggtcgctggtggaggtcccctacaccgtgacgctggcgcacacggccaacgcgctactggcagcacgcgtgtatggccactctgcacgctagcctgtagatcaccgtgatggaacttaagaagtaagtggctgagtactgagccagcacaagtcttgaggtccacggcgtcgacga

SEQ ID NO: 73320 - DNA, 258 bp, Zea mays
  Clone ID: MRT4577_166869C.1
gtattctgtctcaacactgccgccgcgatgtccaatagaggtaggggagagtcggctggaaaaagttccgcatgtcactggatctaccggcggcgtccacgtgtaactgtgcggacaacactcctgccaagaacctctacatcatctccgtttggctatcaaggaccgcctcaaccgtctcccgtccgtgtgtgtccttgacatgaggatggccagcgtaacgaagggacaagcccgacctcaagaagaaagtgatgc

SEQ ID NO: 73321 - DNA, 310 bp, Zea mays
  Clone ID: MRT4577_16686C.1
aacccaaaaaaacccaaatccctgcgtttaaattttaaatccggcccgggacggacatgaccgggggccctttacacaaatgaacatgaaccccaggggcgcccctgggtcgataatggggggggcagttgacaggatcttatttaaaccctgctattaattatttttatacccctcgggggcggcgtccttttaactttggggcgccattcccgggccgggcgggccggtttaattgcagctgcaacaggagcacccccaagtggggccccaattgcaggtgttgcacacccaaccgccccccttgggg

SEQ ID NO: 73322 - DNA, 961 bp, Zea mays
  unsure (1)..(961): unsure at all n locations
  Clone ID: MRT4577_166870C.1
gtaccctcgggtccggccgggngtttgcaagtggattatcggttcgacggttgcatctcctcgcggcaagaagacagaaacgcgattggcaatggggagttccaagctctccttgctttgcctcgtccccttccttctcctcgccggcggcgacacgcttaccacattcatcgtgcacgtgcagcgcccggagccagaggagaaccagaccaccggcgaccgggaggtatggtacaggttgttcctgcccgaggacggccgcctcgtccacgcgtaccaccacgtcgcaagcggcttcgcggcccggctgacgcaggaggaggtcgacgcgctgtccgccatgcccgggttcgtggcggcggtcccggacgagatgtacgagctgcacacgacgcacacgcctctgttcctcggcctggacgcccggcaaggcgacagtccgtctcacggctccgaacgcggcgctggggtcatcgtctgcatgctcgacaccggcatctccccgacccacccgtccttcaacgacgacggcatgccgccgccgccgccggaaaagtggaaggggcgctgcgacttcggtgtccccgtgtgcaacaacaagctcatcggagcccgctctttcatgtccatccccaccgccggcggcaactcttcgtcgccggtcgacgacgctggccacggcacgcacaccgccagcacggcagccggagccgtcgtgccaggtgctcaggtcctaggccaggccgcgggagtcgccgtcgggatggcgccccgcgcgcacgtcgccatgtacaaggtgtgcaacgacacaatctgcgccagtgccgacatactcgccggcgtcgacgccgccgtgggtgacggctgcgacgtcatttcatgtccatcggcggagtgtccagccgtactaccgtgacaccatcgccgtgggcacgttcggcgccgtcgagaaggaatcttc

SEQ ID NO: 73323 - DNA, 1224 bp, Zea mays
  unsure (1)..(1224): unsure at all n locations
  Clone ID: MRT4577_166871C.1
tccccaccgtcggaggacccgacgcccttcatctccccaccgccaccgccgacggcactgggcttggcgccccctccccaccatcttgttccccaccgacgcgctcccgacgcccccgctaagctcgcctcctccccaccgtcgtctgctcggggctcggcgcgcctcctccccacgtcgatactgctcggcgcgtctcccgatccaaatcggccagcctcatcttctcccgatccaaatcgccattctcccgatccaaatctgccagccccatcttcctccccgaatcgccgagaaggacgctcctgtaggccgcatccctgctcccccacggatccacggagcggtagcctctccggacgggcttcttctccgacaccgcagcagccctggaggagcgtcttcaccgtggaggagcgccgcagcaggcctggagggcttcttcgccgtgggcctcctctgcgcctgcgccgccctgctccacaccccgtctccctgcaccctacgcgtcatcttcccaggctccggcgtcctcctccctgctccctgctctctacgcccagccccgtccgcccgacagctggcagcacatcggacctgtgcagtgtgaaggtcttgacgagtagtcaagccgcggcacgctactcgccccttcggagacgaacgagatttggggagcacgagcaccaactccacccacgaccatggattcacgcatgtcgcgggcaagcggctcctccaatggaggacaaggatggcccagttatggtctggtgtcgctgatccgctgccccaaatgcgaaaggtcagagttgctcgtgagactaagatcgaaaaggtgggagaacggcaactttggtcgagagttcgtgaagtgtgaaagcaagccatatcgagataataagatgcttgaaggggcaggggtggtgggtggctctggggagatgatggcgtctaatatgtgggatgaacgagcagtagcaaatagagcagatgtgactacaaactgggacaaatttgctgccgaactgaagaagatgaatgacaacatggtcgagttgaagaagataaaggacaacatagttgagttgaagaagatgtttggagccttttatgcttctatgatttttattctattccttttctttgngatgaactataattgtaagcgttaaatataggattcatggtgaacctatgctgaatatttgtgatgttgaatct

SEQ ID NO: 73324 - DNA, 455 bp, Zea mays
  Clone ID: MRT4577_166872C.1
agcagtggtaacaacgcagagtacttttttttttttttttttttttttttttttttttcctttttttttttttttttttttttttttttttttttttttttttttttaagccctttcaatccccccaataaaaaatgggcgggcaaacgacccgccagcaattttcgggaaagaaagaggggcccccaccttttgggggggggggattgggcacccccccgggggaaaaatctggggcccgggggggaggagttccgggtagcaaaccagactagcaatcaaatcttacccaaaactaaatcgttccccgggggacaggcagacagaaccggggggggtcaagctctcagctccgggggggggggggggcccaacgggggggccttgggggaccccggcccgggggggggaaccgggttcaaaaggtgggccagcgggttgaggggcacgggggc

SEQ ID NO: 73325 - DNA, 871 bp, Zea mays
  unsure (1)..(871): unsure at all n locations
  Clone ID: MRT4577_166873C.1
attgggaccctcgaggccggccgattgaaacctcgaaaaaaatatctcactcacactcactctctctctcggcgacgtctacgccgagtgcccaggcattcttcaggcgcaggtcgctgccgccctacgccaggtgccccggtcttctttcgtcccttcgccggcgacgaccaccgccagcttccggaactttgtaaagaaacgaaagaaaagtttaacacagcgcgcgcgcgcgatcctttccgacaggacagtatagcggatggcttcgtcggtgcgggcgccatcgggcgcgaggacgccatgaactcgctcgcctacgaggccgacatgcgaattcgcgaccccgtctacggctgcgtgggcgtcatctccatcctccagcacaacctacggcagctccagcaggacctcgcccgcgccaagtacgagctctccaagtaccaggcggcagcggcggcagcatccgcgtcgacggcgccgaccgggccgcaggcgatggcagagttcatcggcagcgcgatgccgaacggcgccgcgcacaacttcatcaaccttggacactcggcggcgctcggctccctcggaggctccaccgccatgttcgggcagcaggagcagttcggcagcaacgcgcagatgctgtccaggagctacgacggcggcgagcccatcgcgaggatagggatgaacaacggcggctacgagttcggttactcgagcgcgacgacgatgggcgggtctgcaggcgctgtctctggcggcctcgggacgctcggcatcagcagcccgccggttcttgaagtctgggaccgncggcggcgacgagaagcccagcggcggttactgacgcgatgaagaaacggggagg

SEQ ID NO: 73326 - DNA, 814 bp, Zea mays
  unsure (1)..(814): unsure at all n locations
  Clone ID: MRT4577_166874C.1
cactctctctctctctcggcgacgtctacgccgagtgcccaggcattcttcaggcgcaggtcgctggctcgctgccgccctacaccaggtgccccggtcttcttccgtcccttcgccggcgacgagcactgccaggtgcgtgcgtccacctccttggtcttctcttcccttccttctgtgggaaaagcgggcacccaaaccctaacttactatttgtattcggatctgagctactggatgcgcccctgatctggggcagtattcctcatatttggccaaagaggaatataatacttcccctgatttccagcagcttccagaactttgtaaagaaacgaaagaaaagtttaacacagttacacagcgtgatcctttccgacaggacagtatagcggatggcttcgtcggtgcgggcgccatcggggtcggtgatcgccgtggcatcgtcctcttcctcagcagccgcggccggggtgtgcggcacgggctcgccgtgcgccgcgtgcaagttcctgcgtcgcaagtgccagccggactgcgtgttcgcgccctacttcccaccggacaacccgcagaagttcgtgcgcgtgcaccgcgtcttcggcgcgagcaacgtgaccaagctgatgaacgaaatccacccgttgcagcgcgaggacgccatgaactcgctcgcctacgaggccgacatgcgaattcgcgaccccgtctacggnctgcgtgggcgtcatctccatcctccagcacaacctacggcagctccagcaggacctcgcccgcgccaagtacgagctctcaagtaccaggcggcagc

SEQ ID NO: 73327 - DNA, 474 bp, Zea mays
  unsure (1)..(474): unsure at all n locations
  Clone ID: MRT4577_166875C.1
taagccggtggtaaaaatggcctcctcctttggccctcaatcgcagcgagccctgtcttgcgctgattctctttcgtcgacaagcagagccactcgcacatacgagtcctagtccccactccagagactatcatgtgtgcgcaccacaaggaactcgttctgtgtcgcagtcaacgggttcccttgcaaggacccgatgggggtcaccccggactacttcttcaacgcggagatgatcatctactagcggagcgacacgaacaacaaggtggcctccaacggcaccaacgtgaacgtggacagcttcccggagctgaacacgatgctcatctctttggcgcacatcgactacgcgcctctcgggaagaaccctgcgcacatccacccacgggttaccgagatgatcaccgaggtcgaggacaccctctacctcganttcatcacgtacaaccccaaccggctctttctcaagga

SEQ ID NO: 73328 - DNA, 276 bp, Zea mays
  Clone ID: MRT4577_166876C.1
cgaagtatcaagcttcatacgcaacaggtcttaaggcacatatgcatgctctgaagactagcgagaggaaagacaagaagaagactgcagatgctgagaaggcaattgagaccgcacgcaagaagcagaatgaagcagcttcatagatatcgtcacggctcaagtcatgagacgctcacagaactcagtgtgtcttctcctgtatgttgtctaccgccagactagttagagtgtcgtgaagtcatacttatctggttttgattcgaattcgtgtct

SEQ ID NO: 73329 - DNA, 1273 bp, Zea mays
  Clone ID: MRT4577_166877C.1
cattgggtacctcgaggccggccgggggaaacgggggtgttcgaggaacctcatcccactcaccggcactctctctctcggcgacgtctacgccgagtgcccaggcattcttcaggcgcaggtcgctgccgccctacgccaggtgccccggtcttctttcgtcccttcgccggcgacgaccaccgccaggacagtatagcggatggcttcgtcggtgcgggcgccatcggggtcggtgatcgccgtggcatcgtcctcttcctcagcagccttggccggggtgtgcggcacgggctcgccgtgcgccgcgtgcaagttcctgcgtcgcaagtgccagccggactgcgtgttcgcgccctacttcccaccggacaacccgcagaagttcgtgcgcgtgcaccgcgtcttcggcgcgagcaacgtgaccaagctgatgaacgaaatccacccgttgcagcgcgaggacgccatgaactcgctcgcctacgaggccgacatgcgaattcgcgaccccgtctacggctgcgtgggcgtcatctccatcctccagcacaacctacggcagctccagcaggacctcgcccgcgccaagtacgagctctccaagtaccaggcggcagcggcggcagcatccgcgtcgacggcgccgaccgggccgcaggcgatggcagagttcatcggcagcgcgatgccgaacggcgccgcgcacaacttcatcaaccttggacactcggcggcgctcggctccctcggaggctccaccgccatgttcgggcagcaggagcagttcggcagcaacgcgcagatgctgtccaggagctacgacggcggcgagcccatcgcgaggatagggatgaacaacggcggctacgagttcggttactcgagcgcgacgacgatgggcgggtctgcaggcgctgtctctggcggcctcgggacgctcggcatcagcagcccgccgttcttgaagtctggaaccgccggcggcgacgagaagcccagcggcggtcagtaggcggttccatccgtgtgaccgatccttctatccatccatccatccatcagtcttgtcaggtttggtttggttttgcatttgcatgctgcctgcacagtgttctagtctgttgtgttttgccttgtgcttccgattaattcgcgagtctggtggactactgttagtcagtttattttctaggtagaggcactaatgaagcatgactaaaataagggtttcattccatttccagggctaataaataccttttgttgcatg

SEQ ID NO: 73330 - DNA, 175 bp, Zea mays
  unsure (1)..(175): unsure at all n locations
  Clone ID: MRT4577_166878C.1
caacatattgggatgtactttgggttcagcttgttcttttaccatacactttgtttttatggatcaaattctatgctagatggtggtataagtcttctttttgtanagaagaatacggcgaagaagaaaaaatatatttgattcgtcgaaatttanaactttcacaaggtcaatg

SEQ ID NO: 73331 - DNA, 407 bp, Zea mays
  unsure (1)..(407): unsure at all n locations
  Clone ID: MRT4577_166879C.1
cattgggtacctcgaggccggccgggaatctaatgcgcggtcacccctttaggtctcccgggtctctagtcgccatcccctccacggttctgccgtcgtcgatgctgccatcgatctctacaccaactcatccctccacccgcagtcccaggtgaaacgtgaagagcagcttgattatgcccaaagtatcatttcgggactgaagagaaatgctaaaattgtgaggggggagtggtcatgtactcctgttcggagcactggcctgagcatttttactcaagngtanacntncnnaagaaggtccacctcnnattgactnnncttatgaccatggggtaatttggtggttaattnaccaacctacccaattttttttttaaaanaaaaaacccccccccccccccccc

SEQ ID NO: 73332 - DNA, 222 bp, Zea mays
  unsure (1)..(222): unsure at all n locations
  Clone ID: MRT4577_16687C.1
tgaccgtcgcccatgccccgccgtaccgtaagagccttggatccctctaagaccgcccgccctttgtttttttgtttctaacctacgatttgactgcattttctgcctaaaactgggggaccacccattaagaggacacaggccaccacttctatattgattactgaatgaagaacttgcatgttcctttcaaccatcggcnacctctggacgccgtgcggc

SEQ ID NO: 73333 - DNA, 149 bp, Zea mays
  Clone ID: MRT4577_166880C.1
caacccgcacctgtttcgctctgttagcggagccatctcctgaagctaggtcagtacggtaggggcgccggccctacactatccggacgcacttgatggtcggcagcatcagcgactactccatggccagtgtgttccaatttatcatg

SEQ ID NO: 73334 - DNA, 201 bp, Zea mays
  Clone ID: MRT4577_166881C.1
gagccagtaacaaaattgttagaaagcagataccatcaaattggttctgggaagtgtgaaatcaaagttgcacaaaccaaagaggtatataggcagcaacagcaacaacaaaaaggtggaataggtgctgcagctggtggacgaggtggtacgaggggtcgtggccgaggtcagggccaaaactggaacaaggattttatt

SEQ ID NO: 73335 - DNA, 627 bp, Zea mays
  Clone ID: MRT4577_166882C.1
tcgaggccggccgggccgggacctgcctactgtcatgatccttacattccgaactgccgctctcgtccttgaagtgagcaatacgagcatgaatctatctatatccctgaccacttgggatgtatgcccacacgatgtcgttcttctcgtactccgcccacatcaagagctccgtgccagatgaatcctctctcgaaggaatccacagttgccatcattcgctacgccttctcagattcctccttatgatcctgattgcaactactctcttcctgcataaattgccggcctcatctcatctcatactactggatttgcagtcgagtgtctttacgaagatactcactgtggacgtcagaggaatgactccctgccaacacacttctgcaaaagaaatgcagctcgtagaactcaacatactgcacgacataataatgatgcacatgatcaatgccgatctctcggcatctggatatcgtcaccaaatggggaagcatggaaccgtatccagtgtctcctcgggctccatgcttcccacagagcagtgccatgtattctgttcaaagcaagtgatgtaacgatgtcgtgagaatcactgctactctattatgtctctcattgtgacta

SEQ ID NO: 73336 - DNA, 418 bp, Zea mays
  Clone ID: MRT4577_166883C.1
gcacaaattgataataatataactttaaagagaacttcatgatcatcaaccatccaacgatttaagacgaaaggaacaagcacagccctcgaaagcgaagtaggaagaacacacgaggaacgaaaaccatactctttaataagattcgagagaaattcaataatacacaattctttttattatttgcattatcccccctctagtaacacgcggtgggaagctgctcgagggtgtggctgataaacacaacctcggaaacaaggccagcgactccaccacccatgagaggcccagcccatgagatccagcggggggtccaagaccagctcacgacagaaggcccaatgccacataggtgttcatgggccttccacagaaggcccccccaacaataagatagcgccgacaataaacccat

SEQ ID NO: 73337 - DNA, 297 bp, Zea mays
  Clone ID: MRT4577_166884C.1
gggccccaaaaacttattttctcagggggtccacgggccgtggacccaaaaaaatgtgtttcccggggagccctttttctgggggagggtgcccccagggccaaaacaggaccccccccttattgggtccggacccccaagggctttttttggtcgccaggggccggtgtgccaaataccccaaaaaatgggggttttctccaatgggctctctttttttgagggcctgcaactgcaggaaagcgggggtgaccaccaccagggcattgggggagactagagggccctgccccccct

SEQ ID NO: 73338 - DNA, 743 bp, Zea mays
  unsure (1)..(743): unsure at all n locations
  Clone ID: MRT4577_166885C.1
actttcccaacaatcactgcaactaactagaagaagaagaagaagaagaagaagcagaaacgatggcgttccgacgcccttcatgtgtaatactaggagctcttctcgccgtctccttcctcgccgccacggcagccgcctgtgaccacggcctgacggtcttctggggccggaacaaggacgagggctccctcggggaggcctgcgacaccggcatctacaacaccgtcatcatctccttctacagcgtcttcggccacggcaagtactggggcgacctctccggccacccgctctacggcatcggcgccgacatcaaacaatgccggggcaagggcatcgtcgtcctcctctccatcggcggcggcggcacccagtactccctgccgtcatcacagtccgcggccgacgtcgccgacaacctgtggaacgcgcacctcgggggcggccgccgcggcgtgttccgcccgttcggcgacgccgtgctcgacggcatcgacttcttcatcgaccagggcgcgccggaccactacgacgagctggacacggggctgttcgagcggatccacgtcaggttctacggcgaggaccggtgctcgtacaaccacgtgtacaaagacggngtggattggcgcagtggagcaagtgggacggcgaggtacccccgggagcaaggtgtacatcgggctgccggcgcgaacgntggccggggaggaacgacaaggtcggcctgccgtcgatga

SEQ ID NO: 73339 - DNA, 445 bp, Zea mays
  Clone ID: MRT4577_166886C.1
gggccggggggggcaaccccaaataaaaacagggcctcctaagggtggaagcaaattatttgggggcaattgggaatattattaaaaatttccacactacattggtcctcgggcaacctattagcactggcctaaaagccgaggaaacaaaacaaagccgtcgttccgggcgggggggatctaagaggaagaaaacttggaaacggccttggggccctcggaaacggggtgcttgggaagctccccaggaaggacgaggcccaccaaaatctggatctcccgggagggtatggggggctttttgttgaaacgggcaaacttgggggccttggaagccaacttttcaaaaatgtcgttgatgaaggagttcatgagggacatggccttggacaaaataccaaaggccgggggcacctgcttgagcaccttgaaaaaagaaaaactt

SEQ ID NO: 73340 - DNA, 927 bp, Zea mays
  Clone ID: MRT4577_166887C.1
gttgaatcggagatcggtcctgtaatctgtgcttgccgcggtatgtttgtgtttgcggtggttccaaaaaaaaaaaaaaaaaaaaaaaaaaaaaaaaaaaaacaacaaccaacaatcactgcaactaactagaagaagaagaagaagaagaagaagcagaaacgatggcgttccgacgcccttcatgtgtaatactaggagctcttctcgccgtctccttcctcgccgccacggcagccgcctgtgaccacggcctgacggtcttctggggccggaacaaggacgagggctccctcggggaggcctgcgacaccggcatctacaacaccgtcatcatctccttctacagcgtcttcggccacggcaagtactggggcgacctctccggccacccgctctacggcatcggcgccgacatcaaacaatgccggggcaagggcatcgtcgtcctcctctccatcggcggcggcggcacccagtactccctgccgtcatcacagtccgcggccgacgtcgccgacaacctgtggaacgcgcacctcgggggcggccgccgcggcgtgttccgcccgttcggcgacgccgtgctcgacggcatcgacttcttcatcgaccagggcgcgccggaccactacgacgagctggccaggcgcctgtccggatacaaccggtactaccgcggcgcgcccggggtgcggctgacggcgacggcgcggtgcgtttacccggactggcacgtccagagggcgctggacacggggctgttcgagcggatccacgtcaggttctacggcgaggaccggtgctcgtacaaccacgtgtacaaagaacgggtgatggcgcagtggagcaagtgggacggcgaggtacccccggagcaaggtgtacatcgggctgccggcggcgaacggtgccgggaggaacgac

SEQ ID NO: 73341 - DNA, 1348 bp, Zea mays
  Clone ID: MRT4577_166888C.1
gccgggactaaaaaatcgccgctctgttttcccagttcgctcctcccatggcggcgggcgcccgctctcgtctcgctgactcccgccgtctccaggcatccccacctcctcttctgctccccttgccccccgccgcgccacatccgcttcgcccctccaaccgccacacccgcctcggacgggaacggcctcggcctcggccccggccccggtgtcttcctatcgccgcgcgcgctctcgcagctcgacgagctcgcggccttccgctacgagcacgccttcccgcacggcctcctcactgtgcgcgccctctcgcgcggccccgacgacgacgccgtggccgaggcgctcgtccgcctcctcgcctcctccttctccgagaccgtgcgctgggccccggcccagcggtacgcgcagctcctcacgttcgtcatccgcaggtacctccacgaccgccgcgggctcgcgccgcacgccgcggtgctcgtggggttctaccgccccgctgacgccggcgccggcgccgacaacgctaacgccgccccggaggacgacgaaggggagggtgggggatgaagggggaagatggcgtgcaccgcgggaggtgttcgtttgacgcgggtgggcgcaccagggggccccggcccacgcccactccgccgctcaacttcccctacatctgcaacatgactgtgaagacgccactgagaaggagaggaattggaaagcaacttcttaaggcatgcgaggatctggttttcaagatgaatgccaaaagacgtgtataccttcactgtagaataattgaccaagtcccattcaacatgtacacgaaagctggatacagtattgtccagactgacagtatattggtctggctgagccttcaaaagcgcaagtacttgatgagcaaggaattaccccaagcttctgttgttagtgagacttcaaccaaaaactttgagtgataatatttgacaagctgaatgtgccacgggaccaacaggtacacataaaagtttatttttgtgtataatgggggttatgtttaccacacatatccactattgtatagcttgtgatgaaatcaactgccattcattaattggccgtcgccagatgttttaacagaaaaaaaaaaaaaaatggtggccgccaacgcacgtattcaatattatagcctgcggactcattaatttcatgaggattaattggcaatttaagtgttgtaatatttgatggttcagtgtaatttctcatatggccagtaatcagaaatggcttcagcttccacatccaactaactaattggatgcttatgatccaaaaaaaaaaaaaaaaagcggcc

SEQ ID NO: 73342 - DNA, 701 bp, Zea mays
  Clone ID: MRT4577_166889C.1
atctaactgcaagaagaagaagaagaagaagcagtaacgatggcgttccgacgcccttcatgtgtactactaggagtacttctcgccgtctccttcctcgccgccacggcagccgccggtgaccacggcctgacggtcttctggggccggaacaaggacgagggctccctcggggaggcctgcgacaccggcatctacaacaccgtcatcatctccttctacagcgtcttcggccacggcaggtactggggcgacctctccggccacccgctctacggcatcggcgccgacatcaagcactgccggggcaagggcatcgtcgtcctcctctccatcggcggcggcggcacccagtactccctgcccacctcacagtccgcggccgacgtcgccgacaacctgtggaacgcgcacctcggcggcggccgacccggcgtgttccgcccgttcggcgacgcggtggtcgacggcatcgacttcttcatcgaccagggcgcgccggaccactacgacgagctggccaggcgtctctcgggatacaacaagtactaccgcggggcgcccggggtgcggctgacggcgacgccgcggtgcgtgtacccggactggcacgtccagagggcgctggacacggggctgttcgagcggatccacgtcaggttctacggcgacgaccggtgctcctacaaccacgtgcacaa

SEQ ID NO: 73343 - DNA, 288 bp, Zea mays
  Clone ID: MRT4577_16688C.1
cgcccggggaaaaaaaacctcttttttcccccaacctttggcccatcgtcctccccctatgggcccataataaaaaaaaggatttgtggggccttttaggtccatgggcccccccccccggggagggcctttttgaccaagtgtccaaggtctcacggcacccctttcagggcattgtcccccccaagaaggggggggggtttcactcccccccaatcttgggggttaggggggaatggtttctctacgtaaaaaccccggagttccagggggctctaacccctcccc

SEQ ID NO: 73344 - DNA, 2140 bp, Zea mays
  unsure (1)..(2140): unsure at all n locations
  Clone ID: MRT4577_166890C.1
tagagctaaagaagaaaggcagtgagtttgacccaatggctgttgcctattggaagcctggtgaacccgtgccattcctgtttctggctcgcgcacttgatctcatctccaacgagagtggccgtattgttattacagaaatcctatcaaatgtgtttcgtacagtgatggcaacaacaccggatgatctccttgcaactgtatacctctcagccaaccggattgcgccacctcatgaggggattgagcttgggattggggatgcatcagtcatccgtgcacttgcagaggcatatggacgcaaagaggagcatgttaagaaggacctcaaggaattgggtgatttggggcttgtggcaaaagcaagcaggtcatcacagaagatgatgtttaagccaaaaccactgacaatagctcgtgtgcttagcactttccggacaatcgcaaaggaatcaggcaaagacagtcaagatcaaaaaagaaaccatatgaagggacttcttgttgctgcaactgactgtgaaccccagccaatggtataccttcttcagtcaaagatgaggattgggctagcagagaaaactgtccaaatggcgctagggcaagctgccgtatatgctgacaaaaatcctttgccaccaaaagttcaatcacctttcgaagaggctgcaaaaataattaaacaagcatattcggttcttccgatatatgataaaattgtcccagcgatactcgaagtaggagtttggaagcttccagagacatgcaaattttccataggtgtccctgttggccctatgttagcaaaagcaacaaaatctgtctcagagatcatcgacaagtttcagggtcttgaatacacttgcgagtacaagtatgatggtgaaagggctcagatacattgcatggaggatggttcagtagagatttatagtcgcaactgctgaaanaaacaccggnaaagtatccagatgttgttgatgcagtttctagattccgtaaggctacagtcaaatcatttgtcttggactgtgaaattgttgcctatgatcgtgaaaaacagaaaattttgccttttcagatacttagcacaagggctctccggggtgtcaccataaatgacatcaaagtttcagtctgtacttttggcttcgatattctttacataaacgggaaacctcttctccaggaacaactcaaaattcgtcgagagcatctttacaactccttcgaagaagtgccaggtgtttttaaattggctactgcaattacatcaaatgacctggaggagatacagaaatttcttgacacagctgtcaactcgagttgtgaagggttgattatcaagacattggataaagacgcaacatatgagccagcaaaacgttcaaacaattggttgaaactgaagaaggattacatggatagcattggtgactctttggacttggtacctattgctgccttctatggtagaggaaaacgaacaggtgtctttggatcattcctcctcgcatgctatgatgagcagaacgaagagtatcaaacaatatgcaacataggtactggattttctgagcaacagcttgaagaacgttctgcgagccttcgaagtaaagtgatagaaaaaccaaaggcatactatagatttggcgacacaatgaaccccgatgtgtggtttgagccatcagaggtctgggaggtcaaagctgccgatctgagcataagccctgtacatcgtgctgccaatggtatagtcgatccaaataagggtatctctctaagattccctcgcctattgagattacgtgacgataaaagcccagaacaagccaccacgtctgaccaagtcgctgacatgtaccggtctcaaaagatcaaccacggttataaccaggaggatgaggacgatgactgatgttgacttaattcttgttgctggatgggatggttcactgtgtaaacactagtcttcgcagtttccagcttgttctcaaccgtaacctgttgatttaccggttcctgtttctatgatcaaatgaacaggtattgaccggagattgcatttcctaataaaaaacaacaaattcttacattataaccaaatgaacgcggatgaaccacgatgcttattaaggtc

SEQ ID NO: 73345 - DNA, 746 bp, Zea mays
  Clone ID: MRT4577_166891C.1
actcaacaagaatctcactgtaactaacctgaagaagaagaagcagaagtagaagcgatggcattccgacgcccttcgtgcgtagtagcaggggctcttctcgccgtctccttcctcgccgccacagcaaccgccggtgaccacggcctgacggtcttctggggccggaacaaggacgagggctccctcagggaggcctgcgacaccggcatctacaacaccgtcatcatctccttttacagcgtcttcggccacggcaggtactggggcgacctctccggccacccgctctacggcatcggcgccgacatcaagcactgccggggcaagggcatcgtcgtcctcctctccatcggcggcggcggcacccagtactcgctgccgtcctcgcagtccgcggccgacgtcgccgacaacctgtggaacgcgcacctcggtggcggccgacctggcgtgttccgcccgttcggcgacgccgtggtcgacggcatcgacttcttcatcgaccagggcgcgccggaccactacgacgagctggccaggcgtctgtccggctacaaccggtactaccgcggcgcgcccggggtgcggctgacggcgacgccgcggtgcgtgtacccggactggcacgtccagagggcgctggacacggggctgttcgagcggatccacgtcaggttctaccgcgacgaccggtgctcctacaaccacgtgcacaaagacgggttgatggcgcagtggagcaa

SEQ ID NO: 73346 - DNA, 772 bp, Zea mays
  Clone ID: MRT4577_166892C.1
ctattgctgccttctacggtagaggaaaacgaacaggtgtctttggatcattcctcctcgcatgctatgatgagcagaacgaagaatatcaaacaatatgcaacataggtactggattttctgagcaacagcttgaagaacgttctgcgagccttcgaagtaaagtgatagaaaaaccaaaggcatactatagatttggcgacacaatgaaccccgatgtgtggtttgagccatcagaggtctgggaggtcaaagctgccgatctgagcataagccctgtacatcgtgctgccaatggtatagtcgatccaaataaggtctgtagttcttttttgcattgccattcctccccatctcgattgtatacttctggtatagtatgttggaaggctaatgctgaaatcgaaccagggtatctctctaaaattccctcccctattaagattacgtgacgataaaagcccagaacaagcccccacgtttgaccaagtcgttgacatgtaccggtctcaaaagatcacccccggttatacccaggaggatgaggccgatgcctgatgttgacttaattcttgttgctgaatgggatggttccctgtgtaaacacaagttttcgcagtttccagcttgttttcacccgtaacctgttgatttaccggttcctgtttctatgatcaaatgaacaggttttgcccggagattgcattttccaacaaaaaaaaaaaaaaaaaaaaacaaaaaaaaaaaaaaaaaaaaaaaaaaaaaaataaaa

SEQ ID NO: 73347 - DNA, 701 bp, Zea mays
  Clone ID: MRT4577_166893C.1
gtgcggcgctcgaggcggccgggcttccatacccgaatgaacgctctccgcagcctcactcacagcactcgactcgcccacacccatctcgcccgccgcacgttcacctcctccgccgccgccatgtccaacctcaagccgctgcagctctacacggccgccacgcccaacggccagaaggtcagcgtcttcctcgaggagctcaaggccgcgtacggcaagaacttccccggcgtcgaggtgcacgccatcgacatcggctccaaggacgagccgcagaagcagcccgagttcctcaagatcaaccccaacggccgcatccccgcgctcgtcgaccccaaccacgacgactttgccgtcttcgagtcggctgctatcctgctctggctcgagaagaactacgacagtgaccacctgttcagctggcccagcagcgacgcacaggccgacaagtacaggtccgaggtgcttcagtggatcttctggacgcacggaggccaaggcccgatgcagggccaagccaaccacttccgcatgcgcgccacgggtgatgcgaaggatgtgatcccgtacgcgttgaaccgctacatcaacgagacgaagcgcctctactcggtgctcgagacccgcctcgagggccgcgactggctggtgggcgagggcaaaggcaagatctcgctcgccgacttcaacgccgcgcc

SEQ ID NO: 73348 - DNA, 2483 bp, Zea mays
  Clone ID: MRT4577_166894C.1
tcggagtcccccactcgctcgtgctcgtgagcgaacggagtccaaggcagacgctgcgattcacaagcgccgaggagcgagatgcagaacgtggtggaggtcgagccgggccgcccggctgcctcgagccggccatccgtggggcccacctaccggagcgccttcgcccgcgacggattcccgccgcccgtccccgggatggacagctgctacgacatcttccgcatggccgtggagaagtatccaaacaacagaatgcttggccatcgtgagattgttgatgggaaggctggtgcatatacctggaagacatataaggaggtgtttgacattgcaaacaaaattggtaactctattaggagctgtggacttgcgaagggtagtcgttgtggtatctatggtgctaattgtcctgaatggattatcacaatggaggcttgcaacgcccatggaatctactgtgttccattatatgacacacttggagctggtgcggtagagtttattctgtgtcatgcagaagttgagattgcttttgcggaggaaaagaaaattgatctgctcgtgaagactttacctaagtcaaatgagttcttaaaaacgatcgtaagtttcggcaaggtaactcaagaacagaagggagaagtccaaaaatatgggctatcaatttactcgtgggatgaatttctgtccctggcggctgaccaagaatttgatcttccagtcaaggagaaggcagacatatgcactataatgtatactagtggaactactggtgacccgaaaggagtactgatatcaaatgctagcattatttgtctcattgcaggtgtggaccggttgcttaactatgtaaacgaagagttggcagaaagcgacgtttacatgtcttaccttcctcttgcacacatctttgatcgtgttgtggaggaattgtttattttccatggtgcctctattggattctggcaaggggatgttaagctactagttgaagatattggtgtgctgaaaccaacaattatgtgtgctgttcctcgtgttcttgatcggatattttctggactacaagctaaaatttcctctggtgggtttttaaagagtacaatgtttaatcttgcttacaaattcaagcagtttagaatgatgagaggagctaagcacaatgaagctgcttccatatgtgacaaagtagtttttagtaaggtgaaagagggtcttggtggaaatgttagagttattttatctggagctgctccacttgctacccatgttgaagaatacttgcgtgtggtcacatgtgcacatgtcgtacaaggatatggcctcacggaaacttgtgctggatctttcgtctcgctaccaaatcaaatgtccatgataggaactgttggccccccagtgccaaacatcgatgttcgtctggagtcggtcccagaaatgggttatgatgcacttgcgagcaaacctcgtggagagatatgcatcaggggagaaacattattctcaggatactacaagcgtgaagaccttacaaaggaggtcctcattgatggatggttccacactggtgacattggtgagtggcaacctgatggatctatgaaaatcatagaccgtaaaaagaatatattcaaactttcacagggtgaatatgtggcagttgaaaatttggagaatgtttatggtcttgtttctgctatagactcgatatggatatatgggaacagctttgagtcctttcttgttgctgtggtcaatcccaacaaggaggttctcgagagttgggctgcagcaaatggaataagtggtgatttcgagtccttgtgcaataatccaagaacaaaagaatacattttaggagagctgtcaagaataggaaaagagaagaggctcaaaggttttgaattcgtaaaggatgtgcacctggaaccagtaccgtttgacatggaccgtgatttgatcaccccgacatacaaaaagaagcgtccgcaactgctcaagtactaccagggcgtgattgacaacatgtacaaaagtgctaagtgaactcactctacagtacacatcccgatgaagattcccaacgctgaatcttgaatgagcagccagaagttctgctgtgtatatgctcgtagtttgtatgcgagaattcttcctgtatcagtttttcagaaacgatttgccttgggcatatatatatagcaaaaccggcaatgtggccagcagccaagtggagacaccgtttcaaattgattgaactatggcgaatactgattgacagaagggttagggcatgcttggtacctttaccaggtactattctacctggccgagcaaattgattaaggccaactgtttggatccaatttaggccttctttgaaatgtgggatttttttcccatttcctatgtatttcctgtgaaaataaactgattcctataaaattcctttacgactcctctaaaaaaaaaaaaaggga

SEQ ID NO: 73349 - DNA, 353 bp, Zea mays
  unsure (1)..(353): unsure at all n locations
  Clone ID: MRT4577_166895C.1
gcgcataccacttaagtgtcttaaaatattattatttattccttcccctgggatttatttgtgggaggaataaaagggttccatgaatatttcctttctcatttttttcaaccttcaaacttctgctttaattcccctcaaggtcgaattccaaacttttacctttagatgcccacctgcggaccctaacatgatgagatgtgggggggggggggcttttatagcatgcntccattctccctttctcgtctcccatccgcttcaaattatgtctgaggtgctagtgtcagatttatgcccaggccgtaccccgaagtccccagcgtggtgccgacttatcttttgttggttcc

SEQ ID NO: 73350 - DNA, 386 bp, Zea mays
  unsure (1)..(386): unsure at all n locations
  Clone ID: MRT4577_166896C.1
gtcggcagccgcccttccccctttttcccccccccccttttttttttttaaacaggcaaaaaaaaaaagggccngggctaaaatcaaaccaaaaacatccatcccccatctcaaacttagcagagacaaaactcaatcaatatatatgaagactaacatcaatactaaaatattatttgataaaggacacacttacagcataaaccaaagaaacattcaaggtccacccaacaaaaaatcaccaacatgaaaacaaggaatgaaaataaatccaattacctgctaaaccatgaccagtacaaaaaaatctttcaaagggtcaacggtatcccaaatgatggccttccaaaaaaaaactacctggagttgtaaacgaacaaaaacaa

SEQ ID NO: 73351 - DNA, 346 bp, Zea mays
  Clone ID: MRT4577_166897C.1
ttcaggaggcatccaaatctgaaatctcggagttattttttttaaaagttttgcaacaatattaaagtatttgatggtatagtattagaggcttaaaaaatgtttagttgttagtgacaaaagacaatttttaaataccgtatccttgaagttctagatactccacatgataccttttttcttcttcgaccctctgctagagaagcaaggattgactgtggcgaatcgtgcttcactaagaacaaggctaaagagcttgaccaagttggagaccgaagcatgcttcctatacgtctccgcatgctaccgactccgtggtgtgtcaagataccagttcaaacatcac

SEQ ID NO: 73352 - DNA, 604 bp, Zea mays
  Clone ID: MRT4577_166898C.1
gagctatggcgatggctcgtcgcggctctgggaggggccattgttggtcctcatgtactcggtcgtgatgctggttgattcaatgatgagtgcggttttctacttcacttgccggtcatcaaacttggacttcttggacgagcagggtggctcggttgaggagcttgagatgatgagggctggcagtttagatgcatttaggtgatgaagaagattggtttatttctcacgtgtgtatctgttcatagcatcataggagaataagtgagatggccatttgtcaagagccgcacagattgacaagtccttattggtggttacaagccatggtggcttatgtgtatgcatgggttgattagctgaagttggtgttgaaaggaacattttttgcagccatttggtatatccatgcttagtcaatagcggatttggatgggaaggctagagggagatctgtcatgtggtttgttctggatcagatccatgttttggcagcgattgaagagctggtgatatgtgtagcattctttcaaaatggtgtaactagtatatcaatttaatcgttgtggaattttgttgcctaatggcattttggttatactgg

SEQ ID NO: 73353 - DNA, 2007 bp, Zea mays
  Clone ID: MRT4577_166899C.1
cggaaaaatccgcatgcatttgattaatctgcaacacatactagtccagctataaaggctgcctcgcctcgtcttccccacaacactccactgcctgctggctggctgctgcttccttccagatctaggggatcaagcaagcagccttccccgcgccgccagcaatggcggcacccccgcccgcgccgttcctcctcctgctgctcgccgtggcagcagcgtcgctcgccggcgccgacgacccctaccgctacttcacctggaccgtcacctacgggccaatcagcccgctcggcaccacgcagcagggcatcctgatcaacggccagttcccgggcccgcgcatcgactgcgtgacgaacgacaacctggtggtgaacgtcgtcaacagcctggacgagccgttcctgctcacctggaacggcgtcaagcagcgcaagaactcgtggcaggacggggtagcgggcaccaactgcggcatcccgccgggcgccaactacacgtaccgcttccaggccaaggaccagatcggaaccttcttctacttcccgtccctggccctgcaccgcgccgcgggcggcttcggcgcgctcaacgtgtaccagcggcccgccatcccggtgccctacccgccgccggccggggacttcacgctgctcgtcggcgactggtacgccgccgcgtccccgcacgcggacctccggcgcgcgctggacgacggcggcggcggagcgctcccgccgcccgccgcgctgctcatcaacggcgccgccgcgtccggggccgcgccgttcgtcggcgcccaaggcgggacgtacctgttccgggtgtccaacatcgggctccgcgcctccgtcaacgtccgggtgcagggccacgcgctgcggctggtggaggtggagggcacccacccggtgcagagcgcctacgactcgctcgacgtccacgcgggccagtcgctggcgttcctcgtcacgctggaccaggcgccgctggactacgccgtggtggcgtccacgcgcttcgccgccgccgagctcacggccgtcgccacgctgcattacgcgggggccacggcccgcgcgcccggcccgctgccgccggccccgccgcccggctacggctggtcgctgggccaggcgcggtcgttccggtggaacctcacggccagcgcggcgcgccccaacccgcagggctccttccactacggcgccatcccgacgtccaggacgctggtgctggccagctccgcttccctcgacggcgccgggcgtaggcgctgcgccgtcaacgccgtgtccttcgtcgtgcccgacacgccgctcaagctcgccgacagatacgacatcgccggcgtcatcgactgggacggcctccccgcgcggctcgacggcgccgcggcggcggcggtgctgcgcgccgggacgcccgtgctcaggctcggcctgcacgagttcgtggaggtggtgttccagaacacggaggaggagctgcagtcgtggcacctcgatggatacgacttctgggttgtagggtacggcgatggccagtggaatgagacgcagcggcagacgtacaatttggtggacgcgcaggcaagacacaccgttcaggtgtaccccaacgggtggtcggcgatcctggtgtcgctggacaaccaggggatgtggaacctgcggtcggcgatgtgggaccggcagtacctcgggcagcagctctacctcagggtgtggacgccggagcagagcctctccaacgagtacgccatccccgccaacgccatcctctgcgggaaggccgccgccctcccacactgacacgacgacgttcagcagccatactactgcctgctccattcgaccaaccaagtgaaagaagaagaggagaatctatttttgttgctgcaagaattaatgtgaaaaaaaacacaattactgccactggtatacgtatctcctaactcctaattgtccagcaaaaaaaaaaaaaaaaaaaaaaaaagcggcc

SEQ ID NO: 73354 - DNA, 245 bp, Zea mays
  Clone ID: MRT4577_16689C.1
acaaatattggttaattctttgggtcaacaaaattgtggtcgtcggaaagttaagtagtttaaaagttcgaagggatgtgtgggcttggccacagaaatggtaatggggagtatggttgaatgttcgggactggtaaaaatggggcgcatttttcgtaagcaatgaaggcagtttgggaataatgtttggtttattatgtttgggacttgttactagagattgggaggccccactttttggtttg

SEQ ID NO: 73355 - DNA, 804 bp, Zea mays
  unsure (1)..(804): unsure at all n locations
  Clone ID: MRT4577_1668C.1
ctcgaggccggccgggctttgctttgtgtcaacagcaatctatgacagagtggattcaggacttcagctgaatgcatagacacttttgccaaaaagttatgcatatataatatatattatgtacatgtattaaaaaaataaagatgacacaaaattataggctattcaagtattcaacccaagttcaattatacaattagcactatgtgatttttcaatcaaatatacattgctagaaactacgatttatgcaaccagcacaaaaaaacttttcttagcctttgaaattctgaatacacgctctcaaattggtagattcaacatgtagctgcattttcagggaatgcatcacaaggcggtactacatatgttcattgtaaagctggaagaggacgaagcaccactattgtattgtgctacttggtaggatgaactgcatttgtagttgcaactcagtacgcatgctcctgttcaatttcctgataatccttgtgttgcagattaaatacaggaacatgacccctgaagcagctttggatcatgtacgatccattaggcctcgagtgcttttggcaccctcgcagtggcatgctgttagttcatttggagctctcaccgctggacaacttccagtacggagtacgaacctggnctgtttcctagaagccattgaagctggctgtaggaacacaggaaatgatgattaccacgtgatggagtttgactgcgaagatagtggcttacactttatcaaattatgctactaggncagcagccccactgggtctggctgcaccgatgcag

SEQ ID NO: 73356 - DNA, 388 bp, Zea mays
  Clone ID: MRT4577_166900C.1
attcggctcgaggaggatttggcggttttctgttactacatcagactgagcatatgcaaggccattcgatgatttcaaactgctacagctatattccaacacaccttcggattttgacttgaaacttgaaagatcagcccaagaatgtgattccctatctgactaaggggcgcatctccccacaaatgttggcataggctccccagtgatccatggaaaattagctgaccatggaggcatatacgagctcttggataaagcccatgttccattagctggaacaccctctaaggaatgccatcgatcttgtgacaagcataatgcttggctggagctcaacgcacagggattgttagcagggcccaactttgttgtggagaaagacaag

SEQ ID NO: 73357 - DNA, 345 bp, Zea mays
  Clone ID: MRT4577_166901C.1
ccttgcagggttgaaacatttattagggccatacacctaaacaagttgggataccattacatacccgtacaatacacctgctgttgctggtaaacacagggaacggacacacagctcagactataaattaaacggtcgccacgggaaacaacagatgccgggtgcacaaagctatgagaaatgctatactcgatcgtctaccggggaccgacggatggcagcacacaaagaggctagttataagactacgccgtaagactagcctgtcattattaatataaaaaggaaaccttttccggctggctaggacacattaattacattgttcgacaccacctaattgct

SEQ ID NO: 73358 - DNA, 182 bp, Zea mays
  unsure (1)..(182): unsure at all n locations
  Clone ID: MRT4577_166902C.1
atcatatcctcaatggtaaaatgtacaaccaaacaccatcttgatgtttcggggggggttttgntgaccacttgttgatgaaaaaccgggggggggggcctggaattgctagatctgctgtgctggcggcacgatcagctctgcagccggcgttgttgccgccggcgacaacaagcagccag

SEQ ID NO: 73359 - DNA, 531 bp, Zea mays
  Clone ID: MRT4577_166903C.1
gggaaccaaacaaatccttttttgttacaatgcaacaggagccgtaatcccataaatccgtcgtcttttgtagtgggggaatttttaacaaaaatttccggggcgcgtctttagttgaaaattcttcgcccacccttttaaaaggggggcttttaagggttaaacgcttggaaggaacctttcggggttttccgccgccaacccgcaaggggtttccaacggggcttctttggggggggcaatcgccgccaccacctttttaatttaataacctttggcggggtccccaataaccgtccgttgggctttaaccaccgccttgtttttaacgggggagttttcaaggttcccgcgcgccagttccacgcaaaccccccatttaaccggaaaatttgggttaaaaaattgttggggcccaaagggccacccaataaggggccccccggggaaaaggtttttgaggacggagttccccccgcaggggttaaggaaccccccgggggacgggtgcaacaggatccgtttttgggg

SEQ ID NO: 73360 - DNA, 493 bp, Zea mays
  Clone ID: MRT4577_166904C.1
ctttacttttttctacgccttcttctattgtatgtattattatttttttttttttttattttctaagggcccgctagcaaatatttaaaagcttgaaaaatttcatataaggcgcaagtttggcccaggaaataattgcgcggctgcctccttttggagcccctgttagttttgcaggatttgcgcacaggtgaggggactatatttatatgcacggtgctctttctgggaggatcacatttagaatcacatggtggccaccgtgctgatgtccatcatggtagacgtggcggggcgactccgcgcggagtgaccggaggacgactatgatgttggcctcctcccactggtggaaagcggaccataatattgaccggtccctgtttgtacacatgagcctgtataggatggcccctccactgcccattttgtttgcctactccccagggctccgagttgatgtacgtgaacccttctttcgcacgtgcaagat

SEQ ID NO: 73361 - DNA, 298 bp, Zea mays
  Clone ID: MRT4577_166905C.1
cccacgcgtccgcccacgcgttcgtacgcttgtgcttccctactacgtcccctgggctaggtgtgctgccatccggctccgggagacgaacgtggacagaataacgcagacctctatggtaccggactgtattatgccgtcccaggcgattaatttactagtgtgttcgaatctatatgttataacagcacctacgtgtattaagacggtatgtaaagctgttgcatctatattaggtgtgaaaccatcattaacgtcatcaactatgccatatataaaaagcatggcggccggttta

SEQ ID NO: 73362 - DNA, 303 bp, Zea mays
  Clone ID: MRT4577_166906C.1
ggaacggcttttggccttgcgggccgcgggcggggacgggagatctgcttctcgggggggcagatacacggggcggcgctttaggcctgggcctgccgctctttgctgtttccgttgcgtttttgccggttcgcgctctactaccgcgccccgcggccggggggcatatttgggggttctcttgggcccggggacttcgctactgccatccgagtcggagtcttgttgctccggtggtggtgactcgagatgctcccatgggtcattcttttgtgttctgcgtgtgctggtggtgccgccggg

SEQ ID NO: 73363 - DNA, 404 bp, Zea mays
  Clone ID: MRT4577_166907C.1
aataagatatcagaagcatatatcaataagatagctgacaaaactaacccgattttaaccaaacaggctcgtaagttcgctggcagcgtgacaactgacaatactagtgccaactcaagtgtaacctcacctgtaccggttaacagtggcacacataccatctttacgactacgacggcttcacgtcacaggttccctatcctgtgccaaccccaaccacaagggaggaaagcgccggttccacccaactagaaagtcaccatgaacgaaacgaccagtcgtctaccaaggaccgagttcatgcgcgttgcgacgacacctaccgtccccgtaaggcgtagttccactggcgtgcttcttcccggaccgtcccactcgtgtggaaggccaaaccggcaagtgaa

SEQ ID NO: 73364 - DNA, 475 bp, Zea mays
  unsure (1)..(475): unsure at all n locations
  Clone ID: MRT4577_166908C.1
agggaaaacacttcgtccccgtgcgngaattgaactgggatccccgcggggattcaggttctactgctactggctcacatcacatggcttgtacacaaaggacgccgcctagtcatcgacaccgagttgggggggggggctgctgatggtacactactccgcaaaagtccatggtggagtggagtgtggaacttgatatgccggaattacggcgccacgtgggcgccatcgctgccgccttccgtggaagcgtcatcgtcggagtcggggtcgcgatcgccgccgctggaggtaaggcgcgcgagccagcagttgccgtggaggtgtccgctgacgcagacgtagttctggaggcgtccctcgtgggcgccgagcctgcggcncgcgctgcgcggtgccttcccggccggcaccttgctccagacgcgcgcgccggtgttggggcaggggtcgcgcgttttctgcggggcccggt

SEQ ID NO: 73365 - DNA, 260 bp, Zea mays
  Clone ID: MRT4577_166909C.1
taagcaaacaccaaacaaccataggttcacaatccaagagcattagagcaatgacttctatggttcagcctcagaatcagaacgagatagcatatcaatatcattttcatcttctttatttttttttggagatgactcctcttcctcaaatgtagggaaactagggatcaacctatttctcttcctgcttcttaatttctgccagttaactcttttagttctctcttctatttctctttgagatgcagctgcaactcctt
